United States Patent Application Publication US 2018/0126003 A1 - sequence listing, part 189

SEQ ID NO: 338199 - DNA, 4273 bp, Artificial Sequence
  derived and/or modified sequence
actcgtctggcaccagcccgggccgcgcccgggacctcatttcggacctcggtttccctttgcgtggggctcgcagctgccaccgcttccccgcggagcatggggctgcctcgccgggcaggggacgcggcggagctgcgcaagagcctgaagccgctgctggagaagcgccggcgcgcgcgcatcaaccagagcctgagccagcttaaggggctcatcctgccgctgctgggccgggagaactccaactgctcgaagctagagaaggcagacgtcctggaaatgaccgtgcgcttcctgcaggagctgcctgcgtcctcatggcccacggcagcgcccctgccttgcgacagctaccgcgagggctacagcgcctgtgtggcgcgcctggcccgcgtgctgcccgcctgccgtgtcctggagcccgccgtgagcgcgcgcctgctggagcacctgtggcggagagcggccagcgccaccctggacggcgggcgcgctggggattccagtggcccgtctgcccccgccccagcgcccgcgtctgccccagagcccgcatccgctccggtgccctcgccgccctcgcctccctgcggccctggcctctggcggccgtggtagcccctcggccgatccacagaccctgccgactgcttgggaccttggggcactggacaggttgaagctcttggtggcggctgctgttcccatcattaggggccagcccagtacccacacccaggccggaagccggctgtttgtgactggcgtggcagactgaaagccctggggctggggctcggctcagggaataaaaggagcgtccctgcttcacccccaacttggctggagaagaaaggacaagaggcagcagggtgaagaagaagccccccatcccagctggtggagatagttctggaactggaccccgcagctgcgtgggcagccgacacacccaccccagcactggcaccagaccagagccagagccaggacctgggcaaagtgcagccgtgcaccctgcctggtcactgctctcccagccctgcctgggcctacctcctgcccagctctgcttgggaccctctgggcatgcagcagcagtagcctaagggctctggtcacttccagggctctacagggcagcagagcagagcaaaagggtgcatatgctgggagctgtcacctccactcctaggcttttctgcctagagcagaattataggggcagtatacatccaggggtctgtgcggtggggctgggggattccttaagtgactttgggaaggatttgttttcccgagcatcaatttcacacctgggcattgcaccccaggctatgcagtctttcagtgtgaggaaggggcagaacaagaatgaggcggccccgtggcctcaaggaagcttgtggctttggaggatctgactccagcagagtctgtgccaatgtggggtgagcagggcccctgccatggagcagcaggaatttgagggatggagcaggttaaagaatgggaaacatcttcacttgtttttttttcttgcaaactactccctgctactcattgagactggttactggaagcaacttgttaagatttttctttctgggcgggcgcggtggctcacgcctgtaatcccagcactttgggaggccaaggcgggtggatcacctgaggtcaggagttcgagaccagcttagccaatatggtgaaaccccgtctctactaaaaatacaaaaattagccgggtgtggtggcatgtgccagctactcgggaggctgaggcaagagaatcacttgaacctcggaggctgaagttgcagtgagccaagattgagccattgctctccagcctgggtgacacagcaagactctgtctcaaaaaaaattttttatttctttcttttccatggaggcctagagtccctgtgaaggctaggaaggggctgctgatcccaggagtgcccacgaggagtggggggcactgttggcccataatcaggcaaacacccatcatttcatgggggattcatgaaatcatagtcaggcaaacacccgtcatttcatggctaagcatttgcagaaggtggaggattctcccccgagtccccaaatcagcagcctgtgctagggaccagagcaccgggggcaagaagacagaaccaatgtgggagtggggatggtcactaaatctgactgtgccacacaagcccatgatgaccttggcactggtttgggtggcaggatatgaaggaagctgtaggcattattgaaaaaatcattgttcagccaacagggtgaggctcccagcaaggccgtgccatcttcccacctccctgtgcccagagggttagactgtaagctcccggagggcgaggctggggctgagcgtgcctccacgtccccaaggcacagggtgcacagtgggtgctcactgaatatagtggactagtgagcagaggatgagaggactaccctgtaatgagccttggacagtctggcatttgccttaactcccactcccatgccctgggatcactgttggatatttactccatgaggacaaatactggggaggtgtggagaggagggagggcaggttcctcttactttcacccattgctgagaatgagcgcctgttggcactgcctttgtgagcctccgggagcaggtaacctgcggcccaagcccgcctaggactccacatcaggcaggcacaggactggccccttgtcctcataaaaactctcagtacagcttaaactctgtaagatctaaccagccaggaggaccctcgcttcctctccgccatgcttgccacctcttgcttctgagagtccatctcagttcgcagttctgtgacttgcattgacctggctccaatcaagctacaactcaagcagtcacggggagaaggattgtagatgggccagtgactcacagggtcaggcactcgggggagcctgagtcaggaggtcagtgggccctggaagggagggggcaagcctgggtgggtaaggttctgggccccaggcaagaaggcagagtttctccgcaggggtgtgtgcaagagctagctgcgcagaaggtctccgctggctctccaagccgggcttgtgaaataggaacgccaacatcctcctccacaggcagtggcaggcacctcctcctcaggtgccccccaagccctatctgatgggcaaaggtgaacgcagggcggtgggcttttcctgtgcagagggagactgattcaaagggtcatttatgacctttcacaagtcccacatcctgcccaatggccaggtcttgggatgctgttgcaagatggttctgtgactccatgtgactgtctgatgattgccccagctggggaaaaggctcccatgtctctttctcataaaaccagtgggcaaggccgggcgcagtggctcacgtctgtaatgccagcacttcgggagaccaaggtgggcggatcacctgaggtcaggagttcaagaccagcctgaccaacatggtgaaaccccgtctctacaaaaatatggaaattagctgggcatgacggcgggtgcctgtaaccccagctacttgggaggctgaggagggataatcagttgaacccaggaggtggaggttgcagtgagccgagatcgcgccactgcactccagcctgggtgacagagcaagactccatctcaaaaacaaacaaacaaaaaactagcgggtgaaatgattcagtgacctaaggacagccagagcactaagctgctgggaacccatctgtgctgaaatgtagatttcccaggaaactcaggcttgggacaggcgcctacctgctcctcgggcaccaggtgattaggagaggtcgaatctcatttccacgtgagtgaggataaagactgggctgccaaggaggactcctcataaacattgacaaattgctctgccccgcctgtgatcccagacgactcctgcagtctgggatcctgagtgtcctgtgggttcatctcggatgggcgctgcataaacagcctgcagggaacgtctgggagaaccagcttcacaacagatataataaggaagaagtttgaaatattgcaagaattgcgaaagtgtgacacacagatacaaagtgggcacatgctcgtgggaaaatgttgccaatagacttgcttgactctggagttaccccgaaccttcaatttgtttaaaaaaaaaaaaaggcaatatcttgacgtgcaataaagtgaactgcaataaaaaaaaaaaaaaa

SEQ ID NO: 338200 - DNA, 522 bp, Artificial Sequence
  derived and/or modified sequence
atgggcctgccacgcagagccggtgacgccgctgagctaagaaaatcactcaagccacttctggaaaaaagacgcagagcccggattaatcagtccctctctcagctgaagggactcatcctgccattgctggggagagaaaacagtaattgctcaaagcttgagaaggccgacgtgctggagatgactgttaggttcctgcaagagctgcctgcaagcagctggccaacagcagcccccctgccatgcgattcctatcgcgaaggctattcagcgtgcgtcgcacgcctcgccagggttctgccagcgtgcagggtattagagcctgccgtgtcagcacggctgttggagcacctttggaggagagctgcatccgctacactggatggtgggcgcgcaggagacagctccgggccaagtgctcctgctccagcccccgcctcagccccggaacctgcatctgcccccgtgccttcacctccaagcccaccatgcggcccgggtctgtggcgcccgtggtag

SEQ ID NO: 338201 - DNA, 231 bp, Artificial Sequence
  derived and/or modified sequence
atgggcctgcctagaagagctggggacgcggcagagctaagaaagtctctcaagcctctgctggaaaaaaggcggcgggcacgcatcaaccagtccttatcccaattaaagggtctcattctgcctctgctgggtagggaagacgcttccggctggcacacctggctgcccctgcacgcacagaattgcttccttctgtatatccaggctccagaacagcctcctgcctag

SEQ ID NO: 338202 - DNA, 231 bp, Artificial Sequence
  derived and/or modified sequence
atggggttgccacgtagggcgggggacgccgctgaactaaggaagtccctcaagcctctactagagaagagacgccgcgctagaattaatcaaagtctctcccagctgaagggtctcatcttgccacttttagggcgagaggacgcctcgggctggcacacgtggctcccactccatgcgcagaattgttttctgctctatatccaggcccccgagcagccccccgcctag

SEQ ID NO: 338203 - DNA, 4262 bp, Artificial Sequence
  derived and/or modified sequence
actcgtctggcaccagcccgggccgcgcccgggacctcatttcggacctcggtttccctttgcgtggggctcgcagctgccaccgcttccccgcggagcatggggctgcctcgccgggcaggggacgcggcggagctgcgcaagagcctgaagccgctgctggagaagcgccggcgcgcgcgcatcaaccagagcctgagccagcttaaggggctcatcctgccgctgctgggccgggagaactccaactgctcgaagctagagaaggcagacgtcctggaaatgaccgtgcgcttcctgcaggagctgcctgcgtcctcatggcccacggcagcgcccctgccttgcgacagctaccgcgagggctacagcgcctgtgtggcgcgcctggcccgcgtgctgcccgcctgccgtgtcctggagcccgccgtgagcgcgcgcctgctggagcacctgtggcggagagcggccagcgccaccctggacggcgggcgcgctggggattccagtggcccgtctgcccccgccccagcgcccgcgtctgccccagagcccgcatccgctccggtgccctcgccgccctcgcctccctgcggccctggcctctggcggccgtggtagcccctcggccgatccacagaccctgccgactgcttgggaccttggggcactggacaggttgaagctcttggtggcggctgctgttcccatcattaggggccagcccagtacccacacccaggccggaagccggctgtttgtgactggcgtggcagactgaaagccctggggctggggctcggctcagggaataaaaggagcgtccctgcttcacccccaacttggctggagaagaaaggacaagaggcagcagggtgaagaagaagccccccatcccagctggtggagatagttctggaactggaccccgcagctgcgtgggcagccgacacacccaccccagcactggcaccagaccagagccagagccaggacctgggcaaagtgcagccgtgcaccctgcctggtcactgctctcccagccctgcctgggcctacctcctgcccagctctgcttgggaccctctgggcatgcagcagcagtagcctaagggctctggtcacttccagggctctacagggcagcagagcagagcaaaagggtgcatatgctgggagctgtcacctccactcctaggcttttctgcctagagcagaattataggggcagtatacatccaggggtctgtgcggtggggctgggggattccttaagtgactttgggaaggatttgttttcccgagcatcaatttcacacctgggcattgcaccccaggctatgcagtctttcagtgtgaggaaggggcagaacaagaatgaggcggccccgtggcctcaaggaagcttgtggctttggaggatctgactccagcagagtctgtgccaatgtggggtgagcagggcccctgccatggagcagcaggaatttgagggatggagcaggttaaagaatgggaaacatcttcacttgtttttttttcttgcaaactactccctgctactcattgagactggttactggaagcaacttgttaagatttttctttctgggcgggcgcggtggctcacgcctgtaatcccagcactttgggaggccaaggcgggtggatcacctgaggtcaggagttcgagaccagcttagccaatatggtgaaaccccgtctctactaaaaatacaaaaattagccgggtgtggtggcatgtgccagctactcgggaggctgaggcaagagaatcacttgaacctcggaggctgaagttgcagtgagccaagattgagccattgctctccagcctgggtgacacagcaagactctgtctcaaaaaaaattttttatttctttcttttccatggaggcctagagtccctgtgaaggctaggaaggggctgctgatcccaggagtgcccacgaggagtggggggcactgttggcccataatcaggcaaacacccatcatttcatgggggattcatgaaatcatagtcaggcaaacacccgtcatttcatggctaagcatttgcagaaggtggaggattctcccccgagtccccaaatcagcagcctgtgctagggaccagagcaccgggggcaagaagacagaaccaatgtgggagtggggatggtcactaaatctgactgtgccacacaagcccatgatgaccttggcactggtttgggtggcaggatatgaaggaagctgtaggcattattgaaaaaatcattgttcagccaacagggtgaggctcccagcaaggccgtgccatcttcccacctccctgtgcccagagggttagactgtaagctcccggagggcgaggctggggctgagcgtgcctccacgtccccaaggcacagggtgcacagtgggtgctcactgaatatagtggactagtgagcagaggatgagaggactaccctgtaatgagccttggacagtctggcatttgccttaactcccactcccatgccctgggatcactgttggatatttactccatgaggacaaatactggggaggtgtggagaggagggagggcaggttcctcttactttcacccattgctgagaatgagcgcctgttggcactgcctttgtgagcctccgggagcaggtaacctgcggcccaagcccgcctaggactccacatcaggcaggcacaggactggccccttgtcctcataaaaactctcagtacagcttaaactctgtaagatctaaccagccaggaggaccctcgcttcctctccgccatgcttgccacctcttgcttctgagagtccatctcagttcgcagttctgtgacttgcattgacctggctccaatcaagctacaactcaagcagtcacggggagaaggattgtagatgggccagtgactcacagggtcaggcactcgggggagcctgagtcaggaggtcagtgggccctggaagggagggggcaagcctgggtgggtaaggttctgggccccaggcaagaaggcagagtttctccgcaggggtgtgtgcaagagctagctgcgcagaaggtctccgctggctctccaagccgggcttgtgaaataggaacgccaacatcctcctccacaggcagtggcaggcacctcctcctcaggtgccccccaagccctatctgatgggcaaaggtgaacgcagggcggtgggcttttcctgtgcagagggagactgattcaaagggtcatttatgacctttcacaagtcccacatcctgcccaatggccaggtcttgggatgctgttgcaagatggttctgtgactccatgtgactgtctgatgattgccccagctggggaaaaggctcccatgtctctttctcataaaaccagtgggcaaggccgggcgcagtggctcacgtctgtaatgccagcacttcgggagaccaaggtgggcggatcacctgaggtcaggagttcaagaccagcctgaccaacatggtgaaaccccgtctctacaaaaatatggaaattagctgggcatgacggcgggtgcctgtaaccccagctacttgggaggctgaggagggataatcagttgaacccaggaggtggaggttgcagtgagccgagatcgcgccactgcactccagcctgggtgacagagcaagactccatctcaaaaacaaacaaacaaaaaactagcgggtgaaatgattcagtgacctaaggacagccagagcactaagctgctgggaacccatctgtgctgaaatgtagatttcccaggaaactcaggcttgggacaggcgcctacctgctcctcgggcaccaggtgattaggagaggtcgaatctcatttccacgtgagtgaggataaagactgggctgccaaggaggactcctcataaacattgacaaattgctctgccccgcctgtgatcccagacgactcctgcagtctgggatcctgagtgtcctgtgggttcatctcggatgggcgctgcataaacagcctgcagggaacgtctgggagaaccagcttcacaacagatataataaggaagaagtttgaaatattgcaagaattgcgaaagtgtgacacacagatacaaagtgggcacatgctcgtgggaaaatgttgccaatagacttgcttgactctggagttaccccgaaccttcaatttgtttaaaaaaaaaaaaaggcaatatcttgacgtgcaataaagtgaactgcaataaaa

SEQ ID NO: 338204 - DNA, 507 bp, Artificial Sequence
  derived and/or modified sequence
cccgggccgcgcccgggacctcatttcggacctcggtttccctttgcgtggggctcgcagctgccaccgcttccccgcggagcatggggctgcctcgccgggcaggggacgcggcggagctgcgcaagagcctgaagccgctgctggagaagcgccggcgcgcgcgcatcaaccagagcctgagccagcttaaggggctcatcctgccgctgctgggccgggaggatgcttctggctggcacacctggcttcccctccatgctcagaactgcttcctactctacatccaggctcctgagcagcccccagcttaagcttcagcagctccagggtaaatccatctccgcccagagctgactccggatctgccccagtgacaataacaagataaatgccttccattctcttcgtacttacaggatgtaatccacatatttacacagtgtttcatttgcggtaatgtttgttttgtttcttgttccttcgtacctatctgggaagcctgtg

SEQ ID NO: 338205 - DNA, 522 bp, Artificial Sequence
  derived and/or modified sequence
atgggcctgcccaggagagctggagatgctgctgagctgaggaagagcctgaagcccctgctggagaagagaagaagagcccgcatcaaccagagcctgagccagctgaagggcctcatcctgcccctgctgggccgggagaacagcaactgcagcaagctggagaaggcagatgtgctggagatgacagtgcgcttcctgcaggagctgcctgccagctcctggcccacagctgcccccctgccctgtgacagctaccgggagggctacagcgcctgtgtggcccggctggcccgggtgctgcctgcctgccgggtgctggagcctgctgtgtctgcccggctgctggagcacctgtggaggagagctgccagcgccaccctggatggcggccgggccggggacagcagcggccccagcgccccagccccagccccagccagcgcccctgagcccgccagcgcccctgtgcccagcccccccagccccccctgtggccctggcctgtggaggccctggtag

SEQ ID NO: 338206 - DNA, 231 bp, Artificial Sequence
  derived and/or modified sequence
atgggcctgcccaggagagctggagatgctgctgagctgaggaagagcctgaagcccctgctggagaagagaagaagagcccgcatcaaccagagcctgagccagctgaagggcctcatcctgcccctgctgggcagagaagatgccagcggctggcacacctggctgcccctgcacgcccagaactgcttcctgctgtacatccaggcccctgagcagcccccagcctag

SEQ ID NO: 338207 - DNA, 522 bp, Artificial Sequence
  derived and/or modified sequence
atgggcctgccccggcgggccggcgacgccgccgagctgcggaagtcacttaagccactccttgagaaaagacgtagggcacgcattaatcaatcgctatcacaactaaagggcttgatccttccacttctggggagagagaacagcaattgttcgaagcttgaaaaggctgacgttctagagatgaccgtcagatttctgcaagagctgcctgcgagtagttggcccacagccgcacccctgccctgcgattcctaccgggaaggatattccgcctgcgtagctcgcctcgctcgcgtcctgccagcctgtagggtgctggagcccgccgtatctgcccggctcctggagcacctgtggcggagggctgcatccgccacgttggacggcggccgggccggagattcaagtggaccatcggcacctgctccagccccagctagcgcccctgaacctgcctctgctcctgttccatcaccccccagccctccctgtggtccagggctatggagaccatggtag

SEQ ID NO: 338208 - DNA, 231 bp, Artificial Sequence
  derived and/or modified sequence
atgggcctgccccggcgggccggcgacgccgccgagctgcggaagtccctcaaacctctgctcgagaaaagaaggcgggcaaggatcaatcagtctctcagtcagctgaaaggactaatattgccgctgctcgggcgcgaggacgcctccggctggcatacttggctgccgctgcacgcgcagaactgttttctcctctatatacaggcacccgagcagccccctgcgtag

SEQ ID NO: 338209 - DNA, 231 bp, Artificial Sequence
  derived and/or modified sequence
atgggcctgccccggcgggccggcgacgccgccgagctgcggaagtctctgaagcctttattagagaagcgccggagggcaagaataaaccagagcctctcccagttaaaaggcctcattctgcctctgttaggaagagaagacgcgtctggctggcacacttggctcccactacatgcgcagaactgcttccttctgtatatccaagctccagagcaacccccagcttag

SEQ ID NO: 338210 - DNA, 522 bp, Artificial Sequence
  derived and/or modified sequence
atgggccttccgaggcgagctggcgacgcggcagagttacgaaaatcactgaaaccactgctggagaaacggagacgagccaggatcaaccaatccctgtctcagctgaaagggttgattctgcctctgcttgggcgagagaacagtaattgtagcaagctggagaaagctgatgttttagaaatgaccgtgaggtttctccaggagctccccgcttcatcatggcctaccgccgctcctcttccttgcgattcatatagggaggggtacagcgcttgcgttgctcggctggctagagtgcttcccgcttgccgcgtgttggaacctgctgtttcggctaggctgctggaacacctgtggcgtcgcgcagcatctgccaccttggacggtggcagggccggagattctagtggtccatctgcacccgctcccgcacccgcttcagccccagagcccgctagcgcacccgttccgtccccaccttcccccccatgtgggcctggcctatggcgcccttggtag

SEQ ID NO: 338211 - DNA, 231 bp, Artificial Sequence
  derived and/or modified sequence
atgggtctcccccgacgcgcaggggatgccgcagagctgagaaaaagccttaagcctcttctagagaagagaagacgtgcacgcatcaaccagtccctgtcccagctgaaggggctgatcttacccctcctcggacgggaggacgcctccggatggcacacgtggctacctctccatgcccagaattgctttctcctttatatccaggcccctgaacagcccccagcttag

SEQ ID NO: 338212 - DNA, 231 bp, Artificial Sequence
  derived and/or modified sequence
atgggccttcctagacgtgccggagatgcggcagagcttagaaagtcattgaagcctctgttagagaagcggaggagagctcgcatcaatcagagcttatcgcagttgaaagggttgatccttcctcttcttgggagagaagatgcctcgggctggcatacctggcttccattgcacgctcagaattgttttttgttatacattcaggcaccagagcagccaccggcatag

SEQ ID NO: 338213 - DNA, 522 bp, Artificial Sequence
  derived and/or modified sequence
atgggcctgcccagaagagccggcgacgccgccgagctgagaaagagcctgaagcccctgctggagaagagaagaagagccagaatcaaccagagcctgagccagctgaagggcctgatcctgcccctgctgggcagagagaacagcaactgcagcaagctggagaaggccgacgtgctggagatgaccgtgagattcctgcaggagctgcccgccagcagctggcccaccgccgcccccctgccctgcgacagctacagagagggctacagcgcctgcgtggccagactggccagagtgctgcccgcctgcagagtgctggagcccgccgtgagcgccagactgctggagcacctgtggagaagagccgccagcgccaccctggacggcggcagagccggcgacagcagcggccccagcgcccccgcccccgcccccgccagcgcccccgagcccgccagcgcccccgtgcccagcccccccagccccccctgcggccccggcctgtggagaccctggtag

SEQ ID NO: 338214 - DNA, 231 bp, Artificial Sequence
  derived and/or modified sequence
atgggcctgcccagaagagccggcgacgccgccgagctgagaaagagcctgaagcccctgctggagaagagaagaagagccagaatcaaccagagcctgagccagctgaagggcctgatcctgcccctgctgggcagagaggacgccagcggctggcacacctggctgcccctgcacgcccagaactgcttcctgctgtacatccaggcccccgagcagccccccgcctag

SEQ ID NO: 338215 - protein, 14 aa, Artificial Sequence
  derived and/or modified sequence
MASKPEKRVASSVF

SEQ ID NO: 338216 - DNA, 315 bp, Artificial Sequence
  derived and/or modified sequence
atggccagcaagcccgagaagagagtggccagcagcgtgttcatcaccctggccccccccagaagagacgtggccgtggccgaggaggtgagacaggccgtgtgcgaggccagaagaggcagaccctgggaggcccccgcccccatgaagacccccgaggccggcctggccggcagacccagcccctggaccacccccggcagagccgccgccaccgtgcccgccgcccccatgcagctgttcaacggcggctgccccccccccccccccgtgctggacggcgaggacgtgctgcccgacctggacctgctgtag

SEQ ID NO: 338217 - DNA, 438 bp, Artificial Sequence
  derived and/or modified sequence
atggccagcaagcccgagaagagagtggccagcagcgtgttcatcaccctggccccccccagaagagacgtggccgtggccgaggaggtgagacaggccgtgtgcgaggccagaagaggcagaccctgggaggcccccgcccccatgaagacccccgaggccggcctggccggcagacccagcccctggaccacccccggcagagccgccgccaccgtgcccgccgcccccatgcagctgttcaacggcggctgccccccccccccccccgtgctggacggcgaggacgtgctgcccgacctggacctgctgccccccccccccccccccccccccgtgctgctgcccagcgaggaggaggcccccgcccccatgggcgccagcctgatcgccgacctggagcagctgcacctgagccccccccccccccccccctag

SEQ ID NO: 338218 - DNA, 577 bp, Artificial Sequence
  derived and/or modified sequence
gctccgctggctcgggcgtcggatcggagccgccggggcgcgggcggcccagcagagctggcctgaacctccaggacttcagcccttctaggagaatctgatcccaggtgagggaggtcacttggggtgtggcccagcaggcaggcgggactccagactgggaacggaagtcagccctgctggggctgggagctgaagcatctgttccttcctcgcgggtgtgagacaaggaagagtgatcattgccacaccaggagctgaagccatggcctcaaagcctgagaagagggtggcatcgtctgtctttatcaccctggcacccccgcgccgcgatgtggccgtggcggaggaagtgaggcaggcagtttgtgaggcccggcgtggccgcccctgggaggctcctgcccccatgaagacacccgaggctggcttggcggggaggcccagcccctggacaacccctggcagagctgcagccacagtgccggctgcacctatgcagctcttcaatggaggatgcccaccccctcctcctgtcctggatggtgaggacgtgcttcctgacctggacctcctc

SEQ ID NO: 338219 - DNA, 571 bp, Artificial Sequence
  derived and/or modified sequence
ccagcggctccgggctccgctggctcgggcgtcggatcggagccgccggggcgcgggcggcccagagctggcctgaacctccaggacttcagcccttctaggagaatctgatcccagccacaccaggagctgaagccatggcctcaaagcctgagaagagggtggcatcgtctgtctttatcaccctggcacccccgcgccgcgatgtggccgtggcggaggaagtgaggcaggcagtttgtgaggcccggcgtggccgcccctgggaggctcctgcccccatgaagacacccgaggctggcttggcggggaggcccagcccctggacaacccctggcagagctgcagccacagtgccggctgcacctatgcagctcttcaatggaggatgcccaccccctcctcctgtcctggatggtgaggacgtgcttcctgacctggacctcctcccaccccctccaccgccccctccagtgcttctgccttctgaagaggaggctcctgctccaatgggggcctcactcattgcagacttagagcagctgcacctgtccccgcccccgcccccacc

SEQ ID NO: 338220 - DNA, 315 bp, Artificial Sequence
  derived and/or modified sequence
atggccagcaagcccgaaaagagggttgcctcgtctgtgttcattaccttggcccctccacgccgggatgtagcagttgccgaggaggtgcgacaggctgtctgtgaagctcggaggggtcggccctgggaggcacctgcccctatgaaaacaccagaggccggattagctggccgccccagcccatggaccacgccgggtagagcggcagctacggtaccagctgctcctatgcagctttttaatggaggctgccccccgcctccgcccgtgcttgatggggaggatgtgctgccagacctggatctgctgtag

SEQ ID NO: 338221 - DNA, 438 bp, Artificial Sequence
  derived and/or modified sequence
atggcctccaagcctgaaaaacgcgtagctagtagtgttttcattaccctggccccacctcggcgagacgtagctgtggccgaggaggttcggcaggccgtttgcgaagctaggagaggaagaccgtgggaggcacccgcccctatgaaaacgcccgaagcagggctggctgggcgaccctcgccgtggactacaccagggagggctgctgcaacggtccccgcggcacccatgcagctttttaacggtggctgtccccctccgcctccggttctggatggagaagacgttctgcccgacctcgatctgcttcctcctccaccgccccccccaccagtgctgcttccttccgaggaagaggccccagcaccaatgggggcaagcttaatcgccgatctcgagcaattgcacctatcacccccacccccccccccctag

SEQ ID NO: 338222 - DNA, 315 bp, Artificial Sequence
  derived and/or modified sequence
atggccagcaagccagagaagagggtggccagcagcgtcttcatcaccctggcccccccaagaagagatgtggccgtggccgaggaggtgcggcaggccgtgtgtgaggcccggcggggccggccctgggaggccccagcccccatgaagaccccagaggccggcctggccggccggcccagcccctggaccaccccaggccgggccgccgccaccgtgcctgctgcccccatgcagctgttcaacggcggctgccccccacctcctcctgtgctggatggagaagatgtgctgcctgacctggacctgctgtag

SEQ ID NO: 338223 - DNA, 438 bp, Artificial Sequence
  derived and/or modified sequence
atggccagcaagccagagaagagggtggccagcagcgtcttcatcaccctggcccccccaagaagagatgtggccgtggccgaggaggtgcggcaggccgtgtgtgaggcccggcggggccggccctgggaggccccagcccccatgaagaccccagaggccggcctggccggccggcccagcccctggaccaccccaggccgggccgccgccaccgtgcctgctgcccccatgcagctgttcaacggcggctgccccccacctcctcctgtgctggatggagaagatgtgctgcctgacctggacctgctgcccccacctcctcctcctcctcctgtgctgctgcccagcgaggaggaggccccagcccccatgggcgccagcctgattgctgacctggagcagctgcacctgagccccccacctcctccaccctag

SEQ ID NO: 338224 - DNA, 315 bp, Artificial Sequence
  derived and/or modified sequence
atggccagcaagcccgagaagcgggtggccagcagcgtgttcatcacgttggctcctccacgtcgcgacgtggccgtggccgaagaggtcagacaggccgtgtgtgaggcgcggcggggccgaccttgggaggcccccgcacctatgaaaacacctgaggctggtttagccggcagaccctcgccctggaccacccctggcagggcggccgccactgtgccagctgcaccaatgcagctgttcaatggcggatgccccccccctcccccagtgttggacggagaagacgtattgccagacctggatttgctctag

SEQ ID NO: 338225 - DNA, 438 bp, Artificial Sequence
  derived and/or modified sequence
atggccagcaagcccgagaagcgggtggccagcagcgtgttcatcacactagctccaccaagacgggatgtggccgtcgccgaggaggtgcgccaggcggtatgtgaggctcgaaggggaagaccatgggaagccccagctcctatgaagacccctgaggcgggccttgctgggcgcccgagcccctggacgacaccaggcagggccgccgctacggtacctgcggctcccatgcagctgttcaatggaggatgcccaccccctcctccagtgcttgacggagaggatgttctccctgatctggatctgttgccaccccctccccccccaccccccgttctattaccaagtgaagaagaggcccctgcccccatgggcgcctctctgatagccgacttagagcagctccatctttcccctcctccacctccaccatag

SEQ ID NO: 338226 - DNA, 315 bp, Artificial Sequence
  derived and/or modified sequence
atggcttccaagcccgaaaaacgggttgcttcatccgtcttcatcactctggcacccccacgcagggacgtggctgtggccgaagaggtacgtcaggccgtgtgcgaagcccgaagaggaagaccctgggaagcccctgcaccaatgaaaactccagaagctggcttggcaggacggcctagcccctggactactcccggacgcgctgccgctactgtgcccgcagcaccaatgcagctgttcaacggtggctgccctccgccaccccctgtactggacggcgaggacgtcttgcctgatcttgatctgctgtag

SEQ ID NO: 338227 - DNA, 438 bp, Artificial Sequence
  derived and/or modified sequence
atggccagcaagcccgagaagagagtagcctcatccgtctttattacgctggcgcctccacgccgtgatgtagcggtcgccgaggaagtgcggcaagcagtgtgcgaagcgcgtcggggacgaccttgggaggcacccgcacctatgaagacacctgaagcgggtcttgcaggccgtccctccccctggaccacccccggaagagccgcagctaccgtacctgctgcccctatgcagctgtttaacggaggctgccctcctccccctccggtattggatggcgaagatgtccttcccgacttagacttgctccccccaccgcctcctccccctccagtcctcctgccctctgaggaggaggccccagcccctatgggcgcttcacttattgcagatctcgaacaactgcatctgtctcccccaccaccccctccgtag

SEQ ID NO: 338228 - protein, 276 aa, Artificial Sequence
  derived and/or modified sequence
MASKPEKRVASSVFITLAPPRRDVAVAEEVRQAVCEARRGRPWEAPAPMKTPEAGLAGRPSPWTTPGRAAATVPAAPMQLFNGDICAFCHKTVSPRELAVEAMKRQYHAQCFTCRTCRRQLAGQSFYQKDGRPLCEPCYQDTLERCGKCGEVVRDHIIRALGQAFHPSCFTCVTCARCIGDESFALGSQNEVYCLDDFYRKFAPVCSICENPIIPRDGKDAFKIECMGRNFHENCYRCEDCRILLSVEPTDQGCYPLNNHLFCKPCHVKRSAAGCC

SEQ ID NO: 338229 - protein, 17 aa, Artificial Sequence
  derived and/or modified sequence
MASKPEKRVASSVFITL

SEQ ID NO: 338230 - protein, 31 aa, Artificial Sequence
  derived and/or modified sequence
MASKPEKRVASSVFITLAPPRRDVAVAEEVR

SEQ ID NO: 338231 - protein, 144 aa, Artificial Sequence
  derived and/or modified sequence
MASKPEKRVASSVFITLAPPRRDVAVAEEVRQAVCEARRGRPWEAPAPMKTPEAGLAGRPSPWTTPGRAAATVPAAPMQLFNGDICAFCHKTVSPRELAVEAMKRQYHAQCFTCRTCRRQLAGQSFYQKDGRPLCEPCYQDTLE

SEQ ID NO: 338232 - protein, 34 aa, Artificial Sequence
  derived and/or modified sequence
MASKPEKRVASSVFITLAPPRRDVAVAEEVRQAV

SEQ ID NO: 338233 - protein, 78 aa, Artificial Sequence
  derived and/or modified sequence
MASKPEKRVASSVFITLAPPRRDVAVAEEVRQAVCEARRGRPWEAPAPMKTPEAGLAGRPSPWTTPGRAAATVPAAPM

SEQ ID NO: 338234 - DNA, 831 bp, Artificial Sequence
  derived and/or modified sequence
atggccagcaagcccgagaagagagtggccagcagcgtgttcatcaccctggccccccccagaagagacgtggccgtggccgaggaggtgagacaggccgtgtgcgaggccagaagaggcagaccctgggaggcccccgcccccatgaagacccccgaggccggcctggccggcagacccagcccctggaccacccccggcagagccgccgccaccgtgcccgccgcccccatgcagctgttcaacggcgacatctgcgccttctgccacaagaccgtgagccccagagagctggccgtggaggccatgaagagacagtaccacgcccagtgcttcacctgcagaacctgcagaagacagctggccggccagagcttctaccagaaggacggcagacccctgtgcgagccctgctaccaggacaccctggagagatgcggcaagtgcggcgaggtggtgagagaccacatcatcagagccctgggccaggccttccaccccagctgcttcacctgcgtgacctgcgccagatgcatcggcgacgagagcttcgccctgggcagccagaacgaggtgtactgcctggacgacttctacagaaagttcgcccccgtgtgcagcatctgcgagaaccccatcatccccagagacggcaaggacgccttcaagatcgagtgcatgggcagaaacttccacgagaactgctacagatgcgaggactgcagaatcctgctgagcgtggagcccaccgaccagggctgctaccccctgaacaaccacctgttctgcaagccctgccacgtgaagagaagcgccgccggctgctgctag

SEQ ID NO: 338235 - DNA, 93 bp, Artificial Sequence
  derived and/or modified sequence
atggccagcaagcccgagaagagagtggccagcagcgtgttcatcaccctggccccccccagaagagacgtggccgtggccgaggaggtgtag

SEQ ID NO: 338236 - DNA, 96 bp, Artificial Sequence
  derived and/or modified sequence
atggccagcaagcccgagaagagagtggccagcagcgtgttcatcaccctggccccccccagaagagacgtggccgtggccgaggaggtgagatag

SEQ ID NO: 338237 - DNA, 435 bp, Artificial Sequence
  derived and/or modified sequence
atggccagcaagcccgagaagagagtggccagcagcgtgttcatcaccctggccccccccagaagagacgtggccgtggccgaggaggtgagacaggccgtgtgcgaggccagaagaggcagaccctgggaggcccccgcccccatgaagacccccgaggccggcctggccggcagacccagcccctggaccacccccggcagagccgccgccaccgtgcccgccgcccccatgcagctgttcaacggcgacatctgcgccttctgccacaagaccgtgagccccagagagctggccgtggaggccatgaagagacagtaccacgcccagtgcttcacctgcagaacctgcagaagacagctggccggccagagcttctaccagaaggacggcagacccctgtgcgagccctgctaccaggacaccctggagtag

SEQ ID NO: 338238 - DNA, 105 bp, Artificial Sequence
  derived and/or modified sequence
atggccagcaagcccgagaagagagtggccagcagcgtgttcatcaccctggccccccccagaagagacgtggccgtggccgaggaggtgagacaggccgtgtag

SEQ ID NO: 338239 - DNA, 237 bp, Artificial Sequence
  derived and/or modified sequence
atggccagcaagcccgagaagagagtggccagcagcgtgttcatcaccctggccccccccagaagagacgtggccgtggccgaggaggtgagacaggccgtgtgcgaggccagaagaggcagaccctgggaggcccccgcccccatgaagacccccgaggccggcctggccggcagacccagcccctggaccacccccggcagagccgccgccaccgtgcccgccgcccccatgtag

SEQ ID NO: 338240 - DNA, 1530 bp, Artificial Sequence
  derived and/or modified sequence
tctgtccctagccacaccaggagctgaagccatggcctcaaagcctgagaagagggtggcatcgtctgtctttatcaccctggcacccccgcgccgcgatgtggccgtggcggaggaagtgaggcaggcagtttgtgaggcccggcgtggccgcccctgggaggctcctgcccccatgaagacacccgaggctggcttggcggggaggcccagcccctggacaacccctggcagagctgcagccacagtgccggctgcacctatgcagctcttcaatggagacatctgtgccttctgccacaagaccgtgtccccccgagagctggctgtggaggccatgaagaggcagtaccatgcccagtgcttcacgtgccgcacctgccgccgccagctggctgggcagagcttctaccagaaggatgggcgacccctctgcgaaccctgctaccaggacacactggagaggtgcggcaagtgtggcgaggtggtccgggaccacatcatcagggccctgggccaggccttccacccctcctgcttcacgtgtgtgacctgcgcccggtgcattggggatgagagctttgccctgggcagccagaacgaggtgtactgcctggacgacttctacaggaaattcgcccccgtctgcagcatctgtgaaaatcccatcatccctcgggatgggaaagatgccttcaaaatcgaatgcatgggaagaaacttccatgaaaattgctacaggtgtgaggactgcaggatcctcctgtctgtcgagcccacggaccaaggctgctaccccctgaacaaccatctcttctgcaagccatgccatgtgaagcggagtgctgcggggtgctgctgagagtgcccgctgggcagtgaacagaccactagccccggctggggcccttccctgacttggtttcccttcctaacctgctcttgcacactttccttctgagcctccatggagaccagcctgcaagccggcccagcctgtccaggatacagtggggctgagcacccccaggccttccactcctctaccctctgggcaccagaaggctcctggaccatgagcttcacccccagaattccctgctgaccctgccccacttccagggaaaagctgggggaggttggacccctctcactgactagctgtctggtaggggtgctaggaccagcctcgcctgtggggttgagctgtttgaggacaaactccaaggtcccttaaaaagtgccttttagaggctgggcatggtggctcacgcttgtaatcccagcactttgggaggccaaggtgggtggatcacctgaggtcaggagttcaagaccagcctggccaacatggtgaaaccctgtctctactaaaaatacaaaaattagccaggcatggtagcaggtgcctgtaatcccagctactggggaaagctgaggcaggagaattgcttcaatctggaaggcagaggttgcagtgagattgcaccattgcattccagcctgggcaacaagagggaaactccgtct

SEQ ID NO: 338241 - DNA, 3058 bp, Artificial Sequence
  derived and/or modified sequence
ggacgggcggaggggacgggaggcccagcggctccgggctccgctggctcgggcgtcggatcggagccgccggggcgcgggcggcccagagctggcctgaacctccaggacttcagcccttctaggagaatctgatcccaggtgagggaggtcacttggggtgtggcccagcaggcaggcgggactccagactgggaacggaagtcagccctgctggggctgggagctgaagcatctgttccttcctcgcgggtgtgagacaaggaagagtgatcattgccacaccaggagctgaagccatggcctcaaagcctgagaagagggtggcatcgtctgtctttatcaccctggcacccccgcgccgcgatgtggccgtggcggaggaagtgaggcaggcagtttgtgaggcccggcgtggccgcccctgggaggctcctgcccccatgaagacacccgaggctggcttggcggggaggcccagcccctggacaacccctggcagagctgcagccacagtgccggctgcacctatgcagctcttcaatggagacatctgtgccttctgccacaagaccgtgtccccccgagagctggctgtggaggccatgaagaggcagtaccatgcccagtgcttcacgtgccgcacctgccgccgccagctggctgggcagagcttctaccagaaggatgggcgacccctctgcgaaccctgctaccaggacacactggagaggtgcggcaagtgtggcgaggtggtccgggaccacatcatcagggccctgggccaggccttccacccctcctgcttcacgtgtgtgacctgcgcccggtgcattggggatgagagctttgccctgggcagccagaacgaggtgtactgcctggacgacttctacaggaaattcgcccccgtctgcagcatctgtgaaaatcccatcatccctcgggatgggaaagatgccttcaaaatcgaatgcatgggaagaaacttccatgaaaattgctacaggtgtgaggactgcaggatcctcctgtctgtcgagcccacggaccaaggctgctaccccctgaacaaccatctcttctgcaagccatgccatgtgaagcggagtgctgcggggtgctgctgagagtgcccgctgggcagtgaacagaccactagccccggctggggcccttccctgacttggtttcccttcctaacctgctcttgcacactttccttctgagcctccatggagaccagcctgcaagccggcccagcctgtccaggatacagtggggctgagcacccccaggccttccactcctctaccctctgggcaccagaaggctcctggaccatgagcttcacccccagaattccctgctgaccctgccccacttccagggaaaagctgggggaggttggacccctctcactgactagctgtctggtaggggtgctaggaccagcctcgcctgtggggttgagctgtttgaggacaaactccaaggtcccttaaaaagtgccttttagaggctgggcatggtggctcacgcttgtaatcccagcactttgggaggccaaggtgggtggatcacctgaggtcaggagttcaagaccagcctggccaacatggtgaaaccctgtctctactaaaaatacaaaaattagccaggcatggtagcaggtgcctgtaatcccagctactggggaaagctgaggcaggagaattgcttcaatctggaaggcagaggttgcagtgagattgcaccattgcattccagcctgggcaacaagagggaaactccgtctcaaaaaaaaaaaagtgccttttaggccggatgtggtggctcatgcctgtaatcccagcactttgggaggccaaggcaggcagatcacttgaggtcaggagtttgagaccagcctggccaacacggcaaaaccccgtttctactaaaaatacaaaaattagctgggtgtggtggcgtgcgcctgtaatcccagctactcaggaggctgaggcaggagcattgcttgaacccgggaggcagaggttgcagtgagctgagatggcaccactgcactccagcctgggagacacagcgagactctgtctccaaaaaaaaaagtgctttttgaaaatgttgaggttgaaatgatgggaaccaacattctttggatttagtggggagcataatagcaaacacccccttggttcgcacatgtacaggaatgggacccagttggggcacagccatggacttccccgccctggaatgtgtggtgcaaagtggggccagggcccagacccaagaggagagggtggtccgcagacaccccgggatgtcagcatcccccgacctgccttctggcggcacctcccgggtgctgtgttgagtcagcaggcatggggtgagagcctggtatatgctgggaacagggtgcaggggccaagcgttcctccttcagccttgacttgggccatgcaccccctctcccccaaacacaaacaagcacttctccagtatggtgccaggacaggtgtcccttcagtcctctggttatgacctcaagtcctacttgggccctgcagcccagcctgtgttgtaacctctgcgtcctcaagaccacacctggaagattcttcttccctttgaaggagaatcatcattgttgctttatcacttctaagacattttgtacggcacggacaagttaaacagaatgtgcttccctccctggggtctcacacgctcccacgagaatgccacaggggccgtgcactgggcaggcttctctgtagaaccccaggggcttcggcccagaccacagcgtcttgccctgagcctagagcagggagtcccgaacttctgcattcacagaccacctccacaattgttataaccaaaggcctcctgttctgttatttcacttaaatcaacatgctattttgttttcactcacttctgactttagcctcgtgctgagccgtgtatccatgcagtcatgttcacgtgctagttacgtttttcttcttacacatgaaaataaatgcataagtgttagaagctc

SEQ ID NO: 338242 - DNA, 507 bp, Artificial Sequence
  derived and/or modified sequence
gacacccgagctgctgcgggccaggacgaatccctccatccgggagcagtggtggcggtggaacaggtggcctggggtgctggaggcaggccaacctggagaggtaggcagtggctacctccactttacagatgaagacactgaggctcaggaggtggcgtgactgctccgggtctcacgcttagtaaacggccgcagaaccctggtcggtttgacgcaagaccctggcggatcccagagccaaaagctggcctgaacctccaggacttcagcccttctaggagaatctgatcccaggtgagggaggtcacttggggtgtggcccagcaggcaggcgggactccagactgggaacggaagtcagccctgctggggctgggagctgaagcatctgttccttcctcgcgggtgtgagacaaggaagagtgatcattgccacaccaggagctgaagccatggcctcaaagcctgagaagagggtggcatcgtctgtctttatcaccctgg

SEQ ID NO: 338243 - DNA, 611 bp, Artificial Sequence
  derived and/or modified sequence
gttgcaggaagtttggcacctgccgatcggtgacatcgacacccgagctgctgcgggccaggacgaatccctccatccgggagcagtggtggcggtggaacaggtggcctggggtgctggaggcaggccaacctggagaggtaggcagtggctacctccactttacagatgaagacactgaggctcaggaggtggcgtgactgctccgggtctcacgcttagtaaacggccgcagaaccctggtcggtttgacgcaagaccctggcggatcccagagccaaagtaagcgctcacctccgccggacaggcagagctggcctgaacctccaggacttcagcccttctaggagaatctgatcccaggtgagggaggtcacttggggtgtggcccagcaggcaggcgggactccagactgggaacggaagtcagccctgctggggctgggagctgaagcatctgttccttcctcgcgggtgtgagacaaggaagagtgatcattgccacaccaggagctgaagccatggcctcaaagcctgagaagagggtggcatcgtctgtctttatcaccctggcacccccgcgccgcgatgtggccgtggcggaggaagtg

SEQ ID NO: 338244 - DNA, 582 bp, Artificial Sequence
  derived and/or modified sequence
agccgggccctgccttccagagctcctggagcggcctgtcccccgggacaccgggacccacctgcagagggcttaccgctcaggagagcagaacaaggccaacctggagaggtaggcagtggctacctccactttacagatgaagacactgaggctcaggaggtggcgtgactgctccgggtctcacgcttagtaaacggccgcagaaccctggtcggtttgacgcaagaccctggcggatcccagagccaaagtaagcgctcacctccgccggacaggagctggcctgaacctccaggacttcagcccttctaggagaatctgatcccaggtgagggaggtcacttggggtgtggcccagcaggcaggcgggactccagactgggaacggaagtcagccctgctggggctgggagctgaagcatctgttccttcctcgcgggtgtgagacaaggaagagtgatcattgccacaccaggagctgaagccatggcctcaaagcctgagaagagggtggcatcgtctgtctttatcaccctggcacccccgcgccgcgatgtggccgtggcggaggaagtgagg

SEQ ID NO: 338245 - DNA, 562 bp, Artificial Sequence
  derived and/or modified sequence
ccgggctccgctggctcgggcgtcggatcggagccgccggggcgcgggcggcccagagctggcctgaacctccaggacttcagcccttctaggagaatctgatcccagccacaccaggagctgaagccatggcctcaaagcctgagaagagggtggcatcgtctgtctttatcaccctggcacccccgcgccgcgatgtggccgtggcggaggaagtgaggcaggcagtttgtgaggcccggcgtggccgcccctgggaggctcctgcccccatgaagacacccgaggctggcttggcggggaggcccagcccctggacaacccctggcagagctgcagccacagtgccggctgcacctatgcagctcttcaatggagacatctgtgccttctgccacaagaccgtgtccccccgagagctggctgtggaggccatgaagaggcagtaccatgcccagtgcttcacgtgccgcacctgccgccgccagctggctgggcagagcttctaccagaaggatgggcgacccctctgcgaaccctgctaccaggacacactggagag

SEQ ID NO: 338246 - DNA, 611 bp, Artificial Sequence
  derived and/or modified sequence
gtttggcacctgccgatcggtgacatcgacacccgagctgctgcgggccaggacgaatccctccatccgggagcagtggtggcggtggaacaggtggcctggggtgctggaggcaggccaacctggagaggtaggcagtggctacctccactttacagatgaagacactgaggctcaggaggtggcgtgactgctccgggtctcacgcttagtaaacggccgcagaaccctggtcggtttgacgcaagaccctggcggatcccagagccaaagtaagcgctcacctccgccggacaggagctggcctgaacctccaggacttcagcccttctaggagaatctgatcccaggtgagggaggtcacttggggtgtggcccagcaggcaggcgggactccagactgggaacggaagtcagccctgctggggctgggagctgaagcatctgttccttcctcgcgggtgtgagacaaggaagagtgatcattgccacaccaggagctgaagccatggcctcaaagcctgagaagagggtggcatcgtctgtctttatcaccctggcacccccgcgccgcgatgtggccgtggcggaggaagtgaggcaggcagttt

SEQ ID NO: 338247 - DNA, 576 bp, Artificial Sequence
  derived and/or modified sequence
atcgacacccgagctgctgcgggccaggacgaatccctccatccgggagcagtggtggcggtggaacaggtggcctggggtgctggaggccaacctggagaggtaggcagtggctacctccactttacagatgaagacactgaggctcaggaggtggcgtgactgctccgggtctcacgcttagtaaacggccgcagaaccctggtcggtttgacgcaagaccctggcggatcccagagccaaagtaagcgctcacctccgccggacaggagctggcctgaacctccaggacttcagcccttctaggagaatctgatcccagccacaccaggagctgaagccatggcctcaaagcctgagaagagggtggcatcgtctgtctttatcaccctggcacccccgcgccgcgatgtggccgtggcggaggaagtgaggcaggcagtttgtgaggcccggcgtggccgcccctgggaggctcctgcccccatgaagacacccgaggctggcttggcggggaggcccagcccctggacaacccctggcagagctgcagccacagtgccggctgcacctatg

SEQ ID NO: 338248 - DNA, 831 bp, Artificial Sequence
  derived and/or modified sequence
atggcatccaagcccgagaagagggttgcctcaagtgtattcattactcttgcccccccacgccgcgacgtagcagtggcggaggaagtgcgccaggcagtctgtgaagctcggaggggccgcccctgggaggcacccgcgcctatgaaaacccctgaagcgggactcgcaggccgcccaagtccatggactacgccggggcgggccgccgcgacagtgccggctgcccccatgcagctgttcaatggagacatatgtgccttctgccacaagactgtatcaccccgggagctggcggtggaagctatgaagagacagtaccacgctcagtgttttacctgcagaacatgcaggagacaactcgctggccagtctttctaccagaaagatggtaggcccctctgtgaaccatgttaccaggataccctggaaagatgcggcaagtgtggcgaggtggtgagggatcacatcatcagggccttgggacaggcatttcaccctagctgtttcacctgcgtgacatgcgccaggtgcatcggagatgaatcgttcgccttaggtagtcagaatgaagtctactgcctggatgacttctacagaaaatttgcccctgtgtgttctatctgcgaaaatcctatcatccctagggacgggaaggacgcgtttaagattgagtgcatgggccgcaactttcacgaaaactgttaccgctgcgaagactgcaggattctgctttctgtggagccaactgatcagggctgttatcccttgaataatcacctgttctgcaaaccatgtcacgtgaagcgctctgccgctggatgctgttag

SEQ ID NO: 338249 - DNA, 831 bp, Artificial Sequence
  derived and/or modified sequence
atggctagcaaacccgagaagagggtcgccagctctgtgttcatcaccctagcaccccccagacgggatgtagctgtagcggaggaggtgcgacaggccgtgtgtgaagctcgacgtgggcggccttgggaagctccagcccctatgaagactccagaggccgggctcgctgggagaccatctccctggaccacaccaggccgcgccgctgccacagttcctgccgcccctatgcagctcttcaacggcgacatctgcgctttctgccataagaccgtgtcccctcgagagctggctgtcgaagccatgaagcgccaatatcatgcccagtgctttacctgcagaacctgtcgaagacagctggccgggcagagtttttatcaaaaggacgggcggccactctgtgaaccatgctaccaggatacactcgaaaggtgtgggaaatgcggcgaagtcgtccgggaccatatcattcgcgcacttggccaagcatttcacccatcatgttttacatgcgtcacgtgtgctagatgtatcggcgacgaatcatttgccctgggctcccagaatgaggtgtactgtctagacgacttttatagaaagtttgcacctgtgtgctctatttgcgagaacccgattatcccaagagacggcaaagacgcttttaagatcgaatgtatgggcaggaacttccatgagaattgctaccgttgcgaggactgtcggatactgctgagtgtagaaccaaccgaccagggctgctaccctctaaacaatcatttattctgcaagccctgtcacgtgaagaggtccgccgctggatgttgttag

SEQ ID NO: 338250 - DNA, 93 bp, Artificial Sequence
  derived and/or modified sequence
atggcttcaaagccggaaaagagagtggcttcatccgtattcatcactttagctcctcctcgccgggatgtggccgtggcagaggaggtttag

SEQ ID NO: 338251 - DNA, 96 bp, Artificial Sequence
  derived and/or modified sequence
atggcctcaaaacctgaaaagagggtggccagcagcgtctttattactctcgcgccgccccgccgcgacgttgctgtcgcagaggaagttcggtag

SEQ ID NO: 338252 - DNA, 435 bp, Artificial Sequence
  derived and/or modified sequence
atggcctccaaaccagagaaaagagttgccagctctgtgttcattacactggccccaccacgtcgcgacgtggcagtcgctgaagaggtgaggcaggcagtgtgtgaagctcggagaggccgcccctgggaagcaccggcccctatgaaaacccctgaagctggcctggccggcaggccaagtccttggaccacccctggacgggcggctgcaacagtgcctgccgctccaatgcagctgtttaatggagacatatgcgccttttgtcataaaactgtgtcgcctagagaactggcggtagaggccatgaagcgccagtatcacgcacagtgctttacttgtagaacctgtcggagacagttagcggggcagagcttctaccagaaagacgggcgccccctctgcgaaccttgttaccaggacactttggagtag

SEQ ID NO: 338253 - DNA, 105 bp, Artificial Sequence
  derived and/or modified sequence
atggcttcaaagcctgagaaaagagtagccagcagtgtgttcatcacactggctccgccaaggcgggatgtcgccgtagcggaggaagtcagacaggcggtgtag

SEQ ID NO: 338254 - DNA, 237 bp, Artificial Sequence
  derived and/or modified sequence
atggcttcgaagccggagaaacgggtggcatccagcgtgttcattacccttgctccaccccgcagagatgtcgccgtcgcggaagaagtgcgtcaagcagtgtgtgaggcccggcgcggccggccctgggaagccccggcccccatgaagacgccagaggccgggcttgccggtagaccctctccatggaccacaccaggccgagcagccgccaccgtacccgcagcccccatgtag

SEQ ID NO: 338255 - DNA, 831 bp, Artificial Sequence
  derived and/or modified sequence
atggccagcaagccagagaagagggtggccagcagcgtcttcatcaccctggcccccccaagaagagatgtggccgtggccgaggaggtgcggcaggccgtgtgtgaggcccggcggggccggccctgggaggccccagcccccatgaagaccccagaggccggcctggccggccggcccagcccctggaccaccccaggccgggccgccgccaccgtgcctgctgcccccatgcagctgttcaacggggacatctgtgccttctgccacaagacagtgagcccccgggagctggccgtggaggccatgaagaggcagtaccacgcccagtgcttcacctgcaggacctgccggcggcagctggccggccagagcttctaccagaaggatggccggcccctgtgtgagccctgctaccaggacaccctggagcgctgtgggaaatgtggggaggtggtgcgggaccacatcatccgggccctgggccaggccttccaccccagctgcttcacctgtgtgacctgtgcccgctgcattggagatgagagctttgccctgggcagccagaatgaggtgtactgcctggatgacttctacaggaagtttgcccctgtgtgcagcatctgtgagaaccccatcatccccagagatggcaaggatgccttcaagattgagtgcatgggcaggaacttccacgagaactgctaccgctgtgaggactgccgcatcctgctgtctgtggagcccacagaccagggctgctaccccctgaacaaccacctgttctgcaagccctgccacgtgaagaggtctgctgctggctgctgctag

SEQ ID NO: 338256 - DNA, 93 bp, Artificial Sequence
  derived and/or modified sequence
atggccagcaagccagagaagagggtggccagcagcgtcttcatcaccctggcccccccaagaagagatgtggccgtggccgaggaggtgtag

SEQ ID NO: 338257 - DNA, 96 bp, Artificial Sequence
  derived and/or modified sequence
atggccagcaagccagagaagagggtggccagcagcgtcttcatcaccctggcccccccaagaagagatgtggccgtggccgaggaggtgaggtag

SEQ ID NO: 338258 - DNA, 435 bp, Artificial Sequence
  derived and/or modified sequence
atggccagcaagccagagaagagggtggccagcagcgtcttcatcaccctggcccccccaagaagagatgtggccgtggccgaggaggtgcggcaggccgtgtgtgaggcccggcggggccggccctgggaggccccagcccccatgaagaccccagaggccggcctggccggccggcccagcccctggaccaccccaggccgggccgccgccaccgtgcctgctgcccccatgcagctgttcaacggggacatctgtgccttctgccacaagacagtgagcccccgggagctggccgtggaggccatgaagaggcagtaccacgcccagtgcttcacctgcaggacctgccggcggcagctggccggccagagcttctaccagaaggatggccggcccctgtgtgagccctgctaccaggacaccctggagtag

SEQ ID NO: 338259 - DNA, 105 bp, Artificial Sequence
  derived and/or modified sequence
atggccagcaagccagagaagagggtggccagcagcgtcttcatcaccctggcccccccaagaagagatgtggccgtggccgaggaggtgcggcaggccgtgtag

SEQ ID NO: 338260 - DNA, 237 bp, Artificial Sequence
  derived and/or modified sequence
atggccagcaagccagagaagagggtggccagcagcgtcttcatcaccctggcccccccaagaagagatgtggccgtggccgaggaggtgcggcaggccgtgtgtgaggcccggcggggccggccctgggaggccccagcccccatgaagaccccagaggccggcctggccggccggcccagcccctggaccaccccaggccgggccgccgccaccgtgcctgctgcccccatgtag

SEQ ID NO: 338261 - DNA, 831 bp, Artificial Sequence
  derived and/or modified sequence
atggccagcaagcccgagaagcgggtggccagcagcgtgttcatcacccttgcacctccccggagagatgtcgctgtggcggaggaggtccgccaggccgtctgtgaggctcgtcgggggcggccttgggaagctccagcccctatgaaaaccccagaggccggcctggccgggcgcccaagtccatggactacacccggcagagccgcagccacggttccagctgcccccatgcagctttttaatggggacatctgcgctttttgtcacaaaacagtcagccctcgtgaactggcggtcgaagccatgaaaaggcaatatcacgcacaatgcttcacttgccggacatgccggaggcaactggctggtcaatctttttaccagaaggacggtcggcccctttgcgaaccctgctaccaggacaccctcgaacgctgtgggaaatgtggggaagtagtgagagaccacattattcgagcactagggcaggcgtttcacccaagttgctttacttgcgtgacatgcgcccgctgcataggcgatgaatctttcgctttgggtagtcagaatgaggtttactgtttagacgacttctaccgtaaattcgcccctgtgtgctcaatttgtgaaaacccaataattcctagggatggaaaagacgcgttcaaaatcgagtgcatgggccgcaactttcatgagaattgttacaggtgcgaggactgccggattctcttgagcgtcgaacccaccgaccaaggctgttaccctctgaacaatcatctgttttgtaagccgtgtcatgttaaacgatctgccgccggttgctgttag

SEQ ID NO: 338262 - DNA, 831 bp, Artificial Sequence
  derived and/or modified sequence
atggccagcaagcccgagaagcgggtggccagcagcgtgttcatcacgctggctcctccacgcagagacgtggctgttgccgaggaggtgcgacaggccgtctgcgaggcccgcagagggagaccatgggaggcaccagccccgatgaaaactccagaggctggcctggcagggaggcctagtccatggactacacctggaagggccgcagctaccgtgccagcagcccctatgcagctgtttaatggcgacatctgcgcgttttgccataagacagtctctcctcgggagctcgcagtggaggcaatgaagcggcagtaccatgctcagtgtttcacctgtaggacctgccgtagacagctggccgggcagtcattctatcaaaaggatgggaggcccctgtgcgagccatgctaccaggataccttagaacggtgcggcaagtgcggcgaagtggttagggatcatatcattcgggcgctggggcaggccttccacccctcgtgttttacctgcgttacttgcgcgcggtgcatcggtgatgaatcattcgccctcggttcccagaatgaagtgtattgcttggacgatttttacaggaaattcgcccctgtgtgttcaatctgtgaaaatccgataataccaagagacggaaaggacgcgttcaagattgaatgcatgggccggaatttccacgagaactgttaccgatgtgaagactgcaggattttgctctctgtggagcctactgatcagggatgttaccccctgaacaatcatttgttctgcaagccatgccacgtaaaacggtcagccgccggttgttgttag

SEQ ID NO: 338263 - DNA, 93 bp, Artificial Sequence
  derived and/or modified sequence
atggccagcaagcccgagaagcgggtggccagcagcgtgttcatcaccttagcaccccctcgcagggacgtcgccgtggcagaggaggtgtag

SEQ ID NO: 338264 - DNA, 96 bp, Artificial Sequence
  derived and/or modified sequence
atggccagcaagcccgagaagcgggtggccagcagcgtgttcatcacactggccccaccacggagggatgtcgctgttgcagaagaggtcaggtag

SEQ ID NO: 338265 - DNA, 435 bp, Artificial Sequence
  derived and/or modified sequence
atggccagcaagcccgagaagcgggtggccagcagcgtgttcatcacacttgctccccctcgtcgcgacgtggcagtggcagaagaagtacggcaagctgtgtgcgaagcaaggcgcggacgaccttgggaggctcctgcccccatgaagacacccgaggctggccttgctggcaggccgagcccttggaccacccctggaagggctgcagctaccgtccctgcagccccaatgcaacttttcaatggcgacatctgtgcattttgccataagacggtttccccgcgcgagttagcagtggaggccatgaaaagacagtaccatgcgcagtgttttacatgtcgtacttgtagaagacagctcgcaggccagtccttctaccaaaaggacggacgacccctgtgcgaaccttgttaccaggatactcttgagtag

SEQ ID NO: 338266 - DNA, 105 bp, Artificial Sequence
  derived and/or modified sequence
atggccagcaagcccgagaagcgggtggccagcagcgtgttcatcacgctcgcaccacctaggcgcgatgttgctgtcgccgaggaagtgcgccaggcagtttag

SEQ ID NO: 338267 - DNA, 237 bp, Artificial Sequence
  derived and/or modified sequence
atggccagcaagcccgagaagcgggtggccagcagcgtgttcatcacccttgctccaccccggagggatgtagctgtggcagaggaggtaaggcaagccgtctgcgaagcccgtaggggtaggccctgggaggctcctgcccctatgaagacaccggaggcaggcctcgctgggcgcccttccccctggacgactcctggcagagcggcagccacagtcccggctgcacccatgtag

SEQ ID NO: 338268 - DNA, 831 bp, Artificial Sequence
  derived and/or modified sequence
atggcctcgaaaccagaaaagagggtcgcctcctccgtcttcatcacattggcaccacctaggagagacgtggcggtcgcagaggaggtacgccaggcagtgtgcgaggctcgccgaggcagaccctgggaagcacctgctccgatgaaaacccccgaggccggtctggccggtcggccttcaccatggaccaccccaggaagagcagccgctacagtgccagcggcacccatgcagcttttcaatggagacatatgcgctttctgccataaaacagtgtcgccccgtgagctcgctgtggaagcgatgaagcgccagtatcatgcccagtgttttacgtgtcgcacatgccggcgtcagctggcgggacagtccttttatcagaaagacgggagaccgttgtgcgagccttgctaccaggacactctggaaagatgtggtaagtgcggcgaggtggtaagggaccacattatcagagccctgggccaagcctttcatccatcttgcttcacatgcgtcacgtgtgcaagatgtattggcgatgagagttttgctctggggtcgcagaatgaggtttactgtctggatgatttctatcggaaattcgcccctgtgtgctccatatgcgaaaatccaatcatccctcgggacggtaaggacgcttttaagattgagtgcatggggagaaacttccatgaaaattgctatcggtgcgaggattgccggattcttttaagcgttgagccaactgatcaggggtgctaccccttgaataatcatctcttctgcaagccctgtcacgtgaaacggagcgctgccggatgctgttag

SEQ ID NO: 338269 - DNA, 831 bp, Artificial Sequence
  derived and/or modified sequence
atggcctccaagcctgaaaaacgggtcgcaagcagcgtctttattaccctcgccccacctcgtcgcgacgtggcagtcgcggaagaggtaaggcaggccgtatgtgaggcgagaagggggagaccctgggaggccccagcacctatgaagacacctgaagcagggctcgctgggagaccaagcccgtggaccacccccggtcgggctgccgcaaccgtacctgccgcacctatgcagcttttcaacggggacatctgcgctttttgccacaaaacggttagtcctcgggagttggctgttgaggcaatgaaaagacagtaccatgcccagtgtttcacgtgtaggacttgtagaaggcaactcgccggtcagtccttctaccagaaggacggtcggcctctgtgtgagccatgttatcaagacaccctggaacggtgtggcaaatgcggagaagtagtccgtgaccatattattcgggctcttggccaagcatttcatcccagctgcttcacatgtgtgacctgtgcacggtgcatcggtgatgagagttttgccctgggctcacagaatgaagtttattgtctcgacgatttctatcgcaagttcgctcccgtgtgcagcatctgcgagaacccgataatccctcgcgatggcaaggatgctttcaaaatcgagtgcatgggacgaaacttccacgagaactgttaccggtgtgaggactgcaggatcttattaagcgtggaaccaacagaccaaggctgttaccccctgaataaccacttgttctgcaagccctgtcacgtgaaacgcagtgccgcaggatgttgctag

SEQ ID NO: 338270 - DNA, 93 bp, Artificial Sequence
  derived and/or modified sequence
atggcttctaaacctgaaaaaagagtcgcctcctcggtgtttattactctggcgcctccccgaagagatgtggccgtagccgaagaggtctag

SEQ ID NO: 338271 - DNA, 96 bp, Artificial Sequence
  derived and/or modified sequence
atggcctcaaaaccagagaaaagagtcgcttccagtgtttttataacactggccccaccaaggcgcgacgtcgctgtcgccgaggaggtcagatag

SEQ ID NO: 338272 - DNA, 435 bp, Artificial Sequence
  derived and/or modified sequence
atggcaagtaaaccagagaagcgtgttgcctcatccgtcttcatcactcttgctccaccgagacgggacgtggccgtggccgaagaagtgcgacaggccgtctgcgaggctcggcgagggcgtccctgggaggccccagcgccaatgaagacgccagaggctggcttggccggtcggccaagcccatggactacacccggacgagctgctgccaccgtaccagcagccccaatgcagctattcaacggggatatatgcgccttttgtcataagactgtctcacctcgagagctagccgtcgaagcgatgaagagacagtatcatgctcagtgcttcacatgtcgcacctgccggcgacagctggctggacagtctttctaccagaaagacggccgacccctgtgtgagccttgttaccaggacacgctggagtag

SEQ ID NO: 338273 - DNA, 105 bp, Artificial Sequence
  derived and/or modified sequence
atggcgtctaaacccgaaaagcgggttgcctctagtgtgtttattaccctcgccccacctcgcagggacgtggcagtcgcggaagaagttcgacaggccgtgtag

SEQ ID NO: 338274 - DNA, 237 bp, Artificial Sequence
  derived and/or modified sequence
atggcgagcaaaccagagaaacgagtggcctctagtgtgtttatcaccctggccccacccaggagagatgtcgccgttgctgaggaggtgcgtcaagctgtgtgcgaggcgcgtcgcggaagaccctgggaggcgcctgctcctatgaagacccctgaagcaggcttggcgggaaggccctccccttggaccactcccggacgggctgcggcaactgtgccagctgcccctatgtag

SEQ ID NO: 338275 - DNA, 165 bp, Artificial Sequence
  derived and/or modified sequence
atgagtgagcagggtgacctcaatcaagctatagccgaagaagggggaacggagcaggagacagctacccccgagaatgggatcgtgaagtctgagagtctcgacgaggaagagaagctcgagctccagcgccgattagaggcccagaaccaggaaaggcgctag

SEQ ID NO: 338276 - protein, 229 aa, Artificial Sequence
  derived and/or modified sequence
MSPFLFRDDMKDLTVFLNSLTPKFYVALTGTSSLISGLIFIFEWWYFHKHGTSFIEQVSVSHLQPLMGGTESSISEPGSPSRNRENETSRQNLSECKVWRNPLNLFRGAEYRRYTWVTGKEPLTYYDMNLSAQDHQTFFTCDTDFLRPSDTVMQKAWRERNPPARIKAAYQALELNNDCATAYVLLAEEEATTIVDAERLFKQALKAGETIYRQSQQCQHQSPQHEAQL

SEQ ID NO: 338277 - protein, 499 aa, Artificial Sequence
  derived and/or modified sequence
MSPFLFRDDMKDLTVFLNSLTPKFYVALTGTSSLISGLIFIFEWWYFHKHGTSFIEQVSVSHLQPLMGGTESSISEPGSPSRNRENETSRQNLSECKVWRNPLNLFRGAEYRRYTWVTGKEPLTYYDMNLSAQDHQTFFTCDTDFLRPSDTVMQKAWRERNPPARIKAAYQALELNNDCATAYVLLAEEEATTIVDAERLFKQALKAGETIYRQSQQCQHQSPQHEAQLRRDTNVLVYIKRRLAMCARKLGRIREAVKIMRDLMKEFPPLTMLNIHENLLESLLELQAYPDVQAVLAKYDDISLPKSAAICYTAALLKTRTVSEKFSPETASRRGLSTAEINAVEAIHRAVEFNPHVPKYLLEMKSLILPPEHILKRGDSEAIAYAFFHLQHWKRIEGALNLLQCTWEGTFRMIPYPLEKGHLFYPYPSCTETADRELLPTFHHVSVYPKKELPLFIHFTAGFCSSTAMIAILTHQFPEIMGIFAKAVSMISRTCVDYL

SEQ ID NO: 338278 - DNA, 690 bp, Artificial Sequence
  derived and/or modified sequence
atgagccccttcctgttcagagacgacatgaaggacctgaccgtgttcctgaacagcctgacccccaagttctacgtggccctgaccggcaccagcagcctgatcagcggcctgatcttcatcttcgagtggtggtacttccacaagcacggcaccagcttcatcgagcaggtgagcgtgagccacctgcagcccctgatgggcggcaccgagagcagcatcagcgagcccggcagccccagcagaaacagagagaacgagaccagcagacagaacctgagcgagtgcaaggtgtggagaaaccccctgaacctgttcagaggcgccgagtacagaagatacacctgggtgaccggcaaggagcccctgacctactacgacatgaacctgagcgcccaggaccaccagaccttcttcacctgcgacaccgacttcctgagacccagcgacaccgtgatgcagaaggcctggagagagagaaacccccccgccagaatcaaggccgcctaccaggccctggagctgaacaacgactgcgccaccgcctacgtgctgctggccgaggaggaggccaccaccatcgtggacgccgagagactgttcaagcaggccctgaaggccggcgagaccatctacagacagagccagcagtgccagcaccagagcccccagcacgaggcccagctgtag

SEQ ID NO: 338279 - DNA, 1500 bp, Artificial Sequence
  derived and/or modified sequence
atgagccccttcctgttcagagacgacatgaaggacctgaccgtgttcctgaacagcctgacccccaagttctacgtggccctgaccggcaccagcagcctgatcagcggcctgatcttcatcttcgagtggtggtacttccacaagcacggcaccagcttcatcgagcaggtgagcgtgagccacctgcagcccctgatgggcggcaccgagagcagcatcagcgagcccggcagccccagcagaaacagagagaacgagaccagcagacagaacctgagcgagtgcaaggtgtggagaaaccccctgaacctgttcagaggcgccgagtacagaagatacacctgggtgaccggcaaggagcccctgacctactacgacatgaacctgagcgcccaggaccaccagaccttcttcacctgcgacaccgacttcctgagacccagcgacaccgtgatgcagaaggcctggagagagagaaacccccccgccagaatcaaggccgcctaccaggccctggagctgaacaacgactgcgccaccgcctacgtgctgctggccgaggaggaggccaccaccatcgtggacgccgagagactgttcaagcaggccctgaaggccggcgagaccatctacagacagagccagcagtgccagcaccagagcccccagcacgaggcccagctgagaagagacaccaacgtgctggtgtacatcaagagaagactggccatgtgcgccagaaagctgggcagaatcagagaggccgtgaagatcatgagagacctgatgaaggagttcccccccctgaccatgctgaacatccacgagaacctgctggagagcctgctggagctgcaggcctaccccgacgtgcaggccgtgctggccaagtacgacgacatcagcctgcccaagagcgccgccatctgctacaccgccgccctgctgaagaccagaaccgtgagcgagaagttcagccccgagaccgccagcagaagaggcctgagcaccgccgagatcaacgccgtggaggccatccacagagccgtggagttcaacccccacgtgcccaagtacctgctggagatgaagagcctgatcctgccccccgagcacatcctgaagagaggcgacagcgaggccatcgcctacgccttcttccacctgcagcactggaagagaatcgagggcgccctgaacctgctgcagtgcacctgggagggcaccttcagaatgatcccctaccccctggagaagggccacctgttctacccctaccccagctgcaccgagaccgccgacagagagctgctgcccaccttccaccacgtgagcgtgtaccccaagaaggagctgcccctgttcatccacttcaccgccggcttctgcagcagcaccgccatgatcgccatcctgacccaccagttccccgagatcatgggcatcttcgccaaggccgtgagcatgatcagcagaacctgcgtggactacctgtag

SEQ ID NO: 338280 - DNA, 690 bp, Artificial Sequence
  derived and/or modified sequence
atgtccccatttctcttcagagatgatatgaaggacctcacagtgtttcttaattccctgacacctaagttttacgttgctctgaccgggacaagttccttaatttcaggcctaatcttcatttttgaatggtggtattttcacaaacacggcacgtcctttattgagcaggttagcgtctcccacttgcaacctctaatgggggggacagagtcctccatatcagaacccggctcgcctagcagaaatcgcgagaacgagacctctaggcagaacctctcggagtgtaaagtgtggcggaatcccctcaacttgttccgaggtgccgaataccgacgttacacctgggtgactggcaaggaacctttaacttactatgatatgaatctctcagctcaggatcaccagacattcttcacatgcgataccgacttcttgcgccccagtgatacagttatgcagaaagcttggagagagcgcaaccctcctgcccgcataaaggcagcctatcaggcacttgagcttaacaatgactgcgccactgcttatgtcctcctggccgaggaagaggcaaccacaatcgtcgatgctgaaagactgtttaagcaggctctcaaagctggcgaaacaatttacagacaatcccagcaatgtcagcaccagtcccctcaacatgaggcccagctgtag

SEQ ID NO: 338281 - DNA, 1500 bp, Artificial Sequence
  derived and/or modified sequence
atgtcgccatttctgtttcgtgacgatatgaaggaccttactgtttttctgaacagcctgacacccaagttttatgtggctctgacaggcacctccagcttgattagtgggctcatttttatctttgagtggtggtacttccataaacatgggacgagcttcatcgagcaggtgagcgtttcacaccttcagccccttatggggggcacagagagctcaatttctgaacccgggtccccttctaggaaccgggagaatgaaacctctcggcagaatctgtccgagtgtaaggtctggagaaatccgctaaatcttttccgcggcgctgaatatcgacgatacacatgggtgacgggaaaggaacccctgacttactacgatatgaatcttagcgctcaggaccatcagacattttttacctgcgacaccgatttcttgcggcccagtgacaccgtgatgcagaaagcgtggcgagagaggaaccccccggcccgcataaaagccgcataccaggctctggagctcaataatgattgtgccacagcttatgtcctgctcgctgaggaagaggccactaccatcgttgacgccgagcggctgtttaaacaggccctgaaggctggagaaaccatctaccgccaatcccaacagtgtcagcaccagtccccacagcatgaggcccagctgaggcgcgatactaatgttctcgtgtatattaaacggagactcgccatgtgcgcaagaaaactcgggagaatcagggaggccgtgaagatcatgcgagatcttatgaaagaattccccccattgacaatgttgaacatccatgaaaatctgctggagtccttgctggagttgcaagcataccctgatgtgcaggccgttttggccaaatatgatgacattagtctgccaaaaagcgcagcaatctgctatacagctgctctgctgaaaacaagaaccgtgtccgagaagttttctccagagaccgcaagtagacgggggctatccaccgctgaaatcaatgccgtcgaggcaatccatcgggccgtggagtttaatccccatgtcccaaagtaccttcttgaaatgaaatcactgatcctgccacccgagcatatactgaagcggggcgactctgaagccattgcctacgccttcttccacctgcaacactggaaaaggatcgaaggagcattaaacctccttcagtgcacctgggagggtaccttccgcatgattccttacccgctggagaagggccacctattctacccatatccctcttgtacggagactgctgatagggagctgcttcccacctttcatcatgtgagcgtgtaccccaaaaaagagcttccactatttattcactttaccgccgggttttgctcaagcacagctatgatcgctattctcactcaccaattcccagaaataatggggatcttcgctaaagcagtctcaatgattagtcgcacctgcgtggactacctttag

SEQ ID NO: 338282 - DNA, 690 bp, Artificial Sequence
  derived and/or modified sequence
atgagccccttcctgttcagagatgacatgaaggacctgaccgtcttcctgaacagcctgacccccaagttctacgtggccctgaccggcaccagcagcctcatcagcggcctcatcttcatctttgagtggtggtacttccacaagcacggcaccagcttcatcgagcaggtgtctgtgagccacctgcagcccctgatgggcggcacagagagcagcatcagcgagcccggcagccccagcaggaacagagaaaatgagaccagccggcagaacctgtctgagtgcaaggtgtggaggaaccccctgaacctcttcagaggagctgagtaccgccgctacacctgggtgacaggcaaggagcccctgacctactatgacatgaacctgagcgcccaggaccaccagaccttcttcacctgtgacacagacttcctgcggcccagcgacacagtgatgcagaaggcctggagggagaggaaccccccagcccgcatcaaggccgcctaccaggccctggagctgaacaatgactgtgccacagcctacgtgctgctggccgaggaggaggccaccaccatcgtggatgctgagcggctcttcaagcaggccctgaaggccggggagaccatctaccggcagagccagcagtgccagcaccagagcccccagcacgaggcccagctgtag

SEQ ID NO: 338283 - DNA, 1500 bp, Artificial Sequence
  derived and/or modified sequence
atgagccccttcctgttcagagatgacatgaaggacctgaccgtcttcctgaacagcctgacccccaagttctacgtggccctgaccggcaccagcagcctcatcagcggcctcatcttcatctttgagtggtggtacttccacaagcacggcaccagcttcatcgagcaggtgtctgtgagccacctgcagcccctgatgggcggcacagagagcagcatcagcgagcccggcagccccagcaggaacagagaaaatgagaccagccggcagaacctgtctgagtgcaaggtgtggaggaaccccctgaacctcttcagaggagctgagtaccgccgctacacctgggtgacaggcaaggagcccctgacctactatgacatgaacctgagcgcccaggaccaccagaccttcttcacctgtgacacagacttcctgcggcccagcgacacagtgatgcagaaggcctggagggagaggaaccccccagcccgcatcaaggccgcctaccaggccctggagctgaacaatgactgtgccacagcctacgtgctgctggccgaggaggaggccaccaccatcgtggatgctgagcggctcttcaagcaggccctgaaggccggggagaccatctaccggcagagccagcagtgccagcaccagagcccccagcacgaggcccagctgcggcgggacaccaacgtgctggtgtacatcaagaggcggctggccatgtgtgccaggaagctgggccgcatccgggaggccgtgaagatcatgagggacctgatgaaggagttcccccccctgaccatgctgaacatccacgagaacctgctggagagcctgctggagctgcaggcctacccagatgtgcaggccgtgctggccaagtatgatgacatcagcctgcccaagtctgctgccatctgctacacagctgccctgctgaagaccaggacagtgtctgagaagttcagccctgagacagccagcagaagaggcctgagcacagctgagatcaatgctgtggaggccatccacagagctgtggagttcaacccccacgtgcccaagtacctgctggagatgaagagcctcatcctgcccccagagcacatcctgaagagaggagacagcgaggccatcgcctatgccttcttccacctgcagcactggaagagaattgagggcgccctgaacctgctgcagtgcacctgggagggcaccttcaggatgatcccctaccccctggagaagggccacctgttctacccctaccccagctgcacagaaacagctgaccgggagctgctgcccaccttccaccacgtgtctgtgtaccccaagaaggagctgcccctcttcatccacttcaccgctggcttctgcagcagcacagccatgattgccatcctgacccaccagtttcctgagatcatgggcatctttgccaaggctgtgtccatgatcagcaggacctgtgtggactacctgtag

SEQ ID NO: 338284 - DNA, 690 bp, Artificial Sequence
  derived and/or modified sequence
atgagccccttcctgttccgggacgacatgaaggacctgaccgtgtttctcaacagtctaactccaaagttctacgtggcactgacaggtactagcagcctcatctccggcttgatattcatttttgagtggtggtattttcacaaacatggcacctcgttcatcgaacaggtctccgtgtctcacctgcagcctcttatgggcgggaccgagagcagtatctcagagccgggttctccctcacgaaaccgagaaaacgagacctcccgtcagaatcttagcgagtgtaaggtctggaggaatcccctgaacctatttagaggggctgaataccggaggtacacttgggtcaccggcaaagagcccttgacctattatgacatgaatcttagcgcacaggatcatcagaccttctttacctgcgacacggatttcttgcgaccctccgacacagtcatgcagaaggcctggagggagaggaatccacccgcacggataaaggcagcctatcaggcactggagctaaataacgactgcgctaccgcttacgtcttattggcagaggaagaggctactaccatcgttgacgccgagaggctgttcaaacaggccttaaaagcaggagaaaccatctaccgacagtcccagcagtgccaacatcagtctccgcagcacgaggcccagttgtag

SEQ ID NO: 338285 - DNA, 1500 bp, Artificial Sequence
  derived and/or modified sequence
atgagccccttcctgttccgggacgacatgaaggacctgaccgtgttcctgaacagtctgactcctaagttctatgtggcactgaccggaacaagctccctgattagcggccttatttttatattcgagtggtggtactttcataagcatggaacctccttcattgaacaagttagcgtgagccacctgcagcccctgatgggcggcactgagtccagcatcagtgaacctgggtcgccctcccgcaaccgtgaaaatgagacatcgcggcagaacctgagtgagtgcaaggtttggaggaacccactgaatctctttcgcggcgccgaatatcgtcgttatacctgggtgactggaaaagagcctctgacgtactacgatatgaacttgagcgcacaagatcaccagaccttttttacttgcgacactgattttctgaggccatcggacaccgttatgcaaaaggcttggcgggagcgcaaccctccggcccgtattaaggctgcataccaagccctggagctgaataatgactgtgccactgcttatgtgctgctggcagaggaagaggcaacaactattgtggatgccgaacgcctctttaagcaggcactcaaagccggcgagactatttatcgccagtcccagcaatgccaacatcagagtccgcagcatgaggctcaactgcggagagatactaacgttctagtgtatatcaaacgacgattagccatgtgcgcgaggaagctgggaaggatcagagaagcggtcaagataatgcgtgatcttatgaaagaattcccccctttaacgatgttaaacatacacgagaatctgctggaaagtctgctcgagctgcaagcataccccgatgtccaggccgtgctggctaagtacgacgacatcagcctccctaaatcggccgctatctgttatacagcagccctcctcaagacccgaaccgtcagcgaaaaattctccccagagactgcatcacggagaggactgagcaccgcggagattaacgccgtcgaagctatccacagagcagtcgagttcaatcctcatgtcccaaagtatctgctcgagatgaagtcccttatactgccgccggagcatattctgaagcggggagattcagaagccatagcctacgcgtttttccacctccagcattggaaaaggatcgaaggagcccttaatcttctgcaatgtacttgggagggcacctttcgaatgataccctatccgttagaaaaaggccaccttttttatccttacccatcttgcacagagactgcggaccgcgaattactgcctacattccatcacgtgagtgtctatcccaaaaaggagctgccactcttcattcactttacagccggcttttgcagttcgacagccatgatagctatacttacacaccagttccccgagattatgggtatcttcgcaaaagctgtgagtatgatcagtaggacctgcgtcgactacctgtag

SEQ ID NO: 338286 - DNA, 690 bp, Artificial Sequence
  derived and/or modified sequence
atgagcccgtttctatttcgcgacgatatgaaggacctgacagtcttcttaaacagcctgacgcctaaattctacgtggctctgacaggtaccagttcactgataagtgggttgatttttattttcgagtggtggtattttcacaaacacgggacttctttcatcgagcaggtgtcagtgtctcacctccaacctctcatgggaggtaccgagagttctatcagcgagcctggaagcccctcgcgaaaccgcgagaatgaaacttcccggcagaatttgtctgaatgcaaggtgtggcggaaccctctgaacctatttagaggcgcagaatatagaaggtatacctgggtgactgggaaggagcctttaacatattatgacatgaatctgtccgcccaggaccaccaaacatttttcacatgtgacactgacttcctgagaccatctgacaccgttatgcagaaagcctggagagagagaaacccgcctgccagaatcaaggccgcttaccaggccctagagttaaacaacgactgcgctaccgcttacgtcctcttagcagaggaagaggctactaccatagtggacgcagagaggctgttcaagcaagccctcaaggcaggcgagactatctatcgccagagtcaacagtgtcagcaccagagcccgcagcacgaggcacagctctag

SEQ ID NO: 338287 - DNA, 1500 bp, Artificial Sequence
  derived and/or modified sequence
atgtctccattcttgttccgtgacgatatgaaagatctgacagtcttcctcaattcccttacacctaaattctacgtggcattaacgggcaccagttccctgatttctggactcatttttatttttgagtggtggtactttcataaacacgggacgtcttttatagagcaagtgtcagtgagccacctccaacccttgatgggcggaaccgagagctctatcagtgagccagggtcccccagtcggaaccgagagaatgagacgtcacgccaaaatctgagtgaatgcaaggtatggcggaaccccctgaacctctttaggggggctgagtatcgtcggtacacctgggtgaccgggaaggagccactgacctactacgatatgaacctcagtgctcaggaccatcagacttttttcacttgtgatacagacttccttagaccaagcgacacagtcatgcagaaagcctggagagaaaggaacccgccagccagaattaaggctgcctaccaggctcttgagttgaataatgactgtgccaccgcttacgtgctactcgcagaggaggaggctaccaccattgtggacgccgaaagactgtttaagcaggcactcaaagctggggagaccatttacagacagtctcagcagtgtcaacaccaaagcccacagcacgaagcacagcttcgacgcgacactaacgtattagtttatattaaaagaagactagcaatgtgcgccagaaagctggggaggatccgtgaagcggtgaagatcatgcgcgacctcatgaaggagttccctccactgaccatgcttaatatccacgaaaatcttctggagtccctcctcgagctgcaggcctacccagacgtgcaggccgtgctagccaaatatgatgacatttctctgccaaagtccgcggctatttgctatacagcagccctgctgaagactaggaccgtctccgagaagttttcgcccgaaacggctagcagacgtggcctcagcaccgcagaaattaacgctgtggaagcaattcacagagccgtggagttcaacccccatgtgcccaaatatctgctggagatgaagtctctgattttgccacccgaacatatcttaaagcgcggagattccgaagctatagcatacgccttttttcacctgcagcattggaagaggatcgagggagccctcaatctactgcaatgcacctgggagggaacatttagaatgattccataccctctggaaaagggccatcttttctatccttatccaagctgcacggaaacggccgaccgggagctactccccacgttccaccacgtatcagtctatcccaagaaagagttacctttgttcatccacttcaccgccggattctgttcaagtactgctatgatcgcgatcctaacgcaccagtttccagaaatcatgggaatctttgcaaaagcggtgtccatgatctccagaacttgcgtggattatctttag

SEQ ID NO: 338288 - DNA, 862 bp, Artificial Sequence
  derived and/or modified sequence
atatactgtactattctttagctgtagacaggatgaagtgtttagggcccaggtccccttaccatgtgattatatttcactcaagatctgagcagcaacctcagaacaagatataagtatttccattacatgattcagtatggtggttgatttttctgaagcaaaaggcagcaaatgtcccctttcctgttcagagatgacatgaaagacttgactgtatttttaaattcattgacacccaaattctatgtggcacttacagggacctcttcattgatatcaggactaatatttatatttgaatggtggtacttccataagcatggcacatcttttattgagcaagtatctgtaagccatttgcaaccactgatgggaggaacagagagcagcatttcagaaccaggttctccttcgaggaacagagaaaatgaaaccagcagacagaatttgtcagaatgtaaggtatggagaaaccctctaaatcttttcagaggagcagaatataggagatacacttgggtgactggtaaagagccacttacatactatgacatgaacctgtcagctcaggaccatcagacctttttcacctgtgacacagattttttacgtccttcagacacagttatgcagaaggcttggagggaaagaaatcctccagctcgaatcaaagcagcctatcaagctttagaattaaacaatgactgtgccactgcatatgttctactggctgaggaagaagcaacaactattgtagatgctgaaaggttatttaaacaggcactcaaggcaggagaaacaatttataggcagtcacagcagtgccagcaccaaagtcctcagcatgaagctcaactga

SEQ ID NO: 338289 - DNA, 1793 bp, Artificial Sequence
  derived and/or modified sequence
atatactgtactattctttagctgtagacaggatgaagtgtttagggcccaggtccccttaccatgtgattatatttcactcaagatctgagcagcaacctcagaacaagatataagtatttccattacatgattcagtatggtggttgatttttctgaagcaaaaggcagcaaatgtcccctttcctgttcagagatgacatgaaagacttgactgtatttttaaattcattgacacccaaattctatgtggcacttacagggacctcttcattgatatcaggactaatatttatatttgaatggtggtacttccataagcatggcacatcttttattgagcaagtatctgtaagccatttgcaaccactgatgggaggaacagagagcagcatttcagaaccaggttctccttcgaggaacagagaaaatgaaaccagcagacagaatttgtcagaatgtaaggtatggagaaaccctctaaatcttttcagaggagcagaatataggagatacacttgggtgactggtaaagagccacttacatactatgacatgaacctgtcagctcaggaccatcagacctttttcacctgtgacacagattttttacgtccttcagacacagttatgcagaaggcttggagggaaagaaatcctccagctcgaatcaaagcagcctatcaagctttagaattaaacaatgactgtgccactgcatatgttctactggctgaggaagaagcaacaactattgtagatgctgaaaggttatttaaacaggcactcaaggcaggagaaacaatttataggcagtcacagcagtgccagcaccaaagtcctcagcatgaagctcaactgaggagagataccaatgtactggtatatattaaaagaagattggcaatgtgtgcaagaaaattaggaagaataagagaagcagtaaaaataatgagagatttgatgaaagaatttcctcctcttaccatgttgaacatccatgaaaatctcttagaatcacttttagaattacaggcctatccagatgttcaggcagtcctagcaaaatatgatgatataagccttccaaagtcagcagcaatctgttacacagcagcactgttgaagacaaggactgtttcagaaaaattctctccagaaacagcctccagaagaggattaagcacagcagaaattaatgccgtggaagcaattcatagagctgtggaatttaatcctcatgttccaaaatatttattagagatgaaaagtttaattttacctccagaacacattctgaaacggggtgatagtgaagcaattgcctatgctttctttcatcttcagcactggaaacgaatagaaggtgctcttaatctgttacagtgtacatgggaaggcacttttagaatgattccatacccgttagagaaaggacatctattttacccttatcccagctgcacagagacggctgatagagagctattacctacctttcatcatgtttctgtttacccaaaaaaggagcttcctttgttcatccatttcacagcaggattttgctcttctacagcaatgatagccattctcactcaccagtttcctgaaatcatgggtatttttgctaaagctgtaagtatgatctcaaggacttgtgtagattatttgtaaaacacacaagaaaccatctctgatctgcctgtgctaacccagctgaacaatggaagatatttgttgtaaattaaaggaattgatttgtatatagttgctgccataaatacatcaaacat

SEQ ID NO: 338290 - DNA, 3501 bp, Artificial Sequence
  derived and/or modified sequence
atggacctcggtaccgcagagggcacccgttgcactgatcccccagctggaaagcccgcgatggcccctaaacgcaagggggggttaaagctgaacgctatctgcgccaagcttagtagacaagtcgtcgtcgagaaacgggctgacgccggttctcataccgaagggtccccgtcacagcctcgggaccaggaacggtcaggccctgagtcaggcgccgcccgagcccccaggagcgaggaggataagcgacgggctgtgatcgagaagtgggtgaatggtgagtactccgaagagccagcaccaaccccggtccttggcagaatcgctagagagggacttgagcttcctcctgagggggtctacatggtgcagccacagggatgctcggatgaggaggaccatgccgaggaaccatctaaggacgggggtgccctggaggaaaaggattcagacggcgcggctagcaaagaagacagtggaccgtccacccgtcaagcaagcggcgaggcctccagtcttagggactacgcagcctcaaccatgaccgagtttctggggatgtttgggtacgacgaccagaatactcgagacgaattagcgagaaagatttcctttgagaaactgcatgccgggagcacgcctgaggccgcgaccagctctatgctgcctacatccgaagacacactgtcaaagcgagctcgattcagcaagtacgaggagtacatccgaaaattgaaggccggtgaacagttgagttggccagcgcccagcactaaaactgaagagagagtcggaaaggaggtggtgggaacactgccagggcttaggcttccctcctctacagcgcacctggagactaaagctaccattttaccactgcctagccattcctcagtccagatgcaaaacctggtcgccagagcttccaagtatgactttttcattcagaaactaaaaactggggaaaacttgcggcctcagaacggttccacatacaaaaaaccatctaagtatgacctggaaaacgtgaaatatcttcacctatttaagcccggggaagggtcccctgacatgggcggtgccatcgcgttcaaaactggaaaagtggggcgcccctctaagtatgacgtccgcggcatccaaaagccgggacccgccaaggtacctccaaccccgagtctggcgcccgccccactggccagcgtgccatcagccccttccgcccctggccccggtcccgagccccccgcgagcttgtcgttcaatactcccgagtacttgaaatcaacattttctaagacagatagcatcacaaccgggaccgtgagtactgtgaagaacggactgcccaccgacaaacctgccgtgactgaagacgtgaatatctaccaaaagtacatcgcgcgattttccggcagccaacactgtggtcatattcactgcgcgtaccagtatcgcgaacactaccattgtctagatccggagtgtaattaccagcgctttacctcgaaacaggatgtgatccgacactacaacatgcacaagaagcgggataattccttacagcacgggttcatgcggttttctcctctggatgactgctctgtatactaccatggatgccatctcaatggtaaaagcacacactatcactgtatgcaagtaggctgcaataaggtttacactagcacaagtgacgtgatgacccacgagaactttcataaaaaaaatacccagttaattaatgacggctttcagcgcttcagagctacagaggactgcggcacagcggattgtcaattctatggccagaagactacacacttccactgcaggcgccctgggtgcacatttacattcaaaaacaagtgtgacatcgaaaagcacaagtcttatcacatcaaggatgatgcttacgctaaagatggttttaaaaaattttataagtatgaggagtgcaagtacgagggatgcgtatactctaaagccacaaaccattttcactgcatccgggccgggtgcggatttacttttacttctacttcgcagatgacttcccataaaaggaaacacgagcgccgtcacatacggagcagcggagccttgggactgcctccctcccttttgggcgccaaggacacagaacatgaggagtcatccaacgatgacctggtggactttagtgctctctcctctaagaacagttctttgtctgcgagcccgacctcccagcagtcttctgcctctttggccgcagcaactgccgcaacagaggccgggccaagcgcaactaagccaccaaatagtaaaataagcgggctgctgcctcagggcctaccaggttctattcctctcgctctggctctaagcaacagtggtctcccaaccccgactccgtatttccccatccttgccggtagggggtccactagcctccccgtaggcaccccctcgttacttggcgcagtgtcctccggctcagcagcttcggccactcccgacacaccgactctggttgctagtggcgccggggacagcgccccagtggccgcggcttccgtcccggctcctcctgcgtcaatcatggagcggatatccgcgtcaaagggactcatctctcccatgatggctcgactcgcagctgcagccctgaagccttctgcgacctttgacccggggtctgggcagcaagtgactcccgctcgcttccctcccgctcaggtgaagcctgaaccaggagagagcaccggggcaccgggcccccatgaggcctcccaagaccgcagcctcgatttgaccgtcaaagaacctagtaacgagagcaacggccatgctgtccccgccaattcaagtctgctgagttctctgatgaataagatgtctcaaggcaatccaggtctggggtcgttgctcaatatcaaagcggaagctgagggcagtccggccgccgagcctagccctttcctgggtaaagccgtgaaggcgttggtccaggaaaaattggcagagccttggaaggtctacctccgacgctttggtaccaaggatttttgcgacggccagtgcgacttcctccacaaagcacattttcattgcgtggtggaagagtgtggagccctgttctctaccctcgacggagctatcaagcacgccaattttcactttagaaccgagggcggagccgctaagggaaacaccgaagcagccttcccagcatcggcagctgagactaaaccaccaatggcaccctctagtcctcctgtcccgcccgtcacgaccgcaaccgtgtcctcattagagggaccagccccaagccccgcatcggtgccatctacacccacactgctggcatggaagcagctggcttccacaatcccacaaatgcctcagatccccgcctcggtgcctcaccttcccgcatctcctctggccacaactagtctggagaacgccaaacctcaagtcaagcccgggttcctacagtttcaagaaaagtag

SEQ ID NO: 338291 - DNA, 3501 bp, Artificial Sequence
  derived and/or modified sequence
atggacctgggcacagctgagggcacccgctgcacagaccccccagctgggaagccagccatggcccccaagaggaagggcggcctgaagctgaatgccatctgtgccaagctgagccggcaggtggtggtggagaagagagcagatgctggcagccacacagagggcagccccagccagccccgggaccaggagaggagcggccctgagagcggggccgcccgggcccccaggtctgaggaggacaagaggcgggccgtcatcgagaagtgggtgaatggagagtacagcgaggagcccgcccccacccctgtgctgggcagaattgcccgggagggcctggagctgcccccagagggcgtgtacatggtgcagccccagggctgcagtgatgaagaagatcatgctgaggagcccagcaaggatggaggagccctggaggagaaggacagtgatggagctgccagcaaggaggacagcggccccagcacccggcaggccagcggggaggccagcagcctgcgggactatgctgccagcaccatgacagagttcctgggcatgtttggctatgatgaccagaacaccagagatgagctggccaggaagatcagctttgagaagctgcatgctggcagcaccccagaggccgccaccagctccatgctgcccaccagcgaggacaccctgagcaagagggcccgcttcagcaaatatgaggagtacatcaggaagctgaaggccggggagcagctgtcctggccagcccccagcaccaagacagaggagcgggtgggcaaggaggtggtgggcaccctgcccggcctgcggctgcccagcagcacagcccacctggagaccaaggccaccatcctgcccctgcccagccacagctctgtgcagatgcagaacctggtggcccgggccagcaaatatgacttcttcatccagaagctgaagacaggagagaacctgcggccccagaatggcagcacctacaagaagcccagcaaatatgacctggagaatgtgaagtacctgcacctgttcaagccaggagagggcagcccagacatgggcggggccatcgccttcaagacaggcaaggtgggccggcccagcaaatatgatgtgcggggcatccagaagccaggccctgccaaggtgccccccacccccagcctggccccagcccccctggcctctgtgcccagcgcccccagcgcccctggccctggccctgagcccccagccagcctgtccttcaacaccccagagtacctgaagagcaccttcagcaagacagacagcatcaccaccggcaccgtgtccacagtgaagaatggcctgcccacagacaagccagctgtgacagaagatgtgaacatctaccagaagtacatcgcccgcttcagcggcagccagcactgcggccacatccactgtgcctaccagtaccgggagcactaccactgcctggaccctgagtgcaactaccagcgcttcaccagcaagcaggatgtgatccgccactacaacatgcacaagaagagggacaacagcctgcagcacggcttcatgaggttcagccccctggatgactgcagcgtgtactaccacggctgccacctgaatggcaagagcacccactaccactgcatgcaggtgggctgcaacaaggtgtacaccagcaccagtgatgtgatgacccatgagaacttccacaagaagaacacccagctgatcaatgatggcttccagcgcttccgggccacagaggactgtggcacagctgactgccagttctacggccagaagaccacccacttccactgcagaagacctggctgcaccttcaccttcaagaacaagtgtgacatcgagaagcacaagagctaccacatcaaggatgatgcctatgccaaggatggcttcaagaagttctacaagtatgaggagtgcaagtatgagggctgtgtgtacagcaaggccaccaaccacttccactgcatccgggccggctgcggcttcaccttcaccagcaccagccagatgaccagccacaagaggaagcatgagcggcggcacatccgcagcagcggggccctgggcctgccccccagcctgctgggcgccaaggacacagaacatgaggagagcagcaatgatgacctggtggacttcagcgccctgagcagcaagaacagcagcctgagcgccagccccaccagccagcagagcagcgccagcctggccgccgccacagctgccacagaggccggccccagcgccaccaagccacccaacagcaagatcagcggcctgctgccccagggcctgcccggcagcatccccctggccctggccctgagcaacagcggcctgcccacccccaccccctacttccccatcctggccggccggggcagcaccagcctgcctgtgggcacccccagcctgctgggcgctgtgagcagcggcagcgctgccagcgccaccccagacacccccaccctggtggccagcggggccggggacagcgcccctgtggccgccgcctctgtgcctgcccccccagccagcatcatggagcgcatcagcgccagcaagggcctcatcagccccatgatggcccggctggccgctgctgccctgaagcccagcgccacctttgatcctggcagcggccagcaggtgaccccagcccgcttccccccagcccaggtgaagccagagcctggagagagcactggagcccctggcccccatgaggccagccaggacaggagcctggacctgactgtgaaggagcccagcaatgaaagcaatggacatgctgtgcctgccaacagcagcctgctgagcagcctgatgaacaagatgagccagggcaaccctggcctgggcagcctgctgaacatcaaggccgaggccgagggcagccctgctgctgagcccagccccttcctgggcaaggctgtgaaggccctggtgcaggagaagctggccgagccctggaaggtgtacctgcggagatttggcaccaaggacttctgtgatggccagtgtgacttcctgcacaaggcccacttccactgtgtggtggaggagtgtggggccctcttcagcaccctggatggagccatcaagcacgccaacttccacttcagaacagagggcggggccgccaagggcaacacagaagctgccttccctgccagcgctgctgagaccaagccacccatggcccccagcagcccccctgtgccccctgtgaccacagccaccgtgagcagcctggagggccctgcccccagccctgcctctgtgcccagcacccccaccctgctggcctggaagcagctggccagcaccatcccccagatgccccagatcccagcctctgtgccccacctgcctgccagccccctggccaccaccagcctggagaatgccaagccccaggtgaagccaggcttcctgcagttccaggagaagtag

SEQ ID NO: 338292 - DNA, 3501 bp, Artificial Sequence
  derived and/or modified sequence
atggacctgggcaccgccgagggcacccggtgcaccgacccccccgccgggaaaccagctatggctcctaagcgaaagggcggactcaaactgaacgccatctgcgcaaagctttctagacaagtggtagtggaaaaacgtgccgatgccggctcgcataccgagggcagccctagtcaaccaagagatcaggagaggagtgggcccgagtctggcgctgcccgggcgccacgaagcgaggaggataagcgacgcgccgtgattgagaagtgggtgaacggtgaatactctgaagaacccgccccgactcctgtgctgggaagaatagctagagaagggcttgaactgccacctgagggtgtctacatggtgcagcctcagggttgcagcgatgaggaagaccatgccgaggaaccaagcaaagacggtggcgccttggaggaaaaagactccgacggggccgctagtaaggaggatagtggaccatccacccggcaggcatcaggggaggccagttctctacgggattacgcggcatcgactatgactgagtttttggggatgttcggctacgacgatcagaatacacgagatgagcttgctagaaagatcagcttcgagaagctgcacgcaggctcaacccctgaagccgcaacttcaagcatgctgcccacatctgaggacaccctaagtaaacgggcccgttttagcaaatacgaggaatatattcgtaagctgaaggccggagagcaattatcttggccggctccctcaacaaagaccgaggagagagtgggtaaagaggtggtgggaacactacccgggctgcggctgcctagctctactgcgcacttggagacgaaggctacaatcctgccgttgccctcacactcaagcgttcagatgcagaatttggtagcgcgtgccagcaagtatgattttttcattcagaaactgaagacgggcgaaaatctaaggcctcagaacggcagtacgtataaaaagccctctaaatatgatttggaaaacgttaaatacttacacctgttcaaaccgggtgaaggcagtcccgatatggggggagccattgcctttaaaaccggcaaagtcgggaggccgtcaaagtacgacgtccgcgggatccaaaagccgggacccgccaaggtgcctccgaccccttctcttgctcctgccccattagcaagcgtgccctccgcacctagtgcgcctgggcctgggccagaaccgcccgcctccttgagtttcaacactcctgagtatttgaaatcaacattttcgaagacggattccatcacaaccggtaccgtgtccacagtcaagaacgggcttcccacggacaaaccggcagtgacagaggatgtgaatatctatcagaagtacatcgcccgattctctggctctcagcattgcggacatatccattgcgcctatcaatacagagaacattaccattgtctcgatcccgagtgtaactatcaaagatttacctcgaagcaggacgtcattaggcattacaatatgcataaaaagagggataactcattacaacatggattcatgagattctcaccgcttgatgattgcagtgtgtactaccacggttgccatctgaacggcaagtctactcactatcattgcatgcaggtcggctgcaacaaggtgtatacgtcaaccagcgacgtcatgacccatgagaacttccataagaagaatacacagctgatcaatgacggcttccaaagattccgggccaccgaggactgcggcaccgccgactgtcagttctacggacagaaaacaacacacttccactgccgccggccaggatgtacatttactttcaagaataagtgtgatattgaaaagcacaaaagttatcatattaaggacgacgcatatgcgaaagacggtttcaaaaaattctacaagtatgaggaatgtaaatacgaaggatgtgtgtacagcaaagctaccaatcatttccattgtattcgagctggctgtggttttacattcactagcacttctcagatgacgtctcacaaacgcaagcatgagaggcgccacatcagatcctcaggagctcttgggcttccgccttcgctgctaggtgccaaagatactgagcacgaagaatcttctaacgacgatctcgttgacttttccgctctatcctcaaagaactcctctctctctgctagcccaacctctcagcagagctccgccagtttggcagccgcaaccgcagccaccgaggccggtccgtcagcgactaagccacctaattctaagatcagcggactgttgccacaaggcctgccggggtctatccctttagcccttgccctcagcaattccgggttgccaacccctacgccttatttcccgatcctggctgggcggggatccacgtctctgccagtcggtacgcctagccttctgggcgctgtgtcatcaggatctgccgcctctgctacacctgacaccccaactctggtagcaagtggagctggagattcagccccagtggccgcagcgtccgtacccgcgcctcctgcctccatcatggaacgtattagtgcgagcaagggattaatctcccccatgatggcacgcttagcagctgcagcactgaagccatcagcaacctttgacccgggatcagggcagcaggttacccctgcccggttcccacctgctcaagttaagccagaaccaggagagtccactggagcgcctggtccacacgaggcttctcaggatcggtcgcttgatcttactgtcaaggagcccagcaacgagagcaacggtcacgctgtgcccgctaattcaagcctgctgtcatcccttatgaataaaatgagtcagggcaaccctggactcggctcactgctgaatatcaaagccgaggccgagggctcacctgccgcagaacctagcccattcctgggcaaggcagtcaaggccctcgttcaggaaaagcttgcggagccatggaaggtttacctgagacgattcggaaccaaggatttttgtgacggacagtgtgacttcctgcataaggcacactttcattgtgtggtagaggagtgtggcgcactgttctcaaccctggacggtgcaattaagcacgcaaactttcacttcagaactgaagggggcgccgcgaagggaaatactgaagcagcattccccgcctctgccgccgaaactaaaccacccatggcgccatcttctcccccagtgccccccgtgacaaccgctactgtgtcctcactggagggccccgctccaagtccagcctccgttcctagtactccaaccttacttgcatggaagcagctggctagcacaattccccagatgccccagatccccgcctctgtgccgcacctgcccgcaagcccgctcgctaccacatccttggaaaatgcgaagccccaggtcaagcctggttttctccaattccaggagaaatag

SEQ ID NO: 338293 - DNA, 3501 bp, Artificial Sequence
  derived and/or modified sequence
atggacctaggtacggccgagggcacgcgttgcactgatccccctgccggaaagcctgcaatggccccaaagcgaaagggtggtctgaaactgaacgcaatctgtgccaagctgagtcggcaggttgtggtggagaaaagggcggacgctggttctcatacagagggcagccccagccagccccgtgaccaggagaggtccggcccagaatctggggcagccagggccccacgctctgaagaagacaaaagaagggcagttatcgagaagtgggtgaacggagagtacagtgaagagccagctcccacccctgtgctggggaggattgctcgtgagggacttgagctgccccctgaaggggtgtatatggttcagccacaagggtgcagcgatgaggaggaccacgcagaagagccgagcaaggatgggggtgcactggaggagaaagatagcgacggtgcagcctcgaaagaggacagcggcccatcaacccgacaggctagtggcgaggcttcctctctgcgggattatgccgctagcacaatgaccgaattcttgggcatgttcgggtacgacgatcagaatacccgggacgagttggctcggaagattagtttcgagaagttgcacgcgggatccaccccagaagccgctacttcgagcatgctgcctacctcagaagatactctctccaaacgggctcggttcagtaaatatgaggagtatattagaaagctgaaggccggagagcagttgtcatggcctgcaccatctactaagaccgaggaaagggttggaaaagaagtcgttggcacccttcccggtctccgccttccctcctcaactgcgcatcttgagaccaaggccaccatcttacccctacccagccatagctcagtgcagatgcagaatctggtcgccagggcctcaaaatacgatttcttcattcagaagctgaaaacaggtgagaatctacgccctcaaaatggctctacttacaagaagccaagcaaatacgacctggaaaatgttaagtacttacacctcttcaagccgggagagggatccccagacatgggcggtgcgattgccttcaaaaccggaaaggttgggaggccatcgaagtacgatgtacggggaatccagaagccaggacccgcaaaagttccacccactccgtcgttggcacctgccccattagcgagtgtgccatccgcgcctagcgcaccaggtcccggaccagagcctcctgcatctttgtccttcaatacccctgagtatctaaagtctaccttctccaaaacggactcgatcacaaccggaacagtctccaccgttaaaaacgggctcccgacagataagcctgccgtgactgaagatgtgaacatataccagaagtacatcgccagattctcaggctcgcagcattgcggacatattcactgtgcgtaccagtatcgtgagcactaccattgcttggacccagaatgtaattaccagagatttacctccaagcaagacgttattcgccattacaatatgcataagaaacgcgataattccctgcagcatggattcatgaggttcagcccgctcgatgattgttccgtgtactaccatggctgtcatttgaacggcaagagcactcactatcactgtatgcaggtgggctgcaataaggtgtatactagcactagcgacgtgatgacgcacgagaacttccacaagaaaaacacacagttgatcaacgatggctttcaaagatttagagccactgaagactgtggaacagccgactgccagttctacggccagaaaaccactcacttccattgcagacgacctggatgtacatttacatttaaaaataagtgtgacatagaaaagcacaagtcctatcatattaaggacgacgcatatgcaaaagatggcttcaaaaaattctacaagtacgaagagtgtaaatacgagggatgcgtgtattcaaaagctactaaccacttccactgcatacgtgcagggtgcggattcactttcacctctacatcacagatgacatcacataaaagaaaacacgagcggaggcatatcagatccagtggagctctcgggcttcccccatctttgttgggagctaaagatacagaacatgaggaatccagcaatgatgatttagttgattttagcgctctttccagcaaaaatagcagcctttccgcctcccctacatcccaacagtccagtgccagcttggcggctgccacagccgcaacagaagccggtccttcggcaactaaaccgcctaactccaagatctcaggcctacttccccagggtctacctggcagcatcccactggctttggcactgagcaattctggcctcccaaccccgactccttacttcccgatcctagccggtagagggtccacttcactgccggtagggacaccttccttacttggggcagttagttcaggcagcgccgcatcagccactcccgacactccgacccttgtcgcctcaggggcaggcgattctgcaccggtggcagctgcatctgtgcccgcacctcccgcttccatcatggagaggatctctgcttctaaaggcttaattagtccaatgatggcccgacttgcagcggcagctctgaagccctccgctaccttcgaccccggtagcggccaacaggtcacccccgctcgattccctcccgcacaggtcaagccagaaccaggagaatcaaccggtgcacccggaccccatgaggcatctcaggatcgatcattggacctgaccgtgaaagagccaagcaacgaatctaatggccatgccgtgccggcaaactcctcactgctcagcagtctaatgaacaagatgagccaaggcaatccgggacttggaagtcttctgaacataaaagccgaagccgagggctctcctgccgctgaaccgtcccccttcctgggaaaggctgtgaaggcactagtgcaggagaagcttgccgagccttggaaggtttacctccggaggtttggcacaaaggacttctgtgatggccaatgcgatttcctgcacaaagctcacttccattgtgtggttgaagaatgcggagccctgttctcaactctggatggcgcaatcaagcacgccaacttccactttaggacagaaggtggcgctgccaaaggtaacaccgaagccgctttccccgcatccgccgcagaaacaaaacctcccatggccccttctagtccccctgttcctcctgtcacaacggctacagtctcctctctcgaaggcccagccccatctcctgcatccgtgcccagtaccccaaccttgctggcatggaaacaactcgcatcgactatcccacaaatgccgcagatccccgctagtgtccctcacctcccagcttccccactggctactacttccctggaaaatgcaaaacctcaggtaaaaccgggttttctacagttccaagaaaaatag

SEQ ID NO: 338294 - DNA, 4405 bp, Artificial Sequence
  derived and/or modified sequence
gcatgcgcgcccgcggcgctccatcccaaacacacacacatttttcccccggacttggaaagtcacccaaagccgccccaagtgcaggcaaacagaccttgctgactgaaggcaaagactcctccatcccacctgccctcccagctgccacggccatcgacccctcctttacaaggggctcctgcaactccccagcagcacgtgttggaatggacttcggaccctggcctcttgggatgcaaaggatgaagtgacacccccagctacatccgaggaggttctaggacctgctacgagagtttgggaccaaggagaagagaatggatcttggaacagctgagggcacccggtgcacggacccgcctgcaggcaagcccgccatggcgcccaaacgcaagggtggcctgaagctgaacgccatctgcgccaagctgagccgccaggtggtggtggagaagcgagctgacgccggctcccacacggagggcagcccatcgcagccccgggaccaagagcgcagtggccctgagtctggggcagcccgggccccccgcagcgaggaagacaagagacgggcagtgatcgagaagtgggtgaacggggagtacagcgaggagccggcacccacacccgtgttggggcggattgcccgcgagggcctggagctgcctcccgagggtgtctacatggtgcagccccaggggtgcagcgatgaggaagaccacgcggaggagccctccaaggacggcggtgccctggaggagaaggattcggacggggcagcctccaaggaggacagcggccccagcaccaggcaggcttcaggagaggcctcctcgctgcgggactacgcggcctccaccatgaccgagttcctcggcatgtttggctatgatgaccagaacacgcgggacgagctggccaggaagatcagctttgagaagctgcacgcgggctccaccccggaggcagccacctcctccatgctgcccacctccgaggataccctcagcaagcgggcgcggttctctaagtatgaggagtacatccgcaagctcaaggctggcgagcagctctcctggccggcccccagcaccaagaccgaggagcgggtgggcaaggaggtggtgggcaccctgcccggcctgcggctgcccagcagcacggcccacctggagaccaaggccaccatcctgcccctgccgtcgcacagcagtgtccagatgcagaacctggtagcccgggcctccaagtacgacttcttcatccaaaaactgaagaccggcgagaatctgcggccccagaacgggagcacctacaagaagccatccaagtacgacctggagaatgtcaagtacctgcacctcttcaaacccggggagggcagccccgacatgggcggggccatcgccttcaagacaggcaaggtggggcgcccttccaagtacgacgtccggggcatccagaagccaggccccgccaaggttccgcccacccccagcctggctcccgcacccctcgccagcgtgcccagtgcccccagcgcccccgggccagggccagagcctcctgcctccctgtccttcaacactcccgagtacctgaagtcaaccttctccaaaacagactccatcaccacggggaccgtctccactgtcaagaacggactgcccacagataaaccagccgtcactgaagatgtaaacatttaccagaaatatattgccaggttctcgggcagccagcactgtggccacatccactgtgcctaccagtaccgcgagcactaccactgccttgaccctgagtgtaactaccagaggttcacgagtaagcaggacgtgatccgccactacaacatgcacaagaagcgcgacaactccctgcagcacggcttcatgcgtttcagcccgctggacgactgcagcgtctactaccacggctgccacctcaatgggaagagcacccactatcactgcatgcaggtgggctgtaacaaggtgtacacgagcacgtctgacgtgatgacccacgagaacttccacaagaagaatacccagctcattaacgacggcttccagcgcttccgagccaccgaagactgtggcacagccgactgccagttctacggacagaagaccacgcacttccactgcaggcgccccggctgcacattcactttcaagaacaagtgtgacatcgagaagcacaagagctaccacatcaaggacgatgcctacgccaaggacggcttcaagaagttctacaagtacgaggagtgcaagtacgagggctgcgtgtacagcaaggctaccaaccacttccactgcatccgcgccggctgcggcttcaccttcacctccaccagccagatgacctctcacaagcgcaagcatgagcgccggcacatccgctcctcgggcgcgctggggctgccgccctcgctgctgggcgccaaggacacggagcacgaggagtccagcaacgacgaccttgttgacttctccgccctgagcagcaagaactccagcctgagcgcctcccctaccagccagcagtcctctgcgtccctggctgccgccactgccgccaccgaggctgggcccagtgccaccaaacctcccaacagcaagatctcggggctgctgccccagggcctgcctggctcaatccccctggccctggccctctccaactcgggcctgcccacccccacgccctacttccccatactggctggccgtgggagcacctccctgcctgtgggcacccccagcctcctgggtgccgtgtcgtctgggtcagcagcctcagccacccctgacacacccacgctggtcgcctcgggagctggagactcagcccccgtggctgccgcctctgtcccggcaccacccgcctccatcatggagaggatctctgcaagcaagggcctcatctcgcccatgatggccaggctggctgcagctgccctcaagccctctgccacctttgacccaggaagcgggcagcaggtcaccccagccaggttccccccggcccaagtgaagccggaacccggtgagagcaccggcgccccaggcccccacgaagcctcccaggaccgcagtctagacctgactgtgaaggagcccagcaacgaatcaaatggccacgcagtcccggcaaattcatctcttttatcctcgcttatgaataagatgtctcagggcaaccctggcctgggcagcctgctgaacatcaaggcggaagcggaggggagccccgctgcggagccctcgcccttcctaggcaaggccgtgaaggcgctggttcaggagaagttggcagagccctggaaggtgtacctgcgcaggtttggtacaaaggacttctgtgacggccagtgtgacttcctccacaaggcccacttccactgcgtggtggaggaatgcggcgcgctcttcagcaccttggacggggccatcaagcacgcaaacttccacttccggacagagggaggagcagcaaaaggaaacacagaggctgcctttccggcctcggccgccgagaccaaacctcccatggccccctcgtcccctccggtccctcctgtcaccacggccacggtgtcctctctggaggggcccgctcccagcccggcctccgtgccctccacccccaccctgctcgcctggaagcagctggcttccaccataccccagatgcctcagatcccagcgtcagtgcctcacctgcccgcctcgcccttggcaacgacttctctagagaacgccaagccccaggtcaaacccggattcctccagttccaggagaagtgagtccctcgatgagccgggagtcccgcgttcccctcgcgtctcgggagtaggtgctagcaagggcgctaggaggccctgttcctcactgcggatggtgctgctgtccccagcctctctggggcatggccatcgggtgatgtccttctagccaaagatgctgctgctcctacctcactgcctgtcccagagcaggccagcccgcgtgggccgatggtggcggcagtggctactgctcctgcagggcatgtggtgatcctgccagggccaggtggggtggactgggcgtggtggtcctcagaggacaactcccagcctgacaaggagggctgcgtctccctccgagcctccgtattggcctcctctgtggctcacacccatggctgaatctctgcagggcacgtgaagtcacgggtaggggccaggcccctccaggccgtcactggcctgcacagtggtctgagctcttgggtggaagggaccctcctcactggatggtggtggctccttgcagggagaacggtgactttgtattgtcatgtgtgcggcttcctgttctcaataaaagtaataaattggattattta

SEQ ID NO: 338295 - DNA, 3501 bp, Artificial Sequence
  derived and/or modified sequence
atggacctgggcaccgccgagggcaccagatgcaccgacccccccgccggcaagcccgccatggcccccaagagaaagggcggcctgaagctgaacgccatctgcgccaagctgagcagacaggtggtggtggagaagagagccgacgccggcagccacaccgagggcagccccagccagcccagagaccaggagagaagcggccccgagagcggcgccgccagagcccccagaagcgaggaggacaagagaagagccgtgatcgagaagtgggtgaacggcgagtacagcgaggagcccgcccccacccccgtgctgggcagaatcgccagagagggcctggagctgccccccgagggcgtgtacatggtgcagccccagggctgcagcgacgaggaggaccacgccgaggagcccagcaaggacggcggcgccctggaggagaaggacagcgacggcgccgccagcaaggaggacagcggccccagcaccagacaggccagcggcgaggccagcagcctgagagactacgccgccagcaccatgaccgagttcctgggcatgttcggctacgacgaccagaacaccagagacgagctggccagaaagatcagcttcgagaagctgcacgccggcagcacccccgaggccgccaccagcagcatgctgcccaccagcgaggacaccctgagcaagagagccagattcagcaagtacgaggagtacatcagaaagctgaaggccggcgagcagctgagctggcccgcccccagcaccaagaccgaggagagagtgggcaaggaggtggtgggcaccctgcccggcctgagactgcccagcagcaccgcccacctggagaccaaggccaccatcctgcccctgcccagccacagcagcgtgcagatgcagaacctggtggccagagccagcaagtacgacttcttcatccagaagctgaagaccggcgagaacctgagaccccagaacggcagcacctacaagaagcccagcaagtacgacctggagaacgtgaagtacctgcacctgttcaagcccggcgagggcagccccgacatgggcggcgccatcgccttcaagaccggcaaggtgggcagacccagcaagtacgacgtgagaggcatccagaagcccggccccgccaaggtgccccccacccccagcctggcccccgcccccctggccagcgtgcccagcgcccccagcgcccccggccccggccccgagccccccgccagcctgagcttcaacacccccgagtacctgaagagcaccttcagcaagaccgacagcatcaccaccggcaccgtgagcaccgtgaagaacggcctgcccaccgacaagcccgccgtgaccgaggacgtgaacatctaccagaagtacatcgccagattcagcggcagccagcactgcggccacatccactgcgcctaccagtacagagagcactaccactgcctggaccccgagtgcaactaccagagattcaccagcaagcaggacgtgatcagacactacaacatgcacaagaagagagacaacagcctgcagcacggcttcatgagattcagccccctggacgactgcagcgtgtactaccacggctgccacctgaacggcaagagcacccactaccactgcatgcaggtgggctgcaacaaggtgtacaccagcaccagcgacgtgatgacccacgagaacttccacaagaagaacacccagctgatcaacgacggcttccagagattcagagccaccgaggactgcggcaccgccgactgccagttctacggccagaagaccacccacttccactgcagaagacccggctgcaccttcaccttcaagaacaagtgcgacatcgagaagcacaagagctaccacatcaaggacgacgcctacgccaaggacggcttcaagaagttctacaagtacgaggagtgcaagtacgagggctgcgtgtacagcaaggccaccaaccacttccactgcatcagagccggctgcggcttcaccttcaccagcaccagccagatgaccagccacaagagaaagcacgagagaagacacatcagaagcagcggcgccctgggcctgccccccagcctgctgggcgccaaggacaccgagcacgaggagagcagcaacgacgacctggtggacttcagcgccctgagcagcaagaacagcagcctgagcgccagccccaccagccagcagagcagcgccagcctggccgccgccaccgccgccaccgaggccggccccagcgccaccaagccccccaacagcaagatcagcggcctgctgccccagggcctgcccggcagcatccccctggccctggccctgagcaacagcggcctgcccacccccaccccctacttccccatcctggccggcagaggcagcaccagcctgcccgtgggcacccccagcctgctgggcgccgtgagcagcggcagcgccgccagcgccacccccgacacccccaccctggtggccagcggcgccggcgacagcgcccccgtggccgccgccagcgtgcccgccccccccgccagcatcatggagagaatcagcgccagcaagggcctgatcagccccatgatggccagactggccgccgccgccctgaagcccagcgccaccttcgaccccggcagcggccagcaggtgacccccgccagattcccccccgcccaggtgaagcccgagcccggcgagagcaccggcgcccccggcccccacgaggccagccaggacagaagcctggacctgaccgtgaaggagcccagcaacgagagcaacggccacgccgtgcccgccaacagcagcctgctgagcagcctgatgaacaagatgagccagggcaaccccggcctgggcagcctgctgaacatcaaggccgaggccgagggcagccccgccgccgagcccagccccttcctgggcaaggccgtgaaggccctggtgcaggagaagctggccgagccctggaaggtgtacctgagaagattcggcaccaaggacttctgcgacggccagtgcgacttcctgcacaaggcccacttccactgcgtggtggaggagtgcggcgccctgttcagcaccctggacggcgccatcaagcacgccaacttccacttcagaaccgagggcggcgccgccaagggcaacaccgaggccgccttccccgccagcgccgccgagaccaagccccccatggcccccagcagcccccccgtgccccccgtgaccaccgccaccgtgagcagcctggagggccccgcccccagccccgccagcgtgcccagcacccccaccctgctggcctggaagcagctggccagcaccatcccccagatgccccagatccccgccagcgtgccccacctgcccgccagccccctggccaccaccagcctggagaacgccaagccccaggtgaagcccggcttcctgcagttccaggagaagtag

SEQ ID NO: 338296 - protein, 209 aa, Artificial Sequence
  derived and/or modified sequence
MRVAGISLAYSSVQDVQKFARLSAQLTHASSLGYNGAILQALAVHLALQGESSSEHFLKQLLGHMEDLEGDAQSVLDARELGMEERPYSSRLKKIGELLDQASVTREEVVSELGNGIAAFESVPTAIYCFLRCMEPDPEIPSAFNSLQRTLIYSISLGGDTDTIATMAGAIAGAYYGMDQVPESWQQSCEGYEETDILAQSLHRVFQKS

SEQ ID NO: 338297 - DNA, 630 bp, Artificial Sequence
  derived and/or modified sequence
atgagggttgccggtatatcgcttgcgtactctagtgtgcaagatgtgcagaagttcgcacgacttagtgcccagctaacccacgcctctagcctcggttataatggagcgattttgcaggcattggcagtccatctcgcccttcagggagaaagctcttcagagcacttccttaaacaactgctgggccatatggaggaccttgagggcgacgcacaatcagtgttggatgcccgcgagctgggcatggaggaacgaccctatagtagtcggctgaaaaagattggagagttgttagaccaggcgtctgttacaagggaggaagtagtcagcgagctggggaacggcatcgctgcctttgagagcgtacctaccgccatttattgttttcttaggtgcatggaacccgatcccgagattccctcagcctttaattccttacagaggactctgatttattccatctctctaggaggggacacggacacaatagccaccatggctggagccattgccggcgcctattatgggatggatcaggtccctgaatcatggcaacagtcctgcgagggctatgaagagaccgacattcttgctcagtcacttcaccgcgtctttcagaagagctag

SEQ ID NO: 338298 - DNA, 630 bp, Artificial Sequence
  derived and/or modified sequence
atgagggtggccggcatcagcctggcctacagctctgtgcaggatgtgcagaagtttgcccggctgagcgcccagctgacccacgccagcagcctgggctacaatggagccatcctgcaggccctggccgtgcacctggccctgcagggcgagagcagcagcgagcacttcctgaagcagctgctgggccacatggaggacctggagggagatgcccagagcgtgctggatgcccgggagctgggcatggaggagcggccctacagcagccggctgaagaagattggagagctgctggaccaggcctctgtgacccgggaggaggtggtgtctgagctgggcaatggaattgctgcctttgagagcgtgcccacagccatctactgcttcctgcgctgcatggagccagaccctgagatccccagcgccttcaacagcctgcagaggaccctcatctacagcatcagcctgggcggggacacagacaccatcgccaccatggccggggccatcgccggggcctactacggcatggaccaggtgcctgagagctggcagcagagctgtgagggctatgaggagacagacatcctggcccagagcctgcacagggtcttccagaagagctag

SEQ ID NO: 338299 - DNA, 630 bp, Artificial Sequence
  derived and/or modified sequence
atgcgggtggccggcatcagcctggcctacagcagcgtgcaggacgtgcagaagtttgcccgcctaagtgcccagctgacccatgcctcttcccttggctacaacggcgccatcttacaagcccttgccgtacacctggccctccagggggagtccagtagcgagcacttcttgaaacagctgctaggccatatggaggatttagagggtgatgcgcagtctgtgctggacgctcgggagctggggatggaggaacgaccatactcatctagacttaagaaaattggggagctcctcgatcaagcctccgtgactcgcgaagaggttgtgtcagagctcgggaatgggattgccgctttcgagtctgtgccgacagctatctattgttttttgcgatgcatggagcccgacccagaaattcccagcgcctttaattccctacagcggacgcttatatactctatcagtctaggtggtgatactgatactattgccacaatggctggcgctatcgccggtgcatattacggcatggatcaagtgcctgagagctggcagcagtcttgtgaggggtacgaagagacagacattctggcccaatcactccacagggtctttcaaaagtcttag

SEQ ID NO: 338300 - DNA, 630 bp, Artificial Sequence
  derived and/or modified sequence
atgagggttgccggaatttctcttgcctatagtagcgtccaggacgttcaaaagttcgctcggctatcagcccagctcacccacgccagctcactcggatacaatggagcaatactgcaagctcttgcagttcacctagccctgcagggggagtctagctccgagcatttcttgaagcagcttttgggacacatggaagatttggagggcgacgcacagagtgttttagacgccagagagcttggtatggaggagcggccttactctagccgactaaagaaaataggggaactgttggatcaggccagcgtcaccagagaagaagttgtatccgagcttggaaacggcattgcagccttcgaaagcgtaccaactgccatttattgcttcctgaggtgtatggagcctgaccctgagatcccttcggcgtttaactcccttcagcgcaccctgatctactccattagcctcggcggtgacactgacactatagccaccatggccggtgcaatcgctggcgcatattacggcatggatcaggttccagaaagctggcagcagtcctgcgaaggctacgaggaaacggacatcctggctcagtctttgcacagagtgtttcagaagtcttag

SEQ ID NO: 338301 - DNA, 630 bp, Artificial Sequence
  derived and/or modified sequence
atgagagtggccggcatcagcctggcctacagcagcgtgcaggacgtgcagaagttcgccagactgagcgcccagctgacccacgccagcagcctgggctacaacggcgccatcctgcaggccctggccgtgcacctggccctgcagggcgagagcagcagcgagcacttcctgaagcagctgctgggccacatggaggacctggagggcgacgcccagagcgtgctggacgccagagagctgggcatggaggagagaccctacagcagcagactgaagaagatcggcgagctgctggaccaggccagcgtgaccagagaggaggtggtgagcgagctgggcaacggcatcgccgccttcgagagcgtgcccaccgccatctactgcttcctgagatgcatggagcccgaccccgagatccccagcgccttcaacagcctgcagagaaccctgatctacagcatcagcctgggcggcgacaccgacaccatcgccaccatggccggcgccatcgccggcgcctactacggcatggaccaggtgcccgagagctggcagcagagctgcgagggctacgaggagaccgacatcctggcccagagcctgcacagagtgttccagaagagctag

SEQ ID NO: 338302 - protein, 62 aa, Artificial Sequence
  derived and/or modified sequence
MPEIRVTPLGACPVLSWNLVLPPGRGSRAPSSTDTRTGFHVLPHGVSASSEGAPRPGVDTVL

SEQ ID NO: 338303 - protein, 606 aa, Artificial Sequence
  derived and/or modified sequence
MCGAGFGHFEWLAGGGAGQDVGRSCILVSIAGKNVMLDCGMHMGFNDDRRFPDFSYITQNGRLTDFLDCVIISHFHLDHCGALPYFSEMVGYDGPIYMTHPTQAICPILLEDYRKIAVDKKGEANFFTSQMIKDCMKKVVAVHLHQTVQVDDELEIKAYYAGHVLGAAMFQIKVGSESVVYTGDYNMTPDRHLGAAWIDKCRPNLLITESTYATTIRDSKRCRERDFLKKVHETVERGGKVLIPVFALGRAQELCILLETFWERMNLKVPIYFSTGLTEKANHYYKLFIPWTNQKIRKTFVQRNMFEFKHIKAFDRAFADNPGPMVVFATPGMLHAGQSLQIFRKWAGNEKNMVIMPGYCVQGTVGHKILSGQRKLEMEGRQVLEVKMQVEYMSFSAHADAKGIMQLVGQAEPESVLLVHGEAKKMEFLKQKIEQELRVNCYMPANGETVTLPTSPSIPVGISLGLLKREMAQGLLPEAKKPRLLHGTLIMKDSNFRLVSSEQALKELGLAEHQLRFTCRVHLHDTRKEQETALRVYSHLKSVLKDHCVQHLPDGSVTVESVLLQAAAPSEDPGTKVLLVSWTYQDEELGSFLTSLLKKGLPQAPS

SEQ ID NO: 338304 - DNA, 2571 bp, Artificial Sequence
  derived and/or modified sequence
accgcaggcgggcctcgcgggtccgggagcgcggcggagacgatgcctgagatcagagtcacgcccttgggtgcctgccctgtgctgtcctggaacctggtccttccaccgggcagggggtcgagggcaccttccagcacagacaccaggacgggattccatgtcctcccccatggcgtgagcgcttcctcggagggtgccccccgccccggtgtggacactgtgctgtgaacacccctggcctgtgcacaccccatggcattttgcagctgtttgcatgggccccactgccctcccctgctctctgggtcctccgtggggtcctcccagcctgcccctttcccatttggcctcttggctgcctgttctgcccactctctggacatctgatctttctgatctttcatgtggcttcaattacccgcaatctgtacctgggtatattctcaaggtcacctcagccaaggcagcccctcggctgtggccccgtcatcctgatgtgtggtgctggctttggacacttcgagtggctggcagggggaggggccggccaggacgtgggccgaagctgcatcctggtctccattgcgggcaagaatgtcatgctggactgtggaatgcacatgggcttcaatgacgaccgacgcttccctgacttctcctacatcacccagaacggccgcctaacagacttcctggactgtgtgatcattagccacttccacctggaccactgcggggcactcccctacttcagcgagatggtgggctacgacgggcccatctacatgactcaccccacccaggccatctgccccatcttgctggaggactaccgcaagatcgccgtagacaagaagggcgaggccaacttcttcacctcccagatgatcaaagactgcatgaagaaggtggtggctgtccacctccaccagacggtccaggtagatgatgagctggagatcaaggcctactatgcaggccacgtgctgggggcagccatgttccagattaaagtgggctcagagtctgtggtctacacgggtgattataacatgaccccagaccgacacttaggagctgcctggattgacaagtgccgccccaacctgctcatcacagagtccacgtacgccacgaccatccgtgactccaagcgctgccgggagcgagacttcctgaagaaagtccacgagaccgtggagcgtggtgggaaggtgctgatacctgtgttcgcgctgggccgcgcccaggagctctgcatcctcctggagaccttctgggagcgcatgaacctgaaggtgcccatctacttctccacggggctgaccgagaaggccaaccactactacaagctgttcatcccctggaccaaccagaagatccgcaagactttcgtgcagaggaacatgtttgagttcaagcacatcaaggccttcgaccgggcttttgctgacaacccaggaccgatggttgtgtttgccacgccaggaatgctgcacgctgggcagtccctgcagatcttccggaaatgggccggaaacgaaaagaacatggtcatcatgcccggctactgcgtgcagggcaccgtcggccacaagatcctcagcgggcagcggaagctcgagatggaggggcggcaggtgctggaggtcaagatgcaggtggagtacatgtcattcagcgcacacgcggacgccaagggcatcatgcagctggtgggccaggcagagccggagagcgtgctgctggtgcatggcgaggccaagaagatggagttcctgaagcagaagatcgagcaggagctccgggtcaactgctacatgccggccaatggcgagacggtgacgctgcccacaagccccagcatccccgtaggcatctcgctggggctgctgaagcgggagatggcgcaggggctgctccctgaggccaagaagcctcggctcctgcacggcaccctgatcatgaaggacagcaacttccggctggtgtcctcagagcaagccctcaaagagctgggtctggctgagcaccagctgcgcttcacctgccgcgtgcacctgcatgacacacgcaaggagcaggagacggcattgcgcgtctacagccacctcaagagcgtcctgaaggaccactgtgtgcagcacctcccagacggctctgtgactgtggagtccgtcctcctccaggccgccgccccttctgaggacccaggcaccaaggtgctgctggtctcctggacctaccaggacgaggagctggggagcttcctcacatctctgctgaagaagggcctcccccaggcccccagctgaggccggcaactcacccagccgccacctctgccctctcccagctggacagaccctgggcctgcacttcaggactgtgggtgccctgggtgaacagaccctgcaggtcccatccctggggacagaggccttgtgtcacctgcctgcccaggcagctgtttgcagctgaagaaacaaactggtctccaggctgtcttgcctttattcctggttagggcaggtggtcctagacagcagtttccagtaaaagctgaac

SEQ ID NO: 338305 - DNA, 2530 bp, Artificial Sequence
  derived and/or modified sequence
gatgcctgagatcagagtcacgcccttgggtgcctgccctgtgctgtcctggaacctggtccttccaccgggcagggggtcgagggcaccttccagcacagacaccaggacgggattccatgtcctcccccatggcgtgagcgcttcctcggagggtgccccccgccccggtgtggacactgtgctgtgaacacccctggcctgtgcacaccccatggcattttgcagctgtttgcatgggccccactgccctcccctgctctctgggtcctccgtggggtcctcccagcctgcccctttcccatttggcctcttggctgcctgttctgcccactctctggacatctgatctttctgatctttcatgtggcttcaattacccgcaatctgtacctgggtatattctcaaggtcacctcagccaaggcagcccctcggctgtggccccgtcatcctgatgtgtggtgctggctttggacacttcgagtggctggcagggggaggggccggccaggacgtgggccgaagctgcatcctggtctccattgcgggcaagaatgtcatgctggactgtggaatgcacatgggcttcaatgacgaccgacgcttccctgacttctcctacatcacccagaacggccgcctaacagacttcctggactgtgtgatcattagccacttccacctggaccactgcggggcactcccctacttcagcgagatggtgggctacgacgggcccatctacatgactcaccccacccaggccatctgccccatcttgctggaggactaccgcaagatcgccgtagacaagaagggcgaggccaacttcttcacctcccagatgatcaaagactgcatgaagaaggtggtggctgtccacctccaccagacggtccaggtagatgatgagctggagatcaaggcctactatgcaggccacgtgctgggggcagccatgttccagattaaagtgggctcagagtctgtggtctacacgggtgattataacatgaccccagaccgacacttaggagctgcctggattgacaagtgccgccccaacctgctcatcacagagtccacgtacgccacgaccatccgtgactccaagcgctgccgggagcgagacttcctgaagaaagtccacgagaccgtggagcgtggtgggaaggtgctgatacctgtgttcgcgctgggccgcgcccaggagctctgcatcctcctggagaccttctgggagcgcatgaacctgaaggtgcccatctacttctccacggggctgaccgagaaggccaaccactactacaagctgttcatcccctggaccaaccagaagatccgcaagactttcgtgcagaggaacatgtttgagttcaagcacatcaaggccttcgaccgggcttttgctgacaacccaggaccgatggttgtgtttgccacgccaggaatgctgcacgctgggcagtccctgcagatcttccggaaatgggccggaaacgaaaagaacatggtcatcatgcccggctactgcgtgcagggcaccgtcggccacaagatcctcagcgggcagcggaagctcgagatggaggggcggcaggtgctggaggtcaagatgcaggtggagtacatgtcattcagcgcacacgcggacgccaagggcatcatgcagctggtgggccaggcagagccggagagcgtgctgctggtgcatggcgaggccaagaagatggagttcctgaagcagaagatcgagcaggagctccgggtcaactgctacatgccggccaatggcgagacggtgacgctgcccacaagccccagcatccccgtaggcatctcgctggggctgctgaagcgggagatggcgcaggggctgctccctgaggccaagaagcctcggctcctgcacggcaccctgatcatgaaggacagcaacttccggctggtgtcctcagagcaagccctcaaagagctgggtctggctgagcaccagctgcgcttcacctgccgcgtgcacctgcatgacacacgcaaggagcaggagacggcattgcgcgtctacagccacctcaagagcgtcctgaaggaccactgtgtgcagcacctcccagacggctctgtgactgtggagtccgtcctcctccaggccgccgccccttctgaggacccaggcaccaaggtgctgctggtctcctggacctaccaggacgaggagctggggagcttcctcacatctctgctgaagaagggcctcccccaggcccccagctgaggccggcaactcacccagccgccacctctgccctctcccagctggacagaccctgggcctgcacttcaggactgtgggtgccctgggtgaacagaccctgcaggtcccatccctggggacagaggccttgtgtcacctgcctgcccaggcagctgtttgcagctgaagaaacaaactggtctccaggctgtcttgcctttattcctggttagggcaggtggtcctagacagcagtttccagtaaaagctgaac

SEQ ID NO: 338306 - DNA, 246 bp, Artificial Sequence
  derived and/or modified sequence
atgtcccactatggctcatattatggtggactgggttattcttgtggtgggtttggcggcctcggttacgggtatggctgcgggtgcggttctttctgtcggcgcggatccgggtgcgggtatgggggatacggctacggatctggattcggcggatacggatacgggtcagggtttggaggctacgggtacggatgttgcagaccctcatataacggcggctatggcttcagtggtttttactag

SEQ ID NO: 338307 - DNA, 573 bp, Artificial Sequence
  derived and/or modified sequence
atggcgaataacagcccagctctcacaggcaactcacagccacaacaccaggccgctgccgctgctgcacagcaacaacagcaatgcggcggagggggcgctacgaagccagccgtttccggaaagcaaggcaacgtattaccattgtggggcaacgaaaagaccatgaatctcaatcctatgatcctgacaaacattctgagttccccatactttaaggtgcagctgtatgaactgaaaacatatcacgaggtggtggatgagatctacttcaaagttacccacgtagaaccctgggagaagggtagccgcaagacggctggacagacaggtatgtgcggaggggtgcgtggcgtggggacaggcggaattgtgagcacagccttctgcctcctctataaactgtttacactgaagttgaccaggaaacaggtcatgggcctaatcacacatacagattctccatacatccgcgccctgggcttcatgtatattagatacacgcaacccccgaccgacctatgggattggtttgagagctttctggacgatgaggagttctttacactgtag

SEQ ID NO: 338308 - DNA, 573 bp, Artificial Sequence
  derived and/or modified sequence
atggccaacaacagccctgccctgactggaaacagccagccccagcaccaggccgctgctgctgctgcccagcagcagcagcagtgtggcggcggcggggccaccaagccagctgtgtctgggaagcagggcaatgtgctgcccctgtggggcaatgagaagaccatgaacctgaaccccatgatcctgaccaacatcctgagcagcccctacttcaaggtgcagctgtatgagctgaagacctaccacgaggtggtggatgagatctacttcaaggtgacccacgtggagccctgggagaagggcagcaggaagacagctggccagacaggcatgtgtggcggcgtgcggggcgtgggcactggaggcatcgtgtccacagccttctgcctgctgtacaagctgttcaccctgaagctgaccaggaagcaggtgatgggcctcatcacccacacagacagcccctacatccgggccctgggcttcatgtacatccgctacacccagcccccaacagacctgtgggactggtttgagagcttcctggatgatgaggagttcttcaccctgtag

SEQ ID NO: 338309 - DNA, 1591 bp, Artificial Sequence
  derived and/or modified sequence
ggcagttggcggaagagatcgagctccctggctgccggctcgccttctgcgtggagttctcgcggtctgggtttcgctgtctgctcttggcccggggtcattttgtcggcgtcgggtgccctctcttgcccagctggggcacagcgaggcggccccttctcccgacgacgttcgatggagtagggtcccagaccgttgtcccgaagagcgagatcgagcttggccccctcccccccctccttccctccctccttccttccgccgcaacatggctaacaacagccccgcgctgacaggcaactcgcagccgcagcaccaggcggctgcagctgcggctcagcaacagcagcagtgcggcggcggcggcgctaccaagccggcggtctccggcaagcagggcaatgtgctcccgctctggggcaacgagaagaccatgaacctcaaccccatgatcctgaccaacatcctgtcgtcgccttacttcaaagtacagctctacgagctcaagacctaccacgaggtggtggacgagatctactttaaggtcacgcacgttgaaccatgggagaaaggaagcaggaaaacagcgggccagacagggatgtgcggaggggttcgaggtgttggaacaggaggaattgtttctacagcattttgcctgttatacaaattatttaccctgaagttaactcgaaagcaagtgatgggtcttataacacacacagactctccatatattagagcgcttggatttatgtatataagatatacacagccccctacagatctgtgggactggtttgaatccttccttgatgatgaagagttcttcaccctctagcttcttccaaatatcagtattcccacttgcatagaagtgcagaattgaagagttgggtgttacataaataggctaagtgtttggatgacttgttcaaggtgacaaaattttaattccagttttctgactcctagtacaccacacacacctttaaaaaagaaattttttaaattgtaattcgagtctccctaatttgaaatctgaaatactaagttagatttaaatcgtgtatgcattggctgggcgtggtggctcacattgtaatcccaacacttcgagagttcaagaccagcctgagcaatatagtgagacctcatctctacaaaaaaaagtttaaaaattagctgagcatagaggtatgcatcttagtcccacctacttgggaggctggggtgggaggatcacttgagcccaggagacagaatttgctgtgagccaagatcattgccactgcattccagcctgggtaacacagtaagaccctttctcaaaacaaaacaaaatatcatatatgcattaatttacttgcatggtgaagtccaacatgtcaaaaatgaaatgatgagctgtattgtccctatgtctacccagtctactactttgtgttttaaggttcataagactttttgagtgctatgtgtcagtagtctatttacagagttcatccaaagaatttattgaattaaaggatggttctaatggaaatctattgtgttttgttattacatgcacacctaaaaaaaaaaaaaa

SEQ ID NO: 338310 - DNA, 573 bp, Artificial Sequence
  derived and/or modified sequence
atggccaacaacagccccgccctgaccggcaacagccagccccagcatcaggccgccgccgcagccgcacaacagcagcagcagtgtggcgggggcggggccaccaagccagccgtttcgggaaagcagggcaatgtcctgcccttgtggggcaatgagaaaacaatgaacctgaaccccatgattctcaccaacatattaagctcaccatatttcaaagtgcaactctacgaacttaagacataccatgaggtggtcgatgagatttattttaaagtgacacacgtggagccctgggaaaaaggatccagaaagaccgctggacagacgggaatgtgcggcggagtgagaggggtgggtacaggcggcatcgtatcaacagcattctgtttgctttacaagcttttcacccttaaactgacaaggaagcaagtgatggggcttatcactcacactgactccccatatatcagggccctggggtttatgtacatccgctacacacaacccccgaccgacctgtgggactggttcgagtcgttccttgacgacgaggaattctttacattgtag

SEQ ID NO: 338311 - DNA, 573 bp, Artificial Sequence
  derived and/or modified sequence
atggcaaataactcccctgcactcacaggcaactctcagcctcagcatcaggcagccgctgccgcagcacagcaacagcagcaatgcggcggaggcggagccactaaacctgccgtctccggaaagcaaggaaacgtccttcctttgtgggggaatgagaagaccatgaacctcaatcctatgatcctgaccaacatcctgtcctccccttacttcaaagttcagctgtatgagctgaaaacctaccatgaggtggttgacgagatctattttaaagtcacccacgtggaaccttgggagaagggcagccggaagacagcgggtcaaaccggaatgtgtgggggagtgagaggcgtgggcaccgggggaattgtgagcaccgcattttgtctgctgtacaagttgttcacactgaagctgacccgcaagcaggtcatgggtctcattactcataccgacagcccgtatatccgtgccctggggttcatgtacattagatatacacagccccctactgacctctgggattggttcgaatccttcctggacgatgaggagtttttcaccctatag

SEQ ID NO: 338312 - DNA, 573 bp, Artificial Sequence
  derived and/or modified sequence
atggccaacaacagccccgccctgaccggcaacagccagccccagcaccaggccgccgccgccgccgcccagcagcagcagcagtgcggcggcggcggcgccaccaagcccgccgtgagcggcaagcagggcaacgtgctgcccctgtggggcaacgagaagaccatgaacctgaaccccatgatcctgaccaacatcctgagcagcccctacttcaaggtgcagctgtacgagctgaagacctaccacgaggtggtggacgagatctacttcaaggtgacccacgtggagccctgggagaagggcagcagaaagaccgccggccagaccggcatgtgcggcggcgtgagaggcgtgggcaccggcggcatcgtgagcaccgccttctgcctgctgtacaagctgttcaccctgaagctgaccagaaagcaggtgatgggcctgatcacccacaccgacagcccctacatcagagccctgggcttcatgtacatcagatacacccagccccccaccgacctgtgggactggttcgagagcttcctggacgacgaggagttcttcaccctgtag

SEQ ID NO: 338313 - protein, 488 aa, Artificial Sequence
  derived and/or modified sequence
MTQLMKAAKSGTKDGLEKTRMAVMRKVSFLHRKDVLGDSEEEDMGLLEVSVSDIKPPAPELGPMPEGLSPQQVVRRHILGSIVQSEGSYVESLKRILQDYRNPLMEMEPKALSARKCQVVFFRVKEILHCHSMFQIALSSRVAEWDSTEKIGDLFVASFSKSMVLDVYSDYVNNFTSAMSIIKKACLTKPAFLEFLKRRQVCSPDRVTLYGLMVKPIQRFPQFILLLQDMLKNTPRGHPDRLSLQLALTELETLAEKLNEQKRLADQVAEIQQLTKSVSDRSSLNKLLTSGQRQLLLCETLTETVYGDRGQLIKSKERRVFLLNDMLVCANINFKPANHRGQLEISSLVPLGPKYVVKWNTALPQVQVVEVGQDGGTYDKDNVLIQHSGAKKASASGQAQNKVYLGPPRLFQELQDLQKDLAVVEQITLLISTLHGTYQNLNMTVAQDWCLALQRLMRVKEEEIHSANKCRLRLLLPGKPDKGTWSDM

SEQ ID NO: 338314 - DNA, 147 bp, Artificial Sequence
  derived and/or modified sequence
atgagcgacttccccgtgcacagcaagtacttcctgatcagcagcctgcaggtgctgaagatgcacaagaaggacttcaccagccaggtgctgctgagaatctacttcgacctgatctgcatgctggtgaagctgcacgtgctgtag

SEQ ID NO: 338315 - DNA, 1467 bp, Artificial Sequence
  derived and/or modified sequence
atgacccaactgatgaaggctgcgaaatcaggcactaaggatggcctggagaagacccgaatggctgtaatgaggaaagtgtctttcctgcaccgcaaagatgtgcttggcgacagtgaggaggaggatatgggcctgttggaagtaagcgtgagtgacatcaagccacctgcacctgaactcggtccaatgcccgaaggcctcagcccgcagcaagtggtaaggcggcacattttgggaagcattgttcaatctgaagggagctatgtggagtcacttaagcggattctgcaagactaccgcaaccccctgatggaaatggaacctaaggccctgtctgcccggaagtgccaggtggtattttttagggtcaaagaaattctgcattgtcactctatgtttcagatcgccctctcctcgcgcgttgcagaatgggacagcaccgagaagattggcgatctcttcgtggcctctttctctaagagcatggtccttgatgtatattcggactacgttaataatttcacctccgcgatgagcatcatcaagaaagcatgtctaactaaaccggcctttctcgaattcctcaaacgcagacaagtatgtagccccgacagagtgacactgtacgggctgatggtcaagcctatccagaggtttccgcaattcatcctgctgctgcaagatatgctgaaaaatacaccaaggggccatcctgaccggctcagccttcagctcgcactgacagaattagaaaccctcgcggagaaactcaacgaacagaagaggctagcagatcaagttgcggagatccaacaattgacaaagtcggtgtctgaccggtcctctcttaataagttgctgactagcggccaaagacagttgttattatgcgagacccttacggagacggtgtatggcgatagaggacaactaatcaagagtaaggaaagaagggtattcttacttaacgacatgctagtttgcgccaacatcaacttcaagcctgcaaatcatagagggcagttggagatttccagtctcgtccctctgggacctaaatacgtagtgaagtggaatacggctctaccccaggtgcaggtggtcgaggttggccaggacgggggtacctacgacaaggacaacgtgctgatccaacactccggggctaaaaaagcgagcgcctccggccaagcgcaaaataaggtatatctcggcccgccgcgactcttccaggagcttcaggaccttcaaaaggatctcgccgttgtggagcagataactttactcatctcgactctccacggtacatatcaaaacctgaacatgacggtggcacaggactggtgcctggctttacagcggcttatgcgagtgaaggaagaagagattcacagcgctaacaaatgccgcttaagactcttactgccaggaaaacctgataaaggcacttggtcagatatgtag

SEQ ID NO: 338316 - DNA, 1467 bp, Artificial Sequence
  derived and/or modified sequence
atgacccagctgatgaaggccgccaagagcggcaccaaggatggcctggagaagaccaggatggctgtgatgaggaaggtgtccttcctgcacaggaaggatgtgctgggggacagcgaggaggaggacatgggcctgctggaggtgtctgtgtctgacatcaagcccccagcccctgagctgggccccatgcctgagggcctgagcccccagcaggtggtgagaagacacatcctgggcagcatcgtgcagagcgagggcagctatgtggagagcctgaagaggatcctgcaggactacagaaaccccctgatggagatggagcccaaggccctgagcgccaggaagtgccaggtggtgttcttccgggtgaaggagatcctgcactgccacagcatgttccagatcgccctgagcagccgggtggccgagtgggacagcacagagaagattggagacctgtttgtggccagcttcagcaagtccatggtgctggatgtgtacagcgactatgtgaacaacttcaccagcgccatgagcatcatcaagaaggcctgcctgaccaagccagccttcctggagttcctgaagaggcggcaggtgtgcagcccagacagagtgaccctgtatggcctgatggtgaagcccatccagcgcttcccccagttcatcctgctgctgcaggacatgctgaagaacaccccccggggccacccagaccggctgagcctgcagctggccctgacagagctggagaccctggccgagaagctgaatgagcagaagaggctggccgaccaggtggccgagatccagcagctgaccaagtctgtgtctgacaggagcagcctgaacaagctgctgaccagcggccagaggcagctgctgctgtgtgagaccctgacagagaccgtgtatggagaccggggccagctgatcaagagcaaggagcggcgggtcttcctgctgaatgacatgctggtgtgtgccaacatcaacttcaagccagccaaccaccggggccagctggagatcagcagcctggtgcccctgggccccaagtatgtggtgaagtggaacacagccctgccccaggtgcaggtggtggaggtgggccaggacggcggcacctatgacaaggacaacgtgctgatccagcacagcggggccaagaaggccagcgccagcggccaggcccagaacaaggtgtacctgggcccccccaggctcttccaggagctgcaggacctgcagaaggacctggccgtggtggagcagatcaccctgctgatcagcaccctgcacggcacctaccagaacctgaacatgacagtggcccaggactggtgcctggccctgcagaggctgatgagggtgaaggaggaggagatccacagcgccaacaagtgccgcctgcggctgctgctgcccgggaagccagacaagggcacctggagcgacatgtag

SEQ ID NO: 338317 - DNA, 1467 bp, Artificial Sequence
  derived and/or modified sequence
atgacccagctgatgaaggccgccaagagcggcaccaaggacggcctcgagaaaacccgcatggcggtgatgaggaaggtgagcttcctccaccggaaggatgtcctaggagattccgaagaggaagacatgggactgctggaagtttctgtctccgatatcaagcctcccgccccagagctgggcccaatgccagaggggttatctccacaacaggtggtgaggcgccatattttgggcagcatagtgcaatccgagggaagttacgttgagtcactgaagaggattttacaagactataggaatccactgatggagatggaacctaaggctttgtcagcccgcaaatgccaggtcgtgttcttccgggtgaaggaaatactccactgtcacagcatgtttcagattgcactcagctctagagtggccgagtgggattccacagagaaaattggtgatctattcgtggccagtttctcaaaatccatggtactagacgtctatagtgattacgttaataattttacatctgccatgtcgatcatcaagaaagcatgtctgacgaagccagcatttctggaattcctcaaacgacggcaagtatgctcccctgatagagtcactctgtatgggctgatggtcaagccgattcaacgctttccccagttcattttactgctgcaagatatgctgaaaaatacgccccggggccatccggatcgcctgtccctgcagctcgccctgaccgagctggagaccctagcagagaagctcaacgaacaaaagagactcgctgatcaggtggctgaaattcagcagttgactaagtctgtctccgaccgttcaagccttaacaaactactgactagcggtcagagacaactattgttgtgcgagacgctgactgagaccgtgtacggagacagaggccagttgatcaagagcaaagaacgcagagtatttctcctcaatgacatgcttgtctgcgcgaacatcaactttaaacccgccaatcatcggggacagctcgaaattagctcactggtccccttggggcctaagtatgttgtaaagtggaataccgcccttcctcaagtccaagtggtggaggttggccaggatggcggaacgtatgacaaggacaatgttctgatccaacactcaggtgctaaaaaggccagcgcgagcggtcaggcacaaaataaagtgtatctgggcccccccagattattccaagaactgcaggacctgcagaaagatctggcagtggtcgaacagatcactctcttaattagcaccctccacgggacgtaccaaaatctaaatatgaccgtggctcaggattggtgtctggccctgcagagactgatgcgcgtcaaggaagaggagatccattctgctaataagtgccggctccggctgcttcttccaggcaagcccgacaagggaacgtggtccgacatgtag

SEQ ID NO: 338318 - DNA, 1467 bp, Artificial Sequence
  derived and/or modified sequence
atgacacagctgatgaaggccgcaaagtctggaacaaaggacggcttggagaaaacgcgtatggccgttatgcggaaggtaagcttcctccacaggaaagatgttctgggggactctgaggaggaagacatgggcctgttggaagtgtcagtgagtgatatcaagccacccgcacccgaacttggtccaatgccggaaggactctcccctcaacaggtggtaagaaggcacatcctaggctcaatcgtgcagtcagaaggatcgtacgttgaaagcctgaagagaatcctccaggactataggaatccactcatggagatggagcccaaggccctgtccgcaagaaaatgccaggtggtgtttttccgtgtcaaggagatcttacactgtcactctatgttccagattgccctcagcagccgcgtcgccgagtgggattcaaccgagaagattggtgaccttttcgtcgcatccttttccaagtcaatggtgctcgacgtgtacagcgactacgtgaataatttcacgagcgcaatgtccatcatcaagaaggcctgcctgactaagccagctttcctggaatttctgaagaggcgccaggtgtgttctcccgatagagttaccttatacggtctgatggtaaaacccatccagcgcttcccccagtttatcctgctactacaggatatgctgaaaaacactccacgtgggcacccagatcgcctgagcttgcagctggcgctaacggaactagagacccttgcggagaagttgaacgagcagaagagattggccgatcaagtagccgagatccagcagctgactaagtcggtcagcgatcgatcttccctaaacaagctgttaacctcaggccaacgccagctgctgctctgcgagactctcacggagacagtgtatggcgataggggccaacttattaaatccaaggaaaggcgagtattcttactgaacgacatgctggtctgcgcaaacatcaactttaaacccgctaaccaccgaggccaattagagatatcgtctctcgtgcccctgggccctaagtacgtggtaaagtggaatacagctctacctcaggtgcaggtcgtggaagtcggacaagatggaggtacatatgataaggacaatgttcttattcagcactccggcgcaaaaaaggcatccgccagcgggcaggcccagaataaggtctatctaggcccacctcggttatttcaggaactccaagatctacagaaagacttggcagtcgtagaacagatcacacttttaatttctactctccatgggacataccagaacctgaatatgacagttgcccaagactggtgtctggccctgcagcgcctcatgcgtgtgaaggaggaagaaatccactccgccaataagtgtcggcttagactgcttctgcccggaaaaccagataaaggcacgtggtcagacatgtag

SEQ ID NO: 338319 - DNA, 1467 bp, Artificial Sequence
  derived and/or modified sequence
atgacccagctgatgaaggccgccaagagcggcaccaaggacggcctggagaagaccagaatggccgtgatgagaaaggtgagcttcctgcacagaaaggacgtgctgggcgacagcgaggaggaggacatgggcctgctggaggtgagcgtgagcgacatcaagccccccgcccccgagctgggccccatgcccgagggcctgagcccccagcaggtggtgagaagacacatcctgggcagcatcgtgcagagcgagggcagctacgtggagagcctgaagagaatcctgcaggactacagaaaccccctgatggagatggagcccaaggccctgagcgccagaaagtgccaggtggtgttcttcagagtgaaggagatcctgcactgccacagcatgttccagatcgccctgagcagcagagtggccgagtgggacagcaccgagaagatcggcgacctgttcgtggccagcttcagcaagagcatggtgctggacgtgtacagcgactacgtgaacaacttcaccagcgccatgagcatcatcaagaaggcctgcctgaccaagcccgccttcctggagttcctgaagagaagacaggtgtgcagccccgacagagtgaccctgtacggcctgatggtgaagcccatccagagattcccccagttcatcctgctgctgcaggacatgctgaagaacacccccagaggccaccccgacagactgagcctgcagctggccctgaccgagctggagaccctggccgagaagctgaacgagcagaagagactggccgaccaggtggccgagatccagcagctgaccaagagcgtgagcgacagaagcagcctgaacaagctgctgaccagcggccagagacagctgctgctgtgcgagaccctgaccgagaccgtgtacggcgacagaggccagctgatcaagagcaaggagagaagagtgttcctgctgaacgacatgctggtgtgcgccaacatcaacttcaagcccgccaaccacagaggccagctggagatcagcagcctggtgcccctgggccccaagtacgtggtgaagtggaacaccgccctgccccaggtgcaggtggtggaggtgggccaggacggcggcacctacgacaaggacaacgtgctgatccagcacagcggcgccaagaaggccagcgccagcggccaggcccagaacaaggtgtacctgggcccccccagactgttccaggagctgcaggacctgcagaaggacctggccgtggtggagcagatcaccctgctgatcagcaccctgcacggcacctaccagaacctgaacatgaccgtggcccaggactggtgcctggccctgcagagactgatgagagtgaaggaggaggagatccacagcgccaacaagtgcagactgagactgctgctgcccggcaagcccgacaagggcacctggagcgacatgtag

SEQ ID NO: 338320 - protein, 306 aa, Artificial Sequence
  derived and/or modified sequence
MKRRNADCSKLRRPLKRNRITEGIYGRLEQDIKKLKADLQASRQVEQELRSQISSLSSTERGIRSEMGQLRQENELLQNKLHNAVQMKQKDKQNISQLEKKLKAEQEARSFVEKQLMEEKKRKKLEEATAARAVAFAAASRGECTETLRNRIRELEAEGKKLTMDMKVKEDQIRELELKVQELRKYKENEKDTEVLMSALSAMQDKTQHLENSLSAETRIKLDLFSALGDAKRQLEIAQGQILQKDQEIKDLKQKIAEVMAVMPSITYSAATSPLSPVSPHYSSKFVETSPSGLDPNASVYQPLKK

SEQ ID NO: 338321 - DNA, 921 bp, Artificial Sequence
  derived and/or modified sequence
atgaagagaagaaacgccgactgcagcaagctgagaagacccctgaagagaaacagaatcaccgagggcatctacggcagactggagcaggacatcaagaagctgaaggccgacctgcaggccagcagacaggtggagcaggagctgagaagccagatcagcagcctgagcagcaccgagagaggcatcagaagcgagatgggccagctgagacaggagaacgagctgctgcagaacaagctgcacaacgccgtgcagatgaagcagaaggacaagcagaacatcagccagctggagaagaagctgaaggccgagcaggaggccagaagcttcgtggagaagcagctgatggaggagaagaagagaaagaagctggaggaggccaccgccgccagagccgtggccttcgccgccgccagcagaggcgagtgcaccgagaccctgagaaacagaatcagagagctggaggccgagggcaagaagctgaccatggacatgaaggtgaaggaggaccagatcagagagctggagctgaaggtgcaggagctgagaaagtacaaggagaacgagaaggacaccgaggtgctgatgagcgccctgagcgccatgcaggacaagacccagcacctggagaacagcctgagcgccgagaccagaatcaagctggacctgttcagcgccctgggcgacgccaagagacagctggagatcgcccagggccagatcctgcagaaggaccaggagatcaaggacctgaagcagaagatcgccgaggtgatggccgtgatgcccagcatcacctacagcgccgccaccagccccctgagccccgtgagcccccactacagcagcaagttcgtggagaccagccccagcggcctggaccccaacgccagcgtgtaccagcccctgaagaagtag

SEQ ID NO: 338322 - DNA, 921 bp, Artificial Sequence
  derived and/or modified sequence
atgaaacggagaaatgctgactgcagtaagttgcgtagacccctcaagaggaatcgcatcacagaaggcatctacggcagattggagcaggacatcaaaaagctcaaagcggacttgcaggcttctagacaggtcgaacaagagctgcgtagccaaatctcttccttatcctctactgagcgcggaattaggtctgaaatgggtcaattgcggcaggagaacgagcttctgcagaacaagcttcacaacgcagtgcagatgaagcaaaaggataaacagaatatcagccaactagagaagaaacttaaggccgaacaagaggctcgttcttttgtagagaaacagcttatggaggaaaaaaagcgcaagaagctagaagaggccactgctgcccgcgcggtggctttcgctgctgcttcaaggggagagtgtacagagacattacggaataggattagagaactggaggccgagggcaaaaagctgaccatggacatgaaagtgaaggaagatcagattcgtgagctggaacttaaagtacaggagttgagaaagtataaagaaaacgaaaaggataccgaggtattgatgtccgcgctaagcgccatgcaggataaaacccaacacctggagaattctttgtcagccgagacccgcattaaactcgatctcttctcagccttgggcgatgccaaaaggcagctcgaaatagcacaaggtcagattctgcagaaggatcaagagatcaaggaccttaagcaaaagatcgcagaagtgatggctgtgatgccttccatcacctactccgctgccacatcacctctctcacctgtttccccacattattctagcaaatttgtggagacgtccccgagcgggcttgacccaaatgcctctgtataccagcccctgaaaaagtag

SEQ ID NO: 338323 - DNA, 921 bp, Artificial Sequence
  derived and/or modified sequence
atgaagagaagaaatgctgactgcagcaagctgcggcggcccctgaagaggaaccgcatcacagagggcatctacggccgcctggagcaggacatcaagaagctgaaggctgacctgcaggccagccggcaggtggagcaggagctgcggagccagatcagcagcctgagcagcacagagcggggcatccgctctgagatgggccagctgcggcaggagaatgagctgctgcagaacaagctgcacaatgctgtgcagatgaagcagaaggacaagcagaacatcagccagctggagaagaagctgaaggccgagcaggaggcccggagctttgtggagaagcagctgatggaggagaagaagaggaagaagctggaggaggccacagctgcccgggctgtggcctttgctgctgccagcagaggagaatgtacagagaccctgaggaaccgcatccgggagctggaggccgagggcaagaagctgaccatggacatgaaggtgaaggaggaccagatccgggagctggagctgaaggtgcaggagctgaggaagtacaaggaaaatgagaaggacacagaggtgctgatgtctgccctgagcgccatgcaggacaagacccagcacctggagaacagcctgtctgctgagacccgcatcaagctggacctcttcagcgccctgggagatgccaagaggcagctggagatcgcccagggccagatcctgcagaaggaccaggagatcaaggacctgaagcagaagattgctgaggtgatggctgtgatgcccagcatcacctacagcgctgccaccagccccctgagccctgtgagcccccactacagcagcaagtttgtggagaccagccccagcggcctggaccccaatgcctctgtgtaccagcccctgaagaagtag

SEQ ID NO: 338324 - DNA, 921 bp, Artificial Sequence
  derived and/or modified sequence
atgaagcggcggaacgccgactgcagcaagctgcggcggcccctgaaacgaaacaggattaccgaaggtatttacggacggttggaacaagatatcaagaagctgaaagccgacctgcaggcaagccgtcaggtcgagcaggagttaaggagtcaaatctcttccctttcttccacagaacggggcattaggagcgagatgggtcaactcaggcaggaaaacgagcttctgcaaaacaaacttcacaatgccgtacagatgaaacaaaaggataaacaaaatatcagccagttggagaaaaagttgaaggccgagcaagaagcccgatccttcgtcgagaagcagctgatggaagaaaaaaaacgcaagaaactagaggaggcaacggccgctcgggcagtcgccttcgccgctgctagtcgcggggaatgtaccgagaccttgcgtaaccgtatccgggagctggaagccgaagggaagaagcttaccatggacatgaaagtcaaggaagatcagattcgcgagctagagttgaaggtccaggaattgagaaagtacaaagagaacgaaaaagacacagaggtgttgatgtcagcactgtctgccatgcaggacaagactcaacatctggagaacagcctgtcagccgaaaccagaatcaaactggatctcttctccgccctcggtgacgctaagaggcagctggaaatagcccagggccaaatcctgcagaaggaccaggagatcaaagatcttaagcagaaaattgccgaagtgatggccgtgatgccaagcatcacatactctgccgctacttccccgctctcacccgtgtcccctcattattcgtctaaatttgtcgagacctcacccagcggactcgacccaaatgcttcggtctatcagcctctgaagaagtag

SEQ ID NO: 338325 - DNA, 921 bp, Artificial Sequence
  derived and/or modified sequence
atgaagcggagaaacgccgattgtagcaagctgcggcgaccactgaagcgtaaccggattaccgagggaatctacggacgcctggagcaggatatcaagaagcttaaagccgacttgcaggccagtaggcaggtcgaacaggaattgaggagtcagattagcagcttatcaagcacagagagaggcattcgtagcgaaatgggacagctgaggcaggagaacgaactgttgcagaataaactgcacaatgcagtgcaaatgaagcagaaagacaaacaaaatatcagccaactggagaagaaattgaaagccgaacaggaagctagatctttcgtagagaaacagctaatggaggagaagaaaagaaagaaactggaagaggccacagctgcgagggcagtggctttcgctgccgctagccgaggggagtgcacagaaactttgaggaatcggatacgagaactcgaggccgagggaaagaagttaaccatggatatgaaagttaaggaggatcaaatcagggagctggaactgaaggtgcaggagctccgcaagtacaaggaaaatgagaaggacaccgaggttcttatgtctgccttatcggccatgcaggacaagacacagcatctagaaaacagcctctccgcggagactaggatcaagctggacctgttctcagcgttgggcgatgccaaacggcaactggaaatcgctcaggggcagattctccaaaaagaccaggagattaaagatctgaaacagaaaattgccgaggttatggctgtcatgccctctatcacctattctgcagctaccagccccctgagcccagtcagtccacattactcatctaagttcgttgaaacatcccccagcggccttgaccctaacgcatctgtgtaccagccattgaagaagtag

SEQ ID NO: 338326 - DNA, 2866 bp, Artificial Sequence
  derived and/or modified sequence
gtcatttctttgtttccgaaggcggaggaggctccgagccccccctccccgtgctaccccctccccccgggtgctggctccatgtctgtgtgaccggcctcaggggtagagtccaggcccgacgcggggcgggccagcggcggcggcagctgaggtgagagacggcggcggcggcgcgggcacccggccccccagcgggaggatgaagcggcggaacgccgactgcagtaagctccgccgccccctaaagcggaaccggatcaccgagggcatttacggcaggctggaacaagacattaaaaagttaaaggctgacctgcaagccagcagacaagtggaacaagagctccgcagtcagatcagctccctttcgagcaccgagcgagggatccgctcagaaatgggccagcttcggcaggagaacgagctgctgcagaacaagttacataatgctgtgcaaatgaagcaaaaagacaagcagaatatcagccagttggagaaaaagctaaaagctgagcaggaagcccgaagttttgtagagaaacagttaatggaagagaaaaagaggaagaagttagaagaagccactgctgcccgggctgttgcgtttgctgctgcatctaggggagaatgcaccgaaaccttacggaatcggatcagagaactagaagcagagggcaagaagctcacgatggacatgaaggtgaaagaagaccaaatcagagaactagaactaaaagtccaggagcttcggaaatataaggaaaatgagaaggacactgaggtgttaatgtcagccctctcagccatgcaagacaaaacacagcacctggagaacagcttaagtgcagagacgagaatcaagctggacctgttctccgcactgggcgatgcaaagcggcagctcgagattgcccaaggacaaatccttcagaaagatcaggaaatcaaggacctaaaacagaagatagccgaagtcatggccgtcatgcccagcataacatacagtgccgccaccagccccctgagccctgtttccccccactactcttccaaatttgtggagaccagcccctctggacttgaccccaatgcctctgtttaccagcccctgaagaaatgaaggccagctgtgtgttgtgcccaaaaatttggttaccggaaggcattgcaaaggagcgtctctggcagtcaagataaaaaaacagtttctattgtattttgtggaactgtatctgttgtcatttttaaaaaggggggaaaagataacatccaagtctgattagaactgcccatcagtttttcttgtaaatttttagaagacctcacagaactttacagtttatttttctcggccaacacattaaaaccattcttggatttcaagtagccaactttgccttttatgtattcttacatagtttcctcttgaagaaaaaaaaagcagagtttttgtttttcaaccctttatgtttgttttgttttattcttaaataagcaagcaaaacctgcacattggattcacgtgagatgataatgaaaacttttagtttaagagtgaagggttaagtaacctaacagagctttgatgttatagctgcattaaagaaggtgattgtcaatattacagaaaacaaaaatggattgcccctccaaggaccaaacagattcaaggagcatcatttaagctaagaagagacctaagtgatgaaactagctgtaagaatgtaacaggggttgtgtttgaaatatttatattcccatcggtgtgtttagtcctagaaaattgctagcagcagtcttcttcacagtgccttgggaaaagacatttcaagaggaaacttgataattttaaactcttttccccctttaccgtcatctatcctctatctgtatcaagctcactgcggatcctgctgtaaaactggtgggtagctgggctgtccgttaccaccacagctacatcttctgtttctttgaatagaaagcaccacagtgttttgcacttgcctccagtaaagtgccctgggaagggagctgggcagtgtttgtggacgagagactgtaacgatggctaataaaagctgcgggtctaggtttttttttttttgttttgttttttcatttcatttaactgtgctttctccacttttcatcattttgtgtttgatgatttaaaagaagcttgactattcctcagctcttgtgccaaggagggttttttttttttaagactcttaaactcaaaactctgcacaaagatttcagtttcaaatgtgtattatacatgggtagaaaagtgtttgcacaggcaacttttggaagtgtttaagaatcagggtgggggtggcgggagggaccgggtgggggcaatgcaaaattgtatttggaaactaggaaaaattaagaaaccaaataaattggttttgcttccttgccatggattctggaaggacatagttcttctaaaatttcctgttaattggcatgtacgtctcatttaaagcaaattaagtaggacaagcaagtcagtaaaatagaagtattaaaaagaatcatcctttaaatcacagatcttattttgagattaaaaaaaatacttctagctttagccaggtgtgcatgttgctgccattttgcatttttgaatcatcttgtgtaattgtcaccatgaaagtgttactcagaattgtcatagattttctcttctttgtgcaaaaacatggaaaattgtcactgactttgttttgaggtttcccccattttgctgccttttgggacacttcgttaaatactggtcttggctgcattcttttttttttttcctgtggggttcaaaagaataaacattttcttacagataaaa

SEQ ID NO: 338327 - protein, 354 aa, Artificial Sequence
  derived and/or modified sequence
MPEKTAVDQPWTQALRELKDQLQALQDSEREHTEALQLLKRQLAETKSSTKSLRTTIGEAFERLHRLLRERQKAMLEELEADTARTLTDIEQKVQRYSQQLRKVQEGAQILQERLAETDRHTFLAGVASLSERLKGKIHETNLTYEDFPTSKYTGPLQYTIWKSLFQDIHPVPAALTLDPGTAHQRLILSDDCTIVAYGNLHPQPLQDSPKRFDVEVSVLGSEAFSSGVHYWEVVVAEKTQWVIGLAHEAASRKGSIQIQPSRGFYCIVMHDGNQYSACTEPWTRLNVRDKLDKVGVFLDYDQGLLIFYNADDMSWLYTFREKFPGKLCSYFSPGQSHANGKNVQPLRINTVRI

SEQ ID NO: 338328 - DNA, 1065 bp, Artificial Sequence
  derived and/or modified sequence
atgcccgagaagaccgccgtggaccagccctggacccaggccctgagagagctgaaggaccagctgcaggccctgcaggacagcgagagagagcacaccgaggccctgcagctgctgaagagacagctggccgagaccaagagcagcaccaagagcctgagaaccaccatcggcgaggccttcgagagactgcacagactgctgagagagagacagaaggccatgctggaggagctggaggccgacaccgccagaaccctgaccgacatcgagcagaaggtgcagagatacagccagcagctgagaaaggtgcaggagggcgcccagatcctgcaggagagactggccgagaccgacagacacaccttcctggccggcgtggccagcctgagcgagagactgaagggcaagatccacgagaccaacctgacctacgaggacttccccaccagcaagtacaccggccccctgcagtacaccatctggaagagcctgttccaggacatccaccccgtgcccgccgccctgaccctggaccccggcaccgcccaccagagactgatcctgagcgacgactgcaccatcgtggcctacggcaacctgcacccccagcccctgcaggacagccccaagagattcgacgtggaggtgagcgtgctgggcagcgaggccttcagcagcggcgtgcactactgggaggtggtggtggccgagaagacccagtgggtgatcggcctggcccacgaggccgccagcagaaagggcagcatccagatccagcccagcagaggcttctactgcatcgtgatgcacgacggcaaccagtacagcgcctgcaccgagccctggaccagactgaacgtgagagacaagctggacaaggtgggcgtgttcctggactacgaccagggcctgctgatcttctacaacgccgacgacatgagctggctgtacaccttcagagagaagttccccggcaagctgtgcagctacttcagccccggccagagccacgccaacggcaagaacgtgcagcccctgagaatcaacaccgtgagaatctag

SEQ ID NO: 338329 - DNA, 1065 bp, Artificial Sequence
  derived and/or modified sequence
atgccagaaaaaacagctgtggaccagccttggacacaagctctgcgtgagttaaaggaccagcttcaggctttgcaggattccgaaagagaacatacagaagcactgcagctcctcaagcgccagctagcggagaccaaatccagcaccaagagtctgcggaccactattggtgaagcctttgaacgcctgcatcgcctgctgagggaaaggcagaaggctatgttagaagagttagaagcagacaccgcccggaccctcacggacatcgaacagaaagtgcagcgatactcacagcaactgcggaaggtgcaggaaggtgcacagatcctccaggaacggctcgctgagaccgatcgccataccttcctggcaggcgtcgcatccctatcagagcggctcaagggcaagatccacgaaaccaacctgacatatgaggatttcccaacttccaagtataccggccctctccagtacactatctggaagtcgctgtttcaggacattcaccccgtcccagctgctttaacccttgaccctggaaccgctcaccagaggttgatcctgagcgatgactgtactatcgttgcttacggcaatctgcatcctcagccccttcaagacagtcctaagcgcttcgatgttgaagttagtgtgcttggatctgaggcctttagcagcggggtgcactattgggaggtcgttgtggctgaaaaaacccagtgggtgatcggtctcgcgcacgaggcggcctcgcgaaaaggctccatccaaatacagccttctaggggcttctactgcatcgtaatgcatgatggcaaccagtactctgcatgtactgagccttggacccggctgaacgtgcgggataaactggacaaagttggggtcttcctcgattacgatcaaggcctccttatcttctataacgcagatgacatgagttggctgtatacattccgagagaagtttccagggaagctgtgtagctacttctcgcccggccagagccatgcaaacgggaagaatgtgcagcctctacgtatcaatactgtccgaatttag

SEQ ID NO: 338330 - DNA, 1065 bp, Artificial Sequence
  derived and/or modified sequence
atgcctgagaagacagctgtggaccagccctggacccaggccctgcgggagctgaaggaccagctgcaggccctgcaggacagcgagcgggagcacacagaggccctgcagctgctgaagaggcagctggccgagaccaagagcagcaccaagagcctgcggaccaccatcggggaggcctttgagcggctgcaccggctgctgcgggagcggcagaaggccatgctggaggagctggaggccgacacagcccggaccctgacagacatcgagcagaaggtgcagcgctacagccagcagctgaggaaggtgcaggagggcgcccagatcctgcaggagcggctggccgagacagacagacacaccttcctggccggcgtggccagcctgtctgagcggctgaagggcaagatccacgagaccaacctgacctatgaggacttccccaccagcaagtacacaggccccctgcagtacaccatctggaagagcctcttccaggacatccaccctgtgcctgctgccctgaccctggaccccggcacagcccaccagaggctcatcctgagtgatgactgcaccatcgtggcctacggcaacctgcacccccagcccctgcaggacagccccaagagatttgatgtggaggtgtctgtgctgggcagcgaggccttcagcagtggagtgcactactgggaggtggtggtggccgagaagacccagtgggtgattggcctggcccacgaggccgccagcaggaagggcagcatccagatccagcccagccggggcttctactgcatcgtgatgcatgatggcaaccagtacagcgcctgcacagagccctggacccggctgaatgtgcgggacaagctggacaaggtgggcgtcttcctggactatgaccagggcctgctgatcttctacaatgctgatgacatgtcctggctgtacaccttccgggagaagtttcctgggaagctgtgcagctacttcagccctggccagagccacgccaacgggaagaatgtgcagcccctgcgcatcaacacagtgcgcatctag

SEQ ID NO: 338331 - DNA, 1065 bp, Artificial Sequence
  derived and/or modified sequence
atgcccgagaagaccgccgtggaccagccctggacccaggccctgagagagctgaaggaccaactgcaagccttgcaggacagtgaaagggaacacactgaagccttacagctcttgaaaaggcaactggccgagacaaaatctagcactaaatctctgcgcacaacaatcggagaagctttcgaacgcctccataggctcctgcgtgagaggcagaaggccatgttggaggagctggaagctgatacagcacggaccttaacagatattgaacagaaggtacagaggtatagtcagcagctgagaaaagtacaggagggcgcccagatactgcaggagcgccttgctgagaccgatcgtcatacatttttagccggggtagcgtctttgtccgagaggttaaaagggaagattcacgagaccaatttgacgtacgaggactttcctactagcaagtacacaggtcctctccagtatactatctggaagtcactgtttcaagatatccatcccgtgcctgctgctctgacactcgatcccggaactgcccaccagcgattgattctgtctgatgactgtactatcgttgcatatggaaacctgcatccccagcccctccaagacagtcccaagcgctttgacgtggaggtgagtgtacttgggtcagaagcctttagttctggggttcattattgggaggttgtcgttgccgaaaaaacccaatgggtgatcggcttggcgcacgaagcagcgtccaggaagggaagcatccaaattcagcccagccggggtttttattgtatagttatgcacgacgggaatcagtacagtgcttgcactgagccttggacaagactgaacgtgagggataagcttgataaagtcggtgtgttccttgattacgatcaggggttactaattttttacaacgctgatgacatgagctggttgtataccttccgtgagaagtttcctggcaaactctgcagttatttttcaccaggtcagagccacgccaacggaaaaaatgtgcaacccctgcgcatcaacactgtgcgcatctag

SEQ ID NO: 338332 - DNA, 1065 bp, Artificial Sequence
  derived and/or modified sequence
atgcccgagaagaccgcagtggatcaaccgtggacgcaagcactccgggagctgaaggatcagctccaagctctgcaggacagcgagcgcgaacacaccgaagcgttacagttattgaagcggcagctcgccgagacaaagtcttccactaaaagcctgagaaccacgattggtgaggccttcgagcgcctccaccggctgctgagggaaaggcaaaaagcaatgctcgaggaacttgaggccgacacagctagaaccctcaccgacatagaacagaaggtgcagaggtacagccaacagcttcgcaaagtgcaggaaggcgctcagattcttcaagagaggctggccgagaccgacagacacaccttcttagctggcgttgcaagcctgagcgagcggctgaagggcaagattcatgagacaaaccttacctacgaagatttccccacatctaagtatactggacctctgcagtacactatatggaagtcactgttccaggatattcatcccgttccagctgctttgaccctggaccctggaacagcacatcagcgtctgatcttgagcgatgactgcactatagtggcctatggcaatcttcatccccagcccctgcaggatagtcctaaaagattcgatgtcgaagtttccgtcctaggaagtgaggcgttctcatctggggttcattattgggaggtcgtggtggccgagaagacacagtgggtgatcggtctcgcccatgaagctgctagccggaaaggcagcattcagattcagccctccagaggcttctactgtatcgtcatgcatgacggcaatcagtactcggcgtgcaccgagccttggacccgactgaacgttcgagataagctggataaggtgggcgtcttcttggactacgaccagggtcttctaatattttataacgcggatgatatgtcttggctatacactttccgcgagaagtttcctggtaagttgtgcagctattttagtccaggccagtctcacgcaaatggaaaaaatgtccaaccgctacggatcaatacggtgcggatctag

SEQ ID NO: 338333 - DNA, 1638 bp, Artificial Sequence
  derived and/or modified sequence
tctcaggttcctaacccccagagaggggatccgattcagtctcagccgccccctccaggcctcatgtgaccattggagcccttcccaaggcttccttcatgccagagaagacagcagtggatcagccttggacgcaagccctgagggagctgaaggaccaacttcaggcccttcaagacagcgagcgggaacacaccgaagcgctgcagctgctcaagcgacaactggcggagaccaagtcttccaccaagagcctgcggaccactatcggcgaggccttcgagcggctgcaccggctgctgcgtgaacgccagaaggccatgctagaggagctggaggcggacacggcccgcacgctgaccgacatcgagcagaaagtccagcgctacagccagcagctgcgcaaggtccaggagggagcccagatcctgcaggagcggctggctgaaaccgaccggcacaccttcctggctggggtggcctcactgtccgagcggctcaagggaaaaatccatgagaccaacctcacatatgaagacttcccgacctccaagtacacaggccccctgcagtacaccatctggaagtccctgttccaggacatccacccagtgccagccgccctaaccctggacccgggcacagcccaccagcgcctgatcctgtcggacgactgcaccattgtggcttacggcaacttgcacccacagccactgcaggactcgccaaagcgcttcgatgtggaggtgtcggtgctgggttctgaagccttcagtagtggcgtccactactgggaggtggtggtggcggagaagacccagtgggtgatcgggctggcacacgaagccgcaagccgcaagggcagcatccagatccagcccagccgcggcttctactgcatcgtgatgcacgatggcaaccagtacagcgcctgcacggagccctggacgcggcttaacgtccgggacaagcttgacaaggtgggtgtcttcctggactatgaccaaggcttgctcatcttctacaatgctgatgacatgtcctggctctacaccttccgcgagaagttccctggcaagctctgctcttacttcagccctggccagagccacgccaatggcaagaacgttcagccgctgcggatcaacaccgtccgcatctagtccaggcagaaggagaccacaacctcctgggaccactgccacctgcaagagccctgcccaggagatagaagacctggactccagcccaccgtggccactggagacctcaggccagttgtttaccctccagcctccagtctgtaaaatggaggttgcattccctacttcctaaactctcttccagcatcgatgttctgtagctctgaccttgatagggatacagctttgatccaaggatgtgacatggcttctcctcagggcaacccctgcccaaccctcatccccatcttctcaggggcaggggactaccttccagtgtctccctccagcccagccctgacctcaggaagtgtcagagcatggccagtagttggcagcccgaaagacacacagcaccctcttatgtcccatggcctaagacttacccctgaccaagctagtgatgggccatttacccttgaccccagtccacagt

SEQ ID NO: 338334 - DNA, 558 bp, Artificial Sequence
  derived and/or modified sequence
atgagcggcggcgagcagaagcccgagagatactacgtgggcgtggacgtgggcaccggcagcgtgagagccgccctggtggaccagagcggcgtgctgctggccttcgccgaccagcccatcaagaactgggagccccagttcaaccaccacgagcagagcagcgaggacatctgggccgcctgctgcgtggtgaccaagaaggtggtgcagggcatcgacctgaaccagatcagaggcctgggcttcgacgccacctgcagcctggtggtgctggacaagcagttccaccccctgcccgtgaaccaggagggcgacagccacagaaacgtgatcatgtggctggaccacagagccgtgagccaggtgaacagaatcaacgagaccaagcacagcgtgctgcagtacgtgggcggcgtgatgagcgtggagatgcaggcccccaagctgctgtggctgaaggagaacctgagagagatctgctgggacaaggccggccacttcttcgacctgcccgacttcctgagctggaaggccaccggcgtgaccgccagatag

SEQ ID NO: 338335 - DNA, 558 bp, Artificial Sequence
  derived and/or modified sequence
atgagcggtggtgagcaaaaacctgagcgttactacgttggtgtcgacgtggggacagggagcgtgcgggctgccttggtggaccagtccggagtcctcctggcattcgcagaccagccgattaaaaattgggagccacagttcaatcaccatgagcaaagctccgaggacatctgggccgcgtgttgcgttgtcacaaaaaaggtagtgcagggaatagacttgaaccagattagggggcttgggttcgatgcaacctgctctttggtagttttggataaacaattccacccactgccagttaaccaggagggggatagccaccggaacgtcattatgtggctagaccatagagccgtttcacaggtcaatcgcatcaatgagactaagcactctgtcctccaatacgtcggaggcgtcatgtccgttgagatgcaggctcctaagcttctgtggttgaaagagaacctgagggagatatgttgggacaaagcaggtcatttctttgatctccccgactttctatcctggaaagcaaccggtgtcaccgcaaggtag

SEQ ID NO: 338336 - DNA, 681 bp, Artificial Sequence
  derived and/or modified sequence
caaggcggggctgtagccgccccgggaccgccctgctcaggcgccgtggggttcggcgcggctacgtgcagaatccgtctagctaaaatgtaatttcagattggacaagtactgtggaggaactgcaatgtctggtggagaacagaaaccagagaggtactatgtgggtgtggacgttggaacaggcagtgtccgtgcagctctggtggaccagagtggggtcctgttggcttttgcagaccagccaattaagaattgggagccccagttcaaccaccatgagcagtcctccgaggacatctgggctgcgtgctgtgttgtcacaaagaaagttgtacaagggattgatttaaaccaaattcgaggacttgggtttgatgccacgtgttctctggttgttttggataagcagtttcacccattaccagtcaaccaggaaggggattcccatcgaaacgtcatcatgtggctggaccatcgagcagtcagtcaagttaacaggatcaatgagaccaagcacagtgtcctccagtacgtcgggggggtgatgtctgtggaaatgcaggccccgaaacttctgtggctgaaagagaacttgagagagatttgctgggataaggcgggacatttctttgatctcccggacttcttatcgtggaaggcaacaggtgtcacagcacg

SEQ ID NO: 338337 - DNA, 558 bp, Artificial Sequence
  derived and/or modified sequence
atgtctggaggagagcagaagccagagcgctactacgtgggcgtggatgtgggcactggatctgtgcgggccgccctggtggaccagagcggcgtgctgctggcctttgctgaccagcccatcaagaactgggagccccagttcaaccaccacgagcagagcagcgaggacatctgggccgcctgctgcgtggtgaccaagaaggtggtgcagggcatcgacctgaaccagatccggggcctgggctttgatgccacctgcagcctggtggtgctggacaagcagttccaccccctgcctgtgaaccaggagggggacagccacagaaatgtcatcatgtggctggaccacagagctgtgtcccaggtgaaccgcatcaatgagaccaagcacagcgtgctgcagtatgtgggcggcgtgatgtctgtggagatgcaggcccccaagctgctgtggctgaaggagaacctgcgggagatctgctgggacaaggccggccacttctttgacctgcctgacttcctgtcctggaaggccaccggggtgacagccaggtag

SEQ ID NO: 338338 - DNA, 558 bp, Artificial Sequence
  derived and/or modified sequence
atgagcggcggcgagcagaagcccgagcggtactacgtgggcgtggacgtcggaactggctctgtgagagcggccttagttgaccaaagtggggtcctgttggctttcgcggatcagcccattaaaaattgggagccacagtttaatcaccatgagcagagctctgaggacatctgggccgcctgttgtgtggtgaccaagaaggtagtacaggggatcgatttaaatcagattcgaggccttggcttcgacgctacttgctccctggtggtgctggataaacagttccacccgctgccggtgaaccaggaaggcgatagccacagaaacgttattatgtggctcgatcacagggcagtgagccaggtgaatagaattaatgaaaccaaacactctgtgctgcagtacgtgggtggtgtaatgagtgtggaaatgcaggcacccaaactgctgtggctgaaggagaacctccgtgagatatgctgggacaaggccgggcatttttttgatctgccggacttcttaagttggaaagccaccggagtcacggctaggtag

SEQ ID NO: 338339 - DNA, 558 bp, Artificial Sequence
  derived and/or modified sequence
atgagtggcggagagcaaaaaccagagcgatattatgtgggcgtggacgtcggaacaggctcagtccgagcagctctcgtggatcagtctggagtgttactggccttcgctgatcagccgattaaaaactgggagccccaatttaaccatcacgagcagagttccgaggatatctgggctgcatgttgcgtcgtgactaagaaggtggtgcaaggtatcgatctgaaccagatacgcggactgggctttgacgccacttgctccctggtcgtgcttgataaacagttccacccactgcccgtaaaccaggagggtgattcccacagaaacgtcataatgtggctggaccacagagccgtctcccaggtcaacaggattaatgagactaagcatagcgtactgcagtatgtaggcggtgtaatgagtgtcgagatgcaggcgccaaagctactgtggcttaaggaaaatttgcgggagatctgctgggataaagccggacatttttttgatctgcccgacttcctgagctggaaggctacaggcgttaccgcccgttag

SEQ ID NO: 338340 - protein, 553 aa, Artificial Sequence
  derived and/or modified sequence
MADPEVVVSSCSSHEEENRCNFNQQTSPSEELLLEDQMRRKLKFFFMNPCEKFWARGRKPWKLAIQILKIAMVTIQLVLFGLSNQMVVAFKEENTIAFKHLFLKGYMDRMDDTYAVYTQSDVYDQLIFAVNQYLQLYNVSVGNHAYENKGTKQSAMAICQHFYKRGNIYPGNDTFDIDPEIETECFFVEPDEPFHIGTPAENKLNLTLDFHRLLTVELQFKLKAINLQTVRHQELPDCYDFTLTITFDNKAHSGRIKISLDNDISIRECKDWHVSGSIQKNTHYMMIFDAFVILTCLVSLILCIRSVIRGLQLQQEFVNFFLLHYKKEVSVSDQMEFVNGWYIMIIISDILTIIGSILKMEIQAKSLTSYDVCSILLGTSTMLVWLGVIRYLGFFAKYNLLILTLQAALPNVIRFCCCAAMIYLGYCFCGWIVLGPYHDKFRSLNMVSECLFSLINGDDMFATFAKMQQKSYLVWLFSRIYLYSFISLFIYMILSLFIALITDTYETIKQYQQDGFPETELRTFISECKDLPNSGKYRLEDDPPVSLFCCCKK

SEQ ID NO: 338341 - protein, 321 aa, Artificial Sequence
  derived and/or modified sequence
MADPEVVVSSCSSHEEENRCNFNQQTSPSEELLLEDQMRRKLKFFFMNPCEKFWARGRKPWKLAIQILKIAMVTIQLVLFGLSNQMVVAFKEENTIAFKHLFLKGYMDRMDDTYAVYTQSDVYDQLIFAVNQYLQLYNVSVGNHAYENKGTKQSAMAICQHFYKRGNIYPGNDTFDIDPEIETECFFVEPDEPFHIGTPAENKLNLTLDFHRLLTVELQFKLKAINLQTVRHQELPDCYDFTLTITFDNKAHSGRIKISLDNDISIRECKDWHVSGSIQKNTHYMMIFDAFVILTCLVSLILCIRSVIRGLQLQQVGNVAF

SEQ ID NO: 338342 - DNA, 2795 bp, Artificial Sequence
  derived and/or modified sequence
cggggctcgaggctgctggagtcgctcgctgactcgccctgcgccctcgccgcggacaccggagctgcggccgctccccgctgtcccccagagatggcagatcctgaggtagttgtgagtagctgcagctctcatgaagaggaaaatcgctgcaattttaaccagcaaacatctccatctgaggagcttctattagaagaccagatgaggcgaaaactcaaattttttttcatgaatccctgtgagaagttctgggctcgaggtagaaaaccatggaaacttgccatacaaattctaaaaattgcaatggtgactatccagctggtcttatttgggctaagtaaccagatggtggtagctttcaaggaagagaatactatagcattcaaacaccttttcctaaaaggatatatggaccgaatggatgacacatatgcagtgtacacacaaagtgacgtgtatgatcagttaatcttcgcagtaaaccagtacttgcagctatacaatgtctccgttgggaatcatgcttatgagaacaaaggtaccaagcaatctgctatggcaatctgtcagcacttctacaagcgaggaaacatctaccctggaaatgatacctttgacatcgatccagaaattgaaactgagtgtttctttgtggagccagatgaaccttttcacattgggacaccagcagaaaataaactgaacttaacactggacttccacagactcctaacagtggagcttcagtttaaactgaaagccattaatctgcagacagttcgtcatcaagaactccctgactgttatgactttactctgactataacatttgacaacaaggcccatagtggaagaattaaaataagtttagataatgacatttccatcagagaatgtaaagactggcatgtatctggatcaattcagaagaacactcattacatgatgatctttgatgcctttgtcattctgacttgcttggtttcattaatcctctgcattagatctgtgattagaggacttcagcttcagcaggagtttgtcaattttttcctcctccattataagaaggaagtttctgtttctgatcaaatggaatttgtcaatggatggtacattatgattattattagtgacatattgacaatcattggatcaattctaaaaatggaaatccaagctaagagtctaactagttatgatgtctgtagcatacttcttgggacttctaccatgctcgtgtggcttggagtcatccgatacctcggtttctttgcaaagtacaacctcctcattttgacccttcaggcagcgctgcccaatgtcatcaggttctgctgctgtgcagctatgatttacttaggttactgcttctgtggatggatcgtgctggggccttaccatgacaagtttcgttctctgaacatggtctctgagtgccttttctctctgataaatggagatgatatgtttgccacgtttgcaaaaatgcagcaaaaaagttacttagtctggctgtttagtagaatttacctctactcattcatcagcctctttatatatatgattttaagtcttttcattgcactgatcactgatacatacgaaacaattaagcaataccaacaagatggcttcccagagactgaacttcgtacatttatatcagaatgcaaagatctacccaactctggaaaatacagattagaagatgaccctccagtatctttattctgctgttgtaaaaagtagctatcaggtttatctgtactttagaggaaaatataatgtgtagctgagttggaacactgtggatattctgagatcagatgtagtatgtttgaagactgttattttgagctaattgagacctataattcaccaataactgtttatatttttaaaagcaatatttaatgtctttgcaactttatgctgggattgtttttaaaaaaactttaatgaggaaagctattggattattattatttcttgtttattttgccatggctttagaatgtattctgtatgcctctcttttgctctgatactgttgctcctgctattctgattgtgcagactgtgtaattagtggaaaacaatccttggtctgactgtgactttggacaactcagtaaccctggcttggaccactctcaggagtccatccttgagagagtgggtgtagttatcatttatacagtaatcattgcattttaaaatcttctcttgaaaggaagaataagagtgcaccagaataagagcgcaccagaataagagcgcaccagctaacaatgtgatacggccatatgtcacttaaggatggagatatgttctgagaaatgtgtcattaggcgattttgtcattaaacatcatagcatgtacttccacaaacctagatggtatagcctactacacacctaggctatttggtatagcctgttggtcctggggtacaaatctgtacaacatgttactgtattgaatacagtaggcaattgtaacacaatggtaagtatctaaacatagaaaagggacagtaaaaatatggttttataatcttctgggaccaccattgtatatgcggtacatcattgaccaaaacatcgttatccagcatatgactgtatttggttatgaaagccaactgttacttgattctgcttttagttcttaagaggatcaggcttttaaatactcatttacaagttttctatcctccttcagtgttaaagtagaaagtaaaaagagtatcttatacatgcatgaaattaaagcatataccaaatgc

SEQ ID NO: 338343 - DNA, 2754 bp, Artificial Sequence
  derived and/or modified sequence
gcgccctcgccgcggacaccggagctgcggccgctccccgctgtcccccagatggcagatcctgaggtagttgtgagtagctgcagctctcatgaagaggaaaatcgctgcaattttaaccagcaaacatctccatctgaggagcttctattagaagaccagatgaggcgaaaactcaaattttttttcatgaatccctgtgagaagttctgggctcgaggtagaaaaccatggaaacttgccatacaaattctaaaaattgcaatggtgactatccagctggtcttatttgggctaagtaaccagatggtggtagctttcaaggaagagaatactatagcattcaaacaccttttcctaaaaggatatatggaccgaatggatgacacatatgcagtgtacacacaaagtgacgtgtatgatcagttaatcttcgcagtaaaccagtacttgcagctatacaatgtctccgttgggaatcatgcttatgagaacaaaggtaccaagcaatctgctatggcaatctgtcagcacttctacaagcgaggaaacatctaccctggaaatgatacctttgacatcgatccagaaattgaaactgagtgtttctttgtggagccagatgaaccttttcacattgggacaccagcagaaaataaactgaacttaacactggacttccacagactcctaacagtggagcttcagtttaaactgaaagccattaatctgcagacagttcgtcatcaagaactccctgactgttatgactttactctgactataacatttgacaacaaggcccatagtggaagaattaaaataagtttagataatgacatttccatcagagaatgtaaagactggcatgtatctggatcaattcagaagaacactcattacatgatgatctttgatgcctttgtcattctgacttgcttggtttcattaatcctctgcattagatctgtgattagaggacttcagcttcagcaggagtttgtcaattttttcctcctccattataagaaggaagtttctgtttctgatcaaatggaatttgtcaatggatggtacattatgattattattagtgacatattgacaatcattggatcaattctaaaaatggaaatccaagctaagagtctaactagttatgatgtctgtagcatacttcttgggacttctaccatgctcgtgtggcttggagtcatccgatacctcggtttctttgcaaagtacaacctcctcattttgacccttcaggcagcgctgcccaatgtcatcaggttctgctgctgtgcagctatgatttacttaggttactgcttctgtggatggatcgtgctggggccttaccatgacaagtttcgttctctgaacatggtctctgagtgccttttctctctgataaatggagatgatatgtttgccacgtttgcaaaaatgcagcaaaaaagttacttagtctggctgtttagtagaatttacctctactcattcatcagcctctttatatatatgattttaagtcttttcattgcactgatcactgatacatacgaaacaattaagcaataccaacaagatggcttcccagagactgaacttcgtacatttatatcagaatgcaaagatctacccaactctggaaaatacagattagaagatgaccctccagtatctttattctgctgttgtaaaaagtagctatcaggtttatctgtactttagaggaaaatataatgtgtagctgagttggaacactgtggatattctgagatcagatgtagtatgtttgaagactgttattttgagctaattgagacctataattcaccaataactgtttatatttttaaaagcaatatttaatgtctttgcaactttatgctgggattgtttttaaaaaaactttaatgaggaaagctattggattattattatttcttgtttattttgccatggctttagaatgtattctgtatgcctctcttttgctctgatactgttgctcctgctattctgattgtgcagactgtgtaattagtggaaaacaatccttggtctgactgtgactttggacaactcagtaaccctggcttggaccactctcaggagtccatccttgagagagtgggtgtagttatcatttatacagtaatcattgcattttaaaatcttctcttgaaaggaagaataagagtgcaccagaataagagcgcaccagaataagagcgcaccagctaacaatgtgatacggccatatgtcacttaaggatggagatatgttctgagaaatgtgtcattaggcgattttgtcattaaacatcatagcatgtacttccacaaacctagatggtatagcctactacacacctaggctatttggtatagcctgttggtcctggggtacaaatctgtacaacatgttactgtattgaatacagtaggcaattgtaacacaatggtaagtatctaaacatagaaaagggacagtaaaaatatggttttataatcttctgggaccaccattgtatatgcggtacatcattgaccaaaacatcgttatccagcatatgactgtatttggttatgaaagccaactgttacttgattctgcttttagttcttaagaggatcaggcttttaaatactcatttacaagttttctatcctccttcagtgttaaagtagaaagtaaaaagagtatcttatacatgcatgaaattaaagcatataccaaatgca

SEQ ID NO: 338344 - protein, 497 aa, Artificial Sequence
  derived and/or modified sequence
MADPEVVVSSCSSHEEENRCNFNQQTSPSEELLLEDQMRRKLKFFFMNPCEKFWARGRKPWKLAIQILKIAMVTIQYLQLYNVSVGNHAYENKGTKQSAMAICQHFYKRGNIYPGNDTFDIDPEIETECFFVEPDEPFHIGTPAENKLNLTLDFHRLLTVELQFKLKAINLQTVRHQELPDCYDFTLTITFDNKAHSGRIKISLDNDISIRECKDWHVSGSIQKNTHYMMIFDAFVILTCLVSLILCIRSVIRGLQLQQEFVNFFLLHYKKEVSVSDQMEFVNGWYIMIIISDILTIIGSILKMEIQAKSLTSYDVCSILLGTSTMLVWLGVIRYLGFFAKYNLLILTLQAALPNVIRFCCCAAMIYLGYCFCGWIVLGPYHDKFRSLNMVSECLFSLINGDDMFATFAKMQQKSYLVWLFSRIYLYSFISLFIYMILSLFIALITDTYETIKQYQQDGFPETELRTFISECKDLPNSGKYRLEDDPPVSLFCCCKK

SEQ ID NO: 338345 - DNA, 1494 bp, Artificial Sequence
  derived and/or modified sequence
atggctgacccagaggtggtagttagcagctgtagctcacacgaagaagagaaccgttgcaattttaaccagcagacgagcccatcagaggagctactgttggaagaccagatgcgccgaaagttgaaattcttctttatgaacccctgcgagaaattctgggctagaggcaggaaaccttggaaactagcaatccaaatcctgaagattgcaatggtcaccattcagtaccttcagttgtataacgtgagtgtgggaaaccacgcatacgagaataaaggaacgaagcagagtgcgatggctatttgtcagcacttttacaaacgtggaaacatttatccaggtaacgacaccttcgacatcgatcccgaaattgaaactgagtgtttcttcgtggaacctgatgagccttttcacatcggtacgcccgcagaaaataagcttaacctaacactcgatttccatcggcttctgacagtcgagctccagtttaagctgaaagctatcaatcttcagacagtacgccatcaggagctcccagattgctatgattttacacttacgataacattcgataacaaagcgcacagtggacggattaagatcagtctggataacgacatttcaatccgcgaatgcaaggattggcacgtgagtggtagcatacagaagaatacacattatatgatgatcttcgacgcatttgtgatcctgacctgtcttgttagcttgattctgtgcataaggtcagtgattagaggacttcaactccagcaggagtttgtcaacttttttctgcttcactacaaaaaggaggtgagcgtctcggatcagatggagttcgtcaacggatggtacatcatgataattattagtgatattctgaccattatcggcagcattctcaaaatggagattcaggctaagtccttaacctcctatgatgtgtgcagcatcctgttaggcactagcaccatgttggtctggctgggcgtgattagatacctgggtttcttcgcaaaatacaatcttctgatactgacgcttcaggcggccctcccgaacgtaataaggttctgttgttgtgccgccatgatctatctgggctactgcttctgcgggtggattgtgctgggaccttatcatgacaagttccgtagcctgaatatggtcagcgagtgccttttctcgctgattaacggcgacgatatgttcgctacctttgcaaagatgcaacaaaaatcgtacctggtttggttgttcagtcggatctatttatacagctttatcagcctgttcatatacatgatattatccctgtttattgctcttatcacagatacctatgaaacaattaagcagtaccagcaagacgggttccccgagactgagctgcggacatttatttccgagtgcaaagacctgcctaacagcggcaagtacaggctcgaagatgatccccccgtctctctgttctgctgttgtaaaaagtag

SEQ ID NO: 338346 - DNA, 1494 bp, Artificial Sequence
  derived and/or modified sequence
atggccgatcctgaggtcgtggtctcatcatgttcaagtcatgaggaggagaaccgatgcaactttaatcagcagacttctcctagcgaggagctgctgttggaggaccagatgaggagaaaattaaagttcttctttatgaatccctgcgagaagttttgggctagagggaggaagccttggaagctggccatacagattctcaagattgcaatggtcacgattcaatatttgcaactgtacaatgtgtccgtggggaatcatgcgtacgagaataaggggacgaagcaatccgccatggccatttgccagcacttttacaagaggggcaatatctatcccggaaacgacaccttcgatatcgaccccgaaatcgagactgagtgtttttttgtggagcctgatgaaccgtttcacataggtacccccgcagaaaataagctgaaccttacactagacttccacaggctgttgacagtggagctgcagttcaagctgaaggccattaatctccaaaccgtacgccaccaggagctccctgactgctacgatttcacactgaccattaccttcgacaataaggcacattccggccgaataaagatttccctcgataacgacattagcatcagagagtgcaaagattggcacgttagcggtagcattcaaaagaacacacattatatgatgattttcgacgcttttgtcatactgacttgcctggtgtcgctgatactctgcattcgcagtgtcatcagggggcttcaacttcagcaggaattcgttaatttttttctgctgcactataagaaggaggtgtctgtgagtgaccagatggaattcgttaacggctggtatatcatgatcattattagtgacatattgactataatagggtctatactcaagatggagattcaggcaaaatccctgacatcctatgacgtgtgctccatccttctgggaacaagtacaatgctggtctggcttggggtgatccgatatctaggtttcttcgctaaatacaacctgctaatccttactttgcaagctgcacttcctaatgtcatccggttttgttgctgtgctgcgatgatctatctgggctactgtttttgtggctggatcgttttaggaccataccatgacaagtttcgctccctgaacatggtatccgagtgtttattttctctaattaatggcgatgacatgttcgctacctttgccaaaatgcagcagaaaagttaccttgtgtggctcttcagccggatctacctatacagctttatcagtttattcatatatatgatcctaagtttattcatcgccttgatcactgatacctatgagacgattaaacagtatcagcaagacgggtttcccgagacggagctgcggactttcatctccgaatgtaaggacctacccaactctggtaagtaccggttggaagacgaccctccagtgtccctcttctgttgttgcaagaaatag

SEQ ID NO: 338347 - DNA, 1494 bp, Artificial Sequence
  derived and/or modified sequence
atggctgaccctgaggtggtggtgagcagctgcagcagccatgaggaggagaaccgctgcaacttcaaccagcagaccagccccagcgaggagctgctgctggaggaccagatgaggaggaagctgaagttcttcttcatgaacccctgtgagaagttctgggcccggggcaggaagccctggaagctggccatccagatcctgaagatcgccatggtgaccatccagtacctgcagctgtacaacgtgtctgtgggcaaccacgcctatgaaaataaaggcaccaagcagagcgccatggccatctgccagcacttctacaagaggggcaacatctacccaggaaatgacacctttgatattgatcctgagattgaaacagagtgcttctttgtggagccagatgagcccttccacatcggcaccccagctgagaacaagctgaacctgaccctggacttccaccggctgctgactgtggagctgcagttcaagctgaaggccatcaacctgcagacagtgcgccaccaggagctgcctgactgctatgacttcaccctgaccatcacctttgacaacaaggcccacagcggccgcatcaagatcagcctggacaatgacatcagcatccgggagtgcaaggactggcacgtgtctggcagcatccagaagaacacccactacatgatgatctttgatgcctttgtgatcctgacctgcctggtgtccctcatcctgtgcatccgcagcgtcatccggggcctgcagctgcagcaggagtttgtgaacttcttcctgctgcactacaagaaggaggtgtctgtgtctgaccagatggagtttgtgaatggctggtacatcatgatcatcatcagtgacatcctgaccatcatcggcagcatcctgaagatggagatccaggccaagagcctgaccagctatgatgtgtgcagcatcctgctgggcaccagcaccatgctggtgtggctgggcgtcatccgctacctgggcttctttgccaagtacaacctgctgatcctgaccctgcaggccgccctgcccaacgtcatccgcttctgctgctgtgccgccatgatctacctgggctactgcttctgtggctggatcgtgctgggcccctaccatgacaagttccgcagcctgaacatggtgtctgaatgtctcttcagcctcatcaatggagatgacatgtttgccacctttgccaagatgcagcagaagagctacctggtgtggctgttcagccgcatctacctgtacagcttcatcagcctcttcatctacatgatcctgagcctcttcatcgccctgatcacagacacctatgagaccatcaagcagtaccagcaggacggcttccctgagacagagctgcggaccttcatcagcgagtgcaaggacctgcccaacagcggcaagtaccgcctggaggatgatcctcctgtgtccctcttctgctgctgcaagaagtag

SEQ ID NO: 338348 - DNA, 1760 bp, Artificial Sequence
  derived and/or modified sequence
gcgccctcgccgcggacaccggagctgcggccgctccccgctgtcccccagatggcagatcctgaggtagttgtgagtagctgcagctctcatgaagaggaaaatcgctgcaattttaaccagcaaacatctccatctgaggagcttctattagaagaccagatgaggcgaaaactcaaattttttttcatgaatccctgtgagaagttctgggctcgaggtagaaaaccatggaaacttgccatacaaattctaaaaattgcaatggtgactatccagtacttgcagctatacaatgtctccgttgggaatcatgcttatgagaacaaaggtaccaagcaatctgctatggcaatctgtcagcacttctacaagcgaggaaacatctaccctggaaatgatacctttgacatcgatccagaaattgaaactgagtgtttctttgtggagccagatgaaccttttcacattgggacaccagcagaaaataaactgaacttaacactggacttccacagactcctaacagtggagcttcagtttaaactgaaagccattaatctgcagacagttcgtcatcaagaactccctgactgttatgactttactctgactataacatttgacaacaaggcccatagtggaagaattaaaataagtttagataatgacatttccatcagagaatgtaaagactggcatgtatctggatcaattcagaagaacactcattacatgatgatctttgatgcctttgtcattctgacttgcttggtttcattaatcctctgcattagatctgtgattagaggacttcagcttcagcaggagtttgtcaattttttcctcctccattataagaaggaagtttctgtttctgatcaaatggaatttgtcaatggatggtacattatgattattattagtgacatattgacaatcattggatcaattctaaaaatggaaatccaagctaagagtctaactagttatgatgtctgtagcatacttcttgggacttctaccatgctcgtgtggcttggagtcatccgatacctcggtttctttgcaaagtacaacctcctcattttgacccttcaggcagcgctgcccaatgtcatcaggttctgctgctgtgcagctatgatttacttaggttactgcttctgtggatggatcgtgctggggccttaccatgacaagtttcgttctctgaacatggtctctgagtgccttttctctctgataaatggagatgatatgtttgccacgtttgcaaaaatgcagcaaaaaagttacttagtctggctgtttagtagaatttacctctactcattcatcagcctctttatatatatgattttaagtcttttcattgcactgatcactgatacatacgaaacaattaagcaataccaacaagatggcttcccagagactgaacttcgtacatttatatcagaatgcaaagatctacccaactctggaaaatacagattagaagatgaccctccagtatctttattctgctgttgtaaaaagtagctatcaggtttatctgtactttagaggaaaatataatgtgtagctgagttggaacactgtggatattctgagatcagatgtagtatgtttgaagactgttattttgagctaattgagacctataattcaccaataactgtttatatttttaaaagcaatatttaatgtctttgcaactttatgctgggattgtttttaaaaaaactttaatgagg

SEQ ID NO: 338349 - DNA, 2627 bp, Artificial Sequence
  derived and/or modified sequence
cggggctcgaggctgctggagtcgctcgctgactcgccctgcgccctcgccgcggacaccggagctgcggccgctccccgctgtcccccagagatggcagatcctgaggtagttgtgagtagctgcagctctcatgaagaggaaaatcgctgcaattttaaccagcaaacatctccatctgaggagcttctattagaagaccagatgaggcgaaaactcaaattttttttcatgaatccctgtgagaagttctgggctcgaggtagaaaaccatggaaacttgccatacaaattctaaaaattgcaatggtgactatccagtacttgcagctatacaatgtctccgttgggaatcatgcttatgagaacaaaggtaccaagcaatctgctatggcaatctgtcagcacttctacaagcgaggaaacatctaccctggaaatgatacctttgacatcgatccagaaattgaaactgagtgtttctttgtggagccagatgaaccttttcacattgggacaccagcagaaaataaactgaacttaacactggacttccacagactcctaacagtggagcttcagtttaaactgaaagccattaatctgcagacagttcgtcatcaagaactccctgactgttatgactttactctgactataacatttgacaacaaggcccatagtggaagaattaaaataagtttagataatgacatttccatcagagaatgtaaagactggcatgtatctggatcaattcagaagaacactcattacatgatgatctttgatgcctttgtcattctgacttgcttggtttcattaatcctctgcattagatctgtgattagaggacttcagcttcagcaggagtttgtcaattttttcctcctccattataagaaggaagtttctgtttctgatcaaatggaatttgtcaatggatggtacattatgattattattagtgacatattgacaatcattggatcaattctaaaaatggaaatccaagctaagagtctaactagttatgatgtctgtagcatacttcttgggacttctaccatgctcgtgtggcttggagtcatccgatacctcggtttctttgcaaagtacaacctcctcattttgacccttcaggcagcgctgcccaatgtcatcaggttctgctgctgtgcagctatgatttacttaggttactgcttctgtggatggatcgtgctggggccttaccatgacaagtttcgttctctgaacatggtctctgagtgccttttctctctgataaatggagatgatatgtttgccacgtttgcaaaaatgcagcaaaaaagttacttagtctggctgtttagtagaatttacctctactcattcatcagcctctttatatatatgattttaagtcttttcattgcactgatcactgatacatacgaaacaattaagcaataccaacaagatggcttcccagagactgaacttcgtacatttatatcagaatgcaaagatctacccaactctggaaaatacagattagaagatgaccctccagtatctttattctgctgttgtaaaaagtagctatcaggtttatctgtactttagaggaaaatataatgtgtagctgagttggaacactgtggatattctgagatcagatgtagtatgtttgaagactgttattttgagctaattgagacctataattcaccaataactgtttatatttttaaaagcaatatttaatgtctttgcaactttatgctgggattgtttttaaaaaaactttaatgaggaaagctattggattattattatttcttgtttattttgccatggctttagaatgtattctgtatgcctctcttttgctctgatactgttgctcctgctattctgattgtgcagactgtgtaattagtggaaaacaatccttggtctgactgtgactttggacaactcagtaaccctggcttggaccactctcaggagtccatccttgagagagtgggtgtagttatcatttatacagtaatcattgcattttaaaatcttctcttgaaaggaagaataagagtgcaccagaataagagcgcaccagaataagagcgcaccagctaacaatgtgatacggccatatgtcacttaaggatggagatatgttctgagaaatgtgtcattaggcgattttgtcattaaacatcatagcatgtacttccacaaacctagatggtatagcctactacacacctaggctatttggtatagcctgttggtcctggggtacaaatctgtacaacatgttactgtattgaatacagtaggcaattgtaacacaatggtaagtatctaaacatagaaaagggacagtaaaaatatggttttataatcttctgggaccaccattgtatatgcggtacatcattgaccaaaacatcgttatccagcatatgactgtatttggttatgaaagccaactgttacttgattctgcttttagttcttaagaggatcaggcttttaaatactcatttacaagttttctatcctccttcagtgttaaagtagaaagtaaaaagagtatcttatacatgcatgaaattaaagcatataccaaatgc

SEQ ID NO: 338350 - DNA, 1494 bp, Artificial Sequence
  derived and/or modified sequence
atggccgaccccgaggtggtggtgagcagctgcagcagccacgaggaggagaatcggtgcaactttaaccagcagacttctccctccgaagaattgctgctggaggaccagatgcggcggaagcttaagttttttttcatgaacccatgtgagaagttttgggctagaggaaggaagccatggaaactcgcaattcagattctcaaaatcgccatggtgacaatccagtatctgcagctgtataatgtatccgttggaaatcacgcctatgagaacaagggtaccaaacagagcgccatggcaatttgccagcatttttacaagcgcggtaacatctacccgggaaacgatacgtttgatatagaccccgaaatcgaaaccgagtgctttttcgtagaaccagatgagccctttcacataggcaccccggcggagaataagcttaatctcaccctggatttccacagattgttaacagtcgagctgcagttcaaactcaaggcaattaatctccaaaccgtacgccatcaagaactgccggactgctatgatttcacacttaccataacctttgacaacaaggcgcactccggcagaataaaaatatccctggataatgatatatccatcagggaatgcaaggactggcacgtcagcggatctatccagaagaacacccactatatgatgatctttgatgcatttgtcatcctcacttgcctcgtgagcctcatcctctgcattagatctgtcatcagaggccttcagctgcagcaggagtttgttaacttttttctgctgcattataaaaaggaagtatctgtgagcgatcagatggaatttgtgaacggttggtatattatgattatcatttctgatatactgacaatcattgggtctattctcaagatggagattcaggcaaaatcacttaccagctatgacgtgtgttccattctgttggggaccagcactatgctcgtgtggttgggggtcatcagatacttaggcttttttgcaaagtataatctgctgatcttgacgctgcaagctgccctgcctaacgtcattagattttgttgctgcgcagctatgatttacctcgggtactgtttctgcgggtggatcgtgctgggtccgtatcatgataagtttcgttctctgaacatggtgtcagagtgtctgtttagcctcatcaatggagacgacatgtttgccactttcgctaaaatgcagcagaaaagttacctggtgtggttgttctcccgcatatacctgtacagctttatttccctctttatctatatgatcctctccctgttcatcgctctgatcaccgacacatatgaaacaatcaagcagtatcaacaggatgggttccccgaaaccgagttgaggacgttcatatcagaatgcaaggacctaccaaactcaggtaagtaccgactggaggacgatccgccagtatccctgttttgctgctgcaaaaaatag

SEQ ID NO: 338351 - DNA, 1494 bp, Artificial Sequence
  derived and/or modified sequence
atggccgaccccgaggtggtggtgagcagctgcagcagccacgaggaggagaaccgatgcaacttcaatcagcagacgtcaccttcagaggagctgctgctagaagatcagatgagacggaagttgaaatttttttttatgaatccctgcgaaaaattttgggcccgtgggagaaagccctggaagttagcaatccagatccttaaaatagctatggtgacaatccaatacctccagctctacaacgtgtctgtagggaaccacgcttacgaaaataagggtaccaaacagtcagccatggcaatctgccagcatttctacaagagaggcaacatttatcccggcaacgatacctttgacatcgaccccgaaatagaaaccgagtgctttttcgtcgaacctgacgagcccttccacatcggaactcccgccgagaataaactaaatttgactctggacttccaccgtctactgactgttgaactccagttcaaacttaaggctataaatctccagaccgtgagacaccaggaactaccggactgttacgactttacgctgaccataacattcgacaacaaagcacacagcgggaggattaaaatcagcctcgataatgatatcagtatccgtgagtgtaaggactggcacgtgtcgggcagcattcagaagaatactcattacatgatgatctttgacgcattcgtcattctgacctgcctggtaagcctaattttatgtatccggtcagttattcgaggcctccaactgcaacaggaatttgtgaacttctttcttctccactacaagaaagaagttagtgtttcagatcagatggagttcgtgaatggctggtatataatgattataatctctgacatcctgacaattatcggcagtatattgaagatggagatccaggcaaaatctcttacttcctacgatgtttgtagcatactgttgggcacttcgaccatgcttgtgtggctgggagtgattcgatacctgggattttttgctaaatacaatctgctcatcctgaccctgcaggcagccttaccgaatgtcatccggttttgttgttgcgctgctatgatctacctggggtactgcttctgtggctggatagtcctcggaccctatcacgacaaattcagatccctgaacatggtgagtgagtgcttgtttagcctgattaacggagacgatatgtttgctacattcgctaaaatgcagcagaaaagctacctagtgtggttgttctcacgaatctatctatactctttcatatcactatttatttatatgattctgtccctcttcattgcattgattaccgatacctatgaaactatcaaacagtatcagcaagacgggttcccagagacggagctgagaacatttatatcagagtgtaaggatctgcctaatagtggcaaatatcgtctggaggacgatccccccgtgagcctgttttgttgctgcaagaaatag

SEQ ID NO: 338352 - DNA, 1494 bp, Artificial Sequence
  derived and/or modified sequence
atggctgacccagaagtagtggtaagctcctgcagctcccatgaagaagagaacagatgcaacttcaaccagcaaacttcaccttcggaggaactgctgctggaggaccagatgaggagaaagttgaagttcttcttcatgaacccttgcgaaaagttttgggcacggggtcgaaagccatggaaactggccattcagatacttaagatcgcaatggtaacaatccagtatttgcaactctacaacgtgtcagtcgggaaccatgcctacgaaaataaaggcaccaagcagtctgcgatggctatttgccaacacttttacaaacgtggaaatatataccccggtaatgataccttcgacattgatcccgaaatcgagactgagtgtttttttgtggagcccgacgagccatttcatataggaactccggcagagaacaaattgaaccttacccttgactttcacaggctgctaacagttgaattgcagtttaaactgaaggcaatcaatttgcagactgttcgacaccaggagctgcccgactgttatgacttcacccttaccattacctttgataacaaggcacattctggacgaatcaaaattagtctggataatgacatctcaatccgggagtgtaaggactggcatgtatccgggagcatacagaagaatactcattatatgatgatttttgacgcgtttgtgattcttacttgtctggtcagcttaattttgtgtattcgatctgtgattaggggcctgcaattgcaacaggagtttgtaaacttctttctacttcactacaaaaaggaagtatccgtgagtgaccaaatggaatttgttaacggctggtacatcatgattattatctcggacattctcacaatcatcggctccattctaaagatggaaattcaagccaaatctctgacatcctacgacgtgtgttccattctgctgggaacgagtacgatgcttgtctggttaggagtcatcagatacctagggtttttcgccaaatacaatctcctaattttgacccttcaagccgcattacccaatgtgatacggttctgctgttgtgcagctatgatctacctgggctattgcttctgcggttggattgttctcggcccttaccatgataagttccgctccctcaacatggtatctgaatgcctattttctctcataaacggagatgacatgttcgccaccttcgcaaaaatgcagcagaagtcctaccttgtctggctcttctccagaatttacctatattcgtttatcagcttatttatatatatgatacttagcctgttcattgctctgatcactgacacctacgaaaccatcaaacagtatcagcaggatggattccccgagaccgagctcagaaccttcatctctgaatgtaaggacctcccgaattcaggaaagtatcggctagaagacgaccccccagttagtcttttctgctgctgtaagaagtag

SEQ ID NO: 338353 - DNA, 1494 bp, Artificial Sequence
  derived and/or modified sequence
atggcagatccagaagtcgtggtgtcgagttgctctagccacgaggaggagaacaggtgcaactttaaccaacaaacttccccgagcgaggagctcctactggaggaccagatgaggagaaaactgaaatttttctttatgaacccttgtgagaaattttgggcacgcggaagaaagccctggaagttggcaatccaaatccttaaaatcgccatggttaccatacagtacctccaactgtataatgttagtgtgggaaatcatgcatacgagaataaaggaacgaagcagtccgctatggccatctgccagcacttttataagcggggtaacatctacccaggaaacgatacgtttgacattgatccggagattgaaacagagtgcttttttgtcgagcctgacgagccgttccatattggcacccccgcagagaataagctcaatcttaccctggattttcatagactgctcaccgtagaactgcagtttaaactgaaggccataaatttgcaaactgtgagacaccaagagttgcctgactgttacgatttcaccctcacaatcacatttgacaataaggcccattccggtcgaataaagatcagtttggacaatgacattagtataagagagtgcaaagactggcatgtttcagggtctattcagaagaatacacactacatgatgatttttgatgcattcgttatcttaacttgtctggtctcactgattctctgcatcaggagcgtcatcagaggactgcaactccagcaggagtttgttaacttttttctcctgcactataagaaggaagtcagcgtgtctgatcagatggagttcgtgaatggatggtatatcatgattattatctccgacatcctgacgatcattggctctatcttgaagatggaaatccaagcaaaatccctcacgtcatacgacgtgtgctcgatcctgttgggaaccagcaccatgcttgtgtggctgggcgtcattagatacctcgggttctttgcaaaatacaatctgttaattctgacacttcaagccgctttgccaaatgttatccggttttgctgctgcgctgcgatgatatatctagggtattgtttctgtggctggattgtactgggcccttatcatgataagttccgctcattaaacatggtgtcagaatgcctcttttcactgatcaatggtgatgatatgttcgccacattcgcgaaaatgcagcagaaaagttatctggtgtggctgtttagccgaatttatctgtattccttcatctcgctattcatctatatgattctttccctattcatagctctgataacagacacctatgagactatcaaacaatatcagcaggatggatttcccgaaacagaactgcgcactttcatcagcgaatgcaaggatttacctaacagcggcaaataccgcttggaggacgaccctcccgtgagcttattttgctgttgtaagaagtag

SEQ ID NO: 338354 - DNA, 1494 bp, Artificial Sequence
  derived and/or modified sequence
atggccgaccccgaggtggtggtgagcagctgcagcagccacgaggaggagaacagatgcaacttcaaccagcagaccagccccagcgaggagctgctgctggaggaccagatgagaagaaagctgaagttcttcttcatgaacccctgcgagaagttctgggccagaggcagaaagccctggaagctggccatccagatcctgaagatcgccatggtgaccatccagtacctgcagctgtacaacgtgagcgtgggcaaccacgcctacgagaacaagggcaccaagcagagcgccatggccatctgccagcacttctacaagagaggcaacatctaccccggcaacgacaccttcgacatcgaccccgagatcgagaccgagtgcttcttcgtggagcccgacgagcccttccacatcggcacccccgccgagaacaagctgaacctgaccctggacttccacagactgctgaccgtggagctgcagttcaagctgaaggccatcaacctgcagaccgtgagacaccaggagctgcccgactgctacgacttcaccctgaccatcaccttcgacaacaaggcccacagcggcagaatcaagatcagcctggacaacgacatcagcatcagagagtgcaaggactggcacgtgagcggcagcatccagaagaacacccactacatgatgatcttcgacgccttcgtgatcctgacctgcctggtgagcctgatcctgtgcatcagaagcgtgatcagaggcctgcagctgcagcaggagttcgtgaacttcttcctgctgcactacaagaaggaggtgagcgtgagcgaccagatggagttcgtgaacggctggtacatcatgatcatcatcagcgacatcctgaccatcatcggcagcatcctgaagatggagatccaggccaagagcctgaccagctacgacgtgtgcagcatcctgctgggcaccagcaccatgctggtgtggctgggcgtgatcagatacctgggcttcttcgccaagtacaacctgctgatcctgaccctgcaggccgccctgcccaacgtgatcagattctgctgctgcgccgccatgatctacctgggctactgcttctgcggctggatcgtgctgggcccctaccacgacaagttcagaagcctgaacatggtgagcgagtgcctgttcagcctgatcaacggcgacgacatgttcgccaccttcgccaagatgcagcagaagagctacctggtgtggctgttcagcagaatctacctgtacagcttcatcagcctgttcatctacatgatcctgagcctgttcatcgccctgatcaccgacacctacgagaccatcaagcagtaccagcaggacggcttccccgagaccgagctgagaaccttcatcagcgagtgcaaggacctgcccaacagcggcaagtacagactggaggacgacccccccgtgagcctgttctgctgctgcaagaagtag

SEQ ID NO: 338355 - DNA, 966 bp, Artificial Sequence
  derived and/or modified sequence
atggctgacccagaagttgttgtttcctcatgcagctcccacgaagaagaaaaccggtgcaatttcaatcaacagactagcccgtcagaggaactactcctcgaagatcagatgcggagaaaactgaagttcttttttatgaacccatgtgagaagttctgggcccgcggcagaaaaccatggaagctggccatacagatcctgaaaattgctatggtgacaatccagcttgttctgttcggcttgagcaatcagatggtcgtggcctttaaggaggagaacactatcgcttttaaacatttgttccttaaaggctatatggatcggatggatgacacttacgctgtttacacacagagcgatgtctacgaccagctcatctttgccgtaaatcagtacctgcagttgtacaatgtgagcgtcggaaatcacgcctacgaaaataaggggacgaaacagagtgccatggctatctgccagcatttttacaaacgggggaacatctatcccggaaatgacacctttgacattgacccagagatcgaaaccgaatgcttcttcgtcgagccagacgagcccttccatattgggactcctgcggagaacaagttaaatctaacgctggatttccatcgcttgctgacagtagagctccagtttaagctgaaagcgattaacctgcagactgttaggcatcaagaattgccagattgctatgactttactctgaccatcacctttgataacaaagcccacagtggacggatcaaaatttcactggacaatgatatcagcatcagagagtgtaaggattggcacgtctctggctcaatccagaaaaatacccattatatgatgatcttcgatgccttcgtgatacttacttgcctcgtgtctctcatcttatgtattaggagtgtcatccggggattacagctccaacaagtgggcaacgtggcattttag

SEQ ID NO: 338356 - DNA, 966 bp, Artificial Sequence
  derived and/or modified sequence
atggctgaccctgaggtggtggtgagcagctgcagcagccatgaggaggagaaccgctgcaacttcaaccagcagaccagccccagcgaggagctgctgctggaggaccagatgaggaggaagctgaagttcttcttcatgaacccctgtgagaagttctgggcccggggcaggaagccctggaagctggccatccagatcctgaagatcgccatggtgaccatccagctggtgctgtttggcctgagcaaccagatggtggtggccttcaaggaggagaacaccatcgccttcaagcacctgttcctgaagggctacatggacaggatggatgacacctatgctgtgtacacccagagtgatgtgtatgaccagctgatctttgctgtgaaccagtacctgcagctgtacaacgtgtctgtgggcaaccacgcctatgaaaataaaggcaccaagcagagcgccatggccatctgccagcacttctacaagaggggcaacatctacccaggaaatgacacctttgatattgatcctgagattgaaacagagtgcttctttgtggagccagatgagcccttccacatcggcaccccagctgagaacaagctgaacctgaccctggacttccaccggctgctgactgtggagctgcagttcaagctgaaggccatcaacctgcagacagtgcgccaccaggagctgcctgactgctatgacttcaccctgaccatcacctttgacaacaaggcccacagcggccgcatcaagatcagcctggacaatgacatcagcatccgggagtgcaaggactggcacgtgtctggcagcatccagaagaacacccactacatgatgatctttgatgcctttgtgatcctgacctgcctggtgtccctcatcctgtgcatccgcagcgtcatccggggcctgcagctgcagcaggtgggcaatgtggccttctag

SEQ ID NO: 338357 - DNA, 2953 bp, Artificial Sequence
  derived and/or modified sequence
tggagtcgctcgctgactcgccctgcgccctcgccgcggacaccggagctgcggccgctccccgctgtcccccagcttactccaatcaagcctctgcccgccaggaacaggtaacctgtgtgtgtccgtttgctccttctaagagcatgcctgatagatacttcggtagcctctccggatggccccttcgtcgggtagcctctcctgatggggtccttcgcccaccctgcctcccgcgccggcgctccgggtgaatgtcaagggtggctggctgcgaatacctccttcagctgctggggttcccgacagtttgcagtttttaaaagtgcaccctcggaagggcttttcagactgggtaaacctgacttttccaagagatggcagatcctgaggtagttgtgagtagctgcagctctcatgaagaggaaaatcgctgcaattttaaccagcaaacatctccatctgaggagcttctattagaagaccagatgaggcgaaaactcaaattttttttcatgaatccctgtgagaagttctgggctcgaggtagaaaaccatggaaacttgccatacaaattctaaaaattgcaatggtgactatccagctggtcttatttgggctaagtaaccagatggtggtagctttcaaggaagagaatactatagcattcaaacaccttttcctaaaaggatatatggaccgaatggatgacacatatgcagtgtacacacaaagtgacgtgtatgatcagttaatcttcgcagtaaaccagtacttgcagctatacaatgtctccgttgggaatcatgcttatgagaacaaaggtaccaagcaatctgctatggcaatctgtcagcacttctacaagcgaggaaacatctaccctggaaatgatacctttgacatcgatccagaaattgaaactgagtgtttctttgtggagccagatgaaccttttcacattgggacaccagcagaaaataaactgaacttaacactggacttccacagactcctaacagtggagcttcagtttaaactgaaagccattaatctgcagacagttcgtcatcaagaactccctgactgttatgactttactctgactataacatttgacaacaaggcccatagtggaagaattaaaataagtttagataatgacatttccatcagagaatgtaaagactggcatgtatctggatcaattcagaagaacactcattacatgatgatctttgatgcctttgtcattctgacttgcttggtttcattaatcctctgcattagatctgtgattagaggacttcagcttcagcaggtagggaacgttgctttctaggaatgctactgacattttgattgacagagacattcactgtgcctcccctcttttccctaaaggagtttgtcaattttttcctcctccattataagaaggaagtttctgtttctgatcaaatggaatttgtcaatggatggtacattatgattattattagtgacatattgacaatcattggatcaattctaaaaatggaaatccaagctaaggtaatttttttcctaatcatgctattgttagtgtcagatttgcactaatggtaatgtatttttccagaatgtaagaattttcagaatgaattgtttcttccaaactgtatatcaagtagacttgaaattggtaatggtaattttcttaaatctagtcaggaggtctcttaggcagagtttttcaaagtgtgatccacaaaccattgcatcagaatcattgggtgcctggtaaagtgtaccatgttagacctactgaattcagactcttcggcggggcctgtgaattcttacacacaccaaaattcatacacaaccaaggtaactaaggtaagagttttttttttttttttaatcttacaagaaatgctcgaatctttaacaaaaatgagtggggctataggggaaagtgaggtcaaggcactatggtgtgcatgcttgcatttgtttcctccgtccattcaaagtgagaatgctcccattttcttactttaccattgatgtgctacaagcttatttattttaagactaacctagcctaaaaatcaactgtccccacaaaataaaaatcacattaaaaaaactaatagtgttcagactaatcttgctcaaacttatgtttccctagtcttgatgcaactgattgagtcacctggggagttggttataaacctgggcagagaccccaaatgcaatggctcagagaagataggagcttatttctgtcttatgcaatagtcagaatgggttttacagactggtgagtagctcaacatctcacagtcattcaggcacccatgttcctcccattttgtttctctgccaccccttaaggacttgccctgactgcatgattattgccgtgttgcctcaaacaggttgcagcttatgggaagcaaaaacacggtatggtagaagctctcccatagactgatggcttggctcaagagtggccgactttatttctgtacatatcccactggatagaatttagtcaatcctaactgcagagggagccagggaacacagcccaggcatgtgcctaggaaggggagaatgggtttaggttgacacttagcagctgccactatatgtggctatagtatgtatcattggaatagatgtttaactttagggacaaataaaaaaccaaaacaaaaaaaggagtaaggggagagatttgcagcaaatctttatttttaccaacctcaactatcattaatttcagtgaaccctaaatggtatccaacaaaatatctttctagaccattcaccgtctctgcctcatagatgatcatatcatgttttcttctcttctgaaacctctaatacccttgtcctatcctcattctaagctgatgaccttacttcctatttcacaaaaataatagaaaaaaaaaa

SEQ ID NO: 338358 - DNA, 966 bp, Artificial Sequence
  derived and/or modified sequence
atggccgaccccgaggtggtggtgagcagctgcagcagccacgaggaggagaaccgctgcaacttcaatcagcagacctctccatctgaagaactacttctagaggatcagatgcggcggaagctgaaatttttcttcatgaacccttgtgaaaagttctgggccaggggccgtaagccgtggaaacttgcaatccagatacttaaaatagccatggtgaccattcaactcgtgctgttcgggctgtcaaatcaaatggttgttgctttcaaggaagagaatactatcgcattcaagcatctgtttctgaaagggtacatggacaggatggatgatacatacgctgtgtatacccagtctgatgtctatgaccaacttatcttcgcggtgaatcagtacctgcagttgtacaacgtaagtgtgggtaaccatgcttatgagaataaaggaaccaaacaaagtgccatggcaatttgccagcatttctacaagagaggaaacatatatcccggcaacgatacttttgacattgatccagaaatcgaaaccgagtgcttttttgtggagccggatgagcccttccacattgggacacccgccgaaaataaattaaatctgacattggacttccaccggctactgaccgtggagctgcaatttaagctcaaagcaatcaatttgcagaccgtaagacaccaggagttgcctgactgctacgacttcaccctgacaattaccttcgataacaaggcccactctggtagaattaagatctccctggataatgacatcagcatcagggaatgcaaagactggcacgtctccgggagtatccagaaaaatacccactatatgatgatattcgatgcattcgtcatcctcacctgcctagtaagtttgattctctgtataaggagcgtaattagaggactccagcttcaacaagtaggaaatgtcgcattttag

SEQ ID NO: 338359 - DNA, 966 bp, Artificial Sequence
  derived and/or modified sequence
atggcggatccagaagtggtggtgtcttcgtgcagtagccacgaggaggagaatcggtgtaactttaaccagcagacaagtccaagcgaagaactgctgctggaagatcagatgcggaggaagctcaaattcttctttatgaacccttgcgagaagttctgggctcggggacgcaaaccatggaaactggccattcagatcctgaagatcgccatggtgacaatccagcttgtcctctttggcctttcaaatcagatggtcgtggcgtttaaagaagaaaatactatcgccttcaagcaccttttcctgaaaggctatatggatcgcatggacgatacctatgcggtgtacactcagagtgatgtgtacgaccagttaatcttcgcggttaatcagtatctgcagctgtacaatgttagcgtcgggaatcatgcatacgagaacaaaggcacgaagcaatctgccatggctatttgccagcatttttacaaaaggggcaatatttatcctggaaacgatacttttgacatcgatcctgaaattgagacggagtgcttcttcgtcgagcccgatgaacccttccacattggcacacctgccgaaaacaaacttaatctgactctggacttccataggctgttaaccgtcgagctccagttcaaactgaaggccatcaacttacagaccgtgcggcatcaagaactgcccgattgttacgattttactctgacgatcactttcgacaataaggctcactcaggacgtatcaagatctccttagataacgatatctctattcgagagtgcaaagactggcacgtctctggttctattcagaaaaacacacactatatgatgattttcgatgccttcgtgatccttacctgtctggtttctctgatcttatgcatcaggagtgtgattagaggcctgcagctacagcaggtgggcaatgtcgccttctag

SEQ ID NO: 338360 - DNA, 966 bp, Artificial Sequence
  derived and/or modified sequence
atggccgaccccgaggtggtggtgagcagctgcagcagccacgaggaggagaacagatgcaacttcaaccagcagaccagccccagcgaggagctgctgctggaggaccagatgagaagaaagctgaagttcttcttcatgaacccctgcgagaagttctgggccagaggcagaaagccctggaagctggccatccagatcctgaagatcgccatggtgaccatccagctggtgctgttcggcctgagcaaccagatggtggtggccttcaaggaggagaacaccatcgccttcaagcacctgttcctgaagggctacatggacagaatggacgacacctacgccgtgtacacccagagcgacgtgtacgaccagctgatcttcgccgtgaaccagtacctgcagctgtacaacgtgagcgtgggcaaccacgcctacgagaacaagggcaccaagcagagcgccatggccatctgccagcacttctacaagagaggcaacatctaccccggcaacgacaccttcgacatcgaccccgagatcgagaccgagtgcttcttcgtggagcccgacgagcccttccacatcggcacccccgccgagaacaagctgaacctgaccctggacttccacagactgctgaccgtggagctgcagttcaagctgaaggccatcaacctgcagaccgtgagacaccaggagctgcccgactgctacgacttcaccctgaccatcaccttcgacaacaaggcccacagcggcagaatcaagatcagcctggacaacgacatcagcatcagagagtgcaaggactggcacgtgagcggcagcatccagaagaacacccactacatgatgatcttcgacgccttcgtgatcctgacctgcctggtgagcctgatcctgtgcatcagaagcgtgatcagaggcctgcagctgcagcaggtgggcaacgtggccttctag

SEQ ID NO: 338361 - protein, 638 aa, Artificial Sequence
  derived and/or modified sequence
MEGTKEIKVSNRRIQEHWTGAVLFLLVTVIVNIKLILDTRRAISEANEDPEPEQDYDEALGRLEPPRRRGSGPRRVLDVEVYSSRSKVYVAVDGTTVLEDEAREQGRGIHVIVLNQATGHVMAKRVFDTYSPHEDEAMVLFLNMVAPGRVLICTVKDEGSFHLKDTAKALLRSLGSQAGPALGWRDTWAFVGRKGGPVFGEKHSKSPALSSWGDPVLLKTDVPLSSAEEAECHWADTELNRRRRRFCSKVEGYGSVCSCKDPTPIEFSPDPLPDNKVLNVPVAVIAGNRPNYLYRMLRSLLSAQGVSPQMITVFIDGYYEEPMDVVALFGLRGIQHTPISIKNARVSQHYKASLTATFNLFPEAKFAVVLEEDLDIAVDFFSFLSQSIHLLEEDDSLYCISAWNDQGYEHTAEDPALLYRVETMPGLGWVLRRSLYKEELEPKWPTPEKLWDWDMWMRMPEQRRGRECIIPDVSRSYHFGIVGLNMNGYFHEAYFKKHKFNTVPGVQLRNVDSLKKEAYEVEVHRLLSEAEVLDHSKNPCEDSFLPDTEGHTYVAFIRMEKDDDFTTWTQLAKCLHIWDLDVRGNHRGLWRLFRKKNHFLMVGVPASPYSVKKPPSVTPIFLEPPPKEEGAPGAPEQT

SEQ ID NO: 338362 - DNA, 1917 bp, Artificial Sequence
  derived and/or modified sequence
atggagggcacaaaggaaatcaaggtgtcgaacaggaggattcaggaacactggactggcgccgtgctcttcctcctcgtgaccgtcatcgtcaatataaaattgattctggacaccaggcgcgctatcagcgaagctaacgaagatcccgaaccagagcaggactacgatgaggcgctcggccggctggaacctcctcgacggcgagggtcagggccgcggcgcgtgctggatgtagaggtgtactccagcaggagtaaagtgtacgtcgctgtcgacggcaccactgtgcttgaggacgaagccagagaacagggcaggggtatccatgtaattgtacttaatcaggcaacaggacatgtgatggccaagcgcgtgttcgatacgtatagcccccatgaggacgaagctatggtcctgtttctaaatatggtggcacctggtcgggtgttaatctgcacggttaaggacgagggtagctttcacctgaaggataccgccaaagctcttctgcgctctctgggatcccaggccgggcctgccctaggatggagggatacttgggctttcgttgggaggaaggggggccctgtatttggcgagaaacactctaagtctcctgctctgtcttcttggggagaccccgtgctgttgaagaccgacgtcccactgagctccgcagaagaagccgaatgtcattgggctgacaccgagttaaacaggagacgcagaagattctgttccaaggtagaaggctacggctcagtgtgtagttgtaaggatccaacacctatcgaattttcacctgatcctctgccagacaataaggtgctaaacgttccggtggccgttattgctggcaacagaccaaactatctctatcgaatgctgaggtccttgcttagcgcacagggcgtttcccctcaaatgatcactgtgttcatcgatgggtactacgaagaaccaatggacgtcgtggctcttttcggactccgggggattcagcacaccccaatcagcattaaaaatgcgagagtgagccagcactacaaggcctctttgactgcaacatttaatctcttcccagaagccaagtttgctgttgtgctggaagaagatttagacatcgccgttgactttttctcctttctctctcagtccatacacctgctcgaagaggatgactctctgtattgtatctccgcatggaatgatcagggttatgagcataccgcagaggaccctgcattactttatcgggtggagaccatgccaggactcggttgggtattgcgaagaagcctatacaaggaagaattggaacccaaatggcctacccctgagaagttatgggattgggatatgtggatgagaatgccagaacaacggagggggcgagagtgcatcattcctgacgtgagccggagctatcacttcgggattgtggggctaaatatgaacggatactttcacgaggcatacttcaagaagcataagtttaatacagtgccaggagtccagctccgcaatgttgacagcttgaagaaagaagcttacgaggtggaagtacaccgtctactgtctgaagcagaggtattagatcatagcaaaaatccctgtgaggatagctttctaccagacacagaaggccacacttacgtggcttttattcgaatggagaaggacgacgacttcactacatggacacagttagctaaatgtctacacatctgggacctggatgtgagaggtaaccacaggggcctgtggagactcttcaggaagaaaaatcacttccttatggtcggggtgccagcttctccctacagcgtcaagaaacctccatctgtcactccgatctttttggaaccccctcctaaagaagaaggtgcgcctggagcccccgagcagacctag

SEQ ID NO: 338363 - DNA, 1917 bp, Artificial Sequence
  derived and/or modified sequence
atggagggcaccaaggagatcaaggtgagcaacagacgcatccaggagcactggacaggagctgtgctcttcctgctggtgaccgtcatcgtgaacatcaagctgatcctggacacccggcgggccatcagcgaggccaatgaagatcctgagcctgagcaggactatgatgaggccctgggccgcctggagcccccaagaagaagaggcagcggcccccggcgggtgctggatgtggaggtgtacagcagccgcagcaaggtgtatgtggccgtggatggcaccaccgtgctggaggatgaggcccgggagcagggccggggcatccacgtgattgtgctgaaccaggccaccggccacgtgatggccaagagggtgtttgacacctacagcccccatgaagatgaggccatggtgctcttcctgaacatggtggcccctggccgggtgctgatctgcaccgtgaaggatgagggcagcttccacctgaaggacacagccaaggccctgctgcggagcctgggcagccaggccggccctgccctgggctggagggacacctgggcctttgtgggcaggaagggcggccctgtgtttggagagaagcacagcaagagccctgccctgagctcctggggagaccctgtgctgctgaagacagatgtgcccctgagcagcgctgaggaggccgagtgccactgggccgacacagagctgaacagaagaagaagacgcttctgcagcaaggtggagggctacggctctgtgtgcagctgcaaggaccccacccccatcgagttctccccagaccccctgcctgacaacaaggtgctgaatgtgcctgtggccgtgattgctggcaaccggcccaactacctgtacaggatgctgcggagcctgctgagcgcccagggcgtgagcccccagatgatcaccgtcttcattgatggctactatgaggagcccatggatgtggtggccctgtttggcctgcggggcatccagcacacccccatcagcatcaagaatgcccgggtgtcccagcactacaaggccagcctgacagccaccttcaacctcttccctgaggccaagtttgctgtggtgctggaggaggacctggacattgctgtggacttcttctccttcctgagccagagcatccacctgctggaggaggatgacagcctgtactgcatcagcgcctggaatgaccagggctatgagcacacagcagaagatcctgccctgctgtacagagtggagaccatgcctggcctgggctgggtgctgcggcgcagcctgtacaaggaggagctggagcccaagtggcccaccccagagaagctgtgggactgggacatgtggatgaggatgcctgagcagaggcggggccgggagtgcatcatcccagatgtgagccgcagctaccactttggaattgtgggcctgaacatgaatggctacttccacgaggcctacttcaagaagcacaagttcaacacagtgcctggggtgcagctgagaaatgtggacagcctgaagaaggaggcctatgaggtggaggtgcaccggctgctgtctgaggccgaggtgctggaccacagcaagaacccctgtgaagattccttcctgcctgacacagagggccacacctacgtggccttcatccgcatggagaaggatgatgacttcaccacctggacccagctggccaagtgcctgcacatctgggacctggatgtgcggggcaaccaccggggcctgtggaggctcttcaggaagaagaaccacttcctgatggtgggcgtgcctgccagcccctacagcgtgaagaagccacccagcgtgacccccatcttcctggagcccccacccaaggaggagggcgcccctggggcccctgagcagacctag

SEQ ID NO: 338364 - DNA, 1917 bp, Artificial Sequence
  derived and/or modified sequence
atggagggcaccaaggagatcaaggtgagcaaccggcggatccaggaacattggacaggagccgtgttgttcctcctggtcacagtgatcgtaaacataaagttgattctggacacacggcgggccatcagcgaggcaaacgaagatccagagcccgaacaggactacgacgaggctctgggacgcctcgagccgccacggcggaggggcagcgggccccggagggtcctggatgtggaggtgtacagcagcaggtccaaggtctatgtcgccgtggacggaaccaccgtgttggaagacgaggcccgagagcaggggagggggatccatgttatcgtccttaaccaagctactggccatgtgatggccaaaagagtgttcgacacttacagtccccacgaggatgaggctatggtgctgttcctcaatatggtcgcacccggccgggtactgatatgtaccgttaaagacgagggaagcttccatcttaaagatacagcaaaagcacttctgagatcactcggctcccaggctggacctgctcttggatggcgcgacacttgggcatttgttgggcgaaagggcggtccagtttttggcgagaagcactctaagagccctgccctctcttcctggggcgaccccgttctgctcaaaacagacgttccactgtcatctgctgaagaggctgaatgtcactgggcagacactgagctgaatcgccgccggcggcgcttctgcagtaaggtggaaggctatggcagtgtttgctcttgcaaagacccaactcccatcgagttctcccctgaccctctcccagacaacaaggtgctcaacgtgcccgtggcggtaatcgctggcaaccgccccaactacttgtacaggatgctcaggtccctcctgagtgcccagggcgtgtctccccagatgatcaccgtgtttattgatggatactacgaggagcctatggatgttgtcgccttgtttggcctacgcggcatccagcatacgccgatctccattaaaaacgcccgggtgtcgcagcactacaaagcgtccctgactgccactttcaacctgttccccgaagcaaaatttgcagtagtacttgaggaggacctcgacatagcagttgatttcttctcctttttgtctcagtccatccacctcctggaagaagacgactctctctattgcatatccgcatggaacgaccagggctatgagcacaccgctgaggacccagccctgctgtatagggtagagacgatgcctggcctgggctgggtgctgcgcaggtctttgtacaaagaagagctggaacctaagtggcctactcccgaaaagctgtgggactgggatatgtggatgcgcatgcctgagcagagaagaggcagagaatgtatcatccccgatgtctccaggtcttaccatttcggcatcgtcggtctcaatatgaacggctacttccacgaagcctactttaagaagcacaaatttaacacagtgccaggggttcagttgcgcaacgtggattccctgaagaaagaagcgtatgaagtggaggtacatagactcctcagcgaagctgaggtcttagatcacagtaaaaatccttgcgaggatagcttccttccagataccgaggggcatacttacgtcgcattcatcaggatggaaaaagatgatgactttactacctggacgcaacttgccaagtgcctacacatctgggatctcgatgtcagaggcaatcatagaggactgtggaggctgttcagaaaaaagaaccattttctgatggtgggcgtccccgcctccccatacagcgtcaagaaaccacctagtgttactccaattttccttgaaccccctccaaaggaggaaggagcccccggcgccccagagcagacctag

SEQ ID NO: 338365 - DNA, 1917 bp, Artificial Sequence
  derived and/or modified sequence
atggaaggcactaaggagataaaagttagcaaccgcaggattcaggaacattggaccggggctgtcctgttcctcctggtgacagtgatcgtgaatataaagttgattctggatacccggcgagccatatctgaagccaatgaggatcccgaaccggagcaggactacgatgaggctctgggacgcctggaacctccaaggagaaggggatctggccctcggcgagtattagatgtcgaggtgtatagttcaagatcaaaagtgtacgtggctgttgatggaactaccgtgttggaggatgaagcaagagaacagggacgcggaatccatgtcattgtactcaatcaggctactggccacgtcatggctaaacgcgtgtttgacacatattcccctcacgaagacgaggccatggtgctgtttctgaacatggtcgctcctggcagggtccttatttgcaccgttaaggatgagggttcatttcacctcaaggatacagctaaggccctgctgaggagtctggggagccaagctgggccagctctcggctggcgtgatacttgggcctttgtgggcaggaaaggtggccctgtatttggcgaaaaacacagcaaaagccctgctctgtcttcatggggagacccggttcttctgaaaaccgatgtgcccctctcatccgccgaggaggccgagtgccattgggctgataccgagttgaaccggaggcggcgaagattttgtagcaaagttgagggctatgggtctgtatgtagctgcaaggatccgacccccatcgaatttagccctgaccccctgcctgataacaaggtgctgaacgtgccagtcgctgtcattgccggtaaccgccctaattatctctaccggatgctgcggagcctgctatctgcccagggagtgagtccacagatgatcacagtgttcatcgatgggtattacgaagagcctatggatgtcgtcgctctgttcggcctcagggggatccagcataccccaatctccatcaagaacgcccgtgtgtcacagcattataaagcaagcctcacagctacgttcaatctgtttccagaggcaaagttcgccgtagtcctggaagaggacctggacattgccgtcgatttcttttcctttttaagccagtccatccacttactcgaggaggatgattcgttatactgtatatcggcttggaatgaccagggctacgagcacactgccgaggaccctgcgttgttgtacagggtagagaccatgccaggcttgggatgggtgttgaggcgcagcctgtacaaggaagagctggaacctaagtggccaacccctgagaaattgtgggattgggatatgtggatgaggatgccagaacaaagacgtggacgggaatgtatcataccagacgtgagtcgcagctaccacttcggaatcgttgggcttaacatgaatggctattttcacgaagcttattttaaaaagcacaagttcaacaccgtacctggcgtacagctccgtaatgtggatagtctgaagaaagaggcttatgaagtggaagtgcaccgcctcctgtccgaagctgaagtgctggaccactcgaagaatccgtgtgaggactcttttctgcccgatactgaaggccacacatatgtagcctttatccgcatggagaaagatgatgatttcactacatggacacagctggctaagtgtctgcacatttgggacctcgacgtgcgaggcaatcatagaggactttggaggctttttagaaaaaaaaaccattttctgatggtgggcgttccagcaagcccttactctgttaagaagcctccttcggtaactcccatcttccttgaacctccacccaaggaagagggcgctcccggagccccagaacagacttag

SEQ ID NO: 338366 - DNA, 2355 bp, Artificial Sequence
  derived and/or modified sequence
ctgatcaggctggctttgcagagaggcacacccctgtgaggcagttagggccaggacccaggtctgatcccccgcttgggtccctgggcctggctccatctctagaaaccaacaatggaggggaccaaggaaatcaaggtctcaaatagaagaatacaggagcactggacaggggccgtgcttttcctgctggtgactgtcattgtcaatatcaagttgatcctggacactcggcgagccatcagtgaagccaatgaagacccagagccagagcaagactatgatgaggccctaggccgcctggagcccccacggcgcagaggcagtggtccccggcgggtcctggacgtagaggtgtattcaagtcgcagcaaagtatatgtggcagtggatggcaccacggtgctggaggatgaggcccgggagcagggccggggcatccatgtcattgtcctcaaccaggccacgggccacgtgatggcaaaacgtgtgtttgacacgtactcacctcatgaggatgaggccatggtgctattcctcaacatggtagcgcccggccgagtgctcatctgcactgtcaaggatgagggctccttccacctcaaggacacagccaaggctctgctgaggagcctgggcagccaggctggccctgccctgggctggagggacacatgggccttcgtgggacgaaaaggaggtcctgtcttcggggagaaacattctaaatcacctgccctctcttcctggggggacccagtcctgctgaagacagatgtgccattgagctcagcagaagaggcagagtgccactgggcagacacagagctgaaccgtcgccgccggcgcttctgcagcaaagttgagggctatggaagtgtatgcagctgcaaggaccccacacccatcgagttcagccctgacccactcccagacaacaaggtcctcaatgtgcctgtggctgtcattgcagggaaccgacccaattacctgtacaggatgctgcgctctctgctttcagcccagggggtgtctcctcagatgataacagttttcattgacggctactatgaggaacccatggatgtggtggcactgtttggtctgaggggcatccagcatactcccatcagcatcaagaatgcccgcgtgtctcagcactacaaggccagcctcactgccactttcaacctgtttccggaggccaagtttgctgtggttctggaagaggacctggacattgctgtggattttttcagtttcctgagccaatccatccacctactggaggaggatgacagcctgtactgcatctctgcctggaatgaccaggggtatgaacacacggctgaggacccagcactactgtaccgtgtggagaccatgcctgggctgggctgggtgctcaggaggtccttgtacaaggaggagcttgagcccaagtggcctacaccggaaaagctctgggattgggacatgtggatgcggatgcctgaacaacgccggggccgagagtgcatcatccctgacgtttcccgatcctaccactttggcatcgtcggcctcaacatgaatggctactttcacgaggcctacttcaagaagcacaagttcaacacggttccaggtgtccagctcaggaatgtggacagtctgaagaaagaagcttatgaagtggaagttcacaggctgctcagtgaggctgaggttctggaccacagcaagaacccttgtgaagactctttcctgccagacacagagggccacacctacgtggcctttattcgaatggagaaagatgatgacttcaccacctggacccagcttgccaagtgcctccatatctgggacctggatgtgcgtggcaaccatcggggcctgtggagattgtttcggaagaagaaccacttcctgatggtgggggtcccggcttccccctactcagtgaagaagccaccctcagtcaccccaattttcctggagccacccccaaaggaggagggagccccaggagccccagaacagacatgagacctcctccaggaccctgcggggctgggcctggctcagaatctaacctatttattgactgtcctgagggccttgaaaacaggccgaacctggagggcctggatttctttttgggctggaatgctgccctgagggtggggctggctcttactcaggaaactgctgtgcccaacccatggacaggcccagctggggcccacatgctgacacagactcactcagagacccttagacactggaccaggcctcctctcagccttctctttgtccagatttccaaagctggataagttggtcattgattaaaaaaggagaagccctctg

SEQ ID NO: 338367 - DNA, 1917 bp, Artificial Sequence
  derived and/or modified sequence
atggagggcaccaaggagatcaaggtgagcaacagaagaatccaggagcactggaccggcgccgtgctgttcctgctggtgaccgtgatcgtgaacatcaagctgatcctggacaccagaagagccatcagcgaggccaacgaggaccccgagcccgagcaggactacgacgaggccctgggcagactggagccccccagaagaagaggcagcggccccagaagagtgctggacgtggaggtgtacagcagcagaagcaaggtgtacgtggccgtggacggcaccaccgtgctggaggacgaggccagagagcagggcagaggcatccacgtgatcgtgctgaaccaggccaccggccacgtgatggccaagagagtgttcgacacctacagcccccacgaggacgaggccatggtgctgttcctgaacatggtggcccccggcagagtgctgatctgcaccgtgaaggacgagggcagcttccacctgaaggacaccgccaaggccctgctgagaagcctgggcagccaggccggccccgccctgggctggagagacacctgggccttcgtgggcagaaagggcggccccgtgttcggcgagaagcacagcaagagccccgccctgagcagctggggcgaccccgtgctgctgaagaccgacgtgcccctgagcagcgccgaggaggccgagtgccactgggccgacaccgagctgaacagaagaagaagaagattctgcagcaaggtggagggctacggcagcgtgtgcagctgcaaggaccccacccccatcgagttcagccccgaccccctgcccgacaacaaggtgctgaacgtgcccgtggccgtgatcgccggcaacagacccaactacctgtacagaatgctgagaagcctgctgagcgcccagggcgtgagcccccagatgatcaccgtgttcatcgacggctactacgaggagcccatggacgtggtggccctgttcggcctgagaggcatccagcacacccccatcagcatcaagaacgccagagtgagccagcactacaaggccagcctgaccgccaccttcaacctgttccccgaggccaagttcgccgtggtgctggaggaggacctggacatcgccgtggacttcttcagcttcctgagccagagcatccacctgctggaggaggacgacagcctgtactgcatcagcgcctggaacgaccagggctacgagcacaccgccgaggaccccgccctgctgtacagagtggagaccatgcccggcctgggctgggtgctgagaagaagcctgtacaaggaggagctggagcccaagtggcccacccccgagaagctgtgggactgggacatgtggatgagaatgcccgagcagagaagaggcagagagtgcatcatccccgacgtgagcagaagctaccacttcggcatcgtgggcctgaacatgaacggctacttccacgaggcctacttcaagaagcacaagttcaacaccgtgcccggcgtgcagctgagaaacgtggacagcctgaagaaggaggcctacgaggtggaggtgcacagactgctgagcgaggccgaggtgctggaccacagcaagaacccctgcgaggacagcttcctgcccgacaccgagggccacacctacgtggccttcatcagaatggagaaggacgacgacttcaccacctggacccagctggccaagtgcctgcacatctgggacctggacgtgagaggcaaccacagaggcctgtggagactgttcagaaagaagaaccacttcctgatggtgggcgtgcccgccagcccctacagcgtgaagaagccccccagcgtgacccccatcttcctggagcccccccccaaggaggagggcgcccccggcgcccccgagcagacctag

SEQ ID NO: 338368 - protein, 233 aa, Artificial Sequence
  derived and/or modified sequence
MASTSDKGAQGRNDKKDSQGRSNKALHLKSDAEFKKIFGLTKDLRVCLTRIPDHLTSGEGFDSFSSLVKSGTYKETEFMVKEGERKQQNFDKKRKAKTNKKMDHIKKRKTENAYNAIINGEANVTGSQLLSSILPTSDVSQHNILTSHSKTRQEKRTEMEYYTHEKQEKGTLNSNAAYEQSHFFNKNYTEDIFPVTPPELEETIRDEKIRRLKQVLREKEAALEEMRKKMHQK

SEQ ID NO: 338369 - DNA, 2484 bp, Artificial Sequence
  derived and/or modified sequence
atgatccaaatgtattccaatggcagcagtaaggaccgcaagcttcatggcaccgctcaacagttactgcaagacagcaagactaagatcgaggttattagaatgcagattctacaggcggttcagaccaatgaactggctttcgacaatgcgaagcccgtgattagtccacttgagcttagaatggaagaactacggcatcattttcggatagaatttgccgtggccgaaggagcaaagaacgtaatgaagctccttggctcagggaaagtgaccgaccgcaaggctttgtctgaggctcaggctaggttcaacgagagctctcaaaagctggacctccttaaatacagcctcgagcagagactcaatgaggtgccgaaaaatcacccaaaatctcgaataattattgaggagctttcactcgtggccgcatctccaactctgtctcccaggcagagcatgatctccactcaaaaccagtacagtacactgtccaagccggccgctctgaccggaaccctcgaggttcgactgatggggtgccaggacattctggagaatgttccagggcgaagcaaggccactagcgtcgcattgcccggttggtccccttcagagactaggtcctccttcatgtctcgtacctctaagagtaaatccggctcctcgagaaatctgctaaagaccgacgatttatcgaacgacgtgtgcgccgtcctgaagctggataacacagtagtgggacaaaccagttggaaaccgatctccaaccaaagttgggaccagaaattcaccttggaactggatagatcccgagagttggaaatcagcgtgtactggagagactggcgcagtttatgtgccgtgaaattccttcgcttggaggacttcctcgacaaccaaaggcacggtatgtgtctgtacttggagccccagggcaccctctttgccgaagttacctttttcaaccctgtgattgaaaggagaccaaagctccagcgccaaaagaaaatctttagtaaacaacagggtaagacattcttgcgcgcccctcagatgaatattaatatcgcaacttgggggaggctagttagacgggccattccaaccgtcaaccactcaggcactttcagcccccaggcaccagtgccaaccactgtccctgtggtcgacgttcgcatcccccagctggcacccccagcgagtgattccacagtcactaagctcgactttgatctcgagccagaacctccaccagctcctcccagggcttctagcctgggcgagattgacgagtctagtgaattgcgggttctggatattccagggcaggattcagaaacagtgtttgatatacagaatgacaggaattccattctgcctaaaagccagagcgagtacaagcctgacacccctcaatcaggcctggagtactcgggcattcaggaactcgaggaccggagatctcagcagcgttttcagttcaatttacaggacttcaggtgttgcgctgtgctgggtcgcgggcatttcggcaaggtgctgttggctgaatacaagaacaccaatgaaatgtttgcaatcaaagcactgaagaaaggtgatatagtggctcgggatgaggttgacagtcttatgtgcgaaaagcgcatttttgaaaccgttaattctgttcgccatccgttcctcgtgaacctgttcgcttgcttccaaactaaggagcatgtgtgcttcgtaatggagtacgctgctggcggagatctgatgatgcacatccatacggatgtgttctccgagccgagggccgttttctatgcagcatgcgtggtgctgggacttcagtatctgcatgaacataaaatcgtctatcgcgacctaaagcttgataacttactgctggacaccgagggatttgttaaaatcgccgattttgggctgtgtaaagaagggatggggtatggtgaccgcacctcaacgttctgtggcacacctgaattcttagcccccgaagtactgaccgaaaccagctacactcgagccgtagactggtggggcctgggggttctcatatatgaaatgctggtgggcgagtcaccatttcccggggatgacgaggaggaggttttcgacagcatcgtcaatgacgaggtgagataccctagattcctctccactgaggcaatttcaataatgaggagactactccgaaggaaccctgaacggaggctgggcgctagtgagaaggatgccgaggacgttaagaagcatcctttctttaggctaattgactggagtgctttaatggataaaaaggtgaaacccccattcattcccacaatccggggcagagaggacgtgagcaacttcgatgacgaattcacaagcgaagcacctattctcactccccctcgggagcccaggatattgtccgaagaggagcaggagatgttccgagacttcgactacatcgccgattggtgctag

SEQ ID NO: 338370 - DNA, 2484 bp, Artificial Sequence
  derived and/or modified sequence
atgatccagatgtacagcaatggcagcagcaaggacaggaagctgcacggcacagcccagcagctgctgcaggacagcaagaccaagattgaggtgatccgcatgcagatcctgcaggccgtgcagaccaatgagctggcctttgacaatgccaagcctgtgatcagccccctggagctgaggatggaggagctgcggcaccacttcagaattgaatttgctgtggccgagggcgccaagaatgtgatgaagctgctgggcagcggcaaggtgacagacaggaaggccctgtctgaggcccaggcccgcttcaatgaaagcagccagaagctggacctgctgaagtacagcctggagcagaggctgaatgaggtgcccaagaaccaccccaagagccgcatcatcatcgaggagctgagcctggtggccgccagccccaccctgagcccccggcagagcatgatcagcacccagaaccagtacagcaccctgagcaagccagctgccctgaccggcaccctggaggtgcggctgatgggctgccaggacatcctggagaatgtgcccggccgcagcaaggccacctctgtggccctgcccggctggagccccagcgagaccaggagcagcttcatgagcaggaccagcaagagcaagagcggcagcagcaggaacctgctgaagacagatgacctgagcaatgatgtgtgtgctgtgctgaagctggacaacacagtggtgggccagacctcctggaagcccatcagcaaccagagctgggaccagaagttcaccctggagctggacaggagccgggagctggagatctctgtgtactggagggactggaggagcctgtgtgctgtgaagttcctgcggctggaggacttcctggacaaccagagacatggcatgtgcctgtacctggagccccagggcaccctgtttgctgaggtgaccttcttcaaccctgtgattgaaagaagacccaagctgcagaggcagaagaagatcttcagcaagcagcagggcaagaccttcctgcgggccccccagatgaacatcaacatcgccacctggggccgcctggtgagaagagccatccccaccgtgaaccacagcggcaccttcagcccccaggcccctgtgcccaccaccgtgcctgtggtggatgtgcgcatcccccagctggcccccccagccagtgacagcacagtgaccaagctggactttgacctggagcctgagcccccaccagccccaccccgggccagcagcctgggggagattgatgagagcagcgagctgcgggtgctggacatccctggccaggacagcgagaccgtgtttgacatccagaatgacaggaacagcatcctgcccaagagccagagcgagtacaagccagacaccccccagagcggcctggagtacagcggcatccaggagctggaggacagaagaagccagcagcgcttccagttcaacctgcaggacttccgctgctgtgctgtgctgggccggggccactttgggaaggtgctgctggccgagtacaagaacaccaatgagatgtttgccatcaaggccctgaagaagggggacatcgtggccagagatgaggtggacagcctgatgtgtgagaagaggatctttgagaccgtgaacagcgtgcgccaccccttcctggtgaacctgtttgcctgcttccagaccaaggagcacgtgtgctttgtgatggagtatgctgctggaggagacctgatgatgcacatccacacagatgtgttcagcgagcccagggctgtgttctacgccgcctgtgtggtgctgggcctgcagtacctgcacgagcacaagatcgtgtacagagacctgaagctggacaacctgctgctggacacagagggctttgtgaagattgctgactttggcctgtgcaaggagggcatgggctatggagacaggaccagcaccttctgtggcaccccagagttcctggcccctgaggtgctgacagagaccagctacaccagggctgtggactggtggggcctgggcgtgctgatctatgagatgctggtgggggagagccccttccctggagatgatgaggaggaggtgtttgacagcatcgtgaatgatgaggtgcgctacccccgcttcctgagcacagaggccatcagcatcatgaggcggctgctgcggagaaatcctgagcggcggctgggcgccagcgagaaggatgctgaagatgtgaagaagcaccccttcttccggctgattgactggagcgccctgatggacaagaaggtgaagccacccttcatccccaccatccggggccgggaggatgtgagcaactttgatgatgagttcaccagcgaggcccccatcctgaccccaccccgggagccccgcatcctgtctgaggaggagcaggagatgttccgggactttgactacatcgctgactggtgctag

SEQ ID NO: 338371 - DNA, 2484 bp, Artificial Sequence
  derived and/or modified sequence
atgatccagatgtacagcaacggcagcagcaaggaccggaagctgcatgggacggcacagcaattattgcaagattccaagaccaaaatcgaggtgatcaggatgcagattctgcaagcagtacaaacaaacgagctggcttttgacaacgcgaagccggtaatctcaccgttagaactgcggatggaggaattgagacaccactttaggatcgaatttgccgtggccgaaggagcaaagaatgttatgaaactgctcgggagcggcaaggtgacagataggaaggcactctccgaagcccaggcccgttttaacgagtctagtcaaaaactcgacctgctgaagtactctctcgagcagcgattaaatgaagtgcccaagaaccaccccaagagccgcatcattattgaagagttgagcctggtggcagcctcccctacgctgagtccaagacagagcatgatatcaacacagaatcagtactccactttgtccaagcctgccgctctcacgggcacacttgaggtcagacttatgggatgtcaggacatcctggagaacgtgccgggccggagcaaagcaacctctgtggcccttccagggtggtccccaagcgaaactagatccagctttatgtctcggacaagcaaatccaagtccggttcttcccggaacctcctcaagaccgacgacctgtcaaacgacgtgtgcgctgtactgaagctggataacactgtagtgggccagacttcctggaaacctatttcaaatcaaagctgggatcagaagtttacactcgaactagataggagccgagagcttgagatctctgtttactggagagactggagaagcttgtgcgcagtgaagttcctgaggctggaggactttctggataaccagcgacatggcatgtgcctctaccttgagccccagggtactctgtttgctgaagtgacattttttaaccccgtgattgagaggcgtcccaagcttcaaaggcagaagaaaatctttagcaagcaacagggaaagacctttcttagagccccccaaatgaacattaatattgctacatggggtaggctggtgaggagggccatccctacggttaaccactctgggacctttagccctcaagcccccgtccccacgaccgtgcctgtggttgacgtgcgcatcccccagctggctccacccgcaagtgatagcacggtcactaaactggactttgacctggaacctgagccaccacccgcccctccaagggcttcgtcgctgggcgagattgatgaatcgtctgagcttcgcgttctcgatatcccaggccaggactcagaaaccgtattcgatatccagaatgaccgaaacagcatattgcctaaatcccagtcagaatataagcccgacactcctcaatctgggctggagtatagcggcatccaggaactggaagacagacggtcgcaacagcgctttcagttcaatttgcaggacttcaggtgttgtgccgtcctgggaagaggacatttcggaaaggtactcctggccgagtacaagaataccaacgagatgttcgctatcaaggcactgaagaagggtgacatcgttgctagggatgaagtcgacagtcttatgtgtgaaaaaagaatcttcgagaccgtcaacagcgttcgacatccctttctcgttaatctgttcgcctgttttcagactaaagagcatgtgtgttttgtaatggaatacgccgctggtggcgacctgatgatgcacatacataccgatgtgttctctgaaccacgggccgttttttatgcggcatgtgtagttctaggactacagtatctgcatgagcacaagatcgtctatagggacctgaagctggataacctgttgcttgataccgaaggattcgttaagatcgccgatttcggactctgcaaagaggggatgggttacggtgatcgtacatcgaccttttgcggtactcctgagtttctggcccctgaggtgcttaccgagacttcgtacactcgtgctgttgattggtggggcttaggggtcctgatttatgaaatgcttgttggggagagccccttcccaggtgatgacgaggaagaggtgttcgatagcatcgtcaacgacgaagtgcgatatcctaggttccttagtacagaggctatctccatcatgcggcgactgctgcggaggaaccctgagagacggctaggcgcctctgagaaagatgccgaggacgtgaaaaaacaccccttctttcgcctgatcgattggtccgccctcatggacaagaaggttaagccgccattcatcccaacgataagagggagggaggacgtttctaacttcgacgacgagtttaccagtgaagctccgatcctcaccccaccccgcgagccccgcatactctccgaggaggagcaggagatgttccgggactttgactacatcgctgattggtgctag

SEQ ID NO: 338372 - DNA, 2484 bp, Artificial Sequence
  derived and/or modified sequence
atgattcagatgtacagtaatggttcatccaaggatcggaaactgcacgggaccgcccagcagttgctccaggatagcaaaacaaagattgaggtcatccgtatgcagattctgcaggcagtgcagaccaacgaactggcctttgataatgccaagccagtgatttcccccctggaacttcgcatggaggagctgagacaccacttcagaatagaattcgctgtcgcagagggcgctaagaacgtgatgaagttgctcggtagcggaaaggtgacggatagaaaagccctctcagaggctcaagcgcgttttaacgaatcaagtcagaaactagatctgctcaaatatagcctggagcagcgtctgaatgaagtgcctaagaatcaccccaagtctcgcatcataattgaggaactttccctcgtagctgccagtcctacattaagcccaaggcaaagcatgatctccactcagaaccaatattcaacactcagcaaacccgctgccctgaccggtaccctggaagtgaggctgatgggttgccaagatattctggagaatgtccctggacgaagcaaagccaccagcgtggctctcccgggttggtctccctccgaaaccagatcttccttcatgagtaggacctcaaaaagtaagtcaggaagcagcaggaatctgctcaaaacagacgatctttcgaacgatgtatgtgccgtgcttaagttggacaacacagttgtcggccagactagctggaagcctatctccaaccagtcctgggatcagaagttcacattggaactggacaggtccagagagttggagatcagcgtgtattggagggattggaggagcctctgcgctgtcaaattcctgcgacttgaggacttcctggataaccagcggcatggcatgtgcctgtaccttgagccacagggtacactttttgcagaagtcactttctttaatcccgtgattgaacgacgcccaaagctgcagaggcagaaaaagattttcagtaagcagcaaggaaaaacatttctgcgtgctccccagatgaacattaatatcgctacctggggccgtctcgttaggcgcgctatccctaccgtaaaccattctgggacattttccccgcaagcaccagtcccaaccacggttcccgtagtagatgttcgcatccctcagctggctccgcctgcaagtgatagtacagtgaccaaactggatttcgatctggagccagaacctccaccagcccctccccgagcctcttccctgggcgaaattgatgagagctcagaactacgggtgctcgatatcccagggcaggattccgagaccgtgttcgacatccagaacgatcgtaacagcattctccctaaaagccaatctgaatacaagccagatacgccacaaagtggcttagagtactcaggcatccaggagttagaggataggcgttctcagcaaaggttccagttcaatctgcaagacttccgatgttgcgcagttttaggcagaggccactttggaaaggttctgctggctgagtataagaataccaatgaaatgtttgccatcaaagccctcaaaaaaggggatatcgtggccagggatgaagttgattctctgatgtgtgaaaagcgtatcttcgagaccgtaaattcagtgcgtcacccgtttttggtaaacctgttcgcctgtttccagaccaaggaacatgtctgtttcgtaatggaatatgcagccggaggagacttgatgatgcatatccatacagatgtcttctccgagcctcgtgcggttttctacgccgcatgtgtggtgctggggcttcagtacctgcatgagcacaagatcgtctatcgagaccttaagctggacaacttactgttggacaccgaaggcttcgtgaagattgcagactttggattatgtaaggaaggcatgggatacggtgatcggacaagtacattttgcggcacccccgaattcctggcgcctgaagttcttacagaaacaagctatactagggctgtcgactggtggggactcggagtcctcatttacgagatgttggtgggcgaatcgcccttcccaggagacgacgaagaagaggtcttcgactcaatagtgaatgacgaagtgcgctatccacgcttcctatctactgaagcgatctctattatgaggcggctgctcagacggaaccccgagaggcgacttggggcttctgagaaggacgctgaggacgtcaaaaaacacccgttcttccgactgatcgactggagcgccctgatggacaagaaagtcaaaccaccttttattccaaccatccgcggacgcgaggacgtctccaactttgatgacgaatttacatcggaggcgcctatactgacgccgccaagggaaccccgtatcctcagcgaggaggaacaggagatgtttcgagactttgactacattgctgattggtgttag

SEQ ID NO: 338373 - DNA, 3147 bp, Artificial Sequence
  derived and/or modified sequence
tcctggcgtcgcccagagggagcgactagacgaacagtccggtgagggcggcgagaggaagcccgctacgagtgccctagctccccgccgctctcgatgaaccggacggaataagccgcgcctccagcaggggctgcgcctccatgaatccctagttgtttttttttttttctttctctcccctctcctcacccccaccccgagccccgtcccgccttctcccttcgccagaggcggccgcgtccaggtgcggagtccataccggagcgcaatggcgtccaaccccgaacggggggagattctgctcacggaactgcagattgcccaaggactccagatactccaaataatgaccctcgttgttctactagcaacaatagattgaaggccttacaaaaacaattggatatagaacttaaagtaaaacaaggtgcagagaatatgatacagatgtattcaaatggatcttcaaaggatcggaaactccatggtacagctcagcaactgctccaggacagcaagacaaaaatagaagtcatacgaatgcagattcttcaggcagtccagactaatgaattggcttttgataatgcaaaacctgtgataagtcctcttgaacttcggatggaagaattaaggcatcattttaggatagagtttgcagtagcagaaggtgcaaagaatgtaatgaaattacttggctcaggaaaagtaacagacagaaaagcactttcagaagctcaagcaagatttaatgaatcaagtcagaagttggaccttttaaagtattcattagagcaaagattaaacgaagtccccaagaatcatcccaaaagcaggattattattgaagaactttcacttgttgctgcatcaccaacactaagtccacgtcaaagtatgatatctacgcaaaatcaatatagtacactatccaaaccagcagcactaacaggtactttggaagttcgtcttatgggctgccaagatatcctagagaatgtccctggacggtcaaaagcaacatcagttgcactgcctggttggagtccaagtgaaaccagatcatctttcatgagcagaacgagtaaaagtaaaagcggaagtagtcgaaatcttctaaaaaccgatgacttgtccaatgatgtctgtgctgttttgaagctcgataatactgtggttggccaaactagctggaaacccatttccaatcagtcatgggaccagaagtttacactggaactggacaggtcacgtgaactggaaatttcagtttattggcgtgattggcggtctctgtgtgctgtaaaatttctgaggttagaagattttttagacaaccaacggcatggcatgtgtctctatttggaaccacagggtactttatttgcagaggttaccttttttaatccagttattgaaagaagaccaaaacttcaaagacaaaagaaaattttttcaaagcaacaaggcaaaacatttctcagagctcctcaaatgaatattaatattgccacttggggaaggctagtaagaagagctattcctacagtaaatcattctggcaccttcagccctcaagctcctgtgcctactacagtgccagtggttgatgtacgcatccctcaactagcacctccagctagtgattctacagtaaccaaattggactttgatcttgagcctgaacctcctccagccccaccacgagcttcttctcttggagaaatagatgaatcttctgaattaagagttttggatataccaggacaggattcagagactgtttttgatattcagaatgacagaaatagtatacttccaaaatctcaatctgaatacaagcctgatactcctcagtcaggcctagaatatagtggtattcaagaacttgaggacagaagatctcagcaaaggtttcagtttaatctacaagatttcaggtgttgtgctgtcttgggaagaggacattttggaaaggtgcttttagctgaatataaaaacacaaatgagatgtttgctataaaagccttaaagaaaggagatattgtggctcgagatgaagtagacagcctgatgtgtgaaaaaagaatttttgaaactgtgaatagtgtaaggcatccctttttggtgaacctttttgcatgtttccaaaccaaagagcatgtttgctttgtaatggaatatgctgccggtggggacctaatgatgcacattcatactgatgtcttttctgaaccaagagctgtattttatgctgcttgtgtagttcttgggttgcagtatttacatgaacacaaaattgtttatagagatttgaaattggataacttattgctagatacagagggctttgtgaaaattgctgattttggtctttgcaaagaaggaatgggatatggagatagaacaagcacattttgtggcactcctgaatttcttgccccagaagtattaacagaaacttcttatacaagggctgtagattggtggggccttggcgtgcttatatatgaaatgcttgttggtgagtctccctttcctggtgatgatgaagaggaagtttttgacagtattgtaaatgatgaagtaaggtatccaaggttcttatctacagaagccatttctataatgagaaggctgttaagaagaaatcctgaacggcgccttggggctagcgagaaagatgcagaggatgtaaaaaagcacccatttttccggctaattgattggagcgctctgatggacaaaaaagtaaagccaccatttatacctaccataagaggacgagaagatgttagtaattttgatgatgaatttacctcagaagcacctattctgactccacctcgagaaccaaggatactttcggaagaggagcaggaaatgttcagagattttgactacattgctgattggtgttaagttgctagacactgcgaaaccaagctgactcacaagaagacctcttaaaaatagcaacccttcatttgctctctgtgccaccaatagcttctgagttttttgttgttgttgtttttattgaaacacgtgaagatttgtttaaaagtaccattctaatacttcttcaaaagtggctcctcattgtacttcagcgtaaatatgagcactggaaacagtttcatg

SEQ ID NO: 338374 - DNA, 2484 bp, Artificial Sequence
  derived and/or modified sequence
atgatccagatgtacagcaacggcagcagcaaggacagaaagctgcacggcaccgcccagcagctgctgcaggacagcaagaccaagatcgaggtgatcagaatgcagatcctgcaggccgtgcagaccaacgagctggccttcgacaacgccaagcccgtgatcagccccctggagctgagaatggaggagctgagacaccacttcagaatcgagttcgccgtggccgagggcgccaagaacgtgatgaagctgctgggcagcggcaaggtgaccgacagaaaggccctgagcgaggcccaggccagattcaacgagagcagccagaagctggacctgctgaagtacagcctggagcagagactgaacgaggtgcccaagaaccaccccaagagcagaatcatcatcgaggagctgagcctggtggccgccagccccaccctgagccccagacagagcatgatcagcacccagaaccagtacagcaccctgagcaagcccgccgccctgaccggcaccctggaggtgagactgatgggctgccaggacatcctggagaacgtgcccggcagaagcaaggccaccagcgtggccctgcccggctggagccccagcgagaccagaagcagcttcatgagcagaaccagcaagagcaagagcggcagcagcagaaacctgctgaagaccgacgacctgagcaacgacgtgtgcgccgtgctgaagctggacaacaccgtggtgggccagaccagctggaagcccatcagcaaccagagctgggaccagaagttcaccctggagctggacagaagcagagagctggagatcagcgtgtactggagagactggagaagcctgtgcgccgtgaagttcctgagactggaggacttcctggacaaccagagacacggcatgtgcctgtacctggagccccagggcaccctgttcgccgaggtgaccttcttcaaccccgtgatcgagagaagacccaagctgcagagacagaagaagatcttcagcaagcagcagggcaagaccttcctgagagccccccagatgaacatcaacatcgccacctggggcagactggtgagaagagccatccccaccgtgaaccacagcggcaccttcagcccccaggcccccgtgcccaccaccgtgcccgtggtggacgtgagaatcccccagctggccccccccgccagcgacagcaccgtgaccaagctggacttcgacctggagcccgagcccccccccgccccccccagagccagcagcctgggcgagatcgacgagagcagcgagctgagagtgctggacatccccggccaggacagcgagaccgtgttcgacatccagaacgacagaaacagcatcctgcccaagagccagagcgagtacaagcccgacaccccccagagcggcctggagtacagcggcatccaggagctggaggacagaagaagccagcagagattccagttcaacctgcaggacttcagatgctgcgccgtgctgggcagaggccacttcggcaaggtgctgctggccgagtacaagaacaccaacgagatgttcgccatcaaggccctgaagaagggcgacatcgtggccagagacgaggtggacagcctgatgtgcgagaagagaatcttcgagaccgtgaacagcgtgagacaccccttcctggtgaacctgttcgcctgcttccagaccaaggagcacgtgtgcttcgtgatggagtacgccgccggcggcgacctgatgatgcacatccacaccgacgtgttcagcgagcccagagccgtgttctacgccgcctgcgtggtgctgggcctgcagtacctgcacgagcacaagatcgtgtacagagacctgaagctggacaacctgctgctggacaccgagggcttcgtgaagatcgccgacttcggcctgtgcaaggagggcatgggctacggcgacagaaccagcaccttctgcggcacccccgagttcctggcccccgaggtgctgaccgagaccagctacaccagagccgtggactggtggggcctgggcgtgctgatctacgagatgctggtgggcgagagccccttccccggcgacgacgaggaggaggtgttcgacagcatcgtgaacgacgaggtgagataccccagattcctgagcaccgaggccatcagcatcatgagaagactgctgagaagaaaccccgagagaagactgggcgccagcgagaaggacgccgaggacgtgaagaagcaccccttcttcagactgatcgactggagcgccctgatggacaagaaggtgaagccccccttcatccccaccatcagaggcagagaggacgtgagcaacttcgacgacgagttcaccagcgaggcccccatcctgaccccccccagagagcccagaatcctgagcgaggaggagcaggagatgttcagagacttcgactacatcgccgactggtgctag

SEQ ID NO: 338375 - protein, 211 aa, Artificial Sequence
  derived and/or modified sequence
  misc_feature (1)..(1): Xaa can be any naturally occurring amino acid
XEELRHHFRIEFAVAEGAKNVMKLLGSGKVTDRKALSEAQARFNESSQKLDLLKYSLEQRLNEVPKNHPKSRIIIEELSLVAASPTLSPRQSMISTQNQYSTLSKPAALTDDVCAVLKLDNTVVGQTSWKPISNQSWDQKFTLELDRSRELEISVYWRDWRSLCAVKFLRLEDFLDNQRHGMCLYLEPQGTLFAEVTFFNPVIERRPKLQR

SEQ ID NO: 338376 - DNA, 636 bp, Artificial Sequence
  derived and/or modified sequence
tgagaggagttgcggcaccatttccggatagaattcgccgtggctgagggcgccaagaacgtgatgaaattgctaggcagcggtaaagttacagatcgcaaagcgttgtccgaggctcaagcccgttttaacgaatccagtcagaagctcgacctgctaaagtattccctagaacagaggcttaacgaagtccctaagaaccatccaaaaagtcgcatcatcattgaagaactgtcacttgttgctgcttcccccacgttgtcccctcggcagagcatgatttccacacagaatcagtactcaacgctttcaaaaccggcagcgctcaccgatgatgtgtgcgccgtcctaaagctggataacactgtcgtgggccagacgagttggaagcctatcagcaatcagagttgggatcagaaatttaccctggaactcgatagaagtcgggagctggagatcagtgtttattggagggactggcgctctttatgtgcagtgaaatttctgaggctggaggactttctagacaaccagaggcacggaatgtgcctttacttggagccacagggcacattgtttgctgaagttactttctttaatcccgttatcgagaggagacctaagttgcagcgatag

SEQ ID NO: 338377 - DNA, 636 bp, Artificial Sequence
  derived and/or modified sequence
tgagaagagctgcggcaccacttccgcatcgagtttgctgtggccgagggcgccaagaatgtgatgaagctgctgggcagcggcaaggtgacagacaggaaggccctgtctgaggcccaggcccgcttcaatgaaagcagccagaagctggacctgctgaagtacagcctggagcagaggctgaatgaggtgcccaagaaccaccccaagagccgcatcatcatcgaggagctgagcctggtggccgccagccccaccctgagcccccggcagagcatgatcagcacccagaaccagtacagcaccctgagcaagccagctgccctgacagatgatgtgtgtgctgtgctgaagctggacaacacagtggtgggccagacctcctggaagcccatcagcaaccagagctgggaccagaagttcaccctggagctggacaggagccgggagctggagatctctgtgtactggagggactggaggagcctgtgtgctgtgaagttcctgcggctggaggacttcctggacaaccagagacatggcatgtgcctgtacctggagccccagggcaccctgtttgctgaggtgaccttcttcaaccctgtgattgaaagaagacccaagctgcagaggtag

SEQ ID NO: 338378 - DNA, 636 bp, Artificial Sequence
  derived and/or modified sequence
tgagaggagctgcggcaccacttccggatcgagttcgccgtggccgagggagcaaaaaacgtgatgaaactcctcgggtcaggtaaagtgacagacaggaaagctttgtccgaggcacaggcgaggtttaacgagtcaagtcagaaactcgatctgctcaagtacagcctggagcagcgcctaaacgaagtcccaaagaatcatccgaagtcaagaatcataattgaagagctgtcactggtagctgcttctccgactctgtcgccacgccagtctatgatcagtacgcagaatcagtactcaacgctgtccaagccagcagccctgacagacgatgtgtgtgcggtgttaaagttggataatacagtcgtcggccagactagctggaagcccatcagtaaccagagctgggatcagaagtttaccctcgagcttgacaggagccgggaactggaaattagtgtctactggagggattggagatccctgtgtgctgtgaaattcctgaggctagaagacttcctggacaaccagaggcacggcatgtgcctgtaccttgagccccaagggactctgttcgccgaggtgacattcttcaatccagtgatcgagcgtagaccaaagctgcagcgctag

SEQ ID NO: 338379 - DNA, 636 bp, Artificial Sequence
  derived and/or modified sequence
taagaagaactaagacatcatttccggattgagtttgctgtggctgaaggtgcaaaaaacgtcatgaaactgctgggctcaggcaaggtcaccgatcgcaaagctttgagcgaggcacaagccagattcaatgagtccagtcaaaagctcgatttattgaaatactccctggagcagagattgaatgaagttcctaaaaatcacccaaagtcccgtatcattattgaggaactcagtctggtggcggcatctccgactttgagtcctaggcagagtatgatctctacccaaaaccagtactccaccctgagcaagcccgcagcgctcaccgatgacgtgtgtgccgtgctgaagctagacaacaccgttgtggggcaaacatcgtggaagcccataagtaaccagagctgggatcaaaaattcactctggaactcgatagatcaagagagctcgagatctccgtatattggagagactggcgttccttgtgcgccgtgaaatttttgcgtttagaagactttctggacaaccagcgtcacggaatgtgtctctaccttgaaccccagggaacactgtttgcagaggttactttctttaaccccgtgatagagcggagacccaaactgcagagatag

SEQ ID NO: 338380 - DNA, 632 bp, Artificial Sequence
  derived and/or modified sequence
ggaagaattaaggcatcattttaggatagagtttgcagtagcagaaggtgcaaagaatgtaatgaaattacttggctcaggaaaagtaacagacagaaaagcactttcagaagctcaagcaagatttaatgaatcaagtcagaagttggaccttttaaagtattcattagagcaaagattaaacgaagtccccaagaatcatcccaaaagcaggattattattgaagaactttcacttgttgctgcatcaccaacactaagtccacgtcaaagtatgatatctacgcaaaatcaatatagtacactatccaaaccagcagcactaacagatgatgtctgtgctgttttgaagctcgataatactgtggttggccaaactagctggaaacccatttccaatcagtcatgggaccagaagtttacactggaactggacaggtcacgtgaactggaaatttcagtttattggcgtgattggcggtctctgtgtgctgtaaaatttctgaggttagaagattttttagacaaccaacggcatggcatgtgtctctatttggaaccacagggtactttatttgcagaggttaccttttttaatccagttattgaaagaagaccaaaacttcaaagac

SEQ ID NO: 338381 - DNA, 636 bp, Artificial Sequence
  derived and/or modified sequence
tgagaggagctgagacaccacttcagaatcgagttcgccgtggccgagggcgccaagaacgtgatgaagctgctgggcagcggcaaggtgaccgacagaaaggccctgagcgaggcccaggccagattcaacgagagcagccagaagctggacctgctgaagtacagcctggagcagagactgaacgaggtgcccaagaaccaccccaagagcagaatcatcatcgaggagctgagcctggtggccgccagccccaccctgagccccagacagagcatgatcagcacccagaaccagtacagcaccctgagcaagcccgccgccctgaccgacgacgtgtgcgccgtgctgaagctggacaacaccgtggtgggccagaccagctggaagcccatcagcaaccagagctgggaccagaagttcaccctggagctggacagaagcagagagctggagatcagcgtgtactggagagactggagaagcctgtgcgccgtgaagttcctgagactggaggacttcctggacaaccagagacacggcatgtgcctgtacctggagccccagggcaccctgttcgccgaggtgaccttcttcaaccccgtgatcgagagaagacccaagctgcagagatag

SEQ ID NO: 338382 - protein, 65 aa, Artificial Sequence
  derived and/or modified sequence
  misc_feature (1)..(1): Xaa can be any naturally occurring amino acid
XGFVKIADFGLCKEGMGYGDRTSTFCGTPEFLAPEVLTETSYTRAVDWWGLGVLIYEMLVGETSV

SEQ ID NO: 338383 - protein, 111 aa, Artificial Sequence
  derived and/or modified sequence
MHIHTDVFSEPRAVFYAACVVLGLQYLHEHKIVYRDLKLDNLLLDTEGFVKIADFGLCKEGMGYGDRTSTFCGTPEFLAPEVLTETSYTRAVDWWGLGVLIYEMLVGETSV

SEQ ID NO: 338384 - DNA, 198 bp, Artificial Sequence
  derived and/or modified sequence
tgaggatttgtgaagatcgcagattttgggctctgcaaggagggcatgggttatggtgaccggacatctaccttctgtggcactccggagttcctggcaccggaggttctcaccgaaacctcctacaccagggctgttgattggtggggacttggtgtgctgatctacgagatgctggtgggagagacttccgtgtag

SEQ ID NO: 338385 - DNA, 1977 bp, Artificial Sequence
  derived and/or modified sequence
atgaacagcactctagaggtgcggctcatgggttgtcaggatattctcgaaaatgttccaggccgttcaaaggcaacaagtgttgctttgccaggctggagtccgtcagagacacgcagttccttcatgtctcggacttctaaatccaagtcaggaagcagtaggaatttacttaaaacagacgatctgagcaacgacgtttgcgctgtactcaaactggataacaccgttgtcggccagacgagttggaagccaatatccaaccagtcttgggatcagaaattcacgcttgagctggatcggtcacgcgaactggagatctctgtttattggagggactggcggtccctatgcgccgttaaattcctgagactcgaggacttcctcgacaatcagcggcacggcatgtgcctgtatctcgaacctcaaggcaccctgttcgccgaagtcacattctttaatccggttatcgagcggcgacccaaactccagcgacaaaaaaagatcttttccaaacaacaggggaaaaccttcctcagagctccacagatgaacatcaatatagccacctgggggcggttagtcaggagggccatccccaccgttaatcattcaggaaccttctctccgcaggctcccgttcccaccacagtcccggtggtggacgtgcggattccacagctcgccccccctgcaagtgactcaacggtgacaaaactggatttcgatctcgagcctgaacctcccccagcgcctccgagagccagtagcctaggcgaaattgacgagagtagcgagctcagggttctggacattcccggacaggacagcgaaacagtgtttgacatacagaatgatcgcaatagcatcctccccaagtcccagtccgaatacaagccagacacgccccagagtggcttggaatactccggaattcaagaactggaagacaggcgtagccagcagaggtttcagtttaatctgcaggacttcagatgttgtgctgtcctcggccggggccacttcggtaaggtgctattagccgagtacaaaaacacaaacgaaatgttcgccataaaagctctgaagaaaggcgatattgtcgcacgtgacgaggtcgactctcttatgtgcgaaaaacgaatcttcgagacagtgaactccgtgagacacccgtttttagtcaacttattcgcatgtttccagaccaaggagcacgtgtgcttcgttatggagtatgcagcgggaggggacttaatgatgcatatccatacggacgtgttttctgaaccccgcgcagttttttacgccgcttgcgtcgtcttgggcttgcagtaccttcacgagcataaaattgtgtaccgggatctaaaactggacaacctgcttctggataccgagggattcgtgaagattgctgacttcggactgtgcaaagaaggaatggggtacggtgataggaccagcacattctgtggcacgccagagttccttgcccctgaagtcttaaccgagacttcgtatactagagccgtggattggtggggattaggagtgctgatctatgagatgctggttggtgagtccccgtttcctggtgatgacgaagaggaagtgtttgatagcatcgtgaatgacgaggtgagatatcctaggttcttgagcaccgaggccatcagcatcatgcggcgactgctgcgccggaatcccgaacggcgtctgggagccagtgaaaaggacgctgaggacgtcaagaagcacccattcttcaggcttatcgattggagcgccttgatggataagaaggtaaaaccaccgttcatcccaacaatcagagggagagaggatgtttccaactttgacgatgaatttacttctgaagccccaatcttgacgcctcctagagagcctcgcatattaagtgaggaagaacaggaaatgtttcgggactttgattacatagcagattggtgctag

SEQ ID NO: 338386 - DNA, 336 bp, Artificial Sequence
  derived and/or modified sequence
atgcacatacacaccgatgtcttttcagagccccgggccgtgttttacgctgcttgtgtagtgctcgggctgcagtatctccacgaacacaaaatagtgtaccgcgatctgaagctggacaacctacttctggatacagagggtttcgtgaagattgctgatttcgggctctgtaaggaaggcatgggctatggagacaggacctccaccttctgcgggacaccagagtttctggcaccggaggtgctgacagagactagttacacccgtgccgtggattggtggggtctgggagtactgatatatgagatgcttgtaggagagaccagcgtgtag

SEQ ID NO: 338387 - DNA, 198 bp, Artificial Sequence
  derived and/or modified sequence
tgaggatttgtgaagattgctgactttggcctgtgcaaggagggcatgggctacggggacaggaccagcaccttctgtggcaccccagagttcctggcccctgaggtgctgacagagaccagctacaccagggctgtggactggtggggcctgggcgtgctgatctatgagatgctggtgggggagacctctgtgtag

SEQ ID NO: 338388 - DNA, 1977 bp, Artificial Sequence
  derived and/or modified sequence
atgaacagcaccctggaggtgcggctgatgggctgccaggacatcctggagaatgtgcccggccgcagcaaggccacctctgtggccctgcccggctggagccccagcgagaccaggagcagcttcatgagcaggaccagcaagagcaagagcggcagcagcaggaacctgctgaagacagatgacctgagcaatgatgtgtgtgctgtgctgaagctggacaacacagtggtgggccagacctcctggaagcccatcagcaaccagagctgggaccagaagttcaccctggagctggacaggagccgggagctggagatctctgtgtactggagggactggaggagcctgtgtgctgtgaagttcctgcggctggaggacttcctggacaaccagagacatggcatgtgcctgtacctggagccccagggcaccctgtttgctgaggtgaccttcttcaaccctgtgattgaaagaagacccaagctgcagaggcagaagaagatcttcagcaagcagcagggcaagaccttcctgcgggccccccagatgaacatcaacatcgccacctggggccgcctggtgcggcgggccatccccaccgtgaaccacagcggcaccttcagcccccaggcccctgtgcccaccaccgtgcctgtggtggatgtgcgcatcccccagctggcccccccagccagtgacagcacagtgaccaagctggactttgacctggagcctgagcccccaccagccccaccccgggccagcagcctgggggagattgatgagagcagcgagctgcgggtgctggacatccctggccaggacagcgagaccgtgtttgacatccagaatgacagaaattccatcctgcccaagagccagagcgagtacaagccagacaccccccagagcggcctggagtacagcggcatccaggagctggaggaccggcgcagccagcagcgcttccagttcaacctgcaggacttccgctgctgtgctgtgctgggccggggccactttgggaaggtgctgctggccgagtacaagaacaccaatgagatgtttgccatcaaggccctgaagaagggggacatcgtggccagagatgaggtggacagcctgatgtgtgagaagaggatctttgaaacagtgaacagcgtgcgccaccccttcctggtgaacctgtttgcctgcttccagaccaaggagcacgtgtgctttgtgatggagtatgctgctggaggagacctgatgatgcacatccacacagatgtgttttctgagcccagggctgtgttctatgctgcctgtgtggtgctgggcctgcagtacctgcacgagcacaagatcgtgtacagagacctgaagctggacaacctgctgctggacacagagggctttgtgaagattgctgactttggcctgtgcaaggagggcatgggctacggggacaggaccagcaccttctgtggcaccccagagttcctggcccctgaggtgctgacagagaccagctacaccagggctgtggactggtggggcctgggcgtgctgatctatgagatgctggtgggggagagccccttccctggagatgatgaggaggaggtgtttgacagcatcgtgaatgatgaggtgcgctacccccgcttcctgagcacagaggccatcagcatcatgaggcggctgctgcggaggaaccctgagcggcggctgggcgccagcgagaaggatgctgaagatgtgaagaagcaccccttcttccggctgattgactggagcgccctgatggacaagaaggtgaagccacccttcatccccaccatccggggcagagaagatgtgagcaactttgatgatgagttcaccagcgaggcccccatcctgaccccaccccgggagccccgcatcctgtctgaggaggagcaggagatgttccgggactttgactacatcgctgactggtgctag

SEQ ID NO: 338389 - DNA, 336 bp, Artificial Sequence
  derived and/or modified sequence
atgcacatccacacagatgtgttttctgagcccagggctgtgttctatgctgcctgtgtggtgctgggcctgcagtacctgcacgagcacaagatcgtgtacagagacctgaagctggacaacctgctgctggacacagagggctttgtgaagattgctgactttggcctgtgcaaggagggcatgggctacggggacaggaccagcaccttctgtggcaccccagagttcctggcccctgaggtgctgacagagaccagctacaccagggctgtggactggtggggcctgggcgtgctgatctatgagatgctggtgggggagacctctgtgtag

SEQ ID NO: 338390 - DNA, 198 bp, Artificial Sequence
  derived and/or modified sequence
tgaggcttcgtgaagatcgccgacttcggcctgtgcaaggagggcatgggctacggggatcggacctctacgttctgtggtactcccgagttcctggctcctgaagtgctcacggaaacatcctatacccgtgcagtggactggtggggcctgggcgttctcatttatgagatgttggtgggcgagactagtgtgtag

SEQ ID NO: 338391 - DNA, 1977 bp, Artificial Sequence
  derived and/or modified sequence
atgaacagcaccctggaggtgcggctgatgggctgccaggacatccttgagaacgtgccgggacggagcaaggccacctcagtcgcactccccggctggagcccatctgagactaggtcttcattcatgagtcgcacctctaagagtaaaagcggcagtagccgcaatcttctaaaaacggacgacttgtctaacgatgtatgcgccgtgctaaagctcgacaatacggtggttggccaaacgtcctggaagccgatttctaaccagtcttgggaccagaaatttacgcttgaactggatcgaagccgcgagctggaaataagcgtgtattggcgcgactggaggtcactctgtgccgttaagttcctgcgcttggaagattttctcgacaaccagagacacggtatgtgcctatatctcgaacctcaggggaccctgttcgccgaagtcactttctttaaccctgtcatcgagaggcgacccaagctacagaggcagaagaagattttcagtaaacagcaaggaaaaacatttctgcgcgctccccagatgaatattaatatcgctacctggggccggttagtgagaagggccatacccacagtgaatcactccgggactttcagcccacaggcccctgtccctacaaccgtgccggtggtggacgtgcgtataccacagctggccccaccagcatcagatagcacggtcaccaagttggatttcgatctggagcccgagcctcctcctgccccaccacgagccagcagcctcggcgagattgacgagagttcggaattgagggtgctggatataccaggccaggattccgaaacagtatttgatattcagaacgatagaaacagtattctccccaaaagccagagtgaatacaagcctgatacaccacaaagcggtcttgagtactctgggatacaggaactagaggataggcgcagccagcagcggttccaatttaacctgcaggacttcagatgttgtgccgtcttggggcgaggacatttcgggaaggtgctgctcgccgaatataaaaacactaatgaaatgttcgcgatcaaggcgctgaaaaaaggggacattgtggcgagagatgaggtggactctcttatgtgtgagaaaagaattttcgagactgtgaatagtgtgcgacaccctttcctggttaaccttttcgcatgctttcaaacaaaggaacacgtgtgcttcgtgatggaatacgccgctggcggcgacctgatgatgcacatacacaccgatgtgttctcggaaccgcgagcagtgttttatgcagcatgcgtagtgctgggccttcagtacttgcatgagcataaaatagtctaccgggacctgaaacttgataacctgctcctggatacagagggattcgtgaagattgctgatttcggactgtgcaaagaggggatggggtacggtgaccgcacaagtacattttgcggcacaccagaattcttggcccccgaagttttgaccgaaacgtcatacacccgagcagtagattggtggggactaggcgtgctgatttatgagatgttggtgggcgagtccccatttcccggtgatgacgaggaagaggtctttgacagcatagtcaatgacgaggtgcgctatccaaggttcctctccaccgaagcaattagtattatgaggaggctcctccggcggaatcccgagcgaagactcggcgccagtgaaaaagatgctgaagatgttaagaagcatcctttcttcagactgatcgactggtccgcactcatggacaaaaaagtgaaaccaccatttattcctacaatccgaggcagagaagacgttagtaacttcgatgatgagttcacgtctgaggcacccatcctaactcctccacgcgaacctcggatactatcggaggaggaacaagagatgttccgtgatttcgattatatcgctgattggtgttag

SEQ ID NO: 338392 - DNA, 336 bp, Artificial Sequence
  derived and/or modified sequence
atgcacatccacaccgacgtgttcagcgagccccgggccgtgttctacgctgcttgtgtggtgttgggcctccagtatctgcatgaacacaaaatcgtatatagggatctaaagctcgataacttgttgctggacaccgaaggattcgtaaaaatagcagacttcggcctttgcaaggagggtatgggatatggcgaccgcactagtacattttgtggaacacccgagttcctggcacctgaggtactgacagaaacatcttacacaagggctgtggactggtggggacttggagttttaatctatgagatgttggtcggggagacctccgtctag

SEQ ID NO: 338393 - DNA, 198 bp, Artificial Sequence
  derived and/or modified sequence
tagggcttcgtcaagatcgcagacttcggcctgtgtaaagagggaatgggctatggcgaccgaacctccactttttgcggcacgcctgagtttcttgcccctgaagtgttgacggagacctcttataccagagctgtggattggtggggactcggggtgttgatatatgaaatgctcgtgggagaaacaagcgtctag

SEQ ID NO: 338394 - DNA, 1977 bp, Artificial Sequence
  derived and/or modified sequence
atgaactccacacttgaggtacggctgatgggctgccaggatattctggaaaacgtccctggccgttctaaggccacctcagtggcattaccgggttggagtccatcagaaacacggagctcattcatgagtcgcacaagcaagtctaagagcgggtcttcccgcaatctcttgaagaccgatgatctctctaatgacgtgtgcgccgtgctaaaactggataataccgtcgtgggtcagacatcctggaagcctatctctaatcagtcttgggatcagaagttcacattggagttggatcgaagtcgcgaactggagatatccgtctactggagagattggagaagcctgtgtgccgtcaagttcctgcgtctcgaagactttctggataaccaaaggcacggaatgtgcctttacctggaaccacagggcactctgtttgctgaggtgactttttttaatccagtgatcgaacggaggcccaaactccagaggcaaaagaagattttttccaagcaacaagggaagacctttttgcgcgctccacaaatgaacataaacatcgcgacatggggcaggctcgtccggagagccatccctacagttaaccattccggaaccttctccccgcaagcccctgttcccacgaccgtgcccgtggtagacgtcaggatcccacagctggccccaccagcctctgatagcaccgtgaccaaactggacttcgatctcgagcccgagccaccacctgcaccccctcgcgcatcgagtctgggagagattgatgagagctcagagcttagagtgttggatatcccaggccaagactccgagaccgtatttgatattcagaacgatcgcaactcaattctgcccaaatcacagtccgagtacaagcctgacactccccagtcaggtctcgagtactctggaattcaggagctggaggaccggcgaagccagcagaggtttcaatttaatctgcaggacttcaggtgttgcgcggtcttaggcaggggccattttggaaaggtcctgttagccgagtacaaaaatactaatgaaatgttcgctattaaggcccttaaaaagggggatatcgttgcgagagacgaagtagattcgctcatgtgtgagaaacgaatctttgagactgtgaattctgtgcggcatccatttctcgtcaatttgttcgcttgcttccagaccaaagaacacgtgtgcttcgttatggagtacgctgccggtggggatctgatgatgcacatccatactgacgtcttctccgagccacgtgccgtgttttacgcggcatgtgtggtgctgggcctgcagtatctgcatgagcacaagatcgtgtaccgcgatttgaaacttgacaacctgcttctggatacggagggtttcgttaagattgctgacttcgggctgtgtaaggagggaatgggctacggggatagaacctctaccttctgtggaacccctgaatttcttgcaccagaagtccttaccgaaacatcttacactcgcgctgtcgactggtgggggctgggagtgctcatctacgaaatgctggtgggcgagtcccctttccccggagacgatgaggaagaggtgtttgatagcatcgtaaacgacgaagtgcgctaccccagattcctttctacggaggcgatttctattatgagacggctgctgcgcagaaatcctgagaggcgcctgggtgcttctgagaaggacgccgaggacgtcaagaagcatcccttctttcggttgatcgactggtccgcgctcatggataagaaggttaaacctccattcatcccaacaatacgcggtcgggaagacgtttcaaacttcgacgatgagtttaccagcgaggctcccattcttaccccaccgagggagccccgaatcctgagtgaggaggaacaggaaatgtttagagattttgactatattgctgattggtgttag

SEQ ID NO: 338395 - DNA, 336 bp, Artificial Sequence
  derived and/or modified sequence
atgcacattcacaccgatgtcttctccgaacccagggccgttttttatgccgcttgtgtagtgctgggattacagtatctgcacgaacataagattgtatatcgagacttgaaactcgacaacttgctgctcgataccgaaggatttgtgaaaatcgctgacttcggactgtgtaaggagggtatgggatacggcgaccgcacctctaccttttgcggaaccccagaattcttggccccagaagtgctgactgagacatcatacacaagggcggtagactggtggggactcggcgtgcttatttatgagatgttggtgggcgagacatctgtatag

SEQ ID NO: 338396 - DNA, 342 bp, Artificial Sequence
  derived and/or modified sequence
gggctttgtgaaaattgctgattttggtctttgcaaagaaggaatgggatatggagatagaacaagcacattttgtggcactcctgaatttcttgccccagaagtattaacagaaacttcttatacaagggctgtagattggtggggccttggcgtgcttatatatgaaatgcttgttggtgagacttccgtctgagcaacacactctgcatccttgcttcaccgggaaactactgaagttcctggggaagcaaagtagaatttcgtaagaacaaaatggatggagagaggagaaaacctatggtagctgtgaaggccctgatgccatgtatgtcaaattga

SEQ ID NO: 338397 - DNA, 2379 bp, Artificial Sequence
  derived and/or modified sequence
aaaaaattctttaagctcctactggaccataaactaaattttaagtaactagggagagaaatactactgacattaatagaagactacacatgacgaaaagatgaacatggatgaatagtactttggaagttcgtcttatgggctgccaagatatcctagagaatgtccctggacggtcaaaagcaacatcagttgcactgcctggttggagtccaagtgaaaccagatcatctttcatgagcagaacgagtaaaagtaaaagcggaagtagtcgaaatcttctaaaaaccgatgacttgtccaatgatgtctgtgctgttttgaagctcgataatactgtggttggccaaactagctggaaacccatttccaatcagtcatgggaccagaagtttacactggaactggacaggtcacgtgaactggaaatttcagtttattggcgtgattggcggtctctgtgtgctgtaaaatttctgaggttagaagattttttagacaaccaacggcatggcatgtgtctctatttggaaccacagggtactttatttgcagaggttaccttttttaatccagttattgaaagaagaccaaaacttcaaagacaaaagaaaattttttcaaagcaacaaggcaaaacatttctcagagctcctcaaatgaatattaatattgccacttggggaaggctagtaagaagagctattcctacagtaaatcattctggcaccttcagccctcaagctcctgtgcctactacagtgccagtggttgatgtacgcatccctcaactagcacctccagctagtgattctacagtaaccaaattggactttgatcttgagcctgaacctcctccagccccaccacgagcttcttctcttggagaaatagatgaatcttctgaattaagagttttggatataccaggacaggattcagagactgtttttgatattcagaatgacagaaatagtatacttccaaaatctcaatctgaatacaagcctgatactcctcagtcaggcctagaatatagtggtattcaagaacttgaggacagaagatctcagcaaaggtttcagtttaatctacaagatttcaggtgttgtgctgtcttgggaagaggacattttggaaaggtgcttttagctgaatataaaaacacaaatgagatgtttgctataaaagccttaaagaaaggagatattgtggctcgagatgaagtagacagcctgatgtgtgaaaaaagaatttttgaaactgtgaatagtgtaaggcatccctttttggtgaacctttttgcatgtttccaaaccaaagagcatgtttgctttgtaatggaatatgctgccggtggggacctaatgatgcacattcatactgatgtcttttctgaaccaagagctgtattttatgctgcttgtgtagttcttgggttgcagtatttacatgaacacaaaattgtttatagagatttgaaattggataacttattgctagatacagagggctttgtgaaaattgctgattttggtctttgcaaagaaggaatgggatatggagatagaacaagcacattttgtggcactcctgaatttcttgccccagaagtattaacagaaacttcttatacaagggctgtagattggtggggccttggcgtgcttatatatgaaatgcttgttggtgagtctccctttcctggtgatgatgaagaggaagtttttgacagtattgtaaatgatgaagtaaggtatccaaggttcttatctacagaagccatttctataatgagaaggctgttaagaagaaatcctgaacggcgccttggggctagcgagaaagatgcagaggatgtaaaaaagcacccatttttccggctaattgattggagcgctctgatggacaaaaaagtaaagccaccatttatacctaccataagaggacgagaagatgttagtaattttgatgatgaatttacctcagaagcacctattctgactccacctcgagaaccaaggatactttcggaagaggagcaggaaatgttcagagattttgactacattgctgattggtgttaagttgctagacactgcgaaaccaagctgactcacaagaagacctcttaaaaatagcaacccttcatttgctctctgtgccaccaatagcttctgagttttttgttgttgttgtttttattgaaacacgtgaagatttgtttaaaagtaccattctaatacttcttcaaaagtggctcctcattgtacttcagcgtaaatatgagcactggaaacagtttcatggagtttaagttgagtgaacatcggccatgaaaatccatcacgaatacttttggatcaatagtctattttt

SEQ ID NO: 338398 - DNA, 476 bp, Artificial Sequence
  derived and/or modified sequence
acagcctgatgtgtgaaaaaagaatttttgaaactgtgaatagtgtaaggcatccctttttggtgaacctttttgcatgtttccaaaccaaagagcatgtttgctttgtaatggaatatgctgccggtggggacctaatgatgcacattcatactgatgtcttttctgaaccaagagctgtattttatgctgcttgtgtagttcttgggttgcagtatttacatgaacacaaaattgtttatagagatttgaaattggataacttattgctagatacagagggctttgtgaaaattgctgattttggtctttgcaaagaaggaatgggatatggagatagaacaagcacattttgtggcactcctgaatttcttgccccagaagtattaacagaaacttcttatacaagggctgtagattggtggggccttggcgtgcttatatatgaaatgcttgttggtgagacttccgtctga

SEQ ID NO: 338399 - DNA, 198 bp, Artificial Sequence
  derived and/or modified sequence
tgaggcttcgtgaagatcgccgacttcggcctgtgcaaggagggcatgggctacggcgacagaaccagcaccttctgcggcacccccgagttcctggcccccgaggtgctgaccgagaccagctacaccagagccgtggactggtggggcctgggcgtgctgatctacgagatgctggtgggcgagaccagcgtgtag

SEQ ID NO: 338400 - DNA, 1977 bp, Artificial Sequence
  derived and/or modified sequence
atgaacagcaccctggaggtgagactgatgggctgccaggacatcctggagaacgtgcccggcagaagcaaggccaccagcgtggccctgcccggctggagccccagcgagaccagaagcagcttcatgagcagaaccagcaagagcaagagcggcagcagcagaaacctgctgaagaccgacgacctgagcaacgacgtgtgcgccgtgctgaagctggacaacaccgtggtgggccagaccagctggaagcccatcagcaaccagagctgggaccagaagttcaccctggagctggacagaagcagagagctggagatcagcgtgtactggagagactggagaagcctgtgcgccgtgaagttcctgagactggaggacttcctggacaaccagagacacggcatgtgcctgtacctggagccccagggcaccctgttcgccgaggtgaccttcttcaaccccgtgatcgagagaagacccaagctgcagagacagaagaagatcttcagcaagcagcagggcaagaccttcctgagagccccccagatgaacatcaacatcgccacctggggcagactggtgagaagagccatccccaccgtgaaccacagcggcaccttcagcccccaggcccccgtgcccaccaccgtgcccgtggtggacgtgagaatcccccagctggccccccccgccagcgacagcaccgtgaccaagctggacttcgacctggagcccgagcccccccccgccccccccagagccagcagcctgggcgagatcgacgagagcagcgagctgagagtgctggacatccccggccaggacagcgagaccgtgttcgacatccagaacgacagaaacagcatcctgcccaagagccagagcgagtacaagcccgacaccccccagagcggcctggagtacagcggcatccaggagctggaggacagaagaagccagcagagattccagttcaacctgcaggacttcagatgctgcgccgtgctgggcagaggccacttcggcaaggtgctgctggccgagtacaagaacaccaacgagatgttcgccatcaaggccctgaagaagggcgacatcgtggccagagacgaggtggacagcctgatgtgcgagaagagaatcttcgagaccgtgaacagcgtgagacaccccttcctggtgaacctgttcgcctgcttccagaccaaggagcacgtgtgcttcgtgatggagtacgccgccggcggcgacctgatgatgcacatccacaccgacgtgttcagcgagcccagagccgtgttctacgccgcctgcgtggtgctgggcctgcagtacctgcacgagcacaagatcgtgtacagagacctgaagctggacaacctgctgctggacaccgagggcttcgtgaagatcgccgacttcggcctgtgcaaggagggcatgggctacggcgacagaaccagcaccttctgcggcacccccgagttcctggcccccgaggtgctgaccgagaccagctacaccagagccgtggactggtggggcctgggcgtgctgatctacgagatgctggtgggcgagagccccttccccggcgacgacgaggaggaggtgttcgacagcatcgtgaacgacgaggtgagataccccagattcctgagcaccgaggccatcagcatcatgagaagactgctgagaagaaaccccgagagaagactgggcgccagcgagaaggacgccgaggacgtgaagaagcaccccttcttcagactgatcgactggagcgccctgatggacaagaaggtgaagccccccttcatccccaccatcagaggcagagaggacgtgagcaacttcgacgacgagttcaccagcgaggcccccatcctgaccccccccagagagcccagaatcctgagcgaggaggagcaggagatgttcagagacttcgactacatcgccgactggtgctag

SEQ ID NO: 338401 - DNA, 336 bp, Artificial Sequence
  derived and/or modified sequence
atgcacatccacaccgacgtgttcagcgagcccagagccgtgttctacgccgcctgcgtggtgctgggcctgcagtacctgcacgagcacaagatcgtgtacagagacctgaagctggacaacctgctgctggacaccgagggcttcgtgaagatcgccgacttcggcctgtgcaaggagggcatgggctacggcgacagaaccagcaccttctgcggcacccccgagttcctggcccccgaggtgctgaccgagaccagctacaccagagccgtggactggtggggcctgggcgtgctgatctacgagatgctggtgggcgagaccagcgtgtag

SEQ ID NO: 338402 - protein, 46 aa, Artificial Sequence
  derived and/or modified sequence
MDSVMPSQEPPVDDKNEDADLPSEETDGIAYISSSRKHDSIKDDSE

SEQ ID NO: 338403 - DNA, 78 bp, Artificial Sequence
  derived and/or modified sequence
atggacagcgtgatgcccagccaggagccccccgtggacgacaagaacgaggacgccgacctgcccagcgaggagtag

SEQ ID NO: 338404 - DNA, 66 bp, Artificial Sequence
  derived and/or modified sequence
atggacagcgtgatgcccagccaggagccccccgtggacgacaagaacgaggacgccgacctgtag

SEQ ID NO: 338405 - DNA, 78 bp, Artificial Sequence
  derived and/or modified sequence
atggatagtgtgatgccctcccaggagcccccagtggatgataaaaacgaggacgctgacctgccctcggaagagtag

SEQ ID NO: 338406 - DNA, 66 bp, Artificial Sequence
  derived and/or modified sequence
atggacagcgtgatgccctcccaggagccaccagtggatgataagaatgaagacgccgatctgtag

SEQ ID NO: 338407 - DNA, 78 bp, Artificial Sequence
  derived and/or modified sequence
atggattctgtgatgcccagccaggagccccctgtggatgacaagaatgaagatgctgacctgcccagcgaggagtag

SEQ ID NO: 338408 - DNA, 66 bp, Artificial Sequence
  derived and/or modified sequence
atggattctgtgatgcccagccaggagccccctgtggatgacaagaatgaagatgctgacctgtag

SEQ ID NO: 338409 - DNA, 78 bp, Artificial Sequence
  derived and/or modified sequence
atggacagcgtgatgcccagccaggagccccccgtggacgacaagaatgaggatgctgatctgccttccgaggagtag

SEQ ID NO: 338410 - DNA, 66 bp, Artificial Sequence
  derived and/or modified sequence
atggacagcgtgatgcccagccaggagccccccgtggacgacaagaacgaagacgcagatctatag

SEQ ID NO: 338411 - DNA, 78 bp, Artificial Sequence
  derived and/or modified sequence
atggactctgtgatgccaagtcaagaaccacctgtggacgacaagaacgaggacgctgatctaccatcggaggagtag

SEQ ID NO: 338412 - DNA, 66 bp, Artificial Sequence
  derived and/or modified sequence
atggattccgtaatgccttcccaggagccccctgtggatgacaagaatgaggacgctgacctgtag

SEQ ID NO: 338413 - protein, 25 aa, Artificial Sequence
  derived and/or modified sequence
MDSVMPSQEPPVDDKNEDADLPSEE

SEQ ID NO: 338414 - protein, 82 aa, Artificial Sequence
  derived and/or modified sequence
MDSVMPSQEPPVDDKNEDADLPSEETDGIAYISSSRKHDSIKDDSEDLKPVIDGMDGIKISQGLGLQDFDLIRVIGRGSYAK

SEQ ID NO: 338415 - protein, 98 aa, Artificial Sequence
  derived and/or modified sequence
MDSVMPSQEPPVDDKNEDADLPSEETDGIAYISSSRKHDSIKDDSEDLKPVIDGMDGIKISQGLGLQDFDLIRVIGRGSYAKVLLVRLKKNDQIYAMK

SEQ ID NO: 338416 - protein, 109 aa, Artificial Sequence
  derived and/or modified sequence
MDSVMPSQEPPVDDKNEDADLPSEETDGIAYISSSRKHDSIKDDSEDLKPVIDGMDGIKISQGLGLQDFDLIRVIGRGSYAKVLLVRLKKNDQIYAMKVVKKELVHDDE

SEQ ID NO: 338417 - protein, 73 aa, Artificial Sequence
  derived and/or modified sequence
MDSVMPSQEPPVDDKNEDADLPSEETDGIAYISSSRKHDSIKDDSEDLKPVIDGMDGIKISQGLGLQDFDLIR

SEQ ID NO: 338418 - protein, 21 aa, Artificial Sequence
  derived and/or modified sequence
MDSVMPSQEPPVDDKNEDADL

SEQ ID NO: 338419 - protein, 71 aa, Artificial Sequence
  derived and/or modified sequence
MDSVMPSQEPPVDDKNEDADLPSEETDGIAYISSSRKHDSIKDDSEDLKPVIDGMDGIKISQGLGLQDFDL

SEQ ID NO: 338420 - DNA, 564 bp, Artificial Sequence
  derived and/or modified sequence
gtcatgtgtaaatattgaggcccgtttgaactatccctgtgcggaaaaaaaggcctgtttttcacagggctgcctggggaggaggggggtggaaaggaaaacaggcaggggacagacggacccggcctgcgttggcctggggtgacttcacggctccactgtcagcaagcggccgtcccgtggtggatcctgtccgccctgcgaggacacctggctccatccacacctgggcctctgtctccagccgccgaggccgtgacaccatgaggatcataatctatctaccgccggggagccagaagatggaggaagctgtaccgtgccaacggccacctcttccaagccaagcgctttaacaggagagcgtactgcggtcagtgcagcgagaggatatggggcctcgcgaggcaaggctacaggtgcatcaactgcaaactgctggtccataagcgctgccacggcctcgtcccgctgacctgcaggaagcatatggattctgtcatgccttcccaagagcctccagtagacgacaagaacgaggacgccgaccttccttccgaggag

SEQ ID NO: 338421 - DNA, 567 bp, Artificial Sequence
  derived and/or modified sequence
gaattcccgatgcacctccttccagcacatggactgtcagagccctgcgttgtcgccagcacagcagatctgaaaggcactaggctgtggcctcgcgacggctgagaatctatctaccgccggggagccagaagatggaggaagctgtaccgtgccaacggccacctcttccaagccaagcgctttaacaggagagcgtactgcggtcagtgcagcgagaggatatggggcctcgcgaggcaaggctacaggtgcatcaactgcaaactgctggtccataagcgctgccacggcctcgtcccgctgacctgcaggaagcatatggattctgtcatgccttcccaagagcctccagtagacgacaagaacgaggacgccgaccttccttccgaggagacagatggaattgcttacatttcctcatcccggaagcatgacagcattaaagacgactcggaggaccttaagccagttatcgatgggatggatggaatcaaaatctctcaggggcttgggctgcaggactttgacctaatcagagtcatcgggcgcgggagctacgccaag

SEQ ID NO: 338422 - DNA, 788 bp, Artificial Sequence
  derived and/or modified sequence
ttttttttaaaaaaaaaaacaacaaaaaaccaaaacaacaaccagcctccccagtcaggcttgtggggagccgtgggcctggggagactgggctgctgaaggtggggactgggctgctgggggaggcggctttccctctcggggggtgctggctgctggggaggctggcagcgcgcccctcccccaggtgcgaagggacctcagcagacgcagggctgctccgcacagccagcttgggccgcaggggtccttgagtgatgaagattctgtgttgatgggaatctatctaccgccggggagccagaagatggaggaagctgtaccgtgccaacggccacctcttccaagccaagcgctttaacaggagagcgtactgcggtcagtgcagcgagaggatatggggcctcgcgaggcaaggctacaggtgcatcaactgcaaactgctggtccataagcgctgccacggcctcgtcccgctgacctgcaggaagcatatggattctgtcatgccttcccaagagcctccagtagacgacaagaacgaggacgccgaccttccttccgaggagacagatggaattgcttacatttcctcatcccggaagcatgacagcattaaagacgactcggaggaccttaagccagttatcgatgggatggatggaatcaaaatctctcaggggcttgggctgcaggactttgacctaatcagagtcatcgggcgcgggagctacgccaaggttctcctggtgcggttgaagaagaatgaccaaatttacgccatgaaa

SEQ ID NO: 338423 - DNA, 706 bp, Artificial Sequence
  derived and/or modified sequence
ggcggggctgctgccggcctggactcaggaccctcaccctccagcccgcaccctcgactccccaccagccagaccctctgtcctggtgtggacagcacccacatcctggctccacccttgtttcttgccctttgacctacagcctcaggacgtgcaggagggagaatctatctaccgccggggagccagaagatggaggaagctgtaccgtgccaacggccacctcttccaagccaagcgctttaacaggagagcgtactgcggtcagtgcagcgagaggatatggggcctcgcgaggcaaggctacaggtgcatcaactgcaaactgctggtccataagcgctgccacggcctcgtcccgctgacctgcaggaagcatatggattctgtcatgccttcccaagagcctccagtagacgacaagaacgaggacgccgaccttccttccgaggagacagatggaattgcttacatttcctcatcccggaagcatgacagcattaaagacgactcggaggaccttaagccagttatcgatgggatggatggaatcaaaatctctcaggggcttgggctgcaggactttgacctaatcagagtcatcgggcgcgggagctacgccaaggttctcctggtgcggttgaagaagaatgaccaaatttacgccatgaaagtggtgaagaaagagctggtgcatgatgacgag

SEQ ID NO: 338424 - DNA, 716 bp, Artificial Sequence
  derived and/or modified sequence
gtccgtccctcggttccgcccccggctgcgcgtctgtccctcgactcggcccctcagctgtgcgccactttctctgtggcccacagtacctccgtctccgccgcttcacacccttctctttctttctctcttcagagagggttgttgggcaggcagagcatcccccgaggggacaagtcaggcctacggactcctggagccaggacctgccgtaggctggttagggcaggatgcgccctgtcttcgtgggtagagccacatgaggggtcacccgaccccctcagggctgaggggcacaggggccgaaagtgtggccgcccctgggggtctgcgcctcttgtggagcccaggcctggcgcccagaatctatctaccgccggggagccagaagatggaggaagctgtaccgtgccaacggccacctcttccaagccaagcgctttaacaggagagcgtactgcggtcagtgcagcgagaggatatggggcctcgcgaggcaaggctacaggtgcatcaactgcaaactgctggtccataagcgctgccacggcctcgtcccgctgacctgcaggaagcatatggattctgtcatgccttcccaagagcctccagtagacgacaagaacgaggacgccgaccttccttccgaggagacagatggaattgcttacatttcctcatcccggaagcatgacagcattaaagacgactcggag

SEQ ID NO: 338425 - DNA, 614 bp, Artificial Sequence
  derived and/or modified sequence
agaacatcgctcggtgccagacaggcaggacgcagcgggctggcctgcggggctcactgctgccccccggggccgagcacgaaagggagagttggagggcgcttcctcgccgggtgttgcggtgtgagcggggactggtgagtgtgtgctgtcttcagagagagaagagcagttttcaggaatctatctaccgccggggagccagaagatggaggaagctgtaccgtgccaacggccacctcttccaagccaagcgctttaacaggagagcgtactgcggtcagtgcagcgagaggatatggggcctcgcgaggcaaggctacaggtgcatcaactgcaaactgctggtccataagcgctgccacggcctcgtcccgctgacctgcaggaagcatatggattctgtcatgccttcccaagagcctccagtagacgacaagaacgaggacgccgaccttccttccgaggagacagatggaattgcttacatttcctcatcccggaagcatgacagcattaaagacgactcggaggaccttaagccagttatcgatgggatggatggaatcaaaatctctcaggggcttgggctgcaggactttgacctaatcaga

SEQ ID NO: 338426 - DNA, 698 bp, Artificial Sequence
  derived and/or modified sequence
gaggaggcagggatgtgaggggcgggggacaggacagccggccttccgttaaatatctgctcctcgcgctcgagcctccctgcctattgtcggggccggaggcgagccgacgcagcatcagctcgtcaacgggaaggaagatgcctccctgcacgcccgccgcgcacagagcataaagaatctgcgctgaggaggcaggagaagaaagccggagcggtgccgctggcctgtggcttctgcagggacaagtagtggctgtggccgggaggcgttcggcagctgtgcttcagccccggccccagcttcagctcttcgagttgctggcttctctaaggcctgtcctgaagtggcctggagactgctgagttacttctggaatctgcaccgtgaaagtgaaacctggaccatgatgtgaggctgaatctatctaccgccggggagccagaagatggaggaagctgtaccgtgccaacggccacctcttccaagccaagcgctttaacaggagagcgtactgcggtcagtgcagcgagaggatatggggcctcgcgaggcaaggctacaggtgcatcaactgcaaactgctggtccataagcgctgccacggcctcgtcccgctgacctgcaggaagcatatggattctgtcatgccttcccaagagcctccagtagacgacaagaacgaggacgccgacctt

SEQ ID NO: 338427 - DNA, 563 bp, Artificial Sequence
  derived and/or modified sequence
tttcgtgtgagcccacgctggccatgcacagctggcacgatcccttgcggtgtgaatacactgctggggtgggagcgccgtggccagggtcaggattcgagcggttactggcttttggtctgatggccctcggtggaatctatctaccgccggggagccagaagatggaggaagctgtaccgtgccaacggccacctcttccaagccaagcgctttaacaggagagcgtactgcggtcagtgcagcgagaggatatggggcctcgcgaggcaaggctacaggtgcatcaactgcaaactgctggtccataagcgctgccacggcctcgtcccgctgacctgcaggaagcatatggattctgtcatgccttcccaagagcctccagtagacgacaagaacgaggacgccgaccttccttccgaggagacagatggaattgcttacatttcctcatcccggaagcatgacagcattaaagacgactcggaggaccttaagccagttatcgatgggatggatggaatcaaaatctctcaggggcttgggctgcaggactttgacct

SEQ ID NO: 338428 - protein, 411 aa, Artificial Sequence
  derived and/or modified sequence
MWIQQLLGLSSMSIRWPGRPLGSHAWILIAMFQLAVDLPACEALGPGPEFWLLPRSPPRPPRLWSFRSGQPARVPAPVWSPRPPRVERIHGQMQMPRARRAHRPRDQAAALVPKAGLAKPPAAAKSSPSLASSSSSSSSAVAGGAPEQQALLRRGKRHLQGDGLSSFDSRGSRPTTETEFIAWGPTGDEEALESNTFPGVYGPTTVSILQTRKTTVAATTTTTTTATPMTLQTKGFTESLDPRRRIPGGVSTTEPSTSPSNNGEVTQPPRILGEASGLAVHQIITITVSLIMVIAALITTLVLKNCCAQSGNTRRNSHQRKTNQQEESCQNLTDFPSARVPSSLDIFTAYNETLQCSHECVRASVPVYTDETLHSTTGEYKSTFNGNRPSSSDRHLIPVAFVSEKWFEISC

SEQ ID NO: 338429 - DNA, 1236 bp, Artificial Sequence
  derived and/or modified sequence
atgtggatccagcaattactgggcctcagcagcatgtcaatcagatggccgggaaggcccttaggaagccacgcatggatactcatcgcgatgttccagctggccgtcgacctgcctgcctgcgaggctttggggccaggcccagaattttggttattacctaggagcccaccccgtccaccgagactgtggtcatttcggtctgggcagcctgccagggtgcccgcacccgtgtggagccctaggccaccccgcgtggagagaattcatggccaaatgcagatgcctcgagctagaagagcccatcggcctagagaccaggcggccgccctggtgcctaaggcagggctagccaaacctcctgcggctgcaaagagtagcccatccctggcaagttctagcagttcgtcatcctcagcggttgccggcggcgcgcccgaacagcaggctttactgcgaagaggaaaacggcatttacaaggcgatggtctgagttcattcgacagccgtggctcacggcccactactgagactgaattcatcgcctggggccccaccggcgatgaagaagccttagaatctaatacttttcctggcgtatatggtcccacaacagtcagcatactgcagaccagaaaaacgaccgtggcggcaaccacaacaaccacaaccaccgctactccaatgaccctccagacaaaaggatttaccgagtctcttgatcctaggcggaggatcccagggggcgttagcacaacggaacccagcacgagtccttccaacaatggcgaggtgactcaaccccctcggattttgggagaggcgagcgggctcgctgtccatcagattataacaataactgtttccctgatcatggtgatcgcggcattgatcacgacactcgtgctcaagaattgttgcgcacagtcgggaaacacaagacgcaattcacaccagcgcaaaactaaccagcaggaagaatcctgtcagaacttgaccgacttcccttctgcgcgcgttccttcctcgctcgatatcttcaccgcatacaacgagacactccagtgttcacacgaatgcgtgcgcgccagtgtacctgtctataccgatgaaactttgcactccactactggagagtacaagtccaccttcaatggtaaccgcccaagttcctctgaccgccacttgattcctgttgccttcgtgagcgagaagtggtttgagattagttgctag

SEQ ID NO: 338430 - DNA, 1236 bp, Artificial Sequence
  derived and/or modified sequence
atgtggatacagcagttgctaggactctcatctatgtccattaggtggccaggccgcccattaggatctcacgcttggattttgatagcaatgttccagctcgccgtggatcttcccgcttgcgaagctttaggtcccgggcctgagttttggctgttgccgagatcccccccccggcccccccgtctgtggagttttcggagcggccagcctgctcgggtgccggcaccagtctggtccccccgtcccccaagagtcgaacgaatccacggccagatgcagatgccgcgagcccggagggcccatagaccgcgcgatcaggcagcggccctggtccctaaggcaggcctggccaaaccacctgccgctgccaaatcttctccctcattggcgtccagctcttcaagtagcagctccgctgtggcaggaggggcaccggaacagcaggcgctgttacgccgcggaaagagacacctgcagggtgacggattgtccagttttgactcacggggaagccgccccaccacagagaccgagtttatcgcgtgggggccgaccggcgacgaggaggcactggagagcaataccttcccaggtgtgtatggaccaaccacagtgtccatcttgcagacaagaaaaacaactgtggctgcgacaactacaacaaccacgactgctacgcctatgacgcttcagacaaagggattcaccgaaagcctggacccaaggagacggattcctggaggagtgagcacaactgagccaagtacctcacctagtaataacggagaggtcacacagcccccacggatcctgggtgaggcttctgggctggccgtgcatcagatcattactatcacagttagcctgataatggtgatagccgcactgattaccacgctcgtcctcaaaaattgctgcgcccaatcagggaataccagaagaaattcccaccagagaaagactaatcagcaggaagagagctgtcagaacctaactgattttccttcagcgcgagttcccagcagtctggatatttttacggcatacaatgaaaccctccagtgcagccatgaatgtgttagagccagtgtacccgtgtacactgatgagacgctgcatagcactaccggcgagtacaagtctacattcaacgggaatcgaccgtcctcctcagaccggcacctcatacctgttgcgttcgtatcagagaagtggtttgagatatcttgttag

SEQ ID NO: 338431 - DNA, 2383 bp, Artificial Sequence
  derived and/or modified sequence
cacgccccgcgctccacggcgccctcgccccgcgcgcctctcgtgcccgcctcctgccagtctccgggccgcggccgtctgcagagcgagcgctcagacggagcccccgggcaacttgagtggcgccgatcggcggcggagcctctggcagagccccccgacccggcagcgcggaggggactcgcgtccgtccgcgtcgcgtcaccccaaaccctaagcagcgccgccccatcggcgcggagctccggctggaggcaagagccgcgcgccgggagacacgcaccgtgagcggcagcgccgccggcctccctcctcgccgccccggagggcgaagccgcggctccccagccctttgctgcgccgcgacagcgccggaacacgccccgcctcgctgccgccttcgctgtgccgccggcggagggggccgcgagccccgcgccccggccggaggatgtgcgcccccgcgggccgcccagcctgagccatgcgccccaacggcggcggcgcgccggccggcatggagccccgcgcggccgcgctctgactcgctgtgcgccccgcggccggcgggcggcgggaggcggcggaccgagagccggagaccggcgccgcgggacggaagcgagcgggcgcgggcgccgcgcagatggcctgggcgagccaggtctgaggccccgctccccgaaacgtgaccatgtggattcaacagcttttaggactcagctccatgtccatccgctggccgggccgccccctcggaagccatgcctggatactgatagccatgtttcagctcgccgtggacctgcccgcctgtgaggccctgggcccggggccggagttctggctcctgccgcggtcgccgccccggccgccccggctgtggagttttaggagtggacagccagcgcgggtcccggccccggtgtggagcccccggccgccccgagtggagcggatccacgggcagatgcagatgcctcgagccagacgggcccacaggccccgggaccaggcggccgccctcgtgcccaaggcaggactggccaagcccccagctgctgccaaatccagcccttccctcgcctcttcgtcctcgtcctcgtcctccgcggtggccggtggggccccggagcagcaggccctcctgaggaggggcaagaggcacctgcagggggacggtctcagcagcttcgactccagaggcagccggcccaccacagagactgagttcatcgcctgggggcccacgggggacgaggaggccctggagtccaacacatttccgggcgtttacggccccaccacggtctccatcctacaaacacggaagacaactgtggccgccaccaccaccaccaccaccacggccacccccatgacgctgcagactaaggggttcaccgagtccttggatccccggagaaggatcccaggtggggttagcacaacggagccttccaccagtcccagcaacaacggggaagtcacccagcccccaaggattctgggggaggcctcaggtctggctgtccatcagatcatcaccatcaccgtctccctcatcatggtcatagctgctctcatcacaactcttgtcttaaaaaattgctgtgcccaaagcgggaacactcgtcggaacagccaccagcggaagaccaaccagcaggaggagagctgccagaacctcacggacttcccctcggcccgggtgcccagcagcctggacatattcacggcctataacgagaccctgcagtgttctcacgagtgcgtcagggcatctgtgcccgtgtacaccgatgagacgctgcactcgacgacgggggagtacaaatccacatttaatggaaaccgaccctcctcttctgatcggcatcttattcctgtggccttcgtgtctgagaaatggtttgaaatctcctgctgactggccgaagtcttttttacctcctgggggcagggcagacgccgtgtgtctgtttcacggcggttgtccggaatgccagtggctcctgggcagatgtgcaccccagattcagcctttgtgatagattccaacacgttctggcctcagaccacctttgtggtggggccagactgctctgggcaaagtgaagctggcctttatgctccaaggaagggggcctcgagagcaggcctgcattggctctcggactaattcgcgatcatctttcatacagcaggtacacttcagcaaacctcgttaatgttgatctctttccctttgccaaggccgcttcgttctgaacggagcctgcaaagtcataaaagctcttgaatccgaagcaagtgagaaataaatcatgcactattattattttcaaaaacacattgatcactaataaaaaataagaagtgt

SEQ ID NO: 338432 - DNA, 2922 bp, Artificial Sequence
  derived and/or modified sequence
tcgccgccccggagggcgaagccgcggctccccagccctttgctgcgccgcgacagcgccggaacacgccccgcctcgctgccgccttcgctgtgccgccggcggagggggccgcgagccccgcgccccggccggaggatgtgcgcccccgcgggccgcccagcctgagccatgcgccccaacggcggcggcgcgccggccggcatggagccccgcgcggccgcgctctgactcgctgtgcgccccgcggccggcgggcggcgggaggcggcggaccgagagccggagaccggcgccgcgggacggaagcgagcgggcgcgggcgccgcgcagatggcctgggcgagccaggtctgaggccccgctccccgaaacgtgaccatgtggattcaacagcttttaggactcagctccatgtccatccgctggccgggccgccccctcggaagccatgcctggatactgatagccatgtttcagctcgccgtggacctgcccgcctgtgaggccctgggcccggggccggagttctggctcctgccgcggtcgccgccccggccgccccggctgtggagttttaggagtggacagccagcgcgggtcccggccccggtgtggagcccccggccgccccgagtggagcggatccacgggcagatgcagatgcctcgagccagacgggcccacaggccccgggaccaggcggccgccctcgtgcccaaggcaggactggccaagcccccagctgctgccaaatccagcccttccctcgcctcttcgtcctcgtcctcgtcctccgcggtggccggtggggccccggagcagcaggccctcctgaggaggggcaagaggcacctgcagggggacggtctcagcagcttcgactccagaggcagccggcccaccacagagactgagttcatcgcctgggggcccacgggggacgaggaggccctggagtccaacacatttccgggcgtttacggccccaccacggtctccatcctacaaacacggaagacaactgtggccgccaccaccaccaccaccaccacggccacccccatgacgctgcagactaaggggttcaccgagtccttggatccccggagaaggatcccaggtggggttagcacaacggagccttccaccagtcccagcaacaacggggaagtcacccagcccccaaggattctgggggaggcctcaggtctggctgtccatcagatcatcaccatcaccgtctccctcatcatggtcatagctgctctcatcacaactcttgtcttaaaaaattgctgtgcccaaagcgggaacactcgtcggaacagccaccagcggaagaccaaccagcaggaggagagctgccagaacctcacggacttcccctcggcccgggtgcccagcagcctggacatattcacggcctataacgagaccctgcagtgttctcacgagtgcgtcagggcatctgtgcccgtgtacaccgatgagacgctgcactcgacgacgggggagtacaaatccacatttaatggaaaccgaccctcctcttctgatcggcatcttattcctgtggccttcgtgtctgagaaatggtttgaaatctcctgctgactggccgaagtcttttttacctcctgggggcagggcagacgccgtgtgtctgtttcacggattccgttggtgaacctgtaaaaacaaaacaaacaaaacaaaacaaaaaagacaaaacctaaaactgagctatctaagggggagggtccccgcacctaccacttctgtttgccggtgggaaactcacagagcaggacgctctaggccaaatctatttttgtaaaaatgctcatgcctatgggtgactgccttctcccagagttttctttggagaacagaaagaagaaaggaaagaaaggaaccagaggcagagagacgaggatacccagcgaaagggacgggaggaagcatccgaaacctaggattcgtcctacgattctgaacctgtgccaataataccattatgtgccatgtactgacccgaaaggctcggccgcagagccggggcccagcgaatcacgcagagaaatcttacagaaaacaggggtgggaatctcttccgatagagtcgctatttctggttaatatacatatataaatatataaatacaaacacacacacacactttttttgtactgtagcaatttttgaagatcttaaatgttcctttttaaaaaaaagaattgtgttataggttacaaaatctgatttatttaacatgcttagtatgagcagaataaaccagtgttttctactttggcaactcacgtcacacacatattacacacatgtgcgcattacacacacacaatacacatacatgcatatagacgcatctattggaaatgcagttccacaggtgagcatgttctttctggtgacctggtattccatcaccattcaccccaggggacagcctcgaccgagacaaggaggcccttaaatgacagcctgcatttgctagacggttggtgagtggcatcaaatgtgtgacttactatcttgggccagaactaagaatgccaaggttttatatatgtgtgtgtatatatatatatatatatatatatatatatatatatatgtttgtgtgtgtatatatatatatatatatatatgtttgtgtgtgtatatatatgtttgtgtatatatatacacatatgcatacatatgatttttttttttcatttaagtgttggaagatgctacctaacagccacgttcacatttacgtagctggttgcttacaaacgggcctgagcccctggttgggtgggtggtggattcttggacgtgtgtgtcatacaagcatagactggattaaagaagttttccagttccaaaaattaaaggaatatatcctt

SEQ ID NO: 338433 - DNA, 1236 bp, Artificial Sequence
  derived and/or modified sequence
atgtggatccagcagctgctgggcctgagctccatgagcatccgctggccaggccggcccctgggcagccacgcctggatcctgattgccatgttccagctggccgtggacctgcctgcctgtgaggccctgggccctggccctgagttctggctgctgcccaggagccccccccggcccccccggctgtggagcttccgcagcggccagcctgcccgggtgcctgcccctgtgtggagccccaggcctccccgggtggagcgcatccacggccagatgcagatgccccgggcccggcgggcccaccggccccgggaccaggccgccgccctggtgcccaaggccggcctggccaagcccccagctgctgccaagagcagccccagcctggccagcagcagcagcagcagcagcagcgctgtggccggcggggcccctgagcagcaggccctgctgcggcggggcaagaggcacctgcagggagatggcctgagcagctttgacagccggggcagccggcccaccacagaaacagagttcatcgcctggggccccactggagatgaggaggccctggagagcaacaccttccctggggtgtatggccccaccaccgtgtccatcctgcagaccaggaagaccaccgtggccgccaccaccaccaccaccaccacagccacccccatgaccctgcagaccaagggcttcacagagagcctggacccccggcggcgcatccctggaggagtgtccaccacagagcccagcaccagccccagcaacaacggggaggtgacccagcccccacgcatcctgggggaggccagcggcctggccgtgcaccagatcatcaccatcaccgtgtccctcatcatggtgattgctgccctgatcaccaccctggtgctgaagaactgctgtgcccagagcggcaacaccaggaggaacagccaccagaggaagaccaaccagcaggaggagagctgccagaacctgacagacttccccagcgcccgggtgcccagcagcctggacatcttcaccgcctacaatgagaccctgcagtgcagccatgaatgtgtgcgggcctctgtgcctgtgtacacagatgagaccctgcacagcaccactggagagtacaagagcaccttcaatggaaaccggcccagcagcagtgacagacacctgatccctgtggcctttgtgtctgagaagtggtttgagatcagctgctag

SEQ ID NO: 338434 - DNA, 1236 bp, Artificial Sequence
  derived and/or modified sequence
atgtggatccagcagctgctgggcctgagcagcatgagcatccggtggccaggcaggcccctgggctcacatgcttggattcttatcgcgatgtttcaactggccgtagatttacccgcctgtgaggccctaggccccggtcccgaattctggcttttgccacgaagcccacccagacccccacggctgtggagttttcggagcggccaacccgcccgcgtgccggcccctgtttggagtcccaggcctccacgcgtggaacggatacacggtcagatgcagatgccaagagcccgccgggcacacaggccgcgggaccaggccgcagccctggttccaaaagctgggttggctaagccccccgctgcagccaaatctagcccgagtcttgcctcatcttcatccagctctagtagtgctgtcgccggaggggccccagaacagcaggctctgctgcgtaggggcaagcgccacttgcagggcgacggattgtcgtcctttgactctcgcggctcccgccccaccacagaaaccgagtttattgcttggggccctactggggatgaagaggccctggagtccaatacttttcccggcgtttatggccctaccaccgttagtattcttcagactagaaagaccaccgtagcagctacgacaaccacaaccaccaccgccaccccaatgacactgcagaccaaaggtttcaccgagagcctcgacccgcgacgaagaattcccggaggagtctccacaaccgagccctctacttctcccagtaacaatggcgaggtgacccagcctcccagaatactgggtgaagcctcaggcctggccgtgcatcagattatcactatcaccgtgagtctgatcatggtgatcgctgccctcataactacccttgttctgaagaactgttgtgcccagtcaggcaacacgcgccgcaacagtcaccaacgcaagacaaatcaacaagaagagagctgccaaaacttgactgattttccgagtgcccgcgtgccatcatctctcgatattttcacagcctataatgaaactctgcaatgcagtcatgagtgtgtcagagccagcgtgcccgtgtacaccgatgaaacactccacagcactaccggagagtacaagtcaacattcaacggaaacaggccctcatcttcagaccggcacttgatccctgtcgcctttgtgtctgagaagtggtttgaaatttcttgctag

SEQ ID NO: 338435 - DNA, 1236 bp, Artificial Sequence
  derived and/or modified sequence
atgtggatccagcagctgctgggcctgagcagcatgagcatccggtggcccggtagaccgctcggttcgcacgcatggatcctgattgctatgtttcagcttgccgtcgaccttccagcttgtgaggcacttggtcctggcccagagttctggctgctgcctagatcccctccccgcccccctcgtctttggtccttcagatccggccagccggccagggtgcccgcgccagtctggtcgccccggccgcctcgagtagaacggatccatggccagatgcaaatgccccgggcccgcagagcccaccgccccagggaccaagctgccgcacttgttcctaaagctgggctggccaagccccccgctgccgccaagtcttcaccatcgttggcttccagtagttcaagttcatcttctgctgtagcaggcggagctccagagcagcaggcccttctccgacgcgggaagcggcacctgcagggggacggactttcttccttcgacagtcggggaagccggcccaccacggagaccgagtttattgcatggggaccgactggggacgaagaggcactcgaaagcaacacatttccaggggtctatgggcccacgactgtctctatcctccagacacgaaaaaccaccgtcgccgctaccacaaccacaactacaaccgctacacctatgacactgcaaactaaaggctttaccgagtctctggacccacgccgcaggattcctgggggcgtctcaacgaccgaaccttccacctcccccagcaacaacggagaggtgactcagcctccaagaattttgggagaagcatctggcttggctgtgcaccagataatcaccataactgtcagcctgatcatggttatcgccgcattgatcacaacgctggtccttaagaattgttgcgcccagtcaggtaacacacgtagaaactcccaccaacgcaaaactaatcaacaagaggaatcctgccagaacttaacagattttccaagcgcgcgagtgccatcttccctggatattttcaccgcctacaatgaaacactccaatgcagccatgaatgcgtaagggcatccgttcctgtctacactgacgaaacgctccatagcacgaccggagaatataagagcacattcaacgggaaccgcccaagctcctcagatcggcacttaattcctgtggcattcgtatctgagaaatggttcgaaatttcctgttag

SEQ ID NO: 338436 - DNA, 1236 bp, Artificial Sequence
  derived and/or modified sequence
atgtggattcaacaactgttagggctgtccagcatgtccattcgatggcctgggagacctctgggaagtcacgcttggattctcattgccatgtttcagctggcagtagatctgcccgcatgcgaggcactggggcctgggccagaattttggctgctgcctcgaagtccgcctaggccaccacggctgtggagtttcagatcagggcagcccgcacgggtgcccgctccggtctggtctcctcgaccaccaagggtagaacggattcatgggcagatgcaaatgccgcgagctagaagggcccaccggcctcgcgatcaagccgcagccctggtgccaaaggctggactggcgaagcccccagcagcagcaaaaagttcgccatccttggcctctagttccagttcttccagttctgctgttgcgggaggcgctccggaacagcaggcccttctgaggcgcggaaagcgacacctgcaaggggatgggttgtcctcatttgattcaaggggaagtagaccaactaccgagactgagtttattgcttggggccctactggggacgaggaggccctggagagcaacacatttccgggagtatacgggcctaccacggtgtccatcctgcagacacgcaaaaccactgttgctgctactaccacaaccaccactaccgccaccccaatgacacttcagactaaaggtttcactgaatcacttgatccaagacgcagaatacctggcggtgtgagcacaaccgagccatccaccagtccgagcaataacggcgaagttacccagccgccacgcatccttggggaggcaagtggactggcggtgcaccaaatcatcactattaccgtgagtctgatcatggttattgcagccctgattaccaccttggttctgaagaactgctgcgcccagtctggaaacacacggagaaactcccatcagaggaagaccaatcaacaagaggaatcttgccagaatttaacagattttccgagcgctcgggtaccgagctcattggacatcttcaccgcttacaacgagacccttcagtgcagccacgagtgtgtgagggcgagcgttcctgtgtacacagacgagactcttcattccacaacgggcgagtacaagagcacctttaatgggaaccgtccatcgtcatctgacagacacctaatcccggtggcgttcgttagcgaaaagtggttcgaaataagttgttag

SEQ ID NO: 338437 - DNA, 1236 bp, Artificial Sequence
  derived and/or modified sequence
atgtggatccaacagcttctcggtctttctagcatgagcatccgctggcccggacgtcccctgggcagccatgcttggattctcattgcaatgttccaactggccgtggatctgcctgcctgcgaggcattggggccaggcccagagttctggttgctccctaggtctcctccacggccaccccgactctggtcttttaggtcaggacagcctgctcgcgtccccgctcccgtgtggagtcccaggcctccccgagtcgaaagaatccatggacagatgcagatgccaagagcgagaagggcccatagaccccgagatcaagccgctgccctcgtcccaaaagcaggattagcgaaacctccggctgccgcaaaatcatctccctctctggcaagctcaagtagttctagcagttcagcagttgccggtggggctcctgaacagcaggctctgctccgtagaggtaaaagacatctgcagggcgatggacttagttctttcgatagccgaggcagcaggccaacaacagagacagaatttattgcatggggcccaaccggagacgaagaggctctggagagcaatactttcccaggcgtgtatgggccaactacagttagtatactccagacccggaaaactacagtggccgcaacaacaacgactacaaccacagccacccccatgacactgcagacgaagggatttactgagtcgctcgaccctaggaggcggatacctggaggagtaagcacaaccgagccatccaccagcccatctaacaacggggaggttacacagccacctaggattctgggggaggcgtctggcctcgccgtccaccagattattacaatcacagtttcccttataatggtgatcgcagcactcattactactctcgtactgaagaattgttgtgctcagtctgggaatacccgacggaactcccatcagaggaaaaccaaccagcaggaggagagttgccaaaatctgacggactttcctagtgcacgggtgcctagcagcctggacatttttacagcttacaatgaaaccctccagtgttcccatgagtgtgtgcgagcgagtgtgccagtatacacagatgagacccttcatagtactacaggagagtacaaatctacctttaacggcaataggccttcctccagcgaccgacacctaatcccagtggcctttgtgtcggagaagtggtttgagatcagctgttag

SEQ ID NO: 338438 - DNA, 1236 bp, Artificial Sequence
  derived and/or modified sequence
atgtggatccagcagctgctgggcctgagcagcatgagcatcagatggcccggcagacccctgggcagccacgcctggatcctgatcgccatgttccagctggccgtggacctgcccgcctgcgaggccctgggccccggccccgagttctggctgctgcccagaagcccccccagaccccccagactgtggagcttcagaagcggccagcccgccagagtgcccgcccccgtgtggagccccagaccccccagagtggagagaatccacggccagatgcagatgcccagagccagaagagcccacagacccagagaccaggccgccgccctggtgcccaaggccggcctggccaagccccccgccgccgccaagagcagccccagcctggccagcagcagcagcagcagcagcagcgccgtggccggcggcgcccccgagcagcaggccctgctgagaagaggcaagagacacctgcagggcgacggcctgagcagcttcgacagcagaggcagcagacccaccaccgagaccgagttcatcgcctggggccccaccggcgacgaggaggccctggagagcaacaccttccccggcgtgtacggccccaccaccgtgagcatcctgcagaccagaaagaccaccgtggccgccaccaccaccaccaccaccaccgccacccccatgaccctgcagaccaagggcttcaccgagagcctggaccccagaagaagaatccccggcggcgtgagcaccaccgagcccagcaccagccccagcaacaacggcgaggtgacccagccccccagaatcctgggcgaggccagcggcctggccgtgcaccagatcatcaccatcaccgtgagcctgatcatggtgatcgccgccctgatcaccaccctggtgctgaagaactgctgcgcccagagcggcaacaccagaagaaacagccaccagagaaagaccaaccagcaggaggagagctgccagaacctgaccgacttccccagcgccagagtgcccagcagcctggacatcttcaccgcctacaacgagaccctgcagtgcagccacgagtgcgtgagagccagcgtgcccgtgtacaccgacgagaccctgcacagcaccaccggcgagtacaagagcaccttcaacggcaacagacccagcagcagcgacagacacctgatccccgtggccttcgtgagcgagaagtggttcgagatcagctgctag

SEQ ID NO: 338439 - protein, 291 aa, Artificial Sequence
  derived and/or modified sequence
MWPGSPQEKDSPSTSRSGGSSRLSSRSRSRSFSRSSRSHSRVSSRFSSRSRRSKSRSRSRRRHQRKYRRYSRSYSRSRSRSRSRRYRERRYGFTRRYYRSPSRYRSRSRSRSRSRGRSYCGRAYAIARGQRYYGFGRTVYPEEHSRWRDRSRTRSRSRTPFRLSEKDRMELLEIAKTNAAKALGTTNIDLPASLRTVPSAKETSRGIDIDEENLLVIDTWAKASELSEKVTEDGTRNPNEKPTQQRSIAFSSNNSVAKPIQKSAKAATEEASSRSPKIDQKKSPYGLWIPI

SEQ ID NO: 338440 - DNA, 219 bp, Artificial Sequence
  derived and/or modified sequence
atgaactactacggcaactactacggcggcctgggctacggctacggtggctttgacgacttaggatatggatacgggtgtggctgcggctccttccgaaggctgggttacggaggcggatacggcggctatggttacggctctgggttcggggggtacggttatcggagctgtaggcctagctgttatggcggctatgggttttcagggttctactag

SEQ ID NO: 338441 - DNA, 893 bp, Artificial Sequence
  derived and/or modified sequence
agtgcgcatccggacgtaggaggtggaggttgtggaattcgccgttcgaaagcagggactaaaagccccacttcgtcttacgttccgaaaggaaggcgtctgttgagcctttctctcagtcgtgagggaggcgtcgacggcgtgcggaagtcctgagttgaggcttgcgggatcctttccggagaaagcgcaggctaaagccgcaggtgaagatgtccaactacgtgaacgacatgtggccgggctcgccgcaggagaaggattcgccctcgacctcgcggtcgggcgggtccagccggctgtcgtcgcggtctaggagccgctctttttccagaagctctcggtcccattcccgcgtctcgagccggttttcgtccaggagtcggaggagcaagtccaggtcccgttcccgaaggcgccaccagcggaagtacaggcgctactcgcggtcatactcgcggagccggtcgcgatcccgcagccgccgttaccgagagaggcgctacgggttcaccaggagatactaccggtctccttcgcggtaccggtcccggtcccgtagcaggtcgcgctctcggggaaggtcgtactgcggaagggcgtacgcgatcgcgcggggacagcgctactacggctttggtcgcacagtgtacccggaggagcacagcagatggagggacagatccaggacgaggtcgcggagcagaaccccctttcgcttaagtgaaaaagatcgaatggagctgttagaaatagcaaaaaccaatgcagcgaaagctctaggaacaaccaacattgacttgccagctagtctcagaactgttccttcagccaaagaaacaagccgtggaataggtgtatcaagtaatggtgcaaagcctgaaaaatcatga

SEQ ID NO: 338442 - DNA, 1061 bp, Artificial Sequence
  derived and/or modified sequence
agtgcgcatccggacgtaggaggtggaggttgtggaattcgccgttcgaaagcagggactaaaagccccacttcgtcttacgttccgaaaggaaggcgtctgttgagcctttctctcagtcgtgagggaggcgtcgacggcgtgcggaagtcctgagttgaggcttgcgggatcctttccggagaaagcgcaggctaaagccgcaggtgaagatgtccaactacgtgaacgacatgtggccgggctcgccgcaggagaaggattcgccctcgacctcgcggtcgggcgggtccagccggctgtcgtcgcggtctaggagccgctctttttccagaagctctcggtcccattcccgcgtctcgagccggttttcgtccaggagtcggaggagcaagtccaggtcccgttcccgaaggcgccaccagcggaagtacaggcgcacagtgtacccggaggagcacagcagatggagggacagatccaggacgaggtcgcggagcagaaccccctttcgcttaagtgaaaaagatcgaatggagctgttagaaatagcaaaaaccaatgcagcgaaagctctaggaacaaccaacattgacttgccagctagtctcagaactgttccttcagccaaagaaacaagccgtggaataggtgtatcaagtaatggtgcaaagcctgaagtaagtattctaggtttgtcggaacaaaactttcagaaagccaactgtcaaatctgattagccacttatatcttagactatactttttgggaagtctagagatgtatataatgtgctaaattcaaagtagcaaatctgaagataggcaatgtcaaacccatgaaaatgggagattaatgagctttatttggccgtgcatggtgcctcatgcctgtaatgaggcagatggcttgagtccaggagttcaagactagcctgggcaatgtggcaaaaccgcgtgtttacaaaaaatacaaaaattagccaggcatggtggtgcatgcctgtagtcccagctgtttgggaggctgaggcaggaggatctttgagcctaggatgcta

SEQ ID NO: 338443 - DNA, 681 bp, Artificial Sequence
  derived and/or modified sequence
atgagcaactacgtgaacgacatgtggcccggcagcccccaggagaaggacagccccagcaccagcagaagcggcggcagcagcagactgagcagcagaagcagaagcagaagcttcagcagaagcagcagaagccacagcagagtgagcagcagattcagcagcagaagcagaagaagcaagagcagaagcagaagcagaagaagacaccagagaaagtacagaagatacagcagaagctacagcagaagcagaagcagaagcagaagcagaagatacagagagagaagatacggcttcaccagaagatactacagaagccccagcagatacagaagcagaagcagaagcagaagcagaagcagaggcagaagctactgcggcagagcctacgccatcgccagaggccagagatactacggcttcggcagaaccgtgtaccccgaggagcacagcagatggagagacagaagcagaaccagaagcagaagcagaacccccttcagactgagcgagaaggacagaatggagctgctggagatcgccaagaccaacgccgccaaggccctgggcaccaccaacatcgacctgcccgccagcctgagaaccgtgcccagcgccaaggagaccagcagaggcatcggcgtgagcagcaacggcgccaagcccgagaagagctag

SEQ ID NO: 338444 - DNA, 525 bp, Artificial Sequence
  derived and/or modified sequence
atgagcaactacgtgaacgacatgtggcccggcagcccccaggagaaggacagccccagcaccagcagaagcggcggcagcagcagactgagcagcagaagcagaagcagaagcttcagcagaagcagcagaagccacagcagagtgagcagcagattcagcagcagaagcagaagaagcaagagcagaagcagaagcagaagaagacaccagagaaagtacagaagaaccgtgtaccccgaggagcacagcagatggagagacagaagcagaaccagaagcagaagcagaacccccttcagactgagcgagaaggacagaatggagctgctggagatcgccaagaccaacgccgccaaggccctgggcaccaccaacatcgacctgcccgccagcctgagaaccgtgcccagcgccaaggagaccagcagaggcatcggcgtgagcagcaacggcgccaagcccgaggtgagcatcctgggcctgagcgagcagaacttccagaaggccaactgccagatctag

SEQ ID NO: 338445 - DNA, 681 bp, Artificial Sequence
  derived and/or modified sequence
atgagtaactacgtcaatgacatgtggcctggaagcccccaagagaaagatagccctagcactagccggagcggggggtcatcccgcctgtcctccagatccaggtccaggagcttctcacgaagctctaggtctcactccagagtgagctctaggtttagcagcagatctagacgttcaaagagccgctcccggagtcgacgaaggcatcaaagaaagtacaggaggtacagccgctcctattcccgcagcaggagtagatcacggagccgtagataccgcgagaggagatatgggttcacaagaaggtactaccgatctccaagtcggtatagatcaaggagtcgatcaagatctagatcgagagggagatcttattgtggcagggcgtatgccatcgcccgaggacagcgttattacggctttggccgcaccgtctaccctgaggagcactccaggtggcgagatagatcccgcacccgcagccggtctagaacgccttttaggctgtctgaaaaagacaggatggagttacttgaaatcgctaaaacaaatgcggcaaaggcgctagggaccaccaacattgatttacccgcatcattacggacagttccatccgcaaaggaaacatccagggggataggtgtgtccagcaacggcgctaagcctgagaagagttag

SEQ ID NO: 338446 - DNA, 525 bp, Artificial Sequence
  derived and/or modified sequence
atgtcaaactacgtcaacgatatgtggcccggctccccgcaggagaaggacagccctagcacttcacgttccggaggaagctctaggctttcctctagatcgaggagtcggagctttagccggtcatcaagatctcactctcgagtgtcatcccgatttagctccaggtctaggcggagtaagtcccgctcacggtcccgtcggcgacaccaacggaagtatcgtcgtacagtttacccagaggaacattcgcggtggcgtgaccgatctcggacccggagtcgatcccgaactccattccgcctgtccgaaaaggatcggatggaactgttggagatcgctaagactaacgccgctaaggctctgggcaccactaacatagacctaccggcttcattgcgcaccgtgccgtctgcgaaggagacatccagaggtatcggcgtgtcctctaatggggccaagcccgaggtttccatcctcgggctgtccgagcaaaattttcaaaaagccaactgtcagatctag

SEQ ID NO: 338447 - DNA, 681 bp, Artificial Sequence
  derived and/or modified sequence
atgagcaactacgtgaatgacatgtggccaggcagcccccaggagaaggacagccccagcaccagccgcagcggcggcagcagccggctgagcagccgcagccgcagccgctccttcagccgcagcagccgcagccacagccgggtgagcagccgcttcagcagccgcagccgccgcagcaagagccgcagccgcagcagaagaagacaccagaggaagtaccgccgctacagccgcagctacagccgcagccgcagccgcagccgcagccgccgctaccgggagcggcgctatggcttcacccggcgctactaccgcagccccagccgctaccgcagccgcagccgcagccgcagccgcagccggggccgcagctactgcggccgggcctatgccatcgcccggggccagcgctactacggcttcggccgcacagtgtacccagaggagcacagccgctggagggacaggagcaggaccaggagccgcagcaggacccccttccggctgtctgagaaggacaggatggagctgctggagatcgccaagaccaatgctgccaaggccctgggcaccaccaacatcgacctgcctgccagcctgaggacagtgcccagcgccaaggagaccagccggggcatcggcgtgagcagcaatggagccaagccagagaagagctag

SEQ ID NO: 338448 - DNA, 525 bp, Artificial Sequence
  derived and/or modified sequence
atgagcaactacgtgaatgacatgtggccaggcagcccccaggagaaggacagccccagcaccagccgcagcggcggcagcagccggctgagcagccgcagccgcagccgctccttcagccgcagcagccgcagccacagccgggtgagcagccgcttcagcagccgcagccgccgcagcaagagccgcagccgcagcagaagaagacaccagaggaagtacagaagaacagtgtacccagaggagcacagccgctggagggacaggagcaggaccaggagccgcagcaggacccccttccggctgtctgagaaggacaggatggagctgctggagatcgccaagaccaatgctgccaaggccctgggcaccaccaacatcgacctgcctgccagcctgaggacagtgcccagcgccaaggagaccagccggggcatcggcgtgagcagcaatggagccaagccagaggtgtccatcctgggcctgtctgagcagaacttccagaaggccaactgccagatctag

SEQ ID NO: 338449 - DNA, 681 bp, Artificial Sequence
  derived and/or modified sequence
atgagcaactacgtgaacgacatgtggcccggcagcccccaggagaaggactcaccctcgacctccagatccggtgggtcctctcggctcagctcccgaagcagaagccggtcttttagtcgtagctcaaggtctcattcgcgggtgtcttcccgcttttctagccgctctcggcgctccaagagtagaagtaggtcacgaaggcgacatcagcgaaagtacaggagatacagcaggtcttactcgagatcaagaagtcgaagccggagccggcggtacagagagcggcgttacgggttcacccgaagatactacagatctcccagcagatatagaagtagatctagatctcgttctcgttctcgagggagatcgtattgcggaagggcctacgccatcgctaggggccagaggtattacggctttggccggacagtttaccctgaagaacatagcagatggcgtgaccgatcccgaactcggagtcggagcagaacaccattcaggctcagcgaaaaagatagaatggaattgctggaaatagctaaaactaacgcagctaaggccctgggcacaactaatatcgacctcccagccagcttgagaactgtgccaagcgcgaaggagacatctcgcggcatcggggtgagctctaacggtgcaaagccggagaaatcctag

SEQ ID NO: 338450 - DNA, 525 bp, Artificial Sequence
  derived and/or modified sequence
atgagcaactacgtgaacgacatgtggcccggcagcccccaggagaaggactcaccatccacctctcgtagcggcggctcatctagattgtcctctagatcaagatcccgctctttctctcgctcaagcaggtctcatagcagagtgtcatcacggttctcatcccgatctcggcgcagcaagtctaggtctcgttcaaggcgtagacaccagcggaaataccgtagaactgtgtacccggaagagcattcaaggtggagggacaggagtagaacacggtctaggtccaggacacctttccgcttgtcggagaaggacagaatggaactcctggaaatagcaaagacgaacgcggcaaaggctctcggtaccacaaatattgacctgcctgcctccctcagaacagttccttcagccaaagaaacaagtaggggtatcggagtttccagcaatggagccaaacccgaggtttccattctggggctttctgagcagaacttccagaaagccaattgtcaaatttag

SEQ ID NO: 338451 - DNA, 681 bp, Artificial Sequence
  derived and/or modified sequence
atgtctaattatgttaacgacatgtggccgggtagccctcaggagaaggatagtccatctacttccaggtcagggggaagctcaaggctatccagccgctctcgctctcgcagtttttcccggagttcacggtcacattctagagtaagctcccgcttctcctccaggagtcgaaggagtaagtctcgctccaggtcaagaaggcgccaccagagaaaatacaggcgttacagccggtcctactccaggagtagatccaggagcagatcccgtcgttatcgggagagacgttacggcttcacaaggcgctattataggagcccgagccggtaccgaagtcgatctcgaagcagatccaggtcacgtggacggagctactgcggacgggcatacgccatcgccaggggccagagatactacggctttggaagaacagtataccctgaagagcatagtcggtggagagacagatctaggacaagatctcggtcacgcactccatttcgtctctcagagaaggacagaatggagctactggagatcgctaagaccaatgcggctaaagcccttgggacaactaatatagacctgcccgcatccctccgtaccgtcccgtctgccaaagagaccagccgtgggatcggcgtgagctccaacggggctaagcctgagaagtcctag

SEQ ID NO: 338452 - DNA, 525 bp, Artificial Sequence
  derived and/or modified sequence
atgtccaactacgtaaatgatatgtggccagggtcaccccaggagaaggacagcccctcaacctccaggtcggggggaagctcgaggctgagcagccgttcacggagcaggtcctttagccgctcttcacgctctcacagccgcgtctcatcgaggtttagcagtcggagccgtcgctccaagagcaggtctcgcagccgccgtcggcatcagcggaagtaccgtagaacagtgtatccagaggagcattcaaggtggagggaccggagtcgaacacgttctcgcagcagaacccccttccgcctatctgaaaaggacaggatggagctgctagagatagctaagacgaacgcagcaaaagctctgggcaccaccaatatcgatttgcctgctagtcttcgcaccgttccttcagccaaggagactagtagaggcatcggagtctcatccaatggcgcaaagcccgaggttagcatccttggcttgtcggaacagaattttcagaaagctaactgccagatttag

SEQ ID NO: 338453 - DNA, 975 bp, Artificial Sequence
  derived and/or modified sequence
atgctgctgggcgagctgggcgtgttcgccagctacgccttcgcccccctgagcctgatcgtgcccctgagcgccgtgagcgtgatcgccagcgccatcatcggcatcatcttcatcaaggagaagtggaagcccaaggacttcctgagaagatacgtgctgagcttcgtgggctgcggcctggccgtggtgggcacctacctgctggtgaccttcgcccccaacagccacgagaagatgaccggcgagaacgtgaccagacacctggtgagctggcccttcctgctgtacatgctggtggagatcatcctgttctgcctgctgctgtacttctacaaggagaagaacgccaacaacatcgtggtgatcctgctgctggtggccctgctgggcagcatgaccgtggtgaccgtgaaggccgtggccggcatgctggtgctgagcatccagggcaacctgcagctggactaccccatcttctacgtgatgttcgtgtgcatggtggccaccgccgtgtaccaggccgccttcctgagccaggccagccagatgtacgacagcagcctgatcgccagcgtgggctacatcctgagcaccaccatcgccatcaccgccggcgccatcttctacctggacttcatcggcgaggacgtgctgcacatctgcatgttcgccctgggctgcctgatcgccttcctgggcgtgttcctgatcaccagaaacagaaagaagcccatccccttcgagccctacatcagcatggacgccatgcccggcatgcagaacatgcacgacaagggcatgaccgtgcagcccgagctgaaggccagcttcagctacggcgccctggagaacaacgacaacatcagcgagatctacgcccccgccaccctgcccgtgatgcaggaggagcacggcagcagaagcgccagcggcgtgccctacagagtgctggagcacaccaagaaggagtag

SEQ ID NO: 338454 - DNA, 405 bp, Artificial Sequence
  derived and/or modified sequence
tgagtggccggcatgctggtgctgagcatccagggcaacctgcagctggactaccccatcttctacgtgatgttcgtgtgcatggtggccaccgccgtgtaccaggccgccttcagcaagaccgacagcagccccgccaacgagaacaacagcccctacctgagagagagccacgaggccctgatgagaatgagcctgggcaagtgccccgtgttcgagagcagcctgaccgacgtgagactgctgttcgactgccagtgcggcctgcacagcgtgcacaaccactgctaccacagcagatgcaacatcctgcccggcctgcacagaggcggcagagccgcccacctgcacgtgtgcaccggcgtgccccactgcatcctgggcagactgctgaaccacgcctag

SEQ ID NO: 338455 - DNA, 975 bp, Artificial Sequence
  derived and/or modified sequence
atgctgctcggcgaattgggtgtgttcgcaagctacgctttcgctcccctctccttaatagtgccattatctgccgtgtctgtgatagcgtccgccattatcggcatcatctttatcaaagagaaatggaagccgaaggatttcctccggcgatatgtgctctctttcgtgggctgcggtttagcagtcgtgggcacttatctgcttgtcaccttcgccccaaatagccacgaaaagatgactggcgagaatgtgactcgtcatctggtttcctggcctttcttgttatatatgctggtagaaattatactgttttgcttgctactatatttctacaaggaaaaaaacgcaaataacatagttgttatcctgctgttggttgcactgctgggctcaatgacagtggtcacagtgaaagcagtagccggcatgctcgtcctttctatccaggggaatctccagctggattacccaatattctatgtgatgttcgtgtgtatggtcgcaacggccgtctaccaggccgccttcctgtctcaggcatctcagatgtacgacagtagcctgatcgcttccgttgggtacattctctccacgactatcgccattaccgctggagccattttctacctggattttataggagaggatgtgttgcatatctgtatgttcgccctcggctgtctgatcgcctttctaggggtgttcttaatcacacgcaataggaaaaaaccaatcccgttcgaaccgtacattagtatggacgccatgccaggcatgcagaatatgcacgataagggtatgactgtacagcccgaactcaaagcgagcttttcgtatggagctctcgaaaacaacgacaatatcagcgaaatctacgctccagcaaccttgccagtcatgcaggaagaacacggatcaaggtcagccagcggcgtaccatacagagtgctggaacacacgaaaaaagaatag

SEQ ID NO: 338456 - DNA, 405 bp, Artificial Sequence
  derived and/or modified sequence
tgagtggccgggatgctggtgttaagcattcagggaaaccttcagttggattatcctatcttctacgtaatgtttgtgtgtatggtcgccactgccgtttatcaggccgcatttagcaaaaccgatagttctcccgccaatgagaataattccccctatcttcgcgagtcccacgaagccttgatgcggatgagccttgggaagtgtcctgtgttcgaatctagcctcaccgatgtaaggttgttgtttgactgtcagtgtggccttcactctgtgcacaatcattgttatcatagccggtgtaacatcctgcccggcctccatcgaggtggccgagccgctcacctgcacgtctgtacgggcgtgccccattgtattctgggtcgcctgcttaatcatgcctag

SEQ ID NO: 338457 - DNA, 975 bp, Artificial Sequence
  derived and/or modified sequence
atgctgctgggggagctgggcgtgtttgccagctatgcctttgcccccctgagcctcatcgtgcccctgtctgctgtgtctgtgattgccagcgccatcatcggcatcatcttcatcaaggagaagtggaagcccaaggacttcctgcggcgctacgtgctgagctttgtgggctgcggcctggccgtggtgggcacctacctgctggtgacctttgcccccaacagccatgagaagatgactggagaaaatgtgaccaggcacctggtgtcctggcccttcctgctgtacatgctggtggagatcatcctcttctgcctgctgctgtacttctacaaggagaagaatgccaacaacatcgtggtgatcctgctgctggtggccctgctgggctccatgacagtggtgacagtgaaggctgtggccggcatgctggtgctgagcatccagggcaacctgcagctggactaccccatcttctacgtgatgtttgtgtgcatggtggccacagctgtgtaccaggccgccttcctgagccaggccagccagatgtatgacagcagcctcatcgcctctgtgggctacatcctgagcaccaccatcgccatcacagctggggccatcttctacctggacttcatcggggaggatgtgctgcacatctgcatgtttgccctgggctgcctgattgccttcctgggcgtcttcctgatcaccaggaacaggaagaagcccatcccctttgagccctacatctccatggatgccatgcctggcatgcagaacatgcatgacaagggcatgacagtgcagcctgagctgaaggccagcttctcctatggagccctggagaacaatgacaacatcagcgagatctatgccccagccaccctgcctgtgatgcaggaggagcacggcagccgcagcgccagcggcgtgccctacagagtgctggagcacaccaagaaggagtag

SEQ ID NO: 338458 - DNA, 405 bp, Artificial Sequence
  derived and/or modified sequence
tgagtggccggcatgctggtgctgagcatccagggcaacctgcagctggactaccccatcttctacgtgatgtttgtgtgcatggtggccacagctgtgtaccaggccgccttcagcaagacagacagcagccctgccaatgaaaacaacagcccctacctgcgggagagccatgaggccctgatgaggatgagcctgggcaagtgccctgtgtttgagagcagcctgacagatgtgcggctgctgtttgactgccagtgtggcctgcacagcgtgcacaaccactgctaccacagccgctgcaacatcctgcccggcctgcaccggggcggccgggccgcccacctgcacgtgtgcaccggggtgccccactgcatcctgggccgcctgctgaaccacgcctag

SEQ ID NO: 338459 - DNA, 975 bp, Artificial Sequence
  derived and/or modified sequence
atgctgctgggcgagctgggcgtgttcgccagctacgccttcgcccccctcagcttgatcgtccctttgagtgccgtgagcgtgatagcaagcgcaatcatcggcataattttcataaaggagaagtggaaaccgaaggacttccttcgtcgctatgttctctcattcgtggggtgcggcctggccgtcgtcggcacatatctgctggtgacatttgctcctaattcacatgagaagatgaccggtgagaacgtgacccgccacctggtttcatggcccttccttctgtatatgttggtcgaaatcattctgttctgcctgctcctctatttctacaaggagaagaacgccaacaacatcgtggtgatcttgctcctggtcgccctcctggggagtatgacagtggttaccgtcaaggcggtcgcgggcatgctggtactgtctattcagggaaacctgcagttggactacccaattttttacgtgatgttcgtgtgtatggtggctaccgctgtgtaccaggccgcctttttaagtcaggcaagtcagatgtatgatagctccctcattgcctctgtgggctatatcctttcaaccacgatcgccatcactgctggcgccattttctatttggatttcataggcgaggacgtgctgcatatttgcatgtttgccctgggctgtttgattgcatttctgggcgtgttcctcatcacacggaatcggaaaaaaccaattccctttgagccttatatctcaatggatgcaatgcctggcatgcagaatatgcacgacaaaggcatgaccgtccagccggagttaaaggcaagcttttcctacggagcactggagaacaacgacaacatctctgagatttacgcaccggctacactcccagtgatgcaggaggagcacgggtcaaggtcagctagtggcgtcccctatagggtgctggagcatacgaaaaaggagtag

SEQ ID NO: 338460 - DNA, 975 bp, Artificial Sequence
  derived and/or modified sequence
atgttactgggggaactgggagtttttgcatcttacgctttcgctcccctgagccttattgtgcctctgagtgccgtatccgttattgcctctgcgattattggaattattttcatcaaagagaaatggaagccaaaggattttctgcgacgctatgtgttgtcttttgtcgggtgtggcctcgcagttgtaggtacatacctgttggttacctttgcacccaactctcacgagaagatgacaggcgagaatgtgaccaggcacctggtgtcctggccattcctgctgtacatgttagtcgagatcatcctgttctgtttactgctgtacttttacaaggagaaaaatgcaaacaatatcgtcgtaatcctcttgcttgtggcacttctcggctcaatgacagtcgtgaccgtgaaagcagttgccggaatgctggtgttgagcattcagggcaacttgcagcttgactaccccatcttttacgtaatgtttgtgtgtatggtagccacagccgtgtatcaggccgcttttctgagtcaggcgagccaaatgtatgacagcagcctgattgcctctgtgggatacattctcagtactacgatcgcaatcactgctggcgcaatcttctacctagactttattggcgaagatgtcttgcatatctgcatgtttgccttagggtgtctgatcgcattcctgggcgtgttcctcataacacggaaccgcaaaaagcccataccctttgaaccgtacatcagcatggacgctatgccaggcatgcagaacatgcatgataaaggaatgaccgtgcagcccgagctgaaagcttcttttagctatggcgcactggagaataacgacaacatctctgaaatttacgcgcctgctactctgcccgttatgcaagaagaacatggttccaggtcagccagcggcgttccataccgcgtcttggaacacactaaaaaagaatag

SEQ ID NO: 338461 - DNA, 405 bp, Artificial Sequence
  derived and/or modified sequence
tgagtagccggtatgctggtactctcaatccaaggcaatctgcagctggactatcctattttttacgtcatgttcgtctgtatggtcgccacagcagtgtaccaggcagcattttccaagactgattctagcccagctaatgagaacaatagcccatacctgagagagtcccacgaagccctcatgcgaatgagccttggcaagtgccccgtcttcgagtccagccttaccgatgtgcgcctgttatttgactgccagtgcggcctgcactcggttcataaccactgttatcattctcgttgcaatatattaccgggattgcatcggggaggccgagccgctcacttgcacgtgtgcactggcgtaccccattgtatcctggggaggcttttaaaccacgcctag

SEQ ID NO: 338462 - DNA, 975 bp, Artificial Sequence
  derived and/or modified sequence
atgctgctgggggagcttggagtatttgcttcttatgcctttgcccctctctccctgatcgtgccattatctgctgtaagcgttatcgcatccgccatcatagggattatcttcattaaagagaagtggaaacccaaagacttcctccgccgatatgtgctctccttcgttgggtgcggattggctgttgtgggcacatatctcctcgtgacctttgcacctaatagccacgaaaagatgacaggcgaaaatgtgaccaggcatttggtgagctggccattcctgttatatatgctggtcgagataatcctattctgtcttttgctgtacttctataaggaaaaaaatgccaacaacatagtcgtgattctgctcctcgtcgcactgcttggctcaatgaccgtggtcactgtcaaggccgtcgccggcatgctcgtcctgtccattcagggtaacttgcagctcgactacccgatcttctacgtaatgtttgtctgcatggtggccactgccgtctaccaagctgccttcttatctcaggcttcccagatgtacgactcgtctcttatcgcctcagtgggttatatcctaagcactactatagcgattaccgcaggcgctatcttttacttggatttcatcggagaagatgtattacacatctgtatgtttgctctgggctgtctcattgcttttttgggggtgttccttattacccggaacaggaaaaaacctattcctttcgagccatatattagcatggatgccatgcccggaatgcagaacatgcatgataaggggatgacagtgcagcccgaactcaaagcttcgttttcctacggcgcacttgagaataatgataacatctctgagatttacgcaccagctacacttccagtgatgcaggaagaacatggctctcgtagtgcttccggagtgccctatagagtcttggaacatacaaagaaagaatag

SEQ ID NO: 338463 - DNA, 975 bp, Artificial Sequence
  derived and/or modified sequence
atgctcctcggcgaactcggagtctttgcatcatacgcctttgccccacttagcctgatagtgcccctctcagcagtgagcgtcatcgccagcgcgataatcggcatcatatttattaaagagaagtggaaacccaaggacttcctgcggcgctacgtactatccttcgttggttgcggactggctgtcgtgggaacctacttgttagttacattcgccccaaactcacatgagaaaatgactggtgagaacgtgacgcgccacctggtaagctggcccttcctgctgtacatgttggtagaaattatcctattttgtcttttattatatttctacaaagaaaaaaatgccaacaatattgtcgttatcctgttgcttgtagcactcctgggttcgatgaccgtggtgacagttaaagctgttgccggcatgctcgttctgtcaatacagggcaatttgcagctcgattatcccattttctacgtgatgtttgtttgcatggtggcaaccgcagtctaccaggctgccttcctgtctcaggcatcccaaatgtacgactcttcccttatcgcctccgttggatatatactgagtactacgatcgctattactgctggagcaattttctacttggacttcatcggggaagatgtccttcatatttgcatgttcgcccttggctgtctcatcgccttcctaggggtgttcttgataaccagaaatagaaagaagcccatcccatttgaaccctacatctccatggatgcaatgcctggaatgcagaacatgcacgataaaggcatgacagtccagcctgagttaaaagcctccttctcttatggcgcgctggaaaacaacgacaacatctctgaaatctatgcgcctgctactctgccagttatgcaagaagagcatgggtccagatcagcttccggcgtcccttatagggtcctcgaacacaccaaaaaggaatag

SEQ ID NO: 338464 - RNA, 975 nt, Artificial Sequence
  derived and/or modified sequence
augcugcugggggagcuuggaguauuugcuucuuaugccuuugccccucucucccugaucgugccauuaucugcuguaagcguuaucgcauccgccaucauagggauuaucuucauuaaagagaaguggaaacccaaagacuuccuccgccgauaugugcucuccuucguugggugcggauuggcuguugugggcacauaucuccucgugaccuuugcaccuaauagccacgaaaagaugacaggcgaaaaugugaccaggcauuuggugagcuggccauuccuguuauauaugcuggucgagauaauccuauucugucuuuugcuguacuucuauaaggaaaaaaaugccaacaacauagucgugauucugcuccucgucgcacugcuuggcucaaugaccguggucacugucaaggccgucgccggcaugcucguccuguccauucaggguaacuugcagcucgacuacccgaucuucuacguaauguuugucugcaugguggccacugccgucuaccaagcugccuucuuaucucaggcuucccagauguacgacucgucucuuaucgccucaguggguuauauccuaagcacuacuauagcgauuaccgcaggcgcuaucuuuuacuuggauuucaucggagaagauguauuacacaucuguauguuugcucugggcugucucauugcuuuuuuggggguguuccuuauuacccggaacaggaaaaaaccuauuccuuucgagccauauauuagcauggaugccaugcccggaaugcagaacaugcaugauaaggggaugacagugcagcccgaacucaaagcuucguuuuccuacggcgcacuugagaauaaugauaacaucucugagauuuacgcaccagcuacacuuccagugaugcaggaagaacauggcucucguagugcuuccggagugcccuauagagucuuggaacauacaaagaaagaauag

SEQ ID NO: 338465 - RNA, 975 nt, Artificial Sequence
  derived and/or modified sequence
augcuccucggcgaacucggagucuuugcaucauacgccuuugccccacuuagccugauagugccccucucagcagugagcgucaucgccagcgcgauaaucggcaucauauuuauuaaagagaaguggaaacccaaggacuuccugcggcgcuacguacuauccuucguugguugcggacuggcugucgugggaaccuacuuguuaguuacauucgccccaaacucacaugagaaaaugacuggugagaacgugacgcgccaccugguaagcuggcccuuccugcuguacauguugguagaaauuauccuauuuugucuuuuauuauauuucuacaaagaaaaaaaugccaacaauauugucguuauccuguugcuuguagcacuccuggguucgaugaccguggugacaguuaaagcuguugccggcaugcucguucugucaauacagggcaauuugcagcucgauuaucccauuuucuacgugauguuuguuugcaugguggcaaccgcagucuaccaggcugccuuccugucucaggcaucccaaauguacgacucuucccuuaucgccuccguuggauauauacugaguacuacgaucgcuauuacugcuggagcaauuuucuacuuggacuucaucggggaagauguccuucauauuugcauguucgcccuuggcugucucaucgccuuccuagggguguucuugauaaccagaaauagaaagaagcccaucccauuugaacccuacaucuccauggaugcaaugccuggaaugcagaacaugcacgauaaaggcaugacaguccagccugaguuaaaagccuccuucucuuauggcgcgcuggaaaacaacgacaacaucucugaaaucuaugcgccugcuacucugccaguuaugcaagaagagcauggguccagaucagcuuccggcgucccuuauaggguccucgaacacaccaaaaaggaauag

SEQ ID NO: 338466 - protein, 454 aa, Artificial Sequence
  derived and/or modified sequence
MKETRGYGGDAPFCTRLNHSYTGMWAPERSAEARGNLTRPPGSGEDCGSVSVAFPITMLLTGFVGNALAMLLVSRSYRRRESKRKKSFLLCIGWLALTDLVGQLLTTPVVIVVYLSKQRWEHIDPSGRLCTFFGLTMTVFGLSSLFIASAMAVERALAIRAPHWYASHMKTRATRAVLLGVWLAVLAFALLPVLGVGQYTVQWPGTWCFISTGRGGNGTSSSHNWGNLFFASAFAFLGLLALTVTFSCNLATIKALVSRCRAKATASQSSAQWGRITTETAIQLMGIMCVLSVCWSPLLIMMLKMIFNQTSVEHCKTHTEKQKECNFFLIAVRLASLNQILDPWVYLLLRKILLRKFCQVANAVSSCSNDGQKGQPISLSNEIIQTEAMRKRRLREQAPLLPTSTVIDPSRFCAQPFRWFLDLSFPAMSSSHPQLPLTLASFKLLREPCSVQLS

SEQ ID NO: 338467 - DNA, 1365 bp, Artificial Sequence
  derived and/or modified sequence
atgaaagagactcgcggatacggaggtgatgcacctttttgcactcggcttaatcactcttacactggcatgtgggcccctgaacgttctgccgaggctagaggaaacctgacgaggcccccaggctctggagaagactgcggcagtgtgtcagttgctttccctataaccatgcttctgacaggattcgtggggaatgcactcgctatgctcctggttagccgcagttacagacggcgcgaatcgaaaaggaagaaatctttcctgttgtgcatcggatggctggcgctgaccgatctcgtcggccagctcctaacaactcctgtggtgatcgtggtgtacttgagcaagcagcggtgggagcacattgacccaagtgggagactgtgcacgttctttggactgaccatgacggtgttcggcctgtccagcctctttattgctagcgcaatggccgttgaacgggctctagctatacgggcgccacattggtacgcaagccatatgaaaactagggctacaagagcggtcctgctgggtgtttggttagccgtgctggcattcgccctactgccagtgttaggggtgggtcagtataccgtgcagtggcccggaacctggtgttttatttccaccggccggggcgggaacggtacgtcatctagtcacaactggggcaacttgttcttcgcatctgcctttgcatttctggggctcctcgcgctgacagtaaccttctcttgtaacttagccactatcaaggcactagtatcgagatgcagagccaaagccaccgccagccagtcttctgcccagtggggaaggatcacaactgagacggcaatacaactgatgggaatcatgtgcgtgctgtccgtgtgctggtcccctctgctcatcatgatgcttaaaatgatctttaatcagacaagcgtggagcactgtaagactcacacagagaagcagaaagagtgcaactttttcttgattgccgttaggttagcttcactcaatcagattctcgacccctgggtctacctactgttgcgtaagattcttttgagaaaattttgtcaagtggctaacgccgtgtcaagctgtagcaatgatggacaaaaaggacagccaatcagcctgtctaatgaaatcattcagacagaagctatgcgcaagcgacgccttcgcgaacaggctcccctgctccctactagtaccgtgattgacccatcccgcttctgtgcccaaccattccggtggtttcttgatctctcctttcccgccatgagtagtagtcacccacagctgcctctgaccctagcttcatttaaactgctgcgggaaccttgcagcgttcaattgtcttag

SEQ ID NO: 338468 - DNA, 1365 bp, Artificial Sequence
  derived and/or modified sequence
atgaaggagacccggggctatggaggagatgcccccttctgcacccggctgaaccacagctacacaggcatgtgggcccctgagaggtctgctgaggcccggggcaacctgacccggcccccaggcagcggggaggactgtggctctgtgtctgtggccttccccatcaccatgctgctgactggatttgtgggcaatgccctggccatgctgctggtgagccgcagctacagaagaagagagagcaagaggaagaagagcttcctgctgtgcatcggctggctggccctgacagacctggtgggccagctgctgaccacccctgtggtgattgtggtgtacctgagcaagcagcgctgggagcacatcgaccccagcggccgcctgtgcaccttcttcggcctgaccatgacagtgtttggcctgagcagcctcttcatcgccagcgccatggctgtggagcgggccctggccatccgggccccccactggtacgccagccacatgaagacccgggccaccagggctgtgctgctgggcgtgtggctggccgtgctggcctttgccctgctgcctgtgctgggcgtgggccagtacacagtgcagtggccaggcacctggtgcttcatcagcacaggccggggcggcaatggcaccagcagcagccacaactggggcaacctcttctttgccagcgcctttgccttcctgggcctgctggccctgactgtgaccttcagctgcaacctggccaccatcaaggccctggtgagccgctgccgggccaaggccacagccagccagagcagcgcccagtggggccgcatcaccacagaaacagccatccagctgatgggcatcatgtgtgtgctgtctgtgtgctggagccccctgctgatcatgatgctgaagatgatcttcaaccagacctctgtggagcactgcaagacccacacagagaagcagaaggagtgcaacttcttcctgattgctgtgcggctggccagcctgaaccagatcctggacccctgggtgtacctgctgctgaggaagatcctgctgaggaagttctgccaggtggccaatgctgtgagcagctgcagcaatgatggccagaagggccagcccatcagcctgagcaatgagatcatccagacagaggccatgaggaagaggcggctgcgggagcaggcccccctgctgcccaccagcacagtgattgaccccagccgcttctgtgcccagcccttccgctggttcctggacctgtccttccctgccatgagcagcagccacccccagctgcccctgaccctggccagcttcaagctgctgcgggagccctgcagcgtgcagctgtcctag

SEQ ID NO: 338469 - DNA, 1365 bp, Artificial Sequence
  derived and/or modified sequence
atgaaggagacccggggctacggcggcgacgcccccttctgcacccgtctgaatcactcctacaccgggatgtgggccccagagagatcggccgaggcaagaggtaacctgacccgccctccaggctctggagaagattgcgggtctgtgtcggtcgctttccctattacgatgctgctgaccggattcgtaggtaatgcactggcaatgctcctggtctcgagatcatacagacgaagagaatcaaaacgcaaaaagtcctttcttctgtgcattggctggctggcgctgaccgacctggtggggcagcttctcacaactcctgtggtgattgtggtgtacctgtccaagcagcgttgggagcacatcgaccctagtggaagactatgcactttctttgggctgactatgaccgtatttgggctgtcctccctgttcatcgcaagtgcaatggcggtggagagggctctggcgatcagagcccctcattggtacgcctcgcatatgaaaacaagagccactcgtgccgtgctgcttggggtgtggcttgccgttcttgcctttgccttgttgcccgtcttgggcgtcggacagtacacagttcagtggccaggcacctggtgtttcatttcaacgggccgcggcgggaatggaaccagcagcagccacaattggggaaacctgttctttgcgtccgcttttgcctttctcggattgctggccttgactgttaccttttcatgcaaccttgccaccattaaggccctcgtcagcagatgtcgggcaaaggccaccgcttctcagagttctgcccagtggggcagaataacaacagaaacagcaatccagctcatggggattatgtgcgtgctgtcagtgtgctggagccccttgttgataatgatgctgaaaatgatattcaaccagacatccgtcgagcattgtaagacgcacaccgagaagcagaaggaatgcaactttttcctgatcgcagttaggctagcttctttaaatcaaatcctggacccctgggtgtacttgctgcttcgtaaaatactgctacggaaattctgtcaggttgccaacgcggtgtctagttgctcaaatgacggacagaaggggcagccaatttccctgagcaacgagatcatccagactgaagcaatgcgcaagcgacgacttagagagcaggcccctttgctgccaacaagcaccgttatcgatccatctcggttttgcgcacagcctttcagatggtttctggatctgagttttccagcgatgtcaagttcccaccctcagctgccactgaccctcgctagctttaaattactgcgagaaccgtgctccgttcagttgtcctag

SEQ ID NO: 338470 - DNA, 1365 bp, Artificial Sequence
  derived and/or modified sequence
atgaaggaaacgcgtgggtatggcggagatgcccctttctgcactcgcctaaatcatagttacacgggtatgtgggctcctgagagatccgctgaagcccgagggaatctaacccggcctcccggaagcggggaagattgcggctctgtcagtgttgcgtttcccatcaccatgctactcacaggtttcgtcggaaatgctcttgcaatgctgctcgtctctcgcagttatcggaggagagagagcaagaggaagaagagtttcctgttgtgcatcggatggttagccctgaccgatctagttggccagttgttaaccactcccgttgtgatcgtagtgtacctgagtaaacagcggtgggagcatatagacccatccggtcgcttgtgcacgttttttggactaacaatgacagtatttgggctgtcgagcctctttatagcatcagcaatggcagtcgagagagctctggccattcgggctccccattggtacgcctcccatatgaaaacaagggccaccagggccgtgctgctgggcgtctggctcgccgtccttgcctttgccctgctgccggtgctgggtgttggccagtatacggtgcagtggccaggcacctggtgctttataagcacagggaggggcggaaacggcacaagctcctctcacaactggggtaatcttttcttcgcatcggctttcgcatttttgggacttctggcccttacagtgacatttagctgcaaccttgcgactataaaggcattggtgtcccgctgtagagccaaggcaactgcatcccaaagtagcgcccagtgggggcgaatcacaaccgagacagccatccagctcatgggaatcatgtgcgtgcttagcgtctgttggtctccactgttaattatgatgctgaaaatgatattcaaccagacaagcgtcgagcattgtaaaacgcacaccgaaaaacagaaagagtgtaactttttcctcatcgccgtgcggcttgccagtctaaaccagattctggatccatgggtttatttactcttacgcaagattttgctccgaaaattttgtcaggttgctaatgccgtgagtagctgctccaacgatggccaaaagggacagccaataagcctgtcgaacgagattatccagactgaggcaatgagaaagcgcagattgcgggagcaggcccctctcctccctacttcaaccgtgattgatcctagcaggttttgcgcacagccattccgctggtttctggatcttagttttcctgccatgtcgagtagccatccccagctgccactcaccttggctagctttaagctcctgagggagccttgttcagtgcaactgtcctag

SEQ ID NO: 338471 - DNA, 1596 bp, Artificial Sequence
  derived and/or modified sequence
accagaggtttcccagagaggaaggcgtggctccctcccgggccagtgagccctggcgccgccgcggccgcggtcccagcagcggagtagggcggcggctgcgccccgcaccatggggggcagcccagccccagccgcggtaaacgccgacctccgccgccgcccgcgccgcgtctgccccctcccgctgcggctctctggacgccatcccctcctcacctcgaagccaacatgaaggagacccggggctacggaggggatgcccccttctgcacccgcctcaaccactcctacacaggcatgtgggcgcccgagcgttccgccgaggcgcggggcaacctcacgcgccctccagggtctggcgaggattgcggatcggtgtccgtggccttcccgatcaccatgctgctcactggtttcgtgggcaacgcactggccatgctgctcgtgtcgcgcagctaccggcgccgggagagcaagcgcaagaagtccttcctgctgtgcatcggctggctggcgctcaccgacctggtcgggcagcttctcaccaccccggtcgtcatcgtcgtgtacctgtccaagcagcgttgggagcacatcgacccgtcggggcggctctgcacctttttcgggctgaccatgactgttttcgggctctcctcgttgttcatcgccagcgccatggccgtcgagcgggcgctggccatcagggcgccgcactggtatgcgagccacatgaagacgcgtgccacccgcgctgtgctgctcggcgtgtggctggccgtgctcgccttcgccctgctgccggtgctgggcgtgggccagtacaccgtccagtggcccgggacgtggtgcttcatcagcaccgggcgagggggcaacgggactagctcttcgcataactggggcaaccttttcttcgcctctgcctttgccttcctggggctcttggcgctgacagtcaccttttcctgcaacctggccaccattaaggccctggtgtcccgctgccgggccaaggccacggcatctcagtccagtgcccagtggggccgcatcacgaccgagacggccattcagcttatggggatcatgtgcgtgctgtcggtctgctggtctccgctcctgataatgatgttgaaaatgatcttcaatcagacatcagttgagcactgcaagacacacacggagaagcagaaagaatgcaacttcttcttaatagctgttcgcctggcttcactgaaccagatcttggatccttgggtttacctgctgttaagaaagatccttcttcgaaagttttgccaggtagcaaatgctgtctccagctgctctaatgatggacagaaagggcagcctatctcattatctaatgaaataatacagacagaagcaatgagaaaaagaagactcagagagcaagctcctcttcttcccacctctactgtgattgatccttcaaggttctgtgctcagcccttccgttggttcttggatttgtcctttcccgccatgtcttcatcacatccacaacttccactaacacttgcgagcttcaaacttcttagagaaccctgcagtgtccagctaagctga

SEQ ID NO: 338472 - DNA, 1365 bp, Artificial Sequence
  derived and/or modified sequence
atgaaggagaccagaggctacggcggcgacgcccccttctgcaccagactgaaccacagctacaccggcatgtgggcccccgagagaagcgccgaggccagaggcaacctgaccagaccccccggcagcggcgaggactgcggcagcgtgagcgtggccttccccatcaccatgctgctgaccggcttcgtgggcaacgccctggccatgctgctggtgagcagaagctacagaagaagagagagcaagagaaagaagagcttcctgctgtgcatcggctggctggccctgaccgacctggtgggccagctgctgaccacccccgtggtgatcgtggtgtacctgagcaagcagagatgggagcacatcgaccccagcggcagactgtgcaccttcttcggcctgaccatgaccgtgttcggcctgagcagcctgttcatcgccagcgccatggccgtggagagagccctggccatcagagccccccactggtacgccagccacatgaagaccagagccaccagagccgtgctgctgggcgtgtggctggccgtgctggccttcgccctgctgcccgtgctgggcgtgggccagtacaccgtgcagtggcccggcacctggtgcttcatcagcaccggcagaggcggcaacggcaccagcagcagccacaactggggcaacctgttcttcgccagcgccttcgccttcctgggcctgctggccctgaccgtgaccttcagctgcaacctggccaccatcaaggccctggtgagcagatgcagagccaaggccaccgccagccagagcagcgcccagtggggcagaatcaccaccgagaccgccatccagctgatgggcatcatgtgcgtgctgagcgtgtgctggagccccctgctgatcatgatgctgaagatgatcttcaaccagaccagcgtggagcactgcaagacccacaccgagaagcagaaggagtgcaacttcttcctgatcgccgtgagactggccagcctgaaccagatcctggacccctgggtgtacctgctgctgagaaagatcctgctgagaaagttctgccaggtggccaacgccgtgagcagctgcagcaacgacggccagaagggccagcccatcagcctgagcaacgagatcatccagaccgaggccatgagaaagagaagactgagagagcaggcccccctgctgcccaccagcaccgtgatcgaccccagcagattctgcgcccagcccttcagatggttcctggacctgagcttccccgccatgagcagcagccacccccagctgcccctgaccctggccagcttcaagctgctgagagagccctgcagcgtgcagctgagctag

SEQ ID NO: 338473 - protein, 390 aa, Artificial Sequence
  derived and/or modified sequence
MKETRGYGGDAPFCTRLNHSYTGMWAPERSAEARGNLTRPPGSGEDCGSVSVAFPITMLLTGFVGNALAMLLVSRSYRRRESKRKKSFLLCIGWLALTDLVGQLLTTPVVIVVYLSKQRWEHIDPSGRLCTFFGLTMTVFGLSSLFIASAMAVERALAIRAPHWYASHMKTRATRAVLLGVWLAVLAFALLPVLGVGQYTVQWPGTWCFISTGRGGNGTSSSHNWGNLFFASAFAFLGLLALTVTFSCNLATIKALVSRCRAKATASQSSAQWGRITTETAIQLMGIMCVLSVCWSPLLIMMLKMIFNQTSVEHCKTHTEKQKECNFFLIAVRLASLNQILDPWVYLLLRKILLRKFCQIRYHTNNYASSSTSLPCQCSSTLMWSDHLER

SEQ ID NO: 338474 - DNA, 1914 bp, Artificial Sequence
  derived and/or modified sequence
gaaggcgtggctccctcccgggccagtgagccctggcgccgccgcggccgcggtcccagcagcggagtagggcggcggctgcgccccgcaccatggggggcagcccagccccagccgcggtaaacgccgacctccgccgccgcccgcgccgcgtctgccccctcccgctgcggctctctggacgccatcccctcctcacctcgaagccaacatgaaggagacccggggctacggaggggatgcccccttctgcacccgcctcaaccactcctacacaggcatgtgggcgcccgagcgttccgccgaggcgcggggcaacctcacgcgccctccagggtctggcgaggattgcggatcggtgtccgtggccttcccgatcaccatgctgctcactggtttcgtgggcaacgcactggccatgctgctcgtgtcgcgcagctaccggcgccgggagagcaagcgcaagaagtccttcctgctgtgcatcggctggctggcgctcaccgacctggtcgggcagcttctcaccaccccggtcgtcatcgtcgtgtacctgtccaagcagcgttgggagcacatcgacccgtcggggcggctctgcacctttttcgggctgaccatgactgttttcgggctctcctcgttgttcatcgccagcgccatggccgtcgagcgggcgctggccatcagggcgccgcactggtatgcgagccacatgaagacgcgtgccacccgcgctgtgctgctcggcgtgtggctggccgtgctcgccttcgccctgctgccggtgctgggcgtgggccagtacaccgtccagtggcccgggacgtggtgcttcatcagcaccgggcgagggggcaacgggactagctcttcgcataactggggcaaccttttcttcgcctctgcctttgccttcctggggctcttggcgctgacagtcaccttttcctgcaacctggccaccattaaggccctggtgtcccgctgccgggccaaggccacggcatctcagtccagtgcccagtggggccgcatcacgaccgagacggccattcagcttatggggatcatgtgcgtgctgtcggtctgctggtctccgctcctgataatgatgttgaaaatgatcttcaatcagacatcagttgagcactgcaagacacacacggagaagcagaaagaatgcaacttcttcttaatagctgttcgcctggcttcactgaaccagatcttggatccttgggtttacctgctgttaagaaagatccttcttcgaaagttttgccagatcaggtaccacacaaacaactatgcatccagctccacctccttaccctgccagtgttcctcaaccttgatgtggagcgaccatttggaaagatgagaaaaagaagactcagagagcaagaggaattttggggaaattaaaacctgcctttctgccaggatcacatcactggaagctccatgactctctttttgtaaaagaaaaaaaaatcacagaaacacccacctcccaaactattctcttttacttcttcccccaagcccacccccaaatataactgttatccagaagctgttatgtcctgtttccatacatgtttttgtacttttactatatctacatacatcaattaaacttatgtcctattgttttgtgaatttatatttgcgtatacattatcatatgtaaaatttgcatttttttattgaaaattatgtttcttgagatttatccacattgaaacatggagctctaaatcgttaattttaaccgctatagagtattccataatttgaataaagcataatttgtttgtacaatctcccgccaagggaaaattatttccacactcatcatgacaaggagcactgcaaaaataaaaataaaaattacattcatacatgttt

SEQ ID NO: 338475 - protein, 205 aa, Artificial Sequence
  derived and/or modified sequence
MAEPGHSHHLSARVRGRTERRIPRLWRLLLWAGTAFQVTQGTGPELHACKESEYHYEYTACDSTGSRWRVAVPHTPGLCTSLPDPIKGTECSFSCNAGEFLDMKDQSCKPCAEGRYSLGTGIRFDEWDELPHGFASLSANMELDDSAAESTGNCTSSKWVPRGDYIASNTDECTATLMYAVNLKQSGTVNFEYYYPDSSIIFEFF

SEQ ID NO: 338476 - protein, 91 aa, Artificial Sequence
  derived and/or modified sequence
MAEPGHSHHLSARVRGRTERRIPRLWRLLLWAGTAFQVTQGTGPELHACKESEYHYEYTACDSTGSRWRVAVPHTPGLCTSLPDPIKGTEC

SEQ ID NO: 338477 - protein, 152 aa, Artificial Sequence
  derived and/or modified sequence
MAEPGHSHHLSARVRGRTERRIPRLWRLLLWAGTAFQVTQGTGPELHACKESEYHYEYTACDSTGSRWRVAVPHTPGLCTSLPDPIKGTECSFSCNAGEFLDMKDQSCKPCAEGRYSLGTGIRFDEWDELPHGFASLSANMELDDSAAESTG

SEQ ID NO: 338478 - protein, 156 aa, Artificial Sequence
  derived and/or modified sequence
MAEPGHSHHLSARVRGRTERRIPRLWRLLLWAGTAFQVTQGTGPELHACKESEYHYEYTACDSTGSRWRVAVPHTPGLCTSLPDPIKGTECSFSCNAGEFLDMKDQSCKPCAEGRYSLGTGIRFDEWDELPHGFASLSANMELDDSAAESTGNCTS

SEQ ID NO: 338479 - DNA, 276 bp, Artificial Sequence
  derived and/or modified sequence
atggccgagcccggccacagccaccacctgagcgccagagtgagaggcagaaccgagagaagaatccccagactgtggagactgctgctgtgggccggcaccgccttccaggtgacccagggcaccggccccgagctgcacgcctgcaaggagagcgagtaccactacgagtacaccgcctgcgacagcaccggcagcagatggagagtggccgtgccccacacccccggcctgtgcaccagcctgcccgaccccatcaagggcaccgagtgctag

SEQ ID NO: 338480 - DNA, 276 bp, Artificial Sequence
  derived and/or modified sequence
atggctgagcctggacactcccaccatctgagcgcacgcgtccggggccggaccgagcgccggattccccgactatggaggctgcttctgtgggcaggcacagcgttccaagtgacccaaggcaccgggcccgaactacatgcatgtaaggagagtgagtatcactatgaatacacagcctgtgacagtacaggcagccgctggcgggtagctgtgccccacaccccggggctttgtactagcctgccagatcccatcaaaggcaccgaatgttag

SEQ ID NO: 338481 - DNA, 276 bp, Artificial Sequence
  derived and/or modified sequence
atggccgagcccggccacagccaccacctgagcgcccgggtgcggggccgcacagagcggcgcatcccccggctgtggaggctgctgctgtgggccggcacagccttccaggtgacccagggcaccggccctgagctgcacgcctgcaaggagagcgagtaccactatgagtacacagcctgtgacagcacaggcagccgctggagggtggccgtgccccacaccccaggcctgtgcaccagcctgcctgaccccatcaagggcacagagtgctag

SEQ ID NO: 338482 - DNA, 276 bp, Artificial Sequence
  derived and/or modified sequence
atggccgagcccggccacagccaccacctgagcgcccgggtgcgggggcgtacagaacggaggattcccaggctgtggagactcctgctgtgggcggggactgccttccaggtgacccagggcactggccccgagctgcatgcttgcaaggagtccgaataccactacgaatatacagcctgtgattccactgggtctaggtggagggttgccgtgccacacacaccaggcctgtgcacctctttaccagacccgattaaaggcaccgagtgttag

SEQ ID NO: 338483 - DNA, 564 bp, Artificial Sequence
  derived and/or modified sequence
ttctttctctcggttcacacgccacgtgtgcaacatcggagatgctcataaaataacccctggcccgaaagggcagtagaaaacggaaatttgttggctggcttggaggatgcttccactgtgttcttcacacgagccccgggcctgcctgttgggccggttgcgcaccccgggcgcgcgctctcccgcgcccacgccgcgcgcaccagcggcggcggctgccatggcgacccgcagaagcagcagccgcagcacctgagccgctactgccgctcactcaggacaacgctatggctgagcctgggcacagccaccatctctccgccagagtcaggggaagaactgagaggcgcataccccggctgtggcggctgctgctctgggctgggaccgccttccaggtgacccagggaacgggaccggagcttcatgcctgcaaagagtctgagtaccactatgagtacacggcgtgtgacagcacgggttccaggtggagggtcgccgtgccgcataccccgggcctgtgcaccagcctgcctgaccccatcaagggcaccgagtgct

SEQ ID NO: 338484 - DNA, 276 bp, Artificial Sequence
  derived and/or modified sequence
atggctgaacccggtcattctcaccacctatcagcgagggttcggggacgaacagaacggagaatccctcgcctctggagattgctgctctgggcaggcaccgcttttcaggtcacacaaggtacaggccctgagctgcacgcctgcaaggagtcagagtatcactacgaatacactgcatgcgacagtacagggtccagatggagggtggccgtaccccatacccccggactgtgtaccagcctgcctgatccaatcaagggcactgagtgctag

SEQ ID NO: 338485 - protein, 1495 aa, Artificial Sequence
  derived and/or modified sequence
MQCLEMTTKRKIIGRLVPCRCFRGEEEIISVLDYSHCSLQQVPKEVFNFERTLEELYLDANQIEELPKQLFNCQALRKLSIPDNDLSNLPTTIASLVNLKELDISKNGVQEFPENIKCCKCLTIIEASVNPISKLPDGFTQLLNLTQLYLNDAFLEFLPANFGRLVKLRILELRENHLKTLPKSMHKLAQLERLDLGNNEFGELPEVLDQIQNLRELWMDNNALQVLPGSIGKLKMLVYLDMSKNRIETVDMDISGCEALEDLLLSSNMLQQLPDSIGLLKKLTTLKVDDNQLTMLPNTIGNLSLLEEFDCSCNELESLPSTIGYLHSLRTLAVDENFLPELPREIGSCKNVTVMSLRSNKLEFLPEEIGQMQKLRVLNLSDNRLKNLPFSFTKLKELAALWLSDNQSKALIPLQTEAHPETKQRVLTNYMFPQQPRGDEDFQSDSDSFNPTLWEEQRQQRMTVAFEFEDKKEDDENAGKVKDLSCQAPWERGQRGITLQPARLSGDCCTPWARCDQQIQDMPVPQNDPQLAWGCISGLQQERSMCTPLPVAAQSTTLPSLSGRQVEINLKRYPTPYPEDLKNMVKSVQNLVGKPSHGVRVENSNPTANTEQTVKEKYEHKWPVAPKEITVEDSFVHPANEMRIGELHPSLAETPLYPPKLVLLGKDKKESTDESEVDKTHCLNNSVSSGTYSDYSPSQASSGSSNTRVKVGSLQTTAKDAVHNSLWGNRIAPSFPQPLDSKPLLSQREAVPPGNIPQRPDRLPMSDTFTDNWTDGSHYDNTGFVAEETTAENANSNPLLSSKSRSTSSHGRRPLIRQDRIVGVPLELEQSTHRHTPETEVPPSNPWQNWTRTPSPFEDRTAFPSKLETTPTTSPLPERKEHIKESTEIPSPFSPGVPWEYHDSNPNRSLSNVFSQIHCRPESSKGVISISKSTERLSPLMKDIKSNKFKKSQSIDEIDIGTYKVYNIPLENYASGSDHLGSHERPDKMLGPEHGMSSMSRSQSVPMLDDEMLTYGSSKGPQQQKASMTKKVYQFDQSFNPQGSVEVKAEKRIPPPFQHNPEYVQQASKNIAKDLISPRAYRGYPPMEQMFSFSQPSVNEDAVVNAQFASQGARAGFLRRADSLVSATEMAMFRRVNEPHELPPTDRYGRPPYRGGLDRQSSVTVTESQFLKRNGRYEDEHPSYQEVKAQAGSFPVKNLTQRRPLSARSYSTESYGASQTRPVSARPTMAALLEKIPSDYNLGNYGDKPSDNSDLKTRPTPVKGEESCGKMPADWRQQLLRHIEARRLDRTPSQQSNILDNGQEDVSPSGQWNPYPLGRRDVPPDTITKKAGSHIQTLMGSQSLQHRSREQQPYEGNINKVTIQQFQSPLPIQIPSSQATRGPQPGRCLIQTKGQRSMDGYPEQFCVRIEKNPGLGFSISGGISGQGNPFKPSDKGIFVTRVQPDGPASNLLQPGDKILQANGHSFVHMEHEKAVLLLKSFQNTVDLVIQRELTV

SEQ ID NO: 338486 - protein, 217 aa, Artificial Sequence
  derived and/or modified sequence
MMENLIRGRNPPQYQRSPCKEVRAALRKRPEEELQCLEMTTKRKIIGRLVPCRCFRGEEEIISVLDYSHCSLQQVPKEVFNFERTLEELYLDANQIEELPKQLFNCQALRKLSIPDNDLSNLPTTIASLVNLKELDISKNGVQEFPENIKCCKCLTIIEASVNPISKLPDGFTQLLNLTQLYLNDAFLEFLPANFGRLVKLRILELRENHLKTLPNI

SEQ ID NO: 338487 - DNA, 4488 bp, Artificial Sequence
  derived and/or modified sequence
atgcagtgcctggagatgactaccaaacgtaaaatcatcgggcgcttggttccttgcagatgtttccgtggggaggaggagatcatatccgtcctggactacagtcattgttcgctccagcaagtccccaaagaagtttttaacttcgaacggaccctcgaagagctgtacctggacgctaaccagatagaggagctgcccaagcagctgttcaactgtcaggcccttagaaagttgagcattccggataacgacctgagtaatctgccaaccacgattgcctccctagttaacttgaaggaattggacattagtaagaatggtgtacaggaatttcccgagaatatcaaatgctgtaaatgcctaaccatcatcgaggcctctgttaaccctatcagcaagctgccggacgggttcacgcaactgctgaatctgacccagctatacctgaatgatgcattccttgagttcctccccgctaatttcggtagacttgtaaagctgcgaatcctcgaactaagagaaaaccacctgaaaacactgccaaaaagcatgcataagttagctcagcttgagcgcctggacttgggaaacaatgagttcggagagctgccagaagtcttagaccagatccagaacctcagagagctgtggatggataacaacgccttgcaggtacttcccggtagcatcggaaagttgaagatgctggtgtacctggacatgagcaagaaccgcatagaaacagtggatatggatatctctggctgcgaagcactagaggacctgttgctcagcagcaacatgctccagcagttgcctgactctatcgggctgctcaaaaaacttacgaccctgaaggtggatgataaccaactgacaatgctacccaacacgataggtaatttgagtctgctggaggagttcgattgcagctgcaatgagctggagagtttgccttcaaccattgggtaccttcactctcttagaacattagcagtagacgaaaacttcctgccagaactgcctagggagataggaagttgcaagaacgtgactgtgatgtcgctccggagtaataagctagagttcttgcccgaagagattggacagatgcagaagctccgggtgctcaatttaagtgacaaccggctgaaaaaccttcctttcagctttacaaaactgaaggaactggctgccctatggctgagcgataaccagagtaaggccctgatccctttgcagacagaagcccacccagagacaaagcagagagtattgaccaattatatgttcccccaacagcccaggggagacgaagacttccagtccgattcagactcatttaatccaaccctatgggaggaacagcgccagcaaagaatgaccgtagccttcgagtttgaagacaaaaaagaggacgacgagaatgctggcaaggtcaaggacctgtcatgccaggctccctgggaacgcggccagaggggtatcacccttcaaccggcccgactatctggcgattgctgcacaccctgggcacgctgtgatcagcaaatccaggacatgcctgtcccgcaaaacgaccctcagctggcctggggctgcattagcgggctgcaacaagagaggtccatgtgcacacctcttccagtagctgctcagtcaactactctgccctcactttccggaagacaggtggagatcaatctcaagcgatacccaaccccttaccctgaagatttgaaaaatatggtgaagtccgttcagaatctagtggggaagccttctcacggcgttagggttgagaactccaatcctaccgctaatacggaacagaccgtgaaggaaaaatatgagcacaagtggcccgtagcccctaaggagattacagtcgaagattccttcgtgcatccggccaatgagatgagaataggcgaactccatcccagtctggccgaaacacccctatatcccccaaagctggtcctattgggcaaagacaagaaagaatctactgatgagagtgaggtagataagacgcattgtctgaacaactccgtcagttccggaacatatagtgactactcaccatcacaggcaagtagcggctcctcaaatacgagggtgaaagtgggctcccttcaaacaaccgcgaaggacgccgtccacaactctctgtgggggaacagaattgctccctcgttcccccaacctttggatagcaaacccctgctttctcagcgggaggccgttcctcccggcaatatcccacagcgcccagacaggctgcccatgagtgataccttcaccgataactggaccgatggcagccactatgacaacacaggctttgtggctgaagaaacaacggccgagaacgcaaatagcaatcccctgctgtcctcaaagtcacgatctacttcttcacatgggagacggcccttgattaggcaggacagaattgtgggagtgccactcgagttggaacagtctacgcaccgccatacacctgaaaccgaggttcctccaagtaatccctggcagaactggacgagaacaccttctccgtttgaggatcggacagccttcccttcaaagttagaaacgaccccgaccacctcaccgctccctgagcggaaggaacatataaaggagagcaccgaaattcccagccctttctctcccggggtcccctgggaatatcatgatagtaatccaaaccgaagcctgtctaacgtgttctcgcagatccactgtagaccagagtcctctaaaggggtcatcagcatctctaagtccactgagcggctcagccccctcatgaaggacatcaagagcaacaagtttaaaaagtcacagagtatcgacgagatagacatcggtacatacaaagtttataacataccgctagagaactacgctagcggaagtgatcacctagggagccacgaacgccccgataaaatgcttggcccggaacatggcatgagtagcatgtcccgctcccagtctgttcccatgctggacgatgagatgttgacctatgggtctagcaaaggtccacaacagcagaaagccagtatgacaaagaaagtttaccagtttgatcagagtttcaatccccaagggtccgtggaagttaaggccgaaaagaggatccctcctccgtttcagcacaatccagagtatgtgcagcaggcctctaagaatatagccaaggatttaatcagcccccgcgcgtatcgaggataccctcctatggaacagatgtttagcttttcccaaccatctgtgaatgaagatgccgttgtgaacgctcaattcgcttctcaaggagctagggcgggtttcctgagaagagccgatagtctggtcagcgctacggagatggcgatgttccgccgggtgaatgaacctcacgagctaccccctactgaccggtacggccggcctccatatagggggggtttagacaggcaaagctcagtgacagttacggagtcgcagttcttaaaaagaaacggaaggtacgaggacgagcacccgagttatcaggaggtcaaggcccaggccggctccttccctgtgaaaaacctgacccaaagaagacctctgtccgcaaggagctacagcacggaatcatatggcgccagccaaacccgtcccgtcagcgcaagaccaacaatggccgccttgctcgaaaaaataccctccgattataacctgggaaactacggcgacaagccatccgacaatagcgatcttaagaccaggcccaccccggttaagggtgaggagtcatgcggtaagatgcccgccgactggagacagcagctgctgcgacatattgaggcaaggagactcgatagaactccttctcagcagtctaatatattggacaacggacaagaagatgtgagtccgtccgggcaatggaacccttaccccctgggtaggagggatgtgcccccggacacgattacgaagaaggcaggttcccatatccagacacttatgggatctcagagtctacagcacaggtcccgtgagcagcagccttacgagggcaacatcaataaggttacgatccaacagttccaatcccctctgccaattcagataccgtccagccaagcaacccgtggtcctcagcctggccggtgcctcattcaaacaaagggccaacgaagcatggacggatatcctgagcagttctgtgtcaggatcgagaagaatcctggactgggtttcagcatctcggggggtattagtggccagggcaaccctttcaagccttcagacaaagggatttttgtgacgagggtacagccggatggccctgcctcaaacctgctccagcccggagacaaaatactccaggccaatgggcactcctttgtccacatggagcatgagaaggctgttctacttctcaaatctttccaaaatacagtcgacctggtgatccagagagagctgaccgtgtag

SEQ ID NO: 338488 - DNA, 654 bp, Artificial Sequence
  derived and/or modified sequence
atgatggagaacctgatcagaggccgcaatcctccccagtaccagcggtctccctgtaaagaagtccgcgctgcactgaggaagagacctgaggaggagctccagtgcttggaaatgaccaccaagcgtaagattattggacgcctggttccttgtagatgctttagaggagaagaggagataatcagcgtgctggattactcccattgttcactccagcaagtgccaaaggaggtcttcaactttgagagaacactggaagaactgtatctagatgccaaccaaattgaggagttacctaagcaactctttaactgtcaggcactgaggaagttatccatcccagataatgatctatccaatcttcccaccaccattgcctcactagtcaacctgaaagagttggacatcagcaagaatggagtgcaggaattccccgagaacatcaagtgctgtaaatgcttgacaataattgaagccagcgtcaatccaataagtaaactgcccgacggcttcactcagctccttaaccttacccaactgtaccttaacgatgccttcctggaattcctccctgccaacttcggacgtttggtgaaacttcggattctcgagctccgagaaaatcacttaaagacgctgcctaatatctag

SEQ ID NO: 338489 - DNA, 4488 bp, Artificial Sequence
  derived and/or modified sequence
atgcagtgcctggagatgaccaccaagaggaagatcatcggccgcctggtgccctgccgctgcttccggggggaggaggagatcatctctgtgctggactacagccactgcagcctgcagcaggtgcccaaggaggtgttcaactttgagaggaccctggaggagctgtacctggatgccaaccagatcgaggagctgcccaagcagctgttcaactgccaggccctgaggaagctgagcatcccagacaatgacctgagcaacctgcccaccaccatcgccagcctggtgaacctgaaggagctggacatcagcaagaatggagtgcaggagttccctgagaacatcaagtgctgcaagtgcctgaccatcatcgaggcctctgtgaaccccatcagcaagctgcctgatggcttcacccagctgctgaacctgacccagctgtacctgaatgatgccttcctggagttcctgcctgccaactttggccgcctggtgaagctgcgcatcctggagctgcgggagaaccacctgaagaccctgcccaagtccatgcacaagctggcccagctggagcggctggacctgggcaacaatgaatttggagagctgcctgaggtgctggaccagatccagaacctgcgggagctgtggatggacaacaatgccctgcaggtgctgcccggcagcatcggcaagctgaagatgctggtgtacctggacatgagcaagaacagaattgaaacagtggacatggacatcagcggctgtgaggccctggaggacctgctgctgagcagcaacatgctgcagcagctgcctgacagcatcggcctgctgaagaagctgaccaccctgaaggtggatgacaaccagctgaccatgctgcccaacaccatcggcaacctgagcctgctggaggagtttgactgcagctgcaatgagctggagagcctgcccagcaccatcggctacctgcacagcctgcggaccctggccgtggatgagaacttcctgcctgagctgccccgggagatcggcagctgcaagaatgtgacagtgatgagcctgcggagcaacaagctggagttcctgcctgaggagatcggccagatgcagaagctgcgggtgctgaacctgagtgacaaccggctgaagaacctgcccttctccttcaccaagctgaaggagctggccgccctgtggctgagtgacaaccagagcaaggccctgatccccctgcagacagaggcccaccctgagaccaagcagagggtgctgaccaactacatgttcccccagcagcccagaggagatgaggacttccagagcgacagcgacagcttcaaccccaccctgtgggaggagcagaggcagcagaggatgacagtggcctttgaatttgaggacaagaaggaggatgatgaaaatgctgggaaggtgaaggacctgagctgccaggccccctgggagcggggccagaggggcatcaccctgcagcctgcccggctgagcggggactgctgcaccccctgggcccgctgtgaccagcagatccaggacatgcctgtgccccagaatgacccccagctggcctggggctgcatcagcggcctgcagcaggagaggtccatgtgcacccccctgcctgtggccgcccagagcaccaccctgcccagcctgagcggccggcaggtggagatcaacctgaagcgctaccccaccccctacccagaggacctgaagaacatggtgaagtctgtgcagaacctggtgggcaagcccagccatggagtgcgggtggagaacagcaaccccacagccaacacagagcagacagtgaaggagaagtatgagcacaagtggcctgtggcccccaaggagatcaccgtggaggacagctttgtgcacccagccaatgagatgagaattggagagctgcaccccagcctggccgagacccccctgtacccacccaagctggtgctgctgggcaaggacaagaaggagagcacagatgaaagtgaggtggacaagacccactgcctgaacaacagcgtgagcagcggcacctacagcgactacagccccagccaggccagcagcggcagcagcaacaccagggtgaaggtgggcagcctgcagaccacagccaaggatgctgtgcacaacagcctgtggggcaacagaattgcccccagcttcccccagcccctggacagcaagcccctgctgagccagcgggaggccgtgcccccaggcaacatcccccagaggccagaccggctgcccatgtctgacaccttcacagacaactggacagatggcagccactatgacaacacaggctttgtggccgaggagaccacagcagaaaatgccaacagcaaccccctgctgagcagcaagagccgcagcaccagcagccacggccggcggcccctcatccggcaggacagaattgtgggcgtgcccctggagctggagcagagcacccaccgccacaccccagagacagaggtgccccccagcaacccctggcagaactggaccaggacccccagcccctttgaggacagaacagccttccccagcaagctggagaccacccccaccaccagccccctgcctgagaggaaggagcacatcaaggagagcacagagatccccagccccttcagccctggggtgccctgggagtaccatgacagcaaccccaacagaagcctgagcaatgtgttcagccagatccactgcaggcctgagagcagcaaaggagtcatcagcatcagcaagagcacagagcggctgagccccctgatgaaggacatcaagagcaacaagttcaagaagagccagagcattgatgaaattgacatcggcacctacaaggtgtacaacatccccctggagaactatgccagcggcagtgaccacctgggcagccatgagaggccagacaagatgctgggccctgagcacggcatgagctccatgagccgcagccagagcgtgcccatgctggatgatgagatgctgacctacggcagcagcaagggcccccagcagcagaaggcctccatgaccaagaaggtgtaccagtttgaccagagcttcaacccccagggctctgtggaggtgaaggccgagaagaggatccccccacccttccagcacaacccagaatatgtgcagcaggccagcaagaacatcgccaaggacctgatcagcccccgggcctaccggggctacccacccatggagcagatgttctccttcagccagcccagcgtgaatgaagatgctgtggtgaatgcccagtttgccagccagggcgcccgggccggcttcctgcggcgggctgacagcctggtgtctgccacagagatggccatgttccggcgggtgaatgagccccatgagctgcccccaacagacagatatggccggcccccctacagaggaggcctggaccggcagagctctgtgacagtgacagagagccagttcctgaagagaaatggccgctatgaagatgagcaccccagctaccaggaggtgaaggcccaggccggcagcttccctgtgaagaacctgacccagaggcggcccctgagcgcccggagctacagcacagagagctatggagccagccagaccaggcctgtgtctgcccggcccaccatggccgccctgctggagaagatccccagcgactacaacctgggcaactatggagacaagcccagcgacaacagcgacctgaagacccggcccacccctgtgaagggggaggagagctgtgggaagatgcctgctgactggaggcagcagctgctgcggcacatcgaggcccggcggctggacaggacccccagccagcagagcaacatcctggacaatggccaggaggatgtgagccccagcggccagtggaacccctaccccctgggcagaagagatgtgcccccagacaccatcaccaagaaggccggcagccacatccagaccctgatgggcagccagagcctgcagcacaggagccgggagcagcagccctatgagggcaacatcaacaaggtgaccatccagcagttccagagccccctgcccatccagatccccagcagccaggccacccggggcccccagcccggccgctgcctgatccagaccaagggccagaggtccatggatggctacccagagcagttctgtgtgagaattgagaagaaccctggcctgggcttcagcatcagcggcggcatcagcggccagggcaaccccttcaagcccagcgacaagggcatctttgtgaccagggtgcagccagatggccctgccagcaacctgctgcagcccggggacaagatcctgcaggccaacggccacagctttgtgcacatggagcacgagaaggctgtgctgctgctgaagagcttccagaacacagtggacctggtgatccagcgggagctgactgtgtag

SEQ ID NO: 338490 - DNA, 654 bp, Artificial Sequence
  derived and/or modified sequence
atgatggagaacctgatccggggcagaaatccaccccagtaccagaggagcccctgcaaggaggtgcgggccgccctgaggaagaggcctgaggaggagctgcagtgcctggagatgaccaccaagaggaagatcatcggccgcctggtgccctgccgctgcttccggggggaggaggagatcatctctgtgctggactacagccactgcagcctgcagcaggtgcccaaggaggtgttcaactttgagaggaccctggaggagctgtacctggatgccaaccagatcgaggagctgcccaagcagctgttcaactgccaggccctgaggaagctgagcatcccagacaatgacctgagcaacctgcccaccaccatcgccagcctggtgaacctgaaggagctggacatcagcaagaatggagtgcaggagttccctgagaacatcaagtgctgcaagtgcctgaccatcatcgaggcctctgtgaaccccatcagcaagctgcctgatggcttcacccagctgctgaacctgacccagctgtacctgaatgatgccttcctggagttcctgcctgccaactttggccgcctggtgaagctgcgcatcctggagctgcgggagaaccacctgaagaccctgcccaacatctag

SEQ ID NO: 338491 - DNA, 5000 bp, Artificial Sequence
  derived and/or modified sequence
ttctgcgtttctctagtgcagtgcctggagatgaccaccaaacggaaaatcatcggccgtctggtgccatgccgatgtttccgaggtgaagaagaaatcatctcagttttagattactcccactgcagtcttcagcaggtgccaaaggaggtctttaacttcgaacgaacattagaggagctttatctagatgccaatcaaattgaagaactacccaagcaattgttcaactgtcaagctctacgaaaactaagtattcctgataacgacctttcaaatctgccaaccactattgctagtttagttaatcttaaagaactcgacatcagtaaaaatggtgtacaagaatttccagaaaacataaagtgctgtaagtgtttaacaattattgaagccagtgtcaatcccatttctaaactacctgatggcttcacacagctcctaaacctgacccagctctacctgaatgacgcctttcttgaatttcttccagccaattttggaagacttgtcaaattgcggatcttggagttaagagaaaatcacttgaaaactctaccaaagtcaatgcacaaactggcccagttggaaagacttgacctaggcaataatgaattcggtgagctgcctgaagttctggatcaaatacaaaatttgagggagttatggatggataataatgcattacaagtgttacctgggtctatagggaagttaaagatgttggtatacctggatatgtcaaaaaacagaatagaaacagttgacatggacatttctggatgtgaagcccttgaggacctcttattgtcatccaatatgttgcaacaattgcctgattctataggacttttgaaaaaactaacaactctaaaagtagatgacaatcaacttacaatgctacccaatacaattggaaatttatctttattagaagaatttgactgtagctgtaatgaactggagtcactaccttctactattggctaccttcatagtcttcggacattagcagttgatgagaatttccttccagaattacccagagaaattggaagttgtaagaatgtaacagtcatgtctctacgctccaacaaattagaatttcttcctgaagagattggacagatgcagaaactaagagtcctaaatttgagtgacaacagattgaagaatttaccattctcatttaccaaacttaaagagcttgcagctttgtggctttctgacaatcagtccaaagcccttatccctttacaaacagaagcccatccagaaacaaagcaaagagtattgactaactacatgtttccccagcagcctcgtggtgatgaagatttccagtcagacagtgacagctttaaccctacactgtgggaagagcagagacaacaacgcatgactgttgcctttgaatttgaagacaaaaaagaagatgacgaaaatgctgggaaagttaaggatctctcctgccaagccccctgggaaaggggccagcgtgggattactctccaacctgccagactgtctggcgattgctgcacaccatgggccaggtgtgatcagcagatccaagatatgcccgtcccccagaatgacccacagctggcatggggttgtataagtggcctccagcaggaaaggagcatgtgtactccattgccagttgcagcacaatccaccactcttccctctctaagtggcagacaggttgaaataaacctaaaacgatatccaactccttacccagaggatttaaagaatatggtaaaatctgttcaaaatttggtgggtaagccaagccatggagtgcgtgttgagaattcaaatccaactgctaacacggagcaaactgtgaaagaaaaatatgaacacaagtggccggtagccccaaaggagattacagtggaggattcttttgttcatccagctaatgaaatgaggattggggaacttcacccttcattagctgagacccctctgtacccacccaaacttgttctgctagggaaggacaaaaaagaatcaactgatgagtctgaagttgacaaaactcactgtctgaataacagtgtttcctcaggcacttactcagactactcgccttcccaggcttcctcaggatcctctaatacccgggttaaagtggggtccttgcagacaacagctaaagatgcagtacataattctttgtggggtaacaggattgcaccatctttcccacagcctcttgattcaaagccattactcagccagcgggaggctgttcccccaggcaatataccacagcgtcctgaccggctgcccatgagtgatactttcactgacaactggactgatggctcgcattatgacaacacagggtttgttgctgaggaaaccacagccgagaatgccaacagtaatcctctcttaagttcgaaatctagaagcacatcttcgcatggacgcaggcctttgatcaggcaagacaggattgttggtgttcccctggaactcgagcagtctacacacagacacacaccagaaacagaagtgcctccttccaatccttggcagaattggaccagaacccctagtccgtttgaagacaggaccgcttttccttccaaattagagacaacccccactaccagcccattgcctgaaaggaaagaacatataaaggaatctactgaaatacctagtcctttttctccaggcgtaccatgggagtatcatgattccaatcccaacaggagtcttagtaatgtcttttctcaaatccactgccgcccggaatcttctaaaggtgttatttcaattagcaaaagcacagagaggctttcccccctaatgaaagatatcaagtctaataaattcaaaaagtcacagagtatcgatgagattgacattggtacatataaggtgtataacataccattagaaaactatgcttctgggagtgatcacttaggaagccacgaacgaccggataagatgctgggaccagagcatggtatgtccagtatgtctcgaagccagtcagtcccaatgctggatgatgagatgctcacctacggaagtagtaaggggccacaacaacaaaaagcttctatgacaaaaaaagtctatcagtttgaccaaagcttcaatcctcaaggatcagtggaagtgaaagccgaaaagaggataccacccccttttcaacacaatcccgagtacgtgcaacaggccagcaaaaacatcgccaaggatttgattagtcctagagcttacagaggatacccaccgatggagcaaatgttttcattttctcagccatctgtgaatgaggatgctgtggtgaatgcccagttcgcaagccaaggggccagggcgggcttcctgagaagggccgactccctggtgagcgccacagaaatggccatgtttagaagggtcaatgagcctcatgagctgcccccaactgataggtacggcagacccccatataggggagggctggatcgccaaagcagcgttacagtgactgagtcccagttcctgaaaaggaatggcaggtatgaagatgaacacccttcatatcaagaagtgaaagctcaggcgggaagttttccggttaaaaaccttacccaaaggaggccattgtctgcgagaagctacagtacagagagttacggtgcctcccaaaccaggccagtttcagctaggcctactatggcagctcttttggaaaaaataccatctgactataacttgggtaactatggtgacaagccatcagataacagtgatttaaagacgaggcctactcctgtgaagggagaggagagctgtggtaaaatgcctgcagactggagacaacagctgcttagacatatagaagctagacggttagacaggaatgctgcttacaaacacaatacagttaaccttggcatgctgccctatggaggtatttcagcaatgcatgcaggcagaagcatgactttaaacttgcagactaagtctaaatttgatcatcaagaactacctcttcagaaaaccccgtcccagcaaagcaacattttagacaatggacaagaagatgtatctcctagtggccaatggaatccttatccacttgggaggcgggatgtacctccggacaccattactaagaaggcaggcagccacatccagacgttgatggggtcccaaagccttcagcatcgcagccgggagcagcagccgtatgaaggaaatataaacaaagtgaccatccagcaatttcagtcaccattgcctattcagatcccctcttcacaggccacccggggacctcagcctggacggtgcttaattcaaactaaagggcaaaggagtatggatggatatccagagcagttttgtgtgagaatagaaaagaatcctggccttggatttagtatcagtggtggaattagtggacaaggaaatccattcaaaccttctgacaagggtatctttgttactagggttcagcctgatgggccagcatcaaacctactgcagcctggtgataagatccttcaggcaaatggacacagttttgtacatatggaacatgaaaaagctgtattactactgaagagtttccagaacacagtagacctagttattcaacgtgagcttactgtctaaatattttttataaatagtgaagatacgtctagccagacctaatgttcaaaaataaatttatacatagaaacaaattttgccaattgctggaccaatggcaaacattagtgccaaatgtataatactatatgttagcactgaccatccttaaaaaatgttaactctataaatatgatgttcatgtggttatgtattagttttaattgtcagcctctggctgtgcattggtgcagttttgtttctgtttttgtttttgtttttaatcaaataagtttcttctcaaaatggatttcatataatttcggagcacggaagcacacacaagctctttatgaattctgctctccatcagaaac

SEQ ID NO: 338492 - DNA, 6500 bp, Artificial Sequence
  derived and/or modified sequence
gcttcccgcgggaacctctccagccgtccacctgaagggcactggcatcatggtctaacgtggcaccttcctggattcccctctatctcctgttcttcctaccttctactccttccctcctcttctcctccgaagaccctggcgcccactccactgcggacccctgaacacttaaggaataacccttggcagctgcacgactacgctctccgaaacctcatgggcagtttctcccgccggcgatgatggagaacctaataaggggaaggaatcccccgcaataccagagaagtccttgtaaagaggttcgtgcagcacttcggaagaggcctgaagaggagtgagcccgctacatgaaaaaaaatgcaagtcaaagtggtcacaacctagaagtctgcagagacaggaataactagcaatgcagtgcctggagatgaccaccaaacggaaaatcatcggccgtctggtgccatgccgatgtttccgaggtgaagaagaaatcatctcagttttagattactcccactgcagtcttcagcaggtgccaaaggaggtctttaacttcgaacgaacattagaggagctttatctagatgccaatcaaattgaagaactacccaagcaattgttcaactgtcaagctctacgaaaactaagtattcctgataacgacctttcaaatctgccaaccactattgctagtttagttaatcttaaagaactcgacatcagtaaaaatggtgtacaagaatttccagaaaacataaagtgctgtaagtgtttaacaattattgaagccagtgtcaatcccatttctaaactacctgatggcttcacacagctcctaaacctgacccagctctacctgaatgacgcctttcttgaatttcttccagccaattttggaagacttgtcaaattgcggatcttggagttaagagaaaatcacttgaaaactctaccaaagtcaatgcacaaactggcccagttggaaagacttgacctaggcaataatgaattcggtgagctgcctgaagttctggatcaaatacaaaatttgagggagttatggatggataataatgcattacaagtgttacctgggtctatagggaagttaaagatgttggtatacctggatatgtcaaaaaacagaatagaaacagttgacatggacatttctggatgtgaagcccttgaggacctcttattgtcatccaatatgttgcaacaattgcctgattctataggacttttgaaaaaactaacaactctaaaagtagatgacaatcaacttacaatgctacccaatacaattggaaatttatctttattagaagaatttgactgtagctgtaatgaactggagtcactaccttctactattggctaccttcatagtcttcggacattagcagttgatgagaatttccttccagaattacccagagaaattggaagttgtaagaatgtaacagtcatgtctctacgctccaacaaattagaatttcttcctgaagagattggacagatgcagaaactaagagtcctaaatttgagtgacaacagattgaagaatttaccattctcatttaccaaacttaaagagcttgcagctttgtggctttctgacaatcagtccaaagcccttatccctttacaaacagaagcccatccagaaacaaagcaaagagtattgactaactacatgtttccccagcagcctcgtggtgatgaagatttccagtcagacagtgacagctttaaccctacactgtgggaagagcagagacaacaacgcatgactgttgcctttgaatttgaagacaaaaaagaagatgacgaaaatgctgggaaagttaaggatctctcctgccaagccccctgggaaaggggccagcgtgggattactctccaacctgccagactgtctggcgattgctgcacaccatgggccaggtgtgatcagcagatccaagatatgcccgtcccccagaatgacccacagctggcatggggttgtataagtggcctccagcaggaaaggagcatgtgtactccattgccagttgcagcacaatccaccactcttccctctctaagtggcagacaggttgaaataaacctaaaacgatatccaactccttacccagaggatttaaagaatatggtaaaatctgttcaaaatttggtgggtaagccaagccatggagtgcgtgttgagaattcaaatccaactgctaacacggagcaaactgtgaaagaaaaatatgaacacaagtggccggtagccccaaaggagattacagtggaggattcttttgttcatccagctaatgaaatgaggattggggaacttcacccttcattagctgagacccctctgtacccacccaaacttgttctgctagggaaggacaaaaaagaatcaactgatgagtctgaagttgacaaaactcactgtctgaataacagtgtttcctcaggcacttactcagactactcgccttcccaggcttcctcaggatcctctaatacccgggttaaagtggggtccttgcagacaacagctaaagatgcagtacataattctttgtggggtaacaggattgcaccatctttcccacagcctcttgattcaaagccattactcagccagcgggaggctgttcccccaggcaatataccacagcgtcctgaccggctgcccatgagtgatactttcactgacaactggactgatggctcgcattatgacaacacagggtttgttgctgaggaaaccacagccgagaatgccaacagtaatcctctcttaagttcgaaatctagaagcacatcttcgcatggacgcaggcctttgatcaggcaagacaggattgttggtgttcccctggaactcgagcagtctacacacagacacacaccagaaacagaagtgcctccttccaatccttggcagaattggaccagaacccctagtccgtttgaagacaggaccgcttttccttccaaattagagacaacccccactaccagcccattgcctgaaaggaaagaacatataaaggaatctactgaaatacctagtcctttttctccaggcgtaccatgggagtatcatgattccaatcccaacaggagtcttagtaatgtcttttctcaaatccactgccgcccggaatcttctaaaggtgttatttcaattagcaaaagcacagagaggctttcccccctaatgaaagatatcaagtctaataaattcaaaaagtcacagagtatcgatgagattgacattggtacatataaggtgtataacataccattagaaaactatgcttctgggagtgatcacttaggaagccacgaacgaccggataagatgctgggaccagagcatggtatgtccagtatgtctcgaagccagtcagtcccaatgctggatgatgagatgctcacctacggaagtagtaaggggccacaacaacaaaaagcttctatgacaaaaaaagtctatcagtttgaccaaagcttcaatcctcaaggatcagtggaagtgaaagccgaaaagaggataccacccccttttcaacacaatcccgagtacgtgcaacaggccagcaaaaacatcgccaaggatttgattagtcctagagcttacagaggatacccaccgatggagcaaatgttttcattttctcagccatctgtgaatgaggatgctgtggtgaatgcccagttcgcaagccaaggggccagggcgggcttcctgagaagggccgactccctggtgagcgccacagaaatggccatgtttagaagggtcaatgagcctcatgagctgcccccaactgataggtacggcagacccccatataggggagggctggatcgccaaagcagcgttacagtgactgagtcccagttcctgaaaaggaatggcaggtatgaagatgaacacccttcatatcaagaagtgaaagctcaggcgggaagttttccggttaaaaaccttacccaaaggaggccattgtctgcgagaagctacagtacagagagttacggtgcctcccaaaccaggccagtttcagctaggcctactatggcagctcttttggaaaaaataccatctgactataacttgggtaactatggtgacaagccatcagataacagtgatttaaagacgaggcctactcctgtgaagggagaggagagctgtggtaaaatgcctgcagactggagacaacagctgcttagacatatagaagctagacggttagacaggaccccgtcccagcaaagcaacattttagacaatggacaagaagatgtatctcctagtggccaatggaatccttatccacttgggaggcgggatgtacctccggacaccattactaagaaggcaggcagccacatccagacgttgatggggtcccaaagccttcagcatcgcagccgggagcagcagccgtatgaaggaaatataaacaaagtgaccatccagcaatttcagtcaccattgcctattcagatcccctcttcacaggccacccggggacctcagcctggacggtgcttaattcaaactaaagggcaaaggagtatggatggatatccagagcagttttgtgtgagaatagaaaagaatcctggccttggatttagtatcagtggtggaattagtggacaaggaaatccattcaaaccttctgacaagggtatctttgttactagggttcagcctgatgggccagcatcaaacctactgcagcctggtgataagatccttcaggcaaatggacacagttttgtacatatggaacatgaaaaagctgtattactactgaagagtttccagaacacagtagacctagttattcaacgtgagcttactgtctaaatattttttataaatagtgaagatacgtctagccagacctaatgttcaaaaataaatttatacatagaaacaaattttgccaattgctggaccaatggcaaacattagtgccaaatgtataatactatatgttagcactgaccatccttaaaaaatgttaactctataaatatgatgttcatgtggttatgtattagttttaattgtcagcctctggctgtgcattggtgcagttttgtttctgtttttgtttttgtttttaatcaaataagtttcttctcaaaatggatttcatataatttcggagcacggaagcacacacaagctctttatgaattctgctctccatcagaaacactgcctcaaagttgtatatgcctttatatagaaaatacaaatataaagaattgtaattcccataaaatatttctagcacaaggtatatgttggcatatatacaaaaagaatatagagaaaaacaatattttcataaactaaacatctcagatagagaaaaaatatatcttaaaataagactttactatattgaatctttttcaataaaaattacatgataatgccttatgaaagtaactgtacatatggtataaagtgtttatatttggttccatattcatttgctaaattctcatgacacagagtgaaatatttcataaattagccatttatctctgggacccaaataaaaataggatgaactaatttgttcaatgcctttagctaattacaatacatgcagagtttagaaacagactaaaggtcattgtagttaagtctttttcaccacaaatttaagcagtggatgatgggtggcaggaaaggtattgctttatttctttcaagttcatgttgattataaactgtagcccctgtgatttctttacttgtaaatgtggaatttatttgtgtgttgcttaatctaatttgctgctttttaaattatttaaaacgaattttggaaattgataaaatttatcattacgaaagactgctgttagaaagttatggtaggtgattttaaatccttggtatttaaatatgaaacttcaaatataatttctcagagctgtggtctacctgtatcattaatttcaatggctgtttttctgggcagaaatagataaaatactttttttccaaaaacagtttcaaggtatgtaaaatcctgaatgctttttcactgaagagaaagacaagcatggttaatgtagaattatttacttttccattgaaactattttcctgcataaatgatcaaaatttattttataatcctttaaaatacttatctttcatattagtcattaatttaattacaatattaatttgaatttccaggataatttcccggagttggttgcatgcattatctttcataattttacatagttcttttgttatataatgaatttactttacatgctagtgtttcaagtattgtatgaggattttcacaatagtatcactgaatgatgtcaccagagctctgagaataatatttgtaagttaactgttttatggggacattgaaaatattgtatttttgtagggtctattaaaatgagtgtcactt

SEQ ID NO: 338493 - DNA, 567 bp, Artificial Sequence
  derived and/or modified sequence
ttctgcgtttctctagtgcagtgcctggagatgaccaccaaacggaaaatcatcggccgtctggtgccatgccgatgtttccgaggtgaagaagaaatcatctcagttttagattactcccactgcagtcttcagcaggtgccaaaggaggtctttaacttcgaacgaacattagaggagctttatctagatgccaatcaaattgaagaactacccaagcaattgttcaactgtcaagctctacgaaaactaagtattcctgataacgacctttcaaatctgccaaccactattgctagtttagttaatcttaaagaactcgacatcagtaaaaatggtgtacaagaatttccagaaaacataaagtgctgtaagtgtttaacaattattgaagccagtgtcaatcccatttctaaactacctgatggcttcacacagctcctaaacctgacccagctctacctgaatgacgcctttcttgaatttcttccagccaattttggaagacttgtcaaattgcggatcttggagttaagagaaaatcacttgaaaactctaccaaaaatt

SEQ ID NO: 338494 - DNA, 2375 bp, Artificial Sequence
  derived and/or modified sequence
gtctaacgtggcaccttcctggattcccctctatctcctgttcttcctaccttctactccttccctcctcttctcctccgaagaccctggcgcccactccactgcggacccctgaacacttaaggaataacccttggcagctgcacgactacgctctccgaaacctcatgggcagtttctcccgccggcgatgatggagaacctaataaggggaaggaatcccccgcaataccagagaagtccttgtaaagaggttcgtgcagcacttcggaagaggcctgaagaggagttgcagtgcctggagatgaccaccaaacggaaaatcatcggccgtctggtgccatgccgatgtttccgaggtgaagaagaaatcatctcagttttagattactcccactgcagtcttcagcaggtgccaaaggaggtctttaacttcgaacgaacattagaggagctttatctagatgccaatcaaattgaagaactacccaagcaattgttcaactgtcaagctctacgaaaactaagtattcctgataacgacctttcaaatctgccaaccactattgctagtttagttaatcttaaagaactcgacatcagtaaaaatggtgtacaagaatttccagaaaacataaagtgctgtaagtgtttaacaattattgaagccagtgtcaatcccatttctaaactacctgatggcttcacacagctcctaaacctgacccagctctacctgaatgacgcctttcttgaatttcttccagccaattttggaagacttgtcaaattgcggatcttggagttaagagaaaatcacttgaaaactctaccaaacatctgaagatccagagtgtgccccttgcccaatcgcctgagactatacagtgacacctacaacagaggatgtggagggagcagcttttcgggcaccagaaatggcagcatcaggagcatcagcacgaatagactttgtagaggtagttctcccaaactatattatgaaaccaaacatttttggtgcgctacctgctgatgggggctgccttcttactgcctagtatctacaaaatgtttggtctttgttaaagtttaacgatgacatttctgactaatatagagagacctgatttttttccaaatgtgttcagttgccataactttcaatgaatatgaaattttatcagtctcagaaaaacattaatacccatatttttatctaattgatttcactatttgttatgttaaggtgcttttgtgtataatttttgtatatatttttaaatgggatcaaactaagccataatttaaaagtcatcctaatgcagtaaataagataatttctctagtttgttaaattcttcagagaccgaatataattgctcgtttttctgtcatactccctgatgatgttccattgtggacttattttgcaaagttcccagatggcacaagtcaaaatatgaaatgctgatgattgattgattttatgtatcctttcatcttatgtaatttaatgtggaacagttattttgtagctctaaaatacatttgttaattaaccatattggcttttcatgcagttcaatggcttatagcatttcaatttgcatagaaaatgaatctctgtaatgatacttttgctaaataaataacaatcgacataatgggttcatttgcttttaacattttatacatacaatttagaagtaggatatatttcatattgaaattttgaaaagcttgaaattcaacatacaaggtcaccatcttgctgatgcctaatgcagtacagcaaattcattcttcatcccatgttaactcctttttggaacaagtcaaaatacaaataatttacaatgattgtgttggagctattgcttgattaaatacaattcaaaggttctttttataaaacaggtgtgagcaggacacattgcacttacgggcttttcctatttttttggttctatttcattttactgcctaggaaagaaacatttttttgtaaaacctatgctatggaactgaaatgtactttattgaatatttctattctgttttatgaatatcaattatgtgaaatatataaatataaaattgccttagaatgcctaactctttgtataaaacagatatctgaaagtagatgttggttttttgttcaaattgtgtaaatgctgatttttccatgagtacttatgaagatctatatgtaaaaattttaagtctgcttactgtgtttgtaccaccttgttcttagctgtgtatactctatgctaattgacttctgtcattgtcacatatattgcatatgtctctcaaaaattaaaaggtatattgctattctaaaaataaaaaatgtaaattcctga

SEQ ID NO: 338495 - DNA, 4488 bp, Artificial Sequence
  derived and/or modified sequence
atgcagtgcctggagatgaccaccaagcggaagatcatcggccggcttgtgccttgtaggtgcttcaggggagaggaggaaatcatttctgtcctcgactattcacattgtagccttcagcaagtccctaaggaagtgttcaatttcgagcgaacccttgaggagctgtatttagacgcaaaccagatcgaggaattgccaaaacagctgttcaattgccaggctcttcgcaagttgtcgatccctgacaatgacctaagtaacctgcccacaacaatcgcttctcttgtaaacttaaaggaattggatatttcaaagaatggggtgcaggagttccccgagaacattaagtgctgtaagtgtttgaccattattgaggcctctgtgaaccctatcagcaaactgcctgatgggtttactcagttactcaacctgacgcagctgtatctcaacgacgcgttcctggagttcctgccagctaacttcggcagactagtgaagcttcggattctggagctgcgtgaaaatcatttgaagacactgcccaagagcatgcataaactcgcacagctcgagaggctggaccttggcaacaacgagttcggagagctccccgaggtattggaccagatccagaacctacgagagttgtggatggacaacaatgccctacaagtgcttcctggaagtatcggcaagttaaagatgctcgtttacctagatatgtcaaaaaacagaatcgaaaccgtcgatatggacataagcggctgtgaggccctggaggatcttttgcttagctccaacatgctgcagcagctgcccgactccatagggctgcttaaaaagcttaccacactgaaggttgacgataatcagttaactatgctcccgaatactatagggaacctatccctattggaagaattcgactgttcctgcaacgagctggagagtctgccctctacgatcgggtatctccattccctgagaactcttgcagttgacgagaacttcctgcccgagttgccccgagagattggctcttgcaaaaatgtgacagtgatgagcttgaggagcaataaactggagtttctccccgaggagattggacagatgcaaaagctgcgcgtcttaaacttaagcgataacagattgaagaatcttccatttagttttacaaagctgaaggaactggcagccctgtggctctcagacaatcagagcaaggcccttataccactgcaaaccgaggcacaccctgagacaaaacagcgggtgctgacgaactatatgttccctcaacaacctcggggcgacgaggattttcaaagcgactccgattccttcaaccctactttgtgggaggagcagcggcagcaacgcatgaccgttgcgtttgaatttgaggataagaaagaagacgatgagaacgcgggcaaggtcaaggatctttcctgtcaggctccttgggaaagagggcagcggggaataacactgcagccggcaaggctttctggcgactgctgtactccctgggcgaggtgcgaccagcagatccaagatatgccggttccgcaaaacgatccacagcttgcttgggggtgcattagcggcttgcaacaggagcggagcatgtgtacacctttgcccgtggccgcccagtccaccactctgcctagtctgtcaggcagacaggtggagatcaacctgaaacgttatcccacgccttacccagaggacctgaagaacatggtgaagagcgtgcagaacttggtgggcaaaccctcacacggcgtacgtgtggagaactctaacccaacagctaatactgagcagactgtcaaagaaaaatatgagcacaagtggccagtggcgcctaaagagataacagtggaagattcgtttgtccatcccgcaaacgaaatgcggataggcgaattgcatccaagcctggccgagacacccctctacccccctaaacttgtgctcctcggcaaggacaagaaggaatcaacagatgagagtgaagtggacaaaacacactgtctgaataatagcgtgagctctggaacatattcagactactccccttctcaggcatcatcaggatcatccaatacacgtgtaaaagttggcagcctgcagacaactgctaaggacgcagtgcataactccctatggggcaataggatcgccccttcctttcctcaacccttggattcaaaacctttgttaagtcagcgagaggcagtccctcccgggaatattccacaacgcccagaccggttgcccatgtccgacacattcaccgacaattggacagacgggagccattatgacaataccgggtttgtcgcagaggagaccaccgcagagaacgctaatagcaatcccctgctgagttctaaatccaggagtacttcatcgcacggcaggcgcccactgatcaggcaggacagaattgttggcgtcccccttgagctggagcaatcaacccaccggcatactcctgagaccgaagtccctcctagtaatccctggcagaactggacccggactccctcgccatttgaagacagaacagcctttccctctaagctcgagacaacccctacaacctcacccttgcctgaaaggaaggaacacatcaaagaaagcactgagattccctcgccttttagccctggcgttccctgggagtatcatgatagcaaccctaacaggtctctgagcaatgtctttagtcagatacactgcaggcctgagagtagcaaaggggtaatttcaatttcgaagagcaccgaaagactttctcctctcatgaaggatatcaaatccaacaaatttaagaaatctcagtccattgacgagatcgacatcgggacctacaaagtatacaacatccccctggagaactatgcctcaggctccgatcacctgggctcacacgagcgaccagacaaaatgctgggaccagaacatggaatgtcatctatgagccgatcccagtcggtgccaatgctagacgacgaaatgctgacatacggaagctcaaagggtccccagcagcaaaaggcctctatgactaaaaaagtgtatcagtttgaccaatcctttaatccccagggctccgtcgaggtcaaggctgaaaagcggatacctcccccatttcaacataacccagagtacgtccagcaagctagcaagaacatcgctaaggatttgattagtccccgagcgtataggggttacccccctatggagcagatgttctcgtttagccagccatccgtgaatgaagatgccgtcgtgaacgctcagttcgcttctcagggagcacgggccgggttcttgagacgggccgactcactggtgtccgcaaccgagatggcgatgtttaggcgcgtaaacgagccacacgagctgccacccactgaccggtacggaagacccccatacagaggaggcctggaccgacagagcagcgtgaccgtgaccgagagccagtttctgaagcggaatggtaggtatgaagatgaacacccgagctaccaagaagtcaaggcccaagctggctccttcccggtgaaaaaccttactcaaaggagaccactgtccgcaagatcttattcaaccgagtcatatggcgcttcccaaactcgtccagtgtccgcacggccaaccatggccgcattattagaaaaaattccctctgactataaccttggtaattatggcgacaaaccttccgacaattctgacctgaagacacgtccgacccctgtcaagggcgaagagtcctgcggcaaaatgccagcggactggagacagcagctgctcagacatattgaagccagaagactcgacaggaccccttctcagcagtccaatatactggacaatggccaggaggacgtcagtcccagtggccagtggaacccataccccctcggacgtcgagatgtgcctccggatactattactaagaaggcaggaagccacatccagaccctcatgggttcacagagcttacagcatcgttcaagagaacagcagccttatgaggggaacatcaacaaggtcactattcagcagttccagtctccactacctatccaaattccaagctctcaggccacgcgcggcccacaacccggtagatgtctgattcagaccaagggacagcgaagcatggatggttaccccgagcaattctgtgtgcgaatcgaaaagaaccctggcctgggcttcagcatttccggcgggatcagcggtcaggggaatcctttcaagccttccgataagggaatttttgtgacacgtgtgcagcccgatggcccagcctctaacctactgcaacccggagataaaatcctgcaggcgaatgggcacagcttcgtccacatggaacacgaaaaggctgtcctgctgctgaaaagttttcagaacactgtagacctcgtcatacagcgggagctgaccgtctag

SEQ ID NO: 338496 - DNA, 654 bp, Artificial Sequence
  derived and/or modified sequence
atgatggagaacctgatccggggccggaaccccccccagtaccagagatccccttgtaaagaggtccgggccgcgcttcgtaaaaggcctgaggaagaattacagtgcctagaaatgaccaccaaacgaaagatcatcggtagacttgtgccttgcaggtgtttccggggggaagaggaaattatcagcgtgctggactacagccattgctcccttcagcaagtacctaaggaggtgtttaacttcgagcgtacacttgaggagctgtatctcgatgcaaaccagatcgaggagttacctaaacaactcttcaactgtcaggctctgcggaaactctctatcccagataacgatctgtcaaacctgccaactaccatcgcctccctcgttaatctgaaggaactggacatcagcaaaaatggagtgcaggaattccctgaaaacatcaagtgttgcaaatgcttgacaattatagaggcttccgtgaacccaatatctaagttacctgatggctttacacagctgctcaacctaacacagctttatcttaacgatgcgttcctcgagttcctccctgccaacttcgggcggctcgtgaaacttcgcattctggagctgcgagaaaatcacctgaagaccctccctaatatctag

SEQ ID NO: 338497 - DNA, 4488 bp, Artificial Sequence
  derived and/or modified sequence
atgcaatgtctggaaatgaccaccaaaaggaaaatcatcgggagattagtgccatgtaggtgtttcaggggggaggaggagatcatctcagtgctggattattcacattgttcccttcagcaagtgccaaaggaagtgttcaactttgaacgcaccctagaggagttatacctggacgcaaaccaaattgaggagttgccaaaacagctcttcaattgccaggcgcttcgtaaactaagtattcccgacaatgatctgagcaatctgccgacaactatcgcttcactggtcaatctcaaggagctggacatcagcaagaacggcgtccaggaattccctgagaatataaaatgctgcaaatgtcttactattatcgaagcgagtgttaatcccatctcaaaattaccggacgggtttactcaacttctcaatcttacccagctctacctcaacgacgccttcctcgaatttctgcccgctaactttggtcgcctggtgaagctccggattctggagctgagggagaatcacctgaagactctccccaaatcaatgcacaagttagctcaactcgagcggttggatttagggaacaatgaattcggcgaacttcctgaggtgctcgatcaaattcaaaacctacgcgagctctggatggataataacgccttgcaagtactgcccggaagcatcggcaagctgaaaatgttggtgtacctggatatgtccaaaaatagaatagagaccgtcgacatggacatcagcgggtgtgaagctctagaggacctgctgctgagctctaacatgcttcaacagctcccagattccatcgggctccttaagaagctgaccacactcaaggtagatgacaatcagctgactatgcttcccaataccatcggtaatttgagcctcctggaagaattcgattgtagctgtaatgagctcgaatccctaccaagcaccattgggtacctccactcactgcggactcttgccgtcgacgagaattttctgccggaactcccacgggagattggatcctgtaagaatgtgaccgtgatgagtctaagatccaataagcttgagttcttgcctgaagagattggccagatgcaaaagttaagggtcctcaacctgtcagacaatcggctgaagaacctcccattctcgtttaccaagctgaaggaactcgccgcactgtggttgtccgacaaccagagcaaggctttgattccactgcagacggaggcccacccagaaaccaaacagcgggtgctcacgaattacatgttcccgcagcagcccaggggtgatgaggacttccagtcagacagcgacagcttcaaccccactctgtgggaggaacagcgacagcaacgcatgacagtcgcctttgagttcgaagacaaaaaggaagacgatgagaacgctggaaaggtaaaagacttgtcctgccaggcaccatgggagcgaggacagcgtggcattacactgcagccagcccgattaagcggcgattgttgtaccccctgggcaaggtgtgatcaacagatacaggatatgcccgtaccccagaacgacccccagcttgcttggggctgcattagtggtctgcaacaggagcggagtatgtgcaccccacttcccgtcgcagcccaatccacaacccttccgtccttgtctggccgtcaggtcgagataaacttaaaaaggtatccgaccccttacccggaagacttgaaaaacatggtgaaaagtgttcagaacttggtcggtaagccttcccacggggtccgtgtcgagaacagcaatcctacagcaaacacagaacagaccgtaaaggaaaagtatgagcacaagtggcccgtggccccaaaagagatcacagtagaggattcttttgtgcaccccgctaatgagatgcgaattggggagcttcacccctcattagctgagacacccctgtaccctccaaaacttgtactgcttggcaaagacaaaaaagaatctacagacgaatctgaagtggataagacccactgtctgaataactccgttagcagtggaacatatagtgattatagcccaagccaggcctctagtggatccagcaatacccgagttaaggtgggctctctgcagactaccgccaaagacgcggtccacaacagcttgtggggcaataggatcgcgcctagcttcccccaacccctcgacagtaagccgttgttatctcagcgcgaagcggtcccacccggaaacattcctcagagaccagaccgcctccccatgtcagataccttcacagacaattggaccgacggatctcattatgataacaccggcttcgttgcagaggagacaacagctgagaacgctaattctaatcccctgttatcttccaaaagccggtctacctcctcacacgggagaagaccgctcataagacaagatcgcatcgtgggggtgccacttgagctcgagcagtccacacatagacatacacccgagactgaggtcccacctagcaatccttggcagaattggacacggaccccgtctcccttcgaggatcggaccgcttttccgtctaagctggaaaccaccccaacgacgagccccctcccagagcgcaaggaacacattaaggagagcacagaaataccatctccatttagccccggtgtgccttgggagtaccatgactccaaccctaaccgaagcttgagcaatgtgttttcacaaatccactgccggcctgagagttcaaaaggagtgatcagcatcagcaaatccactgaaagactgtcccctctgatgaaggatattaagtctaataaatttaagaagtcacagtctattgatgagatcgatatagggacatacaaggtttacaacatccccctggaaaattatgcctccggttcagatcacctaggttcccacgagagacccgacaaaatgttggggcctgaacatgggatgtcatctatgtcccggagccagagtgttcccatgttggacgacgagatgctgacttatggttctagtaaagggccacagcaacagaaggcctctatgaccaagaaagtgtatcagttcgaccagtcattcaaccctcaaggatccgtggaggtgaaggctgagaagaggatccccccacctttccagcacaatcctgagtacgtacaacaggcgagcaaaaatatcgccaaggacctcatttctcctcgcgcttataggggttatccacctatggagcagatgttctccttttcccagcccagcgtcaacgaggacgccgttgtgaatgcgcagttcgctagtcagggcgcaagagcagggttcctgagacgcgcagatagtcttgtgagcgctaccgaaatggccatgtttaggcgcgtgaacgaaccccatgagcttccacccactgatagatatggtaggcctccttatagaggcggacttgatcggcagagcagtgtgactgtgaccgagagccagttcctgaagcgcaatggccgttacgaggacgagcacccttcgtaccaggaagtgaaggcccaagctggctctttccccgtgaaaaaccttacgcagcgaaggcctctgtcagccagatcgtatagcacagaaagttatggagcgtcccagactcgcccagtaagcgctagacccaccatggccgctctgttggaaaaaatcccaagcgactacaacctgggtaactatggagacaagccaagtgataactcagatctgaagacaaggcccactcctgtgaaaggggaagaatcatgtggcaagatgcccgctgactggcgccaacagctgctgcgacacatcgaagcgagacggctcgatcgcacaccttctcagcagagcaatatactggacaatgggcaggaagatgtgtcccctagcggacagtggaacccgtaccctctcggcagaagagacgtccctcctgacaccatcactaaaaaggcgggtagtcacatacagactctgatgggctctcagagcctgcagcataggagcagagaacagcagccatacgagggcaatatcaacaaggtgactatccaacagttccaaagtcccctgccgattcagattccctcttcccaggctacccggggaccgcaacccggtcggtgtctcattcaaacgaaagggcagcggagcatggacggatacccagaacagttctgcgtacgcattgaaaagaatccagggcttggattctccatctccggtggaattagcggccaggggaacccttttaaaccttcggacaagggcatcttcgtgaccagagtgcagcccgacggacctgctagcaatttgttgcaaccgggagataagatcttgcaggctaacggccactctttcgtgcacatggagcatgagaaggccgtgttgctgttaaagtctttccaaaatactgttgacctggtcattcaaagagagctaaccgtgtag

SEQ ID NO: 338498 - DNA, 654 bp, Artificial Sequence
  derived and/or modified sequence
atgatggagaatctcattagagggagaaatcccccacagtaccagagaagtccttgcaaggaggtgcgcgcagccctccgcaaaagacctgaggaggagctccagtgtctggaaatgacaaccaaaaggaagattataggacggttggtcccatgtaggtgtttcaggggagaagaggaaataatctcggtgctcgattattcccattgcagcctccagcaagtgccaaaagaagtgttcaatttcgaacggaccttggaagaactgtatctcgatgccaatcagatcgaggagctccccaagcagctgtttaactgtcaagccttgcggaagctgagcattcccgacaacgacctgtctaatctgccgacgactatagcatccctcgtaaacttgaaagagctagatatctctaaaaatggagtccaggaatttcctgagaacattaaatgctgcaagtgtctgacaatcattgaagcatctgtcaacccaatcagcaaactccctgacgggttcacccaactgctcaatctcacccagctctaccttaacgacgcctttctggaattcctccctgcgaacttcggccgactagttaagttacgtatacttgagctccgcgaaaaccatttaaagacactgcctaatatctag

SEQ ID NO: 338499 - DNA, 4488 bp, Artificial Sequence
  derived and/or modified sequence
atgcagtgcctggagatgaccaccaagagaaagatcatcggcagactggtgccctgcagatgcttcagaggcgaggaggagatcatcagcgtgctggactacagccactgcagcctgcagcaggtgcccaaggaggtgttcaacttcgagagaaccctggaggagctgtacctggacgccaaccagatcgaggagctgcccaagcagctgttcaactgccaggccctgagaaagctgagcatccccgacaacgacctgagcaacctgcccaccaccatcgccagcctggtgaacctgaaggagctggacatcagcaagaacggcgtgcaggagttccccgagaacatcaagtgctgcaagtgcctgaccatcatcgaggccagcgtgaaccccatcagcaagctgcccgacggcttcacccagctgctgaacctgacccagctgtacctgaacgacgccttcctggagttcctgcccgccaacttcggcagactggtgaagctgagaatcctggagctgagagagaaccacctgaagaccctgcccaagagcatgcacaagctggcccagctggagagactggacctgggcaacaacgagttcggcgagctgcccgaggtgctggaccagatccagaacctgagagagctgtggatggacaacaacgccctgcaggtgctgcccggcagcatcggcaagctgaagatgctggtgtacctggacatgagcaagaacagaatcgagaccgtggacatggacatcagcggctgcgaggccctggaggacctgctgctgagcagcaacatgctgcagcagctgcccgacagcatcggcctgctgaagaagctgaccaccctgaaggtggacgacaaccagctgaccatgctgcccaacaccatcggcaacctgagcctgctggaggagttcgactgcagctgcaacgagctggagagcctgcccagcaccatcggctacctgcacagcctgagaaccctggccgtggacgagaacttcctgcccgagctgcccagagagatcggcagctgcaagaacgtgaccgtgatgagcctgagaagcaacaagctggagttcctgcccgaggagatcggccagatgcagaagctgagagtgctgaacctgagcgacaacagactgaagaacctgcccttcagcttcaccaagctgaaggagctggccgccctgtggctgagcgacaaccagagcaaggccctgatccccctgcagaccgaggcccaccccgagaccaagcagagagtgctgaccaactacatgttcccccagcagcccagaggcgacgaggacttccagagcgacagcgacagcttcaaccccaccctgtgggaggagcagagacagcagagaatgaccgtggccttcgagttcgaggacaagaaggaggacgacgagaacgccggcaaggtgaaggacctgagctgccaggccccctgggagagaggccagagaggcatcaccctgcagcccgccagactgagcggcgactgctgcaccccctgggccagatgcgaccagcagatccaggacatgcccgtgccccagaacgacccccagctggcctggggctgcatcagcggcctgcagcaggagagaagcatgtgcacccccctgcccgtggccgcccagagcaccaccctgcccagcctgagcggcagacaggtggagatcaacctgaagagataccccaccccctaccccgaggacctgaagaacatggtgaagagcgtgcagaacctggtgggcaagcccagccacggcgtgagagtggagaacagcaaccccaccgccaacaccgagcagaccgtgaaggagaagtacgagcacaagtggcccgtggcccccaaggagatcaccgtggaggacagcttcgtgcaccccgccaacgagatgagaatcggcgagctgcaccccagcctggccgagacccccctgtacccccccaagctggtgctgctgggcaaggacaagaaggagagcaccgacgagagcgaggtggacaagacccactgcctgaacaacagcgtgagcagcggcacctacagcgactacagccccagccaggccagcagcggcagcagcaacaccagagtgaaggtgggcagcctgcagaccaccgccaaggacgccgtgcacaacagcctgtggggcaacagaatcgcccccagcttcccccagcccctggacagcaagcccctgctgagccagagagaggccgtgccccccggcaacatcccccagagacccgacagactgcccatgagcgacaccttcaccgacaactggaccgacggcagccactacgacaacaccggcttcgtggccgaggagaccaccgccgagaacgccaacagcaaccccctgctgagcagcaagagcagaagcaccagcagccacggcagaagacccctgatcagacaggacagaatcgtgggcgtgcccctggagctggagcagagcacccacagacacacccccgagaccgaggtgccccccagcaacccctggcagaactggaccagaacccccagccccttcgaggacagaaccgccttccccagcaagctggagaccacccccaccaccagccccctgcccgagagaaaggagcacatcaaggagagcaccgagatccccagccccttcagccccggcgtgccctgggagtaccacgacagcaaccccaacagaagcctgagcaacgtgttcagccagatccactgcagacccgagagcagcaagggcgtgatcagcatcagcaagagcaccgagagactgagccccctgatgaaggacatcaagagcaacaagttcaagaagagccagagcatcgacgagatcgacatcggcacctacaaggtgtacaacatccccctggagaactacgccagcggcagcgaccacctgggcagccacgagagacccgacaagatgctgggccccgagcacggcatgagcagcatgagcagaagccagagcgtgcccatgctggacgacgagatgctgacctacggcagcagcaagggcccccagcagcagaaggccagcatgaccaagaaggtgtaccagttcgaccagagcttcaacccccagggcagcgtggaggtgaaggccgagaagagaatccccccccccttccagcacaaccccgagtacgtgcagcaggccagcaagaacatcgccaaggacctgatcagccccagagcctacagaggctacccccccatggagcagatgttcagcttcagccagcccagcgtgaacgaggacgccgtggtgaacgcccagttcgccagccagggcgccagagccggcttcctgagaagagccgacagcctggtgagcgccaccgagatggccatgttcagaagagtgaacgagccccacgagctgccccccaccgacagatacggcagacccccctacagaggcggcctggacagacagagcagcgtgaccgtgaccgagagccagttcctgaagagaaacggcagatacgaggacgagcaccccagctaccaggaggtgaaggcccaggccggcagcttccccgtgaagaacctgacccagagaagacccctgagcgccagaagctacagcaccgagagctacggcgccagccagaccagacccgtgagcgccagacccaccatggccgccctgctggagaagatccccagcgactacaacctgggcaactacggcgacaagcccagcgacaacagcgacctgaagaccagacccacccccgtgaagggcgaggagagctgcggcaagatgcccgccgactggagacagcagctgctgagacacatcgaggccagaagactggacagaacccccagccagcagagcaacatcctggacaacggccaggaggacgtgagccccagcggccagtggaacccctaccccctgggcagaagagacgtgccccccgacaccatcaccaagaaggccggcagccacatccagaccctgatgggcagccagagcctgcagcacagaagcagagagcagcagccctacgagggcaacatcaacaaggtgaccatccagcagttccagagccccctgcccatccagatccccagcagccaggccaccagaggcccccagcccggcagatgcctgatccagaccaagggccagagaagcatggacggctaccccgagcagttctgcgtgagaatcgagaagaaccccggcctgggcttcagcatcagcggcggcatcagcggccagggcaaccccttcaagcccagcgacaagggcatcttcgtgaccagagtgcagcccgacggccccgccagcaacctgctgcagcccggcgacaagatcctgcaggccaacggccacagcttcgtgcacatggagcacgagaaggccgtgctgctgctgaagagcttccagaacaccgtggacctggtgatccagagagagctgaccgtgtag

SEQ ID NO: 338500 - DNA, 654 bp, Artificial Sequence
  derived and/or modified sequence
atgatggagaacctgatcagaggcagaaaccccccccagtaccagagaagcccctgcaaggaggtgagagccgccctgagaaagagacccgaggaggagctgcagtgcctggagatgaccaccaagagaaagatcatcggcagactggtgccctgcagatgcttcagaggcgaggaggagatcatcagcgtgctggactacagccactgcagcctgcagcaggtgcccaaggaggtgttcaacttcgagagaaccctggaggagctgtacctggacgccaaccagatcgaggagctgcccaagcagctgttcaactgccaggccctgagaaagctgagcatccccgacaacgacctgagcaacctgcccaccaccatcgccagcctggtgaacctgaaggagctggacatcagcaagaacggcgtgcaggagttccccgagaacatcaagtgctgcaagtgcctgaccatcatcgaggccagcgtgaaccccatcagcaagctgcccgacggcttcacccagctgctgaacctgacccagctgtacctgaacgacgccttcctggagttcctgcccgccaacttcggcagactggtgaagctgagaatcctggagctgagagagaaccacctgaagaccctgcccaacatctag

SEQ ID NO: 338501 - DNA, 480 bp, Artificial Sequence
  derived and/or modified sequence
atgagaaacgccagaagcatcagacccgccagagccgagagctggagactgagcctgtgcttcctgaactggcaggacgccatcatcagcaagccccactgccccgccggcagaacctgccccaccgccgccgccagccacggcagcagaggcgccggccacagcgacaaggaccagggcagaagccccaagcacgtggtgtgccacgtggagcacaagaagcagtgccccgccgagttcaccgacagcagaggcgtgcacaacgccgccgccagcatcagcagccaggtgggcttccccggccacctgaccgccagaaccgccgcccacaagagagaggccctggccgtgagccccacccccaccctgcaggtgaacgcccccggcgccaagctgagagcccccaaggcccccagaacccccgaggccctgggcagaggccccaagagagccggcgagtggaagaccggctgcttctag

SEQ ID NO: 338502 - DNA, 480 bp, Artificial Sequence
  derived and/or modified sequence
atgagaaacgcacggtccatccgaccagcccgagctgaatcctggaggctgagcttgtgttttctgaactggcaagacgcaatcatctctaaaccccactgcccagcagggagaacctgcccaaccgctgccgcttcacatggcagccggggcgcaggtcatagcgacaaggaccaaggcagaagtccaaagcacgtggtttgtcacgtagagcacaagaaacagtgccctgcggagtttaccgacagccgaggcgtgcacaacgccgcagccagcattagttcccaggtaggtttcccggggcatttgactgcccgaactgctgcacataagagagaggccttagccgttagccctacacctacactccaagtgaacgcccccggagccaagctgagagctcccaaagcaccaagaacgcccgaagctctcggccgcgggccaaagcgcgccggagagtggaaaacgggatgtttctag

SEQ ID NO: 338503 - DNA, 480 bp, Artificial Sequence
  derived and/or modified sequence
atgcggaacgcccggagcatccggcccgcccgggccgagagctggcgtctgtcactctgtttccttaattggcaggatgctattatcagtaaaccccactgtccggctggaagaacttgcccaacagccgccgcctctcacggcagccgcggcgcaggacatagtgataaggaccagggcagaagtcctaaacacgtggtgtgtcacgtcgagcacaagaagcagtgccctgccgagttcacggatagcagaggagtacacaatgctgcggccagcatttctagccaggtcggtttcccaggccatctcaccgcgcggaccgctgcacacaagcgggaagcgctggccgtttccccgacacccacattacaagtgaacgctcctggtgctaaattgagggcccctaaggcccctaggactccggaagcactgggcagaggcccaaagagagcgggcgagtggaagacgggctgtttttag

SEQ ID NO: 338504 - DNA, 480 bp, Artificial Sequence
  derived and/or modified sequence
atgcgcaatgccagatccatccgacccgctcgagccgagtcatggcgactgtcactctgcttccttaactggcaggatgcgatcattagcaagccccactgtcctgctgggagaacttgcccaacagcggctgccagtcatgggagcagaggagccggacatagtgacaaggatcagggccgatccccgaaacatgttgtgtgccatgttgaacacaaaaagcagtgtcctgccgaatttacagactctcggggagttcataacgctgccgctagcatatcctcacaggttggctttcctgggcatctgacagcaaggactgctgcccacaaaagggaggcattggcggtgagtcccaccccaacgctccaagtgaatgcccctggcgctaagctgcgcgctcctaaggcacctagaacaccggaagcattgggacgaggccctaagcgcgctggggagtggaaaacagggtgcttttag

SEQ ID NO: 338505 - protein, 1585 aa, Artificial Sequence
  derived and/or modified sequence
MENTGWMGKGHRMTPACPLLLSVILSLRLATAFDPAPSACSALASGVLYGAFSLQDLFPTIASGCSWTLENPDPTKYSLYLRFNRQEQVCAHFAPRLLPLDHYLVNFTCLRPSPEEAVAQAESEVGRPEEEEAEAAAGLELCSGSGPFTFLHFDKNFVQLCLSAEPSEAPRLLAPAALAFRFVEVLLINNNNSSQFTCGVLCRWSEECGRAAGRACGFAQPGCSCPGEAGAGSTTTTSPGPPAAHTLSNALVPGGPAPPAEADLHSGSSNDLFTTEMRYGEEPEEEPKVKTQWPRSADEPGLYMAQTGDPAAEEWSPWSVCSLTCGQGLQVRTRSCVSSPYGTLCSGPLRETRPCNNSATCPVHGVWEEWGSWSLCSRSCGRGSRSRMRTCVPPQHGGKACEGPELQTKLCSMAACPVEGQWLEWGPWGPCSTSCANGTQQRSRKCSVAGPAWATCTGALTDTRECSNLECPATDSKWGPWNAWSLCSKTCDTGWQRRFRMCQATGTQGYPCEGTGEEVKPCSEKRCPAFHEMCRDEYVMLMTWKKAAAGEIIYNKCPPNASGSASRRCLLSAQGVAYWGLPSFARCISHEYRYLYLSLREHLAKGQRMLAGEGMSQVVRSLQELLARRTYYSGDLLFSVDILRNVTDTFKRATYVPSADDVQRFFQVVSFMVDAENKEKWDDAQQVSPGSVHLLRVVEDFIHLVGDALKAFQSSLIVTDNLVISIQREPVSAVSSDITFPMRGRRGMKDWVRHSEDRLFLPKEVLSLSSPGKPATSGAAGSPGRGRGPGTVPPGPGHSHQRLLPADPDESSYFVIGAVLYRTLGLILPPPRPPLAVTSRVMTVTVRPPTQPPAEPLITVELSYIINGTTDPHCASWDYSRADASSGDWDTENCQTLETQAAHTRCQCQHLSTFAVLAQPPKDLTLELAGSPSVPLVIGCAVSCMALLTLLAIYAAFWRFIKSERSIILLNFCLSILASNILILVGQSRVLSKGVCTMTAAFLHFFFLSSFCWVLTEAWQSYLAVIGRMRTRLVRKRFLCLGWGLPALVVAVSVGFTRTKGYGTSSYCWLSLEGGLLYAFVGPAAVIVLVNMLIGIIVFNKLMARDGISDKSKKQRAGSERCPWASLLLPCSACGAVPSPLLSSASARNAMASLWSSCVVLPLLALTWMSAVLAMTDRRSVLFQALFAVFNSAQGFVITAVHCFLRREVQDVVKCQMGVCRADESEDSPDSCKNGQLQILSDFEKDVDLACQTVLFKEVNTCNPSTITGTLSRLSLDEDEEPKSCLVGPEGSLSFSPLPGNILVPMAASPGLGEPPPPQEANPVYMCGEGGLRQLDLTWLRPTEPGSEGDYMVLPRRTLSLQPGGGGGGGEDAPRARPEGTPRRAAKTVAHTEGYPSFLSVDHSGLGLGPAYGSLQNPYGMTFQPPPPTPSARQVPEPGERSRTMPRTVPGSTMKMGSLERKKLRYSDLDFEKVMHTRKRHSELYHELNQKFHTFDRYRSQSTAKREKRWSVSSGGAAERSVCTDKPSPGERPSLSQHRRHQSWSTFKSMTLGSLPPKPRERLTLHRAAAWEPTEPPDGDFQTEV

SEQ ID NO: 338506 - DNA, 4758 bp, Artificial Sequence
  derived and/or modified sequence
atggagaacaccgggtggatgggcaaagggcaccggatgacaccagcatgtcctctgttgctctctgtgattctgagtctgcggctggctaccgccttcgatccagctccatccgcttgtagcgcactggcttctggtgtactgtacggcgctttctcgcttcaggatctctttcctactattgcctcaggctgcagttggaccctggaaaatcccgaccccactaagtattcgctctaccttcgatttaacaggcaggagcaggtctgtgcccactttgcaccgcggctgctgcccctggaccattaccttgtaaacttcacttgtttgcggcccagtccggaagaagcagtcgcacaagcggaatcagaagtaggaaggccagaggaagaagaggcggaagcggcggcgggtctggagctctgctcaggttccggacctttcacatttcttcatttcgataaaaatttcgtccaattgtgcctaagcgcagaaccatctgaagcacctaggctgttagcccccgctgctctggcatttagattcgtggaggtcctcctgatcaacaacaacaactccagccaattcacctgtggtgtcctgtgtcggtggtccgaggagtgcggccgggccgccgggcgggcctgtggcttcgctcagccagggtgttcatgtcccggcgaggcaggtgccggttccactacaactacaagccccggccctcctgccgcacataccctgagcaacgccctggtgcccggcggtcccgcacctcccgctgaggccgatctgcactcggggagctccaatgacttgttcacaactgaaatgagatatggtgaagagcccgaggaggagcccaaagtaaaaactcagtggcctaggagcgccgatgagccaggcctgtacatggctcaaacaggagatccagctgccgaagagtggtcaccttggtcggtctgttccctgacatgcggacaaggcctgcaggtacggacaagatcctgtgtgtcatcaccgtatggaacgctgtgttctggtcccctgcgggagacacgaccctgcaacaacagcgccacctgtcctgttcacggagtgtgggaggaatggggcagctggtccctgtgctcccgctcatgtggtcggggcagtagatccagaatgagaacttgtgtgccaccccagcatggcgggaaagcctgtgaaggaccggagttgcagaccaagctatgctctatggccgcctgccccgtggagggtcagtggctcgaatggggcccttgggggccctgtagcacctcctgcgccaacggcacacagcagaggagtagaaaatgcagcgtggcgggtccggcctgggcaacttgcaccggagctcttacggacacacgcgaatgtagtaatctcgagtgtcctgcaactgactccaagtgggggccatggaatgcttggtccctgtgcagcaagacgtgtgataccggatggcaaaggcgcttccggatgtgccaggccaccggaacacagggatacccatgtgaggggaccggagaagaagtaaagccttgctctgaaaagcgctgtcccgcctttcatgaaatgtgtagggatgaatacgtcatgctgatgacctggaaaaaagcggccgccggcgagataatttataataagtgtccccctaacgcatcgggctctgcaagtaggcggtgcctcctaagcgctcagggcgtcgcctactgggggctgcccagctttgcaaggtgtatatctcacgaataccgctatctctatctttccctgcgcgagcacttggcgaaaggacagcgcatgcttgccggggagggtatgagccaggtggtccgctccctgcaggaactgctcgcccggagaacttactattctggcgatctgctctttagcgttgatattctgcgcaacgtgaccgacaccttcaagagggccacgtacgttccctccgccgacgatgtacagcgtttttttcaagtggtcagttttatggtcgatgccgaaaataaagaaaagtgggatgatgcccagcaggtatctccgggatctgttcatctcctgcgcgtagtggaagattttatccatctcgttggtgacgcgctgaaggctttccaatcctctctgattgtgactgacaacctcgttatatccatccagagagagcctgttagcgccgtctcttccgacataactttccccatgcgcgggagacggggtatgaaagattgggtgagacacagcgaagaccgattgtttttgccaaaggaggtgctttccctgtcctcacctggcaagcccgcgacatctggtgccgccggttcacccggacggggccggggcccggggacagtgccacctggacctggccactctcaccagcgcctgctcccagctgaccccgacgaatcatcatatttcgtgataggagctgtgctatacaggaccctgggacttatactcccaccccctagaccccctttggcggtcacctcccgggtgatgactgtgaccgtgaggccgcctactcagccgccagctgagcccctgattactgtagagctttcctacatcattaatggtaccacggaccctcactgcgcatcttgggactactcccgggctgacgctagtagcggggattgggacacagagaactgtcaaaccctggagacacaggccgcgcacacccgatgtcagtgtcagcatttgtcaaccttcgctgtgctggcccagccccccaaagatttgacactcgagttagctggatccccttcagtgcctctggttatcggctgtgctgttagttgcatggcattgctgactctgctggccatctacgctgccttctggagatttatcaagtctgaaagatccattatcctactgaacttttgtttgtcgattctggccagtaacatcttaatactggtcggtcaatccagggtcctgtccaagggcgtgtgcacaatgactgctgccttcctgcacttttttttcctctcaagtttctgttgggtgctcaccgaagcctggcagtcctacttggccgtaattggaagaatgcgcacgaggctcgtacggaagcggttcctgtgtcttgggtgggggttgcccgccctggtggtcgcagtgagtgtcgggtttacccggactaaagggtacgggaccagctcttactgttggctgagcctggaagggggcctgctgtacgcctttgtaggtcccgccgccgtgattgtgctggtgaatatgctaatcggaataatagtattcaacaaattaatggctcgtgacggaatctctgacaagtcgaagaaacaacgtgcagggtctgaacgttgcccctgggcatctctccttctgccctgctccgcctgcggcgcggtgccaagccccctgctttcatccgcgtccgcaagaaatgccatggccagtctgtggagtagttgcgtagtcttaccgcttttagcccttacatggatgtccgccgtgctggcaatgacagaccggcggtctgtcctatttcaggcgctcttcgccgtgtttaactctgcccaggggtttgtgatcaccgctgtccattgttttctgaggcgcgaagttcaagatgtcgtgaaatgtcagatgggggtttgtcgggcagacgagagcgaggacagccctgacagctgcaagaatggccagcttcagattctcagcgacttcgagaaggatgtagacctggcctgtcaaaccgtgttattcaaggaggtgaatacatgtaatccttcaactattacaggaacgttgtcccggctatccttggacgaagacgaggagcccaaatcttgtctggtgggcccagaaggctctctgagtttttcaccactgccaggcaacatactcgtgcctatggccgcctccccagggctgggagaacccccgccaccccaagaagccaatcctgtctacatgtgcggggagggcggtctgaggcaactggatctgacgtggcttcgacctaccgaacccgggagtgagggcgattacatggttctgcctcggcgaacactgtctcttcaaccagggggcgggggcggaggaggagaagacgctccccgcgctaggcccgaaggcactccccgccgcgcagctaagacagttgcccatactgaaggctacccgtcttttttgtccgttgatcatagcggcctcgggctgggacctgcttacgggtctctacagaacccctacgggatgacatttcagcctccgcctcccaccccaagcgcaaggcaggtcccagaacccggggagagatcccggaccatgcccaggacagtcccgggctcaactatgaaaatggggtccctggaaaggaagaaactaagatactccgacttggatttcgagaaagtgatgcacactcgaaagaggcatagcgaactttatcatgaactgaaccagaagtttcacacctttgatcggtacagaagccagtccacagctaagcgtgagaaaaggtggagtgtaagctcgggcggggcagctgagcgcagcgtgtgtaccgacaagccgtcacccggcgaaagaccttcactgagccagcacagaagacaccagtcatggtctacatttaaaagcatgactctggggtcactgccacctaaacctagggagagactgactctgcatcgcgccgcggcttgggaacccaccgaacccccagacggggattttcagactgaagtatag

SEQ ID NO: 338507 - DNA, 4758 bp, Artificial Sequence
  derived and/or modified sequence
atggagaacacaggctggatgggcaagggccacaggatgaccccagcctgccccctgctgctgagcgtcatcctgagcctgcggctggccacagcctttgatcctgcccccagcgcctgcagcgccctggccagcggcgtgctgtatggagccttcagcctgcaggacctcttccccaccatcgccagcggctgctcctggaccctggagaacccagaccccaccaagtacagcctgtacctgcgcttcaaccggcaggagcaggtgtgtgcccactttgccccccggctgctgcccctggaccactacctggtgaacttcacctgcctgcggcccagccctgaggaggccgtggcccaggccgagagcgaggtgggccggcctgaggaggaggaggccgaggccgctgctggcctggagctgtgcagcggcagcggccccttcaccttcctgcactttgacaagaactttgtgcagctgtgcctgtctgctgagcccagcgaggccccccggctgctggccccagctgccctggccttccgctttgtggaggtgctgctgatcaacaacaacaacagcagccagttcacctgtggggtgctgtgccgctggagcgaagaatgtggccgggccgccggccgggcctgtggctttgcccagcccggctgcagctgccctggagaggccggggccggcagcaccaccaccaccagccctggccccccagctgcccacaccctgagcaatgccctggtgcctgggggccctgcccccccagctgaggccgacctgcacagcggcagcagcaatgacctcttcaccacagagatgagatatggagaggagcctgaggaggagcccaaggtgaagacccagtggcccaggtctgcagatgagcccggcctgtacatggcccagacaggagaccctgctgctgaggagtggagcccctggagcgtgtgcagcctgacctgtggccagggcctgcaggtgaggaccaggagctgtgtgagcagcccctacggcaccctgtgcagcggccccctgcgggagacccggccctgcaacaacagcgccacctgccctgtgcacggcgtgtgggaggagtggggctcctggagcctgtgcagccgcagctgtggccggggcagccgcagcaggatgaggacctgtgtgcccccccagcacggcggcaaggcctgtgagggccctgagctgcagaccaagctgtgcagcatggccgcctgccctgtggagggccagtggctggagtggggcccctggggcccctgcagcaccagctgtgccaacggcacccagcagaggagcaggaaatgttctgtggccggccctgcctgggccacctgcacaggagccctgacagacaccagagaatgtagcaacctggagtgcccagccacagacagcaagtggggcccctggaatgcctggagcctgtgcagcaagacctgtgacaccggctggcagaggcgcttcaggatgtgccaggccaccggcacccagggctacccctgtgagggcactggagaggaggtgaagccctgcagcgagaagcgctgcccagccttccacgagatgtgcagagatgaatatgtgatgctgatgacctggaagaaggctgctgctggggagatcatctacaacaagtgccccccaaatgccagcggcagcgccagccgccgctgcctgctgagcgcccagggcgtggcctactggggcctgcccagctttgcccgctgcatcagccatgagtaccgctacctgtacctgagcctgcgggagcacctggccaagggccagaggatgctggccggggagggcatgagccaggtggtgcgcagcctgcaggagctgctggcccggaggacctactacagcggggacctgctcttctctgtggacatcctgagaaatgtgacagacaccttcaagagggccacctacgtgcccagcgcagatgatgtgcagcgcttcttccaggtggtgtccttcatggtggatgctgagaacaaggagaagtgggatgatgcccagcaggtgtccccaggctctgtgcacctgctgcgggtggtggaggacttcatccacctggtgggagatgccctgaaggccttccagagcagcctgattgtgacagacaacctggtgatcagcatccagcgggagcctgtgtctgctgtgtccagtgacatcaccttccccatgagaggaagaagaggcatgaaggactgggtgcgccacagcgaggacaggctcttcctgcccaaggaggtgctgagcctgagcagccctgggaagccagccaccagcggggccgccggcagccctggccggggccggggccctggcaccgtgcccccaggccctggccacagccaccagaggctgctgcctgctgaccctgatgagagcagctacttcgtcatcggggctgtgctgtaccgcaccctgggcctcatcctgcccccacccaggcctcccctggccgtgaccagccgggtgatgacagtgacagtgcggccccccacccagcccccagctgagcccctcatcaccgtggagctgagctacatcatcaatggcaccacagacccccactgtgcctcctgggactacagcagagcagatgccagcagcggggactgggacacagagaactgccagaccctggagacccaggccgcccacacccgctgccagtgccagcacctgagcacctttgctgtgctggcccagccccccaaggacctgaccctggagctggccggcagccccagcgtgcccctggtgattggctgtgctgtgtcctgcatggccctgctgaccctgctggccatctatgctgccttctggaggttcatcaagtctgagaggagcatcatcctgctgaacttctgcctgagcatcctggccagcaacatcctgatcctggtgggccagagccgggtgctgagcaaaggagtgtgcaccatgacagctgccttcctgcacttcttcttcctgagcagcttctgctgggtgctgacagaggcctggcagagctacctggccgtcatcggccgcatgaggacccggctggtgaggaagcgcttcctgtgcctgggctggggcctgcctgccctggtggtggccgtgtctgtgggcttcaccaggaccaagggctacggcaccagcagctactgctggctgagcctggagggcggcctgctgtatgcctttgtgggccctgctgctgtgattgtgctggtgaacatgctgattggcatcatcgtgttcaacaagctgatggccagagatggcatcagtgacaagagcaagaagcagagagctggcagcgagcgctgcccctgggccagcctgctgctgccctgcagcgcctgtggggctgtgcccagccccctgctgagcagcgccagcgccagaaatgccatggccagcctgtggagcagctgtgtggtgctgcccctgctggccctgacctggatgtctgctgtgctggccatgacagaccggcgctctgtgctcttccaggccctgtttgctgtgttcaacagcgcccagggcttcgtcatcacagctgtgcactgcttcctgcggcgggaggtgcaggatgtggtgaagtgccagatgggcgtgtgcagagcagatgaaagtgaggacagcccagacagctgcaagaatggccagctgcagatcctgagtgactttgagaaggatgtggacctggcctgccagacagtgctcttcaaggaggtgaacacctgcaaccccagcaccatcaccggcaccctgagccggctgagcctggatgaagatgaggagcccaagagctgcctggtgggccctgagggcagcctgtccttcagccccctgcccggcaacatcctggtgcccatggccgccagccctggcctgggggagcccccaccaccccaggaggccaaccctgtgtacatgtgtggggagggcggcctgcggcagctggacctgacctggctgcggcccacagagcccggcagcgagggggactacatggtgctgcccaggaggaccctgagcctgcagcccggcggcggcggcggcggcggagaagatgccccccgggcccggcctgagggcaccccaagaagagctgccaagacagtggcccacacagagggctaccccagcttcctgtctgtggaccacagcggcctgggcctgggccctgcctacggcagcctgcagaacccctacggcatgaccttccagcccccaccacccaccccatctgcccggcaggtgcctgagcccggggagaggagcaggaccatgcccaggacagtgcccggcagcaccatgaagatgggcagcctggagaggaagaagctgcgctacagcgacctggactttgagaaggtgatgcacaccaggaagaggcacagcgagctgtaccacgagctgaaccagaagttccacacctttgaccgctaccgcagccagagcacagccaagcgggagaagcgctggagcgtgagcagcggcggcgctgctgagaggtctgtgtgcacagacaagcccagccctggagagcggcccagcctgagccagcacagaagacaccagagctggagcaccttcaagtccatgaccctgggcagcctgccccccaagccccgggagcggctgaccctgcacagagctgctgcctgggagcccacagagcccccagatggagacttccagacagaggtgtag

SEQ ID NO: 338508 - DNA, 4758 bp, Artificial Sequence
  derived and/or modified sequence
atggagaacaccggctggatgggcaagggccaccggatgacccccgcttgtcccttgctccttagcgtcattctcagcctaagactggctacagcgttcgatccggccccgtcagcttgtagcgccctagccagcggcgttttgtacggagctttttctctccaggacctgtttcctacgattgcctccggctgttcatggacactagagaatcccgacccaaccaaatactccctgtatcttcgatttaatcggcaggagcaggtgtgtgctcattttgctcccagactgcttccacttgaccactatctggtgaacttcacatgtctgagacccagcccagaagaggctgttgctcaagcggagtcagaagtcggacgacccgaagaagaagaggctgaagctgcagctggattagagctgtgcagcggctctgggccatttaccttcctgcactttgataagaattttgtccagctgtgcctgagcgctgagccaagcgaagcacctcgccttctggcgccagcagcgctcgctttccggttcgtggaggtcctgctgattaataataacaacagcagtcaattcacctgtggcgtcctctgccggtggagcgaggagtgcgggcgtgcagcagggcgcgcgtgtgggtttgcccagccagggtgttcctgtccgggggaagccggggccggaagcacaacaaccaccagtcctggtccaccagccgcccacactctgagtaacgccctggtccccgggggaccagctcctcccgcagaagccgacttgcacagcggctctagtaatgatctgttcacaaccgagatgcgctatggtgaagaaccagaagaggaacctaaagtaaaaacccagtggcctcggagtgccgacgagcccggactatacatggcccagactggggacccagccgctgaggagtggagtccatggagtgtgtgcagtttgacatgcgggcagggactgcaggtgaggacccgatcctgcgtgtcgtcgccatacgggaccctgtgctcaggccctcttcgggagactcgcccctgtaataactcagcaacatgccctgtgcatggggtatgggaggaatggggatcgtggtccctgtgctcgaggtcctgtggaagagggtccaggtctaggatgaggacgtgtgtgccaccgcaacatgggggcaaggcctgcgagggcccagagctgcaaacaaaactgtgcagtatggccgcgtgccctgtggaagggcagtggctcgagtggggaccttggggcccatgttctacttcatgtgcaaatggcactcagcagcgttctcgcaagtgcagtgtggccggccctgcttgggctacctgcacaggcgccctcacagatacaagggaatgctctaatctggagtgtcccgccactgactcaaagtggggtccctggaacgcgtggtccctgtgtagtaagacttgcgacactggctggcagagaagattcagaatgtgccaggccacagggactcaaggctatccatgcgaaggtacaggggaggaggtgaaaccttgtagcgaaaagagatgccccgcattccacgaaatgtgtcgagatgagtatgttatgctgatgacatggaagaaggcggctgccggtgaaatcatctacaacaagtgtcccccaaacgcatccggaagcgccagtcgtcggtgcctcttgtcggcccaaggcgtggcatattggggactccccagcttcgcccgatgcatcagccacgaataccgttacttgtatctgagccttagagagcacctagcgaaagggcagaggatgctggccggagagggcatgtcccaagttgtgcgctcccttcaggagctgttagcacggcgcacttactactctggggatttgctgttctcagtagacatcctgcgcaacgtaacggatacattcaagcgggccacctacgtgccgtcagccgacgacgtacagaggttctttcaggtggtgtcgttcatggtcgatgctgagaacaaggaaaaatgggatgacgctcagcaggtctcccccggatctgtgcatcttctccgggtcgttgaagatttcattcacttggtgggcgacgctcttaaggcctttcagtccagccttatagtcacagacaacctggttattagcattcagcgggagcccgtctcagctgttagttctgacatcaccttccccatgcgcgggaggagggggatgaaggactgggtcaggcactccgaggataggctttttctacccaaggaagtccttagcctatcctcccccggaaagccggctaccagtggcgccgctggcagcccggggcggggcagaggacctggtacagttcctcccggaccaggtcattcccatcagcgcttgctgccagctgatccagatgagagctcttattttgtgatcggagccgttttgtaccggacactgggtctgatattaccgcccccaagacctccactcgcggtcacatctagggtcatgacagtgacagtgcgacctccgacccaaccccctgccgagcctttgattaccgtggagctgagttatattatcaatggaaccactgacccgcactgcgcaagctgggactatagtcgcgccgacgccagctccggcgattgggatacagaaaattgtcaaaccctagagacgcaggcagcccacacaaggtgccagtgccagcacttatctactttcgcagtgctggcacagccgcccaaagacttaacattggagctggccggttctccctccgtgccacttgtgattgggtgcgccgtatcttgcatggccttgctgaccttgctggcaatatacgccgccttctggagattcatcaagtcagaacgatccatcatcctgcttaacttctgtctgtcaattctagctagcaatatcttaattctggttggtcaatcacgggtcctgagcaaaggagtatgtaccatgacagccgcctttcttcacttcttttttctgagcagcttttgttgggtgctcaccgaagcctggcagagctatctggcagtcatcgggcgcatgagaacccgcctcgttaggaagaggttcctgtgcttaggctgggggctgcccgcgctagttgtggctgtgtcggtggggttcactaggacgaaaggatacggtacatccagctactgctggttgtctctcgagggagggctactgtatgcatttgtcggcccagccgcggtgatagtgctggtgaacatgttgatcggcatcattgtattcaataaacttatggcgcgggatgggattagcgataaaagcaaaaagcaaagggccgggagtgagcgctgcccgtgggcttctctcctgctgccttgtagcgcctgcggtgccgtgcccagtccactcctgagttccgcaagtgcaagaaatgctatggcaagcctctggagttcatgtgtggtgcttccactgttggctctgacctggatgagtgctgtattggctatgacagatcgcaggtccgtgctcttccaggctctgttcgctgtgtttaacagcgcccagggctttgttataacggccgtgcactgttttttaagacgtgaggtgcaggatgtggtgaagtgccaaatgggagtatgcagagctgatgaaagtgaagattcaccagatagctgtaagaacggccagcttcagatcctgagcgattttgaaaaggatgtggaccttgcttgccaaacggttctgtttaaggaggtgaacacctgcaatcccagcactatcaccggtaccctgtccagactttccttagacgaggatgaggaacccaagtcttgtctggttggccccgagggaagcctctcgttttcaccccttccaggtaatatcttggtgcccatggccgcttcaccaggtctaggcgaacctcctcctcctcaggaagccaaccctgtgtacatgtgtggcgaaggagggctgcggcagctggacctgacatggctgcggccaacagaacctggcagtgagggcgactatatggtgctgcccaggcgaactctgtcgttgcagcctgggggcggcggggggggcggagaggacgcacctcgagcccggcctgaaggcacccctcggagggccgcgaagaccgtggcacacaccgagggatacccatcattcctgagcgtggaccactctgggctcgggctgggacctgcctatgggagcctccagaacccctatgggatgacattccaaccaccccctccaacaccatcagccagacaggtccccgaaccaggggagcgctcaaggacgatgccacgcacagtgcccggcagtacaatgaaaatggggagcttggagcgtaaaaaattacgctatagtgacttggacttcgagaaggtgatgcatacccgcaaaaggcactccgaactctatcacgaattgaatcagaaattccacaccttcgaccgctatcgttcgcagtccactgcgaaaagggagaaaagatggtccgtttccagcgggggcgctgccgagcggagcgtttgtaccgacaaaccgtcccctggcgagcgccccagcctcagccagcaccgtcgacaccagagctggtccacctttaagtccatgacacttggaagtttgccacccaaaccccgcgagcggttaacccttcaccgcgccgccgcctgggaacccacagaacctccggatggagattttcagactgaagtatag

SEQ ID NO: 338509 - DNA, 4758 bp, Artificial Sequence
  derived and/or modified sequence
atggaaaatactggttggatgggcaaaggtcacagaatgactccagcctgccccctactgttgtcagtaattctttccttgcgacttgctactgcctttgaccctgccccaagcgcatgcagcgccctcgcatcaggcgttctatacggggcattctccctgcaggatttgtttccaactatcgcatctggctgttcctggaccctcgaaaacccagacccaaccaagtacagcctgtacctgagattcaaccgccaagagcaggtttgcgcacattttgccccaaggttactgccgttagaccattatcttgtgaactttacttgcttgaggccctctcccgaagaagccgtcgcccaggctgagtctgaagtaggtagacccgaagaggaagaagcggaggcggcagcaggcctggagctgtgctccgggagcggcccatttactttcctccattttgacaagaacttcgtgcagctctgcctgtctgccgagccttccgaagcccctcgactactggccccagccgcactagcatttcggttcgtggaagtcctgctgattaataataacaacagttcccaattcacttgtggcgtgctctgcaggtggagtgaagaatgcggtagggccgcaggaagggcttgtgggttcgcccaacctggctgttcatgccccggtgaagccggagctggaagcaccaccacaacatcaccgggtcccccagccgctcacacattatcaaatgctctggtcccagggggacctgctccccctgcagaagctgatctgcatagcgggtccagcaatgaccttttcaccaccgaaatgcgatatggagaggagcctgaggaagaaccaaaggtgaagactcagtggccgcgtagtgccgacgagcccggtctttatatggcacagaccggggaccccgctgctgaggagtggtccccttggagtgtgtgcagtctaacatgcggacagggtctacaagtccgcacgcgctcctgtgtatcatccccttacggtactctttgcagcggcccactgcgcgaaacaagaccatgtaacaactctgctacatgtccagtgcacggcgtttgggaagaatgggggtcatggtcgttgtgttcacggagctgcggcagaggcagccgcagccgcatgagaacgtgcgtccctcctcaacacggcggtaaagcctgcgagggtccagagctgcagactaagctctgtagtatggccgcttgcccagttgaggggcagtggctcgagtggggcccatggggcccatgcagcactagttgtgccaatggcactcagcagagatcaaggaagtgctccgtggcagggcctgcatgggccacatgtactggtgcgctcacggacactagagaatgctcaaatctggagtgccccgcaacagattctaaatggggcccttggaacgcgtggagtctgtgtagcaaaacttgcgatacaggctggcaacgcaggttcagaatgtgtcaggccactggtactcaggggtacccatgcgaaggaaccggagaagaagttaaaccctgctccgagaagaggtgtccagcttttcacgaaatgtgccgtgatgaatacgtgatgctgatgacttggaagaaagcggcagcaggtgagatcatttataacaaatgtccccctaatgcaagcgggagcgcttcccgccgatgcctgctctcagcacaaggcgtcgcatactgggggcttcccagtttcgccagatgcatatcacacgaatatcgttatctttatctcagcctgagggaacacctggcgaaggggcagcggatgcttgcgggagagggaatgtctcaggtcgttcgctccttgcaggagcttctggctcgccgaacctattatagtggcgatctgctcttcagcgtggatatcctgcggaacgtcacggatacgttcaagcgagccacctacgtccccagcgctgacgacgttcagcgattttttcaggtagtgagcttcatggtggatgcagagaataaagagaagtgggacgatgcccagcaagtttcccctggatcggtgcacctattgcgcgtggtggaggactttatccacctggttggtgacgctctgaaggccttccagtcctcgctcattgttaccgataacctggtgatttcaatacagagggaaccagtttctgcagtttcttcggatatcactttccctatgcgtgggagacggggaatgaaagattgggtgcgccatagtgaagatagactcttcttgcccaaggaagtactttcgctttcttctcccggaaagcccgctacctccggcgcagctggaagccctggccgaggacgaggccctggcaccgtgccccctggaccaggtcattcccatcagagacttctgcccgcagaccccgacgagtccagttactttgtgattggtgcagtcttgtaccggacgctgggcttgatcctccccccaccacgcccacctcttgctgttacctctagagtgatgaccgtcactgtacgccctccaacgcaaccgcctgcggagcccctaatcactgtggaactgtcatatataattaacgggactactgacccacactgtgcctcctgggattacagcagagccgatgcatcttctggcgattgggacaccgagaattgccagaccctggagacccaggccgctcacacacgctgtcaatgccagcatctgtccacctttgcagtgctcgctcagcctcccaaggacctcactcttgaacttgccggtagtcccagtgttcctctggtgatcggctgcgccgttagttgtatggcactcctgacgttattggccatctacgccgctttttggagattcataaaatccgaaagatctatcattctcctgaacttttgcttgtctatcctcgcatccaatatcttgatcctggtaggccagtcacgcgttctgagtaaaggggtgtgtaccatgaccgcagcctttctccattttttctttctcagcagtttctgctgggttttaaccgaggcttggcagagctatctggcagtgatcggcagaatgagaacacggcttgtccggaagagatttctttgcctggggtggggactgccggcactggtggtggccgtctctgtgggctttaccaggactaaggggtatggaacttcatcctactgttggctgagccttgagggtggtttgctttacgcatttgttggcccagctgctgtcattgttcttgtcaacatgcttattggcattatagtgttcaataagctcatggccagagacggtatatccgataagtcaaaaaagcagagagctggctccgaacgctgtccatgggcctctctgcttctcccatgcagcgcctgcggagccgtcccatcccccctcctgtcttccgcgtccgccagaaatgctatggcttccctgtggtcatcatgcgttgtgctcccccttctggctctgacctggatgagcgccgttctggctatgacagatcgtcggtccgtcctttttcaagcattattcgccgtctttaactctgctcagggattcgtgattaccgctgtgcattgttttttaagaagggaagtccaggatgtcgtaaaatgccagatgggtgtctgccgtgccgacgagagcgaagactcccctgactcatgtaaaaatggacaattgcaaatactgtctgacttcgaaaaagacgtggacttagcctgccagactgtcctgttcaaggaggtgaacacttgtaatccctcgaccattaccggcaccctgagcagactgagcctggatgaggacgaggagcctaaatcctgcctggtaggccctgagggctcgctgtcctttagcccactacctgggaatatcctggttccaatggctgctagtccgggtttgggtgagcctccaccaccacaggaggccaatccggtctatatgtgtggagagggcggactgagacagttggatttaacatggctccggccaactgagcctgggagtgagggagattatatggtgttgcctagacgcacactctccctgcagcccggtggtggtggcggaggcggagaggatgcccctcgtgcaagacctgagggaacgcctagaagagctgctaaaaccgttgcacacacagaaggatatccctctttcctttccgtcgatcattctggtctgggtctcggcccagcttatggatccctccaaaatccgtacggtatgacttttcagccaccaccaccaacaccctctgccagacaagtgcctgaaccaggggagcgaagccgaactatgccacggaccgttccaggaagtactatgaagatgggtagcctcgagaggaagaaattaaggtattccgacctcgactttgaaaaggtcatgcacaccaggaagcgacactcagaactgtaccatgaacttaaccagaaatttcatacttttgaccgataccgatcccagagcactgccaagcgtgagaaacgatggagtgtgtcaagtggcggtgccgctgagcgcagcgtgtgcaccgacaaacccagccctggagaacgcccttccctgtcgcaacacaggaggcatcagtcctggtcaacgttcaaatctatgaccttagggtccctgccacctaagcctcgcgaacgccttactctgcatagagcagcagcctgggagcccacagagccacccgacggagactttcaaacggaggtatag

SEQ ID NO: 338510 - DNA, 5403 bp, Artificial Sequence
  derived and/or modified sequence
gccgcccgggagagcgggagcctcggccctccgcgcggctgcagctacctaccctgcgcccggcccggtccccgacttagggatggcaaacttgcgccccgtggccgcccccgccagcgccggcccccgctcctgctgctgacggcgcccaggaaatccacagcagtgatacatgtgacgtccacactgacagtgccctcctgtgggcatggctcaggttgtgcgcagttcctggcacactggctgtaactccgcccctttctctccctctcagtaaagcaagattacgcggtgacatgcctcacagctgatcacgacacacggggatggagagcaagagttatggagaatacaggttggatgggcaagggacataggatgaccccagcctgtcccctcttactgtctgtgattctgtccctgcgcctggccaccgccttcgaccccgcccccagtgcctgctctgccctggcctcgggtgtgctctacggggccttctcgctgcaggacctctttcctaccatcgcctcgggctgctcctggaccctggagaaccctgaccccaccaagtactccctctacctgcgcttcaaccgccaggagcaggtgtgcgcacactttgccccccgcctgctgcccctggaccactacctggtcaactttacctgcctgcggcctagccccgaggaggcggtggcccaggcggagtcagaggtggggcggccagaagaggaggaggcagaggcggcagcggggttggagctgtgcagcggctcaggcccctttaccttcctgcacttcgacaagaacttcgtgcagctgtgcctgtcggctgagccctccgaggccccgcgcctgctggcgcccgctgccctagccttccgctttgtcgaggtcttgctcatcaacaacaacaactctagccaattcacctgtggtgtgctctgccgctggagtgaggagtgtggccgcgctgccggcagggcctgcggctttgctcagccaggctgcagctgccctggagaggcgggggccggctccaccaccaccacatctccaggccctcctgctgcccacaccctgtccaatgccctggtgcccgggggcccagccccacctgctgaggccgatttgcactcggggagcagcaatgatctgttcacaaccgagatgagatatggtgaggagccggaagaggaaccgaaagtgaaaacccagtggccgaggtctgcagatgagcctgggctatacatggcgcagacaggcgacccggcggctgaggagtggtccccgtggagcgtgtgttccctgacgtgtgggcagggtctgcaggtgcggacccgctcctgtgtgtcctccccctatgggaccctgtgcagcgggcccctgcgggagaccaggccctgcaacaattcagccacctgcccagtgcacggcgtgtgggaggagtgggggtcctggagcctgtgctcccgcagctgcgggcgggggtcccggagccggatgcggacctgcgtgcccccccagcacggcggcaaggcctgcgagggtcctgagctgcagactaagctctgcagtatggctgcctgcccggtggaaggccagtggttagaatggggtccctggggcccatgctccacgtcctgtgccaatgggacccaacagcgcagccggaagtgcagcgtggcgggcccagcctgggccacatgcacgggtgccctcactgacacccgggagtgcagcaacctcgagtgcccggccactgatagcaagtgggggccatggaatgcgtggagcctgtgctctaagacgtgtgacacaggctggcagcgccgcttccgcatgtgccaggccacgggcacgcagggctacccctgcgagggcaccggagaggaggtgaagccttgtagtgagaagaggtgtccagccttccatgagatgtgcagggatgagtacgtgatgctgatgacgtggaagaaggcagctgctggcgagatcatctacaacaagtgccccccgaatgcctcagggtctgccagccgccgctgtctcctcagtgcccaaggcgtggcgtactgggggctgcccagctttgctcgctgcatctcccatgagtaccgctacctgtatctgtcacttagggagcacctggccaaggggcagcgcatgctggcaggcgagggcatgtcgcaggtggtgcgcagcctgcaggagctactggcccggcgcacctactatagtggggacctgctcttctctgtggacattctgaggaatgtcactgacacctttaagagggccacctacgtgccctcggctgatgatgtgcagcgcttcttccaggtggtgagcttcatggtggatgcggaaaacaaggagaagtgggacgatgctcagcaggtgtcccctggctctgtgcacctgctccgtgtcgtggaggacttcattcacctggtgggcgatgctctcaaggccttccagagctctctgattgtcacagataatctagtgatcagcattcagcgagagcccgtctcagctgtgtccagtgacatcacgttccccatgcggggccgccggggcatgaaggactgggtgcggcactcagaggaccgcctcttcctgcccaaggaggtgctcagcctctcctccccagggaagccagccacatctggggcagcaggcagccctggcagggggaggggcccaggaacggtgcctcctggcccaggccactcccaccagcgcctcctcccagcagaccctgatgagtcctcctactttgtgatcggtgctgtactctaccgcacccttggcctcatcctgccgcctcccaggcccccgctggccgtcacatcccgggtgatgacagtgactgtgcgcccccctacccagcctccagctgagcccctcatcactgtggagctctcctacatcatcaatgggaccacggatccccattgcgccagctgggactactccagagcagatgccagctcaggagactgggacactgaaaattgccagaccctggagacccaggcagctcacacccgctgccagtgccagcacctgtccacctttgctgtactagcccagccgcccaaggacctgaccctggagctggcgggctccccctcggtccccctggtgatcggctgtgcagtgtcgtgcatggcgctgctcaccctgctcgccatctatgccgccttttggaggttcataaaatctgaacgctccatcatcttgctgaacttctgcctgtccatcttggcatccaacatcctgatcctcgtgggccagtcccgggtgctgagcaagggcgtgtgcaccatgacggctgccttcctgcacttcttctttctctcctccttttgctgggtgcttaccgaggcctggcagtcctacctggctgtcattgggcggatgcgcacccgcctcgttcgcaagcgcttcctctgcctgggctggggtctgcctgccctggtggtggccgtgtctgttggctttacccgaacgaaaggatacggtacatccagctactgctggctctccctggagggcggcctgctctacgcctttgtgggccctgcagccgtcattgtcctggtgaacatgctcatcggaatcatcgtcttcaacaagctcatggcacgtgatggcatctccgacaaatccaagaagcagagggccgggtcggagcggtgcccctgggccagcctgctcctcccctgctcagcgtgtggagcggtccccagccccctgctcagctcagcctcggccaggaacgccatggcctcactctggagctcctgcgtggtgctgcccctgctggcgctcacctggatgtctgccgtcctggctatgacagaccgccgttccgtcctcttccaggccctctttgctgtcttcaactccgcgcagggctttgtcatcactgctgtgcactgcttcctgcgccgagaggtccaggatgtggtgaagtgccagatgggggtgtgccgggctgatgagagcgaagactcccctgactcgtgtaagaacgggcagctgcagatcctgtcagactttgaaaaggatgtggatctggcttgtcaaacagtgctgttcaaggaggtcaacacttgcaacccgtccaccatcacgggcacactatcccgcctgtccctggatgaggatgaggagcccaagtcctgcctcgtgggccctgagggcagcctcagcttctcaccactgcctgggaatatcctggtgcccatggcagcctcaccagggctgggggagcctccgcccccacaggaggccaaccctgtttacatgtgtggggagggtggcctgcggcagctggacctcacatggctgcggcccactgagccaggctctgagggagactacatggtgctgccccggcggactttgagcctgcagcctggcggtgggggtggaggtggtgaggatgcccccagggcccggccggaggggaccccccggcgagctgccaagacagtggcccacactgaaggctaccccagcttcctgtccgtggaccactcgggcctggggctgggccctgcctatggatctctccagaatccctatggaatgaccttccaaccgccaccgccgacacccagcgcccgccaagtgcccgagccaggggagcgcagccggaccatgcctcgcaccgtgcccggctctaccatgaagatgggctccctggagcgaaagaaattacggtattcagacctggactttgagaaggtgatgcacacccggaaacggcattcagaactctaccacgagctcaaccagaagttccacactttcgaccgctaccgcagccagtccacggccaagagggagaagcggtggagtgtgtcctcgggtggggcagccgagcggagcgtgtgcaccgataagcccagccctggggagcgccccagcttgtcccaacatcggcgccatcagagctggagcaccttcaaatctatgacactgggctcgctgccccccaagccccgagaacggctgactctgcaccgggcagcagcctgggagcccacagaaccaccggatggtgacttccagacagaggtgtgagtgccacgctggactgcccactgcatataaatatatatatctctctattttcacactccactttggaactacccaggagccagcgccctctcccctctcccgagggctgggcagggaggcgccgtggactcagccaggctgggggagccggacatggcttggcctggggtcccagggcccttccttgtttctcagaggcccctcagccactggaaccccatcttcagcccagcctgtccgtccctgtcccgggctggggaggggggaggggaactttgttgggaataaacttcactctgtgga

SEQ ID NO: 338511 - DNA, 4758 bp, Artificial Sequence
  derived and/or modified sequence
atggagaacaccggctggatgggcaagggccacagaatgacccccgcctgccccctgctgctgagcgtgatcctgagcctgagactggccaccgccttcgaccccgcccccagcgcctgcagcgccctggccagcggcgtgctgtacggcgccttcagcctgcaggacctgttccccaccatcgccagcggctgcagctggaccctggagaaccccgaccccaccaagtacagcctgtacctgagattcaacagacaggagcaggtgtgcgcccacttcgcccccagactgctgcccctggaccactacctggtgaacttcacctgcctgagacccagccccgaggaggccgtggcccaggccgagagcgaggtgggcagacccgaggaggaggaggccgaggccgccgccggcctggagctgtgcagcggcagcggccccttcaccttcctgcacttcgacaagaacttcgtgcagctgtgcctgagcgccgagcccagcgaggcccccagactgctggcccccgccgccctggccttcagattcgtggaggtgctgctgatcaacaacaacaacagcagccagttcacctgcggcgtgctgtgcagatggagcgaggagtgcggcagagccgccggcagagcctgcggcttcgcccagcccggctgcagctgccccggcgaggccggcgccggcagcaccaccaccaccagccccggcccccccgccgcccacaccctgagcaacgccctggtgcccggcggccccgccccccccgccgaggccgacctgcacagcggcagcagcaacgacctgttcaccaccgagatgagatacggcgaggagcccgaggaggagcccaaggtgaagacccagtggcccagaagcgccgacgagcccggcctgtacatggcccagaccggcgaccccgccgccgaggagtggagcccctggagcgtgtgcagcctgacctgcggccagggcctgcaggtgagaaccagaagctgcgtgagcagcccctacggcaccctgtgcagcggccccctgagagagaccagaccctgcaacaacagcgccacctgccccgtgcacggcgtgtgggaggagtggggcagctggagcctgtgcagcagaagctgcggcagaggcagcagaagcagaatgagaacctgcgtgcccccccagcacggcggcaaggcctgcgagggccccgagctgcagaccaagctgtgcagcatggccgcctgccccgtggagggccagtggctggagtggggcccctggggcccctgcagcaccagctgcgccaacggcacccagcagagaagcagaaagtgcagcgtggccggccccgcctgggccacctgcaccggcgccctgaccgacaccagagagtgcagcaacctggagtgccccgccaccgacagcaagtggggcccctggaacgcctggagcctgtgcagcaagacctgcgacaccggctggcagagaagattcagaatgtgccaggccaccggcacccagggctacccctgcgagggcaccggcgaggaggtgaagccctgcagcgagaagagatgccccgccttccacgagatgtgcagagacgagtacgtgatgctgatgacctggaagaaggccgccgccggcgagatcatctacaacaagtgcccccccaacgccagcggcagcgccagcagaagatgcctgctgagcgcccagggcgtggcctactggggcctgcccagcttcgccagatgcatcagccacgagtacagatacctgtacctgagcctgagagagcacctggccaagggccagagaatgctggccggcgagggcatgagccaggtggtgagaagcctgcaggagctgctggccagaagaacctactacagcggcgacctgctgttcagcgtggacatcctgagaaacgtgaccgacaccttcaagagagccacctacgtgcccagcgccgacgacgtgcagagattcttccaggtggtgagcttcatggtggacgccgagaacaaggagaagtgggacgacgcccagcaggtgagccccggcagcgtgcacctgctgagagtggtggaggacttcatccacctggtgggcgacgccctgaaggccttccagagcagcctgatcgtgaccgacaacctggtgatcagcatccagagagagcccgtgagcgccgtgagcagcgacatcaccttccccatgagaggcagaagaggcatgaaggactgggtgagacacagcgaggacagactgttcctgcccaaggaggtgctgagcctgagcagccccggcaagcccgccaccagcggcgccgccggcagccccggcagaggcagaggccccggcaccgtgccccccggccccggccacagccaccagagactgctgcccgccgaccccgacgagagcagctacttcgtgatcggcgccgtgctgtacagaaccctgggcctgatcctgcccccccccagaccccccctggccgtgaccagcagagtgatgaccgtgaccgtgagaccccccacccagccccccgccgagcccctgatcaccgtggagctgagctacatcatcaacggcaccaccgacccccactgcgccagctgggactacagcagagccgacgccagcagcggcgactgggacaccgagaactgccagaccctggagacccaggccgcccacaccagatgccagtgccagcacctgagcaccttcgccgtgctggcccagccccccaaggacctgaccctggagctggccggcagccccagcgtgcccctggtgatcggctgcgccgtgagctgcatggccctgctgaccctgctggccatctacgccgccttctggagattcatcaagagcgagagaagcatcatcctgctgaacttctgcctgagcatcctggccagcaacatcctgatcctggtgggccagagcagagtgctgagcaagggcgtgtgcaccatgaccgccgccttcctgcacttcttcttcctgagcagcttctgctgggtgctgaccgaggcctggcagagctacctggccgtgatcggcagaatgagaaccagactggtgagaaagagattcctgtgcctgggctggggcctgcccgccctggtggtggccgtgagcgtgggcttcaccagaaccaagggctacggcaccagcagctactgctggctgagcctggagggcggcctgctgtacgccttcgtgggccccgccgccgtgatcgtgctggtgaacatgctgatcggcatcatcgtgttcaacaagctgatggccagagacggcatcagcgacaagagcaagaagcagagagccggcagcgagagatgcccctgggccagcctgctgctgccctgcagcgcctgcggcgccgtgcccagccccctgctgagcagcgccagcgccagaaacgccatggccagcctgtggagcagctgcgtggtgctgcccctgctggccctgacctggatgagcgccgtgctggccatgaccgacagaagaagcgtgctgttccaggccctgttcgccgtgttcaacagcgcccagggcttcgtgatcaccgccgtgcactgcttcctgagaagagaggtgcaggacgtggtgaagtgccagatgggcgtgtgcagagccgacgagagcgaggacagccccgacagctgcaagaacggccagctgcagatcctgagcgacttcgagaaggacgtggacctggcctgccagaccgtgctgttcaaggaggtgaacacctgcaaccccagcaccatcaccggcaccctgagcagactgagcctggacgaggacgaggagcccaagagctgcctggtgggccccgagggcagcctgagcttcagccccctgcccggcaacatcctggtgcccatggccgccagccccggcctgggcgagcccccccccccccaggaggccaaccccgtgtacatgtgcggcgagggcggcctgagacagctggacctgacctggctgagacccaccgagcccggcagcgagggcgactacatggtgctgcccagaagaaccctgagcctgcagcccggcggcggcggcggcggcggcgaggacgcccccagagccagacccgagggcacccccagaagagccgccaagaccgtggcccacaccgagggctaccccagcttcctgagcgtggaccacagcggcctgggcctgggccccgcctacggcagcctgcagaacccctacggcatgaccttccagccccccccccccacccccagcgccagacaggtgcccgagcccggcgagagaagcagaaccatgcccagaaccgtgcccggcagcaccatgaagatgggcagcctggagagaaagaagctgagatacagcgacctggacttcgagaaggtgatgcacaccagaaagagacacagcgagctgtaccacgagctgaaccagaagttccacaccttcgacagatacagaagccagagcaccgccaagagagagaagagatggagcgtgagcagcggcggcgccgccgagagaagcgtgtgcaccgacaagcccagccccggcgagagacccagcctgagccagcacagaagacaccagagctggagcaccttcaagagcatgaccctgggcagcctgccccccaagcccagagagagactgaccctgcacagagccgccgcctgggagcccaccgagccccccgacggcgacttccagaccgaggtgtag

SEQ ID NO: 338512 - protein, 1554 aa, Artificial Sequence
  derived and/or modified sequence
MTPACPLLLSVILSLRLATAFDPAPSACSALASGVLYGAFSLQDLFPTIASGCSWTLENPDPTKYSLYLRFNRQEQVCAHFAPRLLPLDHYLVNFTCLRPSPEEAVAQAESEVGRPEEEEAEAAAGLELCSGSGPFTFLHFDKNFVQLCLSAEPSEAPRLLAPAALAFRFVEVLLINNNNSSQFTCGVLCRWSEECGRAAGRACGFAQPGCSCPGEAGAGSTTTTSPGPPAAHTLSNALVPGGPAPPAEADLHSGSSNDLFTTEMRYGEEPEEEPKVKTQWPRSADEPGLYMAQTGDPAAEEWSPWSVCSLTCGQGLQVRTRSCVSSPYGTLCSGPLRETRPCNNSATCPVHGVWEEWGSWSLCSRSCGRGSRSRMRTCVPPQHGGKACEGPELQTKLCSMAACPVEGQWLEWGPWGPCSTSCANGTQQRSRKCSVAGPAWATCTGALTDTRECSNLECPATDSKWGPWNAWSLCSKTCDTGWQRRFRMCQATGTQGYPCEGTGEEVKPCSEKRCPAFHEMCRDEYVMLMTWKKAAAGEIIYNKCPPNASGSASRRCLLSAQGVAYWGLPSFARCISHEYRYLYLSLREHLAKGQRMLAGEGMSQVVRSLQELLARRTYYSGDLLFSVDILRNVTDTFKRATYVPSADDVQRFFQVVSFMVDAENKEKWDDAQQVSPGSVHLLRVVEDFIHLVGDALKAFQSSLIVTDNLVISIQREPVSAVSSDITFPMRGRRGMKDWVRHSEDRLFLPKEVLSLSSPGKPATSGAAGSPGRGRGPGTVPPGPGHSHQRLLPADPDESSYFVIGAVLYRTLGLILPPPRPPLAVTSRVMTVTVRPPTQPPAEPLITVELSYIINGTTDPHCASWDYSRADASSGDWDTENCQTLETQAAHTRCQCQHLSTFAVLAQPPKDLTLELAGSPSVPLVIGCAVSCMALLTLLAIYAAFWRFIKSERSIILLNFCLSILASNILILVGQSRVLSKGVCTMTAAFLHFFFLSSFCWVLTEAWQSYLAVIGRMRTRLVRKRFLCLGWGLPALVVAVSVGFTRTKGYGTSSYCWLSLEGGLLYAFVGPAAVIVLVNMLIGIIVFNKLMARDGISDKSKKQRAGSERCPWASLLLPCSACGAVPSPLLSSASARNAMASLWSSCVVLPLLALTWMSAVLAMTDRRSVLFQALFAVFNSAQGFVITAVHCFLRREVQDVVKCQMGVCRADESEDSPDSCKNGQLQILSDFEKDVDLACQTVLFKEVNTCNPSTITGTLSRLSLDEDEEPKSCLVGPEGSLSFSPLPGNILVPMAASPGLGEPPPPQEANPVYMCGEGGLRQLDLTWLRPTEPGSEGDYMVLPRRTLSLQPGGGGGGGEDAPRARPEGTPRRAAKTVAHTEGYPSFLSVDHSGLGLGPAYGSLQNPYGMTFQPPPPTPSARQVPEPGERSRTMPRTVPGSTMKMGSLERKKLRYSDLDFEKVMHTRKRHSELYHELNQKFHTFDRYRSQSTAKDKPSPGERPSLSQHRRHQSWSTFKSMTLGSLPPKPRERLTLHRAAAWEPTEPPDGDFQTEV

SEQ ID NO: 338513 - DNA, 4665 bp, Artificial Sequence
  derived and/or modified sequence
atgacgccagcatgtccactgcttctgagcgttatcttgagcctacgtcttgctactgctttcgatccagccccaagtgcctgttccgctctggcgagcggcgtgctttacggtgccttcagcctgcaggacctgtttccaaccatcgccagtggatgtagctggactctggaaaatcctgatccgacaaagtacagtctatatctccgctttaacagacaggaacaggtgtgcgcccacttcgcccccagactgcttcccctcgaccactacctggtgaactttacttgccttagaccgagtcccgaggaggccgtggctcaggctgaaagtgaggtgggaagaccagaggaggaggaggcagaggcggcggcagggctcgagctgtgcagcgggtcaggcccttttacattcctgcactttgacaagaatttcgtgcagttatgcctgagcgccgaaccttctgaagctccccgcctcctcgcaccggccgccctggcttttcgatttgttgaagtgttgctgattaataataacaatagctctcagttcacatgtggcgtgctctgtcggtggagtgaagagtgcgggcgcgccgccggccgtgcttgtggctttgcacagccaggctgctcctgtcctggcgaggccggtgccggttccacaacgactacatctccaggcccccccgctgcccacacactctccaatgctcttgttccaggcggacctgcccctcccgccgaggcagatctccatagcggaagttcaaacgacctctttactaccgaaatgcggtacggtgaggagccagaggaagaaccaaaggttaagactcaatggccccgtagcgcagatgaacctgggctgtacatggcacagactggggatcccgctgccgaagaatggagcccctggagcgtgtgctcactcacctgtggccagggcctccaagttaggactcgtagctgcgtaagctccccttacggcacactgtgcagcggtccactgcgcgaaacaaggccgtgcaacaactcagctacctgccccgttcatggggtgtgggaagagtgggggtcatggagtctgtgttctcggagctgtggaaggggttcccgctcacgaatgcgcacctgcgtgccacctcaacatggcggcaaggcttgtgagggtccagagcttcagacaaagctttgttccatggccgcctgccctgtagaggggcagtggctggagtggggcccatggggcccttgcagtaccagttgcgcgaatggaactcagcagcgctcacgtaagtgctccgtggccggacctgcgtgggcaacctgtacaggagccctgaccgacacccgggagtgctccaacctcgaatgcccagctactgattccaaatgggggccctggaatgcgtggtcgctctgcagcaagacctgcgacacaggctggcagaggcgctttcggatgtgccaggccaccggcacccagggctatccctgcgaaggaactggtgaggaagtgaaaccatgctcagagaaaaggtgcccagcctttcacgagatgtgtagagacgagtatgtgatgctaatgacctggaagaaggcggcagccggcgagattatctacaacaaatgtccaccgaatgcttcaggctccgcatcgcgcaggtgtctgctgtccgcccagggcgtcgcctactggggattgccatccttcgcccgttgcattagtcatgaatacagatatttgtatctcagtctaagagaacacttggcaaagggtcagcgcatgcttgctggggagggtatgagtcaggtcgtgagatccctgcaagagctgctcgcacgtcgcacctactacagtggtgatctcctattcagtgtagatatattgagaaatgtcactgacactttcaaaagagcaacttacgtgccttccgccgatgacgttcagcggttctttcaggtcgtcagctttatggtcgacgccgagaacaaagagaagtgggatgatgctcagcaggtgagccctggaagcgtgcacttgctgcgggttgtggaagacttcattcatctggtcggcgatgcactcaaggcctttcagtcttccctgatcgtcaccgataaccttgtgatcagcatccagcgcgagcctgtgtccgctgtgtcatctgacatcacatttcccatgcggggcagacgtgggatgaaagactgggtaagacactctgaagatcgtctcttcctgcctaaagaggtgctcagcttgagctcacccggaaagcctgctacttccggggccgcgggctcccccgggcgcgggcggggacccggcacagtaccaccaggtccgggtcatagccaccaaagactgcttccagctgaccctgacgaaagtagttacttcgtaattggcgcagtcctgtatcggactctcgggcttattctccctcctcctcgtccacccttggccgtcacttccagggtcatgaccgtgacggtgagacccccaacccagccaccagctgagccacttatcaccgtggagttgtcttatattataaatggaacaaccgatccgcattgcgcctcatgggattactccagagctgatgctagttcgggtgattgggacaccgaaaactgtcagacacttgagactcaggctgcacacacaagatgtcaatgccagcatttaagcactttcgccgtgcttgctcagcctcccaaggacctgactttagagctggcagggtcccccagtgtccctctagtgatcggatgcgcagtgagttgtatggctctgttgaccctgttagctatctacgccgccttctggcggttcatcaaatccgaacgcagcattatcttgctgaacttctgcctctcaattctggccagcaacattctgatcctggtgggacagagtagggtactctcaaaaggcgtgtgcacaatgactgccgcgttcctgcattttttctttctttcctccttctgttgggtgctgaccgaggcctggcagagttatttggcagtcatcggccgtatgcgtaccaggcttgtccggaagcggttcctatgcctcggctggggccttcccgctcttgtggtagccgtgtctgtaggttttaccaggacaaaaggctatggaacctcttcctactgctggctgagcttagaagggggattactctatgcgttcgtgggccccgctgccgtcatagtgctggttaatatgctgatcggcataatagtctttaacaaactcatggcgagagatggcatctctgataagtccaaaaaacaaagagctggaagcgaacgctgtccctgggcaagcttgcttctgccttgcagtgcttgtggggcagtgcctagcccccttttatccagcgcatcagctaggaacgccatggccagcttatggagttcctgcgttgtcctgccacttttggccctgacgtggatgtcagccgtgttagccatgacagatcgacgcagcgtcctgttccaggcactgttcgcagtgtttaactccgctcagggctttgtgatcaccgctgtgcattgcttcctgcggcgcgaggtgcaagatgtggtgaaatgccagatgggcgtttgtagagcagatgagtctgaggatagtccagacagttgtaagaatggtcaattgcagatcctgtccgactttgagaaggatgttgatttggcgtgtcaaactgtgctctttaaggaagtgaatacctgcaacccaagcactatcacaggaaccctgtctcgactgagtctcgacgaggacgaggagcctaagagctgtcttgtaggaccagaaggttcactttctttttctccactgccgggtaacatcctggtccccatggccgccagccccgggcttggtgagcccccaccgccgcaagaggccaatccggtatatatgtgcggcgaaggtgggcttcgccagctggacttgacatggctcagaccaacggagcccggctcggaaggggattatatggtgttacctagacggacactgtccctgcagcccggcggaggcggcgggggcggggaggacgcccctcgggcacgaccggagggtaccccccgtagggcagcgaaaaccgtagctcacacggagggctaccccagttttttaagcgtagatcactcagggcttgggctgggtcctgcttacggctccctccagaatccatatgggatgacttttcagcctccccctccgacaccatctgcacggcaagtccccgaaccaggtgagagaagcaggactatgccccgtacagttccagggagcactatgaagatgggaagcctcgaaagaaaaaagttgaggtattctgatctcgatttcgaaaaagtcatgcatactcgcaaacggcactctgaactgtaccacgagcttaaccagaagttccatacatttgacaggtaccgctcgcagtctaccgctaaggacaagccctctccgggcgaacgcccaagcctcagtcagcataggcgccaccagagttggagcacctttaaaagcatgacactgggctcgctgccaccaaaaccacgggagcggctgactctccacagggcggcagcctgggagccgactgaaccaccagacggcgacttccagaccgaggtgtag

SEQ ID NO: 338514 - DNA, 4665 bp, Artificial Sequence
  derived and/or modified sequence
atgaccccagcctgccccctgctgctgagcgtcatcctgagcctgcggctggccacagcctttgatcctgcccccagcgcctgcagcgccctggccagcggcgtgctgtatggagccttcagcctgcaggacctcttccccaccatcgccagcggctgctcctggaccctggagaacccagaccccaccaagtacagcctgtacctgcgcttcaaccggcaggagcaggtgtgtgcccactttgccccccggctgctgcccctggaccactacctggtgaacttcacctgcctgcggcccagccctgaggaggccgtggcccaggccgagagcgaggtgggccggcctgaggaggaggaggccgaggccgctgctggcctggagctgtgcagcggcagcggccccttcaccttcctgcactttgacaagaactttgtgcagctgtgcctgtctgctgagcccagcgaggccccccggctgctggccccagctgccctggccttccgctttgtggaggtgctgctgatcaacaacaacaacagcagccagttcacctgtggggtgctgtgccgctggagcgaagaatgtggccgggccgccggccgggcctgtggctttgcccagcccggctgcagctgccctggagaggccggggccggcagcaccaccaccaccagccctggccccccagctgcccacaccctgagcaatgccctggtgcctgggggccctgcccccccagctgaggccgacctgcacagcggcagcagcaatgacctcttcaccacagagatgagatatggagaggagcctgaggaggagcccaaggtgaagacccagtggcccaggtctgcagatgagcccggcctgtacatggcccagacaggagaccctgctgctgaggagtggagcccctggagcgtgtgcagcctgacctgtggccagggcctgcaggtgaggaccaggagctgtgtgagcagcccctacggcaccctgtgcagcggccccctgcgggagacccggccctgcaacaacagcgccacctgccctgtgcacggcgtgtgggaggagtggggctcctggagcctgtgcagccgcagctgtggccggggcagccgcagcaggatgaggacctgtgtgcccccccagcacggcggcaaggcctgtgagggccctgagctgcagaccaagctgtgcagcatggccgcctgccctgtggagggccagtggctggagtggggcccctggggcccctgcagcaccagctgtgccaacggcacccagcagaggagcaggaaatgttctgtggccggccctgcctgggccacctgcacaggagccctgacagacaccagagaatgtagcaacctggagtgcccagccacagacagcaagtggggcccctggaatgcctggagcctgtgcagcaagacctgtgacaccggctggcagaggcgcttcaggatgtgccaggccaccggcacccagggctacccctgtgagggcactggagaggaggtgaagccctgcagcgagaagcgctgcccagccttccacgagatgtgcagagatgaatatgtgatgctgatgacctggaagaaggctgctgctggggagatcatctacaacaagtgccccccaaatgccagcggcagcgccagccgccgctgcctgctgagcgcccagggcgtggcctactggggcctgcccagctttgcccgctgcatcagccatgagtaccgctacctgtacctgagcctgcgggagcacctggccaagggccagaggatgctggccggggagggcatgagccaggtggtgcgcagcctgcaggagctgctggcccggaggacctactacagcggggacctgctcttctctgtggacatcctgagaaatgtgacagacaccttcaagagggccacctacgtgcccagcgcagatgatgtgcagcgcttcttccaggtggtgtccttcatggtggatgctgagaacaaggagaagtgggatgatgcccagcaggtgtccccaggctctgtgcacctgctgcgggtggtggaggacttcatccacctggtgggagatgccctgaaggccttccagagcagcctgattgtgacagacaacctggtgatcagcatccagcgggagcctgtgtctgctgtgtccagtgacatcaccttccccatgagaggaagaagaggcatgaaggactgggtgcgccacagcgaggacaggctcttcctgcccaaggaggtgctgagcctgagcagccctgggaagccagccaccagcggggccgccggcagccctggccggggccggggccctggcaccgtgcccccaggccctggccacagccaccagaggctgctgcctgctgaccctgatgagagcagctacttcgtcatcggggctgtgctgtaccgcaccctgggcctcatcctgcccccacccaggcctcccctggccgtgaccagccgggtgatgacagtgacagtgcggccccccacccagcccccagctgagcccctcatcaccgtggagctgagctacatcatcaatggcaccacagacccccactgtgcctcctgggactacagcagagcagatgccagcagcggggactgggacacagagaactgccagaccctggagacccaggccgcccacacccgctgccagtgccagcacctgagcacctttgctgtgctggcccagccccccaaggacctgaccctggagctggccggcagccccagcgtgcccctggtgattggctgtgctgtgtcctgcatggccctgctgaccctgctggccatctatgctgccttctggaggttcatcaagtctgagaggagcatcatcctgctgaacttctgcctgagcatcctggccagcaacatcctgatcctggtgggccagagccgggtgctgagcaaaggagtgtgcaccatgacagctgccttcctgcacttcttcttcctgagcagcttctgctgggtgctgacagaggcctggcagagctacctggccgtcatcggccgcatgaggacccggctggtgaggaagcgcttcctgtgcctgggctggggcctgcctgccctggtggtggccgtgtctgtgggcttcaccaggaccaagggctacggcaccagcagctactgctggctgagcctggagggcggcctgctgtatgcctttgtgggccctgctgctgtgattgtgctggtgaacatgctgattggcatcatcgtgttcaacaagctgatggccagagatggcatcagtgacaagagcaagaagcagagagctggcagcgagcgctgcccctgggccagcctgctgctgccctgcagcgcctgtggggctgtgcccagccccctgctgagcagcgccagcgccagaaatgccatggccagcctgtggagcagctgtgtggtgctgcccctgctggccctgacctggatgtctgctgtgctggccatgacagaccggcgctctgtgctcttccaggccctgtttgctgtgttcaacagcgcccagggcttcgtcatcacagctgtgcactgcttcctgcggcgggaggtgcaggatgtggtgaagtgccagatgggcgtgtgcagagcagatgaaagtgaggacagcccagacagctgcaagaatggccagctgcagatcctgagtgactttgagaaggatgtggacctggcctgccagacagtgctcttcaaggaggtgaacacctgcaaccccagcaccatcaccggcaccctgagccggctgagcctggatgaagatgaggagcccaagagctgcctggtgggccctgagggcagcctgtccttcagccccctgcccggcaacatcctggtgcccatggccgccagccctggcctgggggagcccccaccaccccaggaggccaaccctgtgtacatgtgtggggagggcggcctgcggcagctggacctgacctggctgcggcccacagagcccggcagcgagggggactacatggtgctgcccaggaggaccctgagcctgcagcccggcggcggcggcggcggcggagaagatgccccccgggcccggcctgagggcaccccaagaagagctgccaagacagtggcccacacagagggctaccccagcttcctgtctgtggaccacagcggcctgggcctgggccctgcctacggcagcctgcagaacccctacggcatgaccttccagcccccaccacccaccccatctgcccggcaggtgcctgagcccggggagaggagcaggaccatgcccaggacagtgcccggcagcaccatgaagatgggcagcctggagaggaagaagctgcgctacagcgacctggactttgagaaggtgatgcacaccaggaagaggcacagcgagctgtaccacgagctgaaccagaagttccacacctttgaccgctaccgcagccagagcacagccaaggacaagcccagccctggagagcggcccagcctgagccagcaccggcggcaccagagctggagcaccttcaagtccatgaccctgggcagcctgccccccaagccccgggagcggctgaccctgcacagagctgctgcctgggagcccacagagcccccagatggagacttccagacagaggtgtag

SEQ ID NO: 338515 - DNA, 4665 bp, Artificial Sequence
  derived and/or modified sequence
atgacccccgcctgccccctgctgctgagcgtgatcctgagcctgcgcctggccaccgcatttgaccccgccccgagtgcctgttccgccctcgcatcaggggtgctgtatggggcattctcactccaggacctcttcccgactattgcctcaggatgttcttggacactggaaaatccggaccccacgaagtattccctgtacttgcgatttaatcgccaggagcaggtttgtgctcacttcgccccccggctgctgcctctcgaccactatctggttaatttcacctgcctccgcccttctcccgaagaagctgtcgcccaggccgaatccgaggtgggccggcctgaagaggaagaagcagaagccgcagccggcctggagttgtgcagcggatctggaccctttacgtttttgcatttcgataagaatttcgtgcagttatgcctgagcgctgagcccagtgaggccccacgactgttggccccagctgccctcgcctttcgtttcgtggaagtgctgctgatcaataacaacaacagcagccaatttacatgcggggtgctctgccgctggtcagaggaatgcggtcgcgcagccggaagagcttgtggctttgcacaacctggctgtagctgtccaggcgaggctggcgctggatccaccactactacttcgcctggtccacccgcagcacacactctctccaacgcacttgtgcccggtggccctgcaccgccagccgaggcagatctgcacagcgggtcctcgaatgatctgttcacgacagaaatgaggtacggggaggaaccagaggaggagcccaaggttaagacgcaatggccgcggtcagctgacgagcctggcttatacatggcccagacaggggatcctgccgcggaagaatggagtccctggtccgtgtgctcacttacgtgtggccaaggcctccaagtcagaacaaggtcctgcgtttcaagtccctatggcaccctgtgcagcggcccattacgcgagaccaggccttgcaacaactccgctacctgtcccgtgcatggcgtgtgggaggagtggggttcgtggtccctgtgttccagatcatgtggccgcggcagtcggagcaggatgcggacatgcgtgccccctcagcatggaggtaaggcttgcgaggggccggaattacaaacaaaactgtgctctatggccgcgtgtcctgtggagggtcaatggcttgagtggggaccctgggggccatgcagcaccagctgtgctaatggaacacaacagcggtccaggaaatgctcggtagctggaccagcctgggcaacctgcaccggcgcccttactgataccagagagtgctccaacctggagtgtccagccaccgacagtaagtggggtccctggaacgcctggtcgctctgctccaagacctgtgatactgggtggcaacgccgctttcgtatgtgtcaggcgactggaacccagggttacccctgcgaagggacgggcgaggaggtaaagccttgttccgaaaagcggtgtcccgcatttcacgaaatgtgccgcgatgagtatgtgatgctaatgacatggaaaaaagcagccgccggcgagataatctacaataagtgcccccccaatgcatccggttcagccagcagacgctgtttgctttccgcccagggggtggcatactggggactgccaagtttcgctagatgcatctcacatgagtacagatacttatatctctctctccgggaacacttggccaagggccagcgcatgttggctggagagggtatgtcgcaagtggtgaggagcctgcaagaactcttagcaagacgcacctactattcgggcgatctgctcttttccgtggacatcctgcgcaacgttaccgacaccttcaaaagagctacgtatgttccctccgctgatgatgttcagagattctttcaagtggtcagtttcatggtggacgcagagaataaggagaaatgggacgatgcacagcaagtgtcccccgggtcggtacacctgcttagagtggtcgaagatttcatacatctcgtcggggacgcactcaaggccttccaatctagtctcatcgtgaccgacaatttagtgatctccattcagcgggaaccggtcagtgcagtgtcttccgacatcacattccctatgcggggcagaagagggatgaaagactgggtcagacacagtgaggaccggcttttcctaccaaaggaggtgctgtccctctcgtcacctggcaaacctgccacatcaggagccgcaggctcaccagggagaggaagaggcccaggcacagtcccaccagggccggggcatagtcaccagaggttactgcctgccgatccggacgaatccagctactttgtgattggtgccgtgttatatcggacactcggcctgattcttcccccacctcggcccccccttgctgtgacatcgcgagttatgacagtaacggtacgacctcccactcagccaccagctgagccattaatcacagttgagctctcatatatcatcaacgggaccaccgacccccattgtgcttcctgggactacagtagagccgatgcctcctccggggattgggacactgagaactgtcagactctcgaaactcaggccgcccacacgaggtgtcaatgtcagcatctttcaaccttcgccgtgctggcccaacccccaaaagatctcacacttgagctggccggcagtccctcagtacctctggttatcggttgtgcagtctcatgcatggcgctactgaccctcctcgccatttatgctgcattctggaggttcattaagtccgagaggtccattatattactgaatttctgcttgtctattttggcgtccaatattctgatcttggtcggtcaaagcagggtgctttctaaaggtgtttgtacaatgaccgctgcatttctgcacttcttctttctcagcagtttctgctgggtgctaactgaggcttggcagtcatacttggccgtcattggccgaatgcgtacgcgtcttgttaggaaaagattcctatgtctgggatggggactccctgctcttgttgtcgcagtcagtgtcgggttcactcgcactaaaggctatggcacctccagctattgctggctctcgctggaggggggactgttgtatgccttcgtgggcccagccgcagtcatagtgttagtgaacatgctcatcgggatcatcgtgtttaacaagctgatggcacgggatggtatttcagacaaatccaagaagcagagggccgggagtgaacggtgtccatgggcttctctcttactgccctgcagcgcctgtggggcggtgccatcgccactgttatccagtgccagtgcccggaatgcaatggccagcttgtggagtagttgcgtcgtgctccccttactggctctcacgtggatgagtgccgtgttggccatgacggaccgccgctccgtcctgttccaggctctgtttgcagtatttaacagtgctcagggcttcgtcataacggccgtgcattgctttttgaggcgcgaagtgcaggacgttgtgaagtgccagatgggcgtttgtagggcggacgagtccgaggactcccctgattcatgtaaaaacggtcagctccagatcctcagcgacttcgaaaaagacgttgacctagcttgtcagaccgttctgtttaaagaggtgaacacctgtaatccaagcactatcacaggtactctttctcggctgtctctggatgaggacgaggaaccaaaaagctgcctggttggtccagagggttcactcagcttctcgcccctgccgggcaatattctggtgccaatggcagcaagtcccggactcggggagcccccccccccccaggaggccaaccccgtctacatgtgcggcgagggcggtctccgccaactggacctcacttggttgcgtcctactgaaccaggcagtgaaggcgattacatggtgctgcctcggcgcaccctgtcactgcagcctggtggcggggggggtgggggggaagacgccccaagagccaggcccgaaggcaccccaagaagggcggctaagacggtagcccacacagaaggctacccaagcttccttagtgtggaccatagcgggctcggtctggggccggcctatgggtcccttcaaaatccatacggcatgacgtttcagcccccccctcctacgccaagtgccaggcaagtccctgaacctggagaaagatctcggaccatgccacgaaccgtccctgggagcaccatgaagatgggcagtcttgaacggaagaagctcaggtactccgacctcgacttcgaaaaggtcatgcacacaagaaaacggcatagcgagctataccacgaactcaaccagaaatttcatacattcgaccgctataggtcccagtcgactgccaaggacaagccatcccctggagagaggccaagcctctcccagcaccggcgccatcagtcatggtcaacattcaagtccatgaccctggggagtttgccccccaaacctcgcgaaaggctgactctccaccgcgcggccgcctgggagccgactgaacctcctgatggtgactttcagactgaggtatag

SEQ ID NO: 338516 - DNA, 4665 bp, Artificial Sequence
  derived and/or modified sequence
atgacccctgcttgcccgctcctgctgtccgtcatactgagcttacgactggctacagcattcgacccggctccctctgcatgttctgctctggcctctggcgtgctctatggcgctttctcgctccaggatttgtttccaactatcgcaagcggctgcagctggacactggagaatcctgatcccaccaaatactccctttacctcaggttcaacaggcaggagcaggtgtgtgcccactttgcccctagactcttgcccttggatcactacctagtgaattttacatgcctgcggccatctcccgaggaagccgtcgcacaggccgagtctgaagttggacggcctgaggaagaggaagcagaagctgcggcaggcttagagctctgttccggttctggcccttttacattcctccatttcgacaaaaacttcgtccagctttgtctctccgcagaaccatctgaggctcctaggctgctcgcaccggctgcgctagcattccgcttcgtcgaggtcctcctgatcaataataacaattccagccagttcacctgcggcgtgctttgtcgctggtctgaagaatgtgggagagcggcagggcgtgcatgcggatttgcacaaccgggatgctcatgtccgggagaggccggagctgggagcacgaccacaacttctccaggcccaccagcagcccatactctgtccaacgcgctcgtcccaggaggccctgcccctccggctgaagccgacctacactcaggctccagcaatgacctatttacgacagaaatgaggtacggggaagagcctgaggaggagcccaaagtgaaaacccagtggccacgctcagccgacgaacctggactgtacatggcgcagacaggagaccctgccgcagaagaatggtctccttggtccgtgtgcagcctaacatgcggccaggggctgcaagtgaggacgagatcttgtgtgagctccccctacggcacactctgcagcggcccattgagggaaacccgcccatgtaataatagtgccacatgtccggtccacggggtgtgggaagagtggggctcttggagcctgtgctctcggtcctgtggaaggggttcgagatcccgtatgcgcacgtgcgtgccgcctcagcatgggggtaaagcctgcgagggaccggaactgcagactaaattgtgctctatggcggcatgtcctgtcgaggggcaatggctcgagtggggaccctggggtccatgctcaacctcctgcgccaacgggacccagcaacgttctcggaaatgtagtgtcgccggtcccgcttgggctacttgcaccggcgcactgaccgataccagagagtgttctaaccttgagtgcccagccacggactccaaatggggcccttggaatgcttggagtctgtgttctaaaacctgcgatactgggtggcaaagacgttttcgcatgtgccaggccacaggaacccaagggtatccctgcgagggaaccggagaagaggttaaaccctgtagtgagaagagatgcccagcttttcatgaaatgtgtcgtgacgaatacgtgatgttgatgacttggaaaaaggccgctgccggagagatcatctacaataagtgcccgccaaacgccagcggaagcgcttctagacgctgcttacttagtgctcaaggggtcgcttattggggattaccgtcttttgcccgttgcatcagccacgaatatcggtacctgtacttgtccctgcgcgaacacctggcaaaaggtcagagaatgcttgcaggcgaaggcatgtcacaagtggtgaggtccctacaggaactcctggctaggagaacctactactctggagatttgttattctctgtggatatccttcgcaatgtcacagatacctttaagcgtgccacctacgtaccttctgcagacgatgtccaaagattctttcaggttgtttcttttatggtggatgccgagaataaggaaaaatgggacgacgcgcagcaggtgagccctggctccgtgcacctgttgcgggtagttgaagattttatccacctcgtaggcgacgccctgaaagcattccagtcaagcctgatcgtgacggataatctggtcatcagcatccagagggaacctgtgtccgctgtgagcagcgatataaccttccctatgagaggaaggagggggatgaaagattgggtgcggcactccgaagacaggcttttcctacccaaagaagtcctcagcctcagctcgcctgggaagcccgcaacaagcggggctgcaggcagcccaggacgcggacgcggtccagggactgtgccgccaggccctggacattctcaccagagactactcccagctgatccggacgagtcgtcttacttcgtcattggcgcagtcttgtaccgaacactgggacttatcctgcccccaccaaggccaccactggctgttacatcaagagtcatgaccgttactgtgcgccctccaacgcagcctcccgctgagcccttaataacggttgagctgtcctacatcattaatggaacaacggacccgcattgcgctagctgggattactcccgggcagatgcttcttcaggtgattgggacactgagaattgccagacccttgaaactcaggcggctcacacacgctgccagtgccagcacctgtctacgttcgctgtcctcgcacagccccctaaagatctcacgctggaactggctggttctccctccgtccctttggtgatcggatgtgccgtatcctgtatggcgctgctcacactgctggcaatctacgccgctttctggagattcattaagagcgagaggtcaattattctgttaaacttctgtttatctatcttggcatctaacatcctcattctggtgggccaaagccgagtgttaagtaagggggtttgcacaatgaccgcggcttttttacacttcttctttttgtctagcttttgttgggtgctgactgaggcttggcagtcatacctagccgtcatagggaggatgcgtacacgacttgtcagaaagcgttttctgtgcttgggatggggactccctgctctggtggtggccgtgagcgtgggcttcacaaggactaaaggttacgggacaagctcttattgttggctctcgctggagggtggcctcctctatgccttcgtgggtccagccgcagtgattgtgttagttaatatgctgatcggaattatcgtgttcaacaagctgatggcccgagacggcatctccgataagagtaagaagcagagggccggttctgaaagatgcccttgggcatcgctgctgttgccttgtagtgcctgtggagccgtgccatctccgttgctctccagtgcgagcgcacgaaatgccatggcctcactttggtcctcttgcgtggttttgccccttctggccctgacctggatgtctgctgtgcttgccatgactgacagacggtcggttctgtttcaggctctgtttgctgtattcaatagcgctcagggcttcgtgatcaccgctgtgcactgtttcctgcggcgagaggtacaggacgtagtgaagtgtcaaatgggcgtttgtcgggcagatgagtccgaagattctccagattcatgtaaaaacggacagttacaaatcctgtcggattttgagaaggacgttgatttggcctgccaaactgtactcttcaaggaagtgaacacctgtaacccttctaccatcacaggcaccctttcacgactgtcactcgacgaagatgaggaacccaagagctgcttggtcggcccagagggatccttatctttttctcctctcccaggaaacatcctggtgcccatggccgcttcccctgggcttggtgagccgcctccaccacaggaggctaatcccgtctacatgtgcggggaaggaggactgaggcaattagatctgacctggttaagacctaccgagccaggatcggaaggagactatatggtgctgcccagaaggacactgtcattacagccaggtgggggaggaggcggaggagaggatgccccaagggctcggccagaggggactccgaggcgcgcagccaaaaccgtggcgcacactgagggttatccatcatttctttctgtggaccacagcggcttgggcctgggtccagcttacggctcactacagaacccgtacggtatgacctttcaaccacctcccccaaccccctcagcaaggcaggtccctgagccgggtgaacggtcacgtaccatgcctaggacagtgcctgggagtactatgaagatgggctccttggagcgaaagaaactgcgatacagcgatctggactttgagaaggttatgcatactaggaagaggcactcagaactttatcacgagctaaatcagaaatttcacacttttgaccgctatcggtcccagtcaactgcaaaagacaagccatccccaggggaacgaccatctctaagtcagcatagaaggcatcagtcctggtcgacatttaaatccatgacccttggtagcctcccccctaagcccagggagaggctcactcttcatcgcgcagctgcctgggaaccaaccgaacctcccgacggcgacttccagacagaggtctag

SEQ ID NO: 338517 - DNA, 4675 bp, Artificial Sequence
  derived and/or modified sequence
gatgaccccagcctgtcccctcttactgtctgtgattctgtccctgcgcctggccaccgccttcgaccccgcccccagtgcctgctctgccctggcctcgggtgtgctctacggggccttctcgctgcaggacctctttcctaccatcgcctcgggctgctcctggaccctggagaaccctgaccccaccaagtactccctctacctgcgcttcaaccgccaggagcaggtgtgcgcacactttgccccccgcctgctgcccctggaccactacctggtcaactttacctgcctgcggcctagccccgaggaggcggtggcccaggcggagtcagaggtggggcggccagaagaggaggaggcagaggcggcagcggggttggagctgtgcagcggctcaggcccctttaccttcctgcacttcgacaagaacttcgtgcagctgtgcctgtcggctgagccctccgaggccccgcgcctgctggcgcccgctgccctagccttccgctttgtcgaggtcttgctcatcaacaacaacaactctagccaattcacctgtggtgtgctctgccgctggagtgaggagtgtggccgcgctgccggcagggcctgcggctttgctcagccaggctgcagctgccctggagaggcgggggccggctccaccaccaccacatctccaggccctcctgctgcccacaccctgtccaatgccctggtgcccgggggcccagccccacctgctgaggccgatttgcactcggggagcagcaatgatctgttcacaaccgagatgagatatggtgaggagccggaagaggaaccgaaagtgaaaacccagtggccgaggtctgcagatgagcctgggctatacatggcgcagacaggcgacccggcggctgaggagtggtccccgtggagcgtgtgttccctgacgtgtgggcagggtctgcaggtgcggacccgctcctgtgtgtcctccccctatgggaccctgtgcagcgggcccctgcgggagaccaggccctgcaacaattcagccacctgcccagtgcacggcgtgtgggaggagtgggggtcctggagcctgtgctcccgcagctgcgggcgggggtcccggagccggatgcggacctgcgtgcccccccagcacggcggcaaggcctgcgagggtcctgagctgcagactaagctctgcagtatggctgcctgcccggtggaaggccagtggttagaatggggtccctggggcccatgctccacgtcctgtgccaatgggacccaacagcgcagccggaagtgcagcgtggcgggcccagcctgggccacatgcacgggtgccctcactgacacccgggagtgcagcaacctcgagtgcccggccactgatagcaagtgggggccatggaatgcgtggagcctgtgctctaagacgtgtgacacaggctggcagcgccgcttccgcatgtgccaggccacgggcacgcagggctacccctgcgagggcaccggagaggaggtgaagccttgtagtgagaagaggtgtccagccttccatgagatgtgcagggatgagtacgtgatgctgatgacgtggaagaaggcagctgctggcgagatcatctacaacaagtgccccccgaatgcctcagggtctgccagccgccgctgtctcctcagtgcccaaggcgtggcgtactgggggctgcccagctttgctcgctgcatctcccatgagtaccgctacctgtatctgtcacttagggagcacctggccaaggggcagcgcatgctggcaggcgagggcatgtcgcaggtggtgcgcagcctgcaggagctactggcccggcgcacctactatagtggggacctgctcttctctgtggacattctgaggaatgtcactgacacctttaagagggccacctacgtgccctcggctgatgatgtgcagcgcttcttccaggtggtgagcttcatggtggatgcggaaaacaaggagaagtgggacgatgctcagcaggtgtcccctggctctgtgcacctgctccgtgtcgtggaggacttcattcacctggtgggcgatgctctcaaggccttccagagctctctgattgtcacagataatctagtgatcagcattcagcgagagcccgtctcagctgtgtccagtgacatcacgttccccatgcggggccgccggggcatgaaggactgggtgcggcactcagaggaccgcctcttcctgcccaaggaggtgctcagcctctcctccccagggaagccagccacatctggggcagcaggcagccctggcagggggaggggcccaggaacggtgcctcctggcccaggccactcccaccagcgcctcctcccagcagaccctgatgagtcctcctactttgtgatcggtgctgtactctaccgcacccttggcctcatcctgccgcctcccaggcccccgctggccgtcacatcccgggtgatgacagtgactgtgcgcccccctacccagcctccagctgagcccctcatcactgtggagctctcctacatcatcaatgggaccacggatccccattgcgccagctgggactactccagagcagatgccagctcaggagactgggacactgaaaattgccagaccctggagacccaggcagctcacacccgctgccagtgccagcacctgtccacctttgctgtactagcccagccgcccaaggacctgaccctggagctggcgggctccccctcggtccccctggtgatcggctgtgcagtgtcgtgcatggcgctgctcaccctgctcgccatctatgccgccttttggaggttcataaaatctgaacgctccatcatcttgctgaacttctgcctgtccatcttggcatccaacatcctgatcctcgtgggccagtcccgggtgctgagcaagggcgtgtgcaccatgacggctgccttcctgcacttcttctttctctcctccttttgctgggtgcttaccgaggcctggcagtcctacctggctgtcattgggcggatgcgcacccgcctcgttcgcaagcgcttcctctgcctgggctggggtctgcctgccctggtggtggccgtgtctgttggctttacccgaacgaaaggatacggtacatccagctactgctggctctccctggagggcggcctgctctacgcctttgtgggccctgcagccgtcattgtcctggtgaacatgctcatcggaatcatcgtcttcaacaagctcatggcacgtgatggcatctccgacaaatccaagaagcagagggccgggtcggagcggtgcccctgggccagcctgctcctcccctgctcagcgtgtggagcggtccccagccccctgctcagctcagcctcggccaggaacgccatggcctcactctggagctcctgcgtggtgctgcccctgctggcgctcacctggatgtctgccgtcctggctatgacagaccgccgttccgtcctcttccaggccctctttgctgtcttcaactccgcgcagggctttgtcatcactgctgtgcactgcttcctgcgccgagaggtccaggatgtggtgaagtgccagatgggggtgtgccgggctgatgagagcgaagactcccctgactcgtgtaagaacgggcagctgcagatcctgtcagactttgaaaaggatgtggatctggcttgtcaaacagtgctgttcaaggaggtcaacacttgcaacccgtccaccatcacgggcacactatcccgcctgtccctggatgaggatgaggagcccaagtcctgcctcgtgggccctgagggcagcctcagcttctcaccactgcctgggaatatcctggtgcccatggcagcctcaccagggctgggggagcctccgcccccacaggaggccaaccctgtttacatgtgtggggagggtggcctgcggcagctggacctcacatggctgcggcccactgagccaggctctgagggagactacatggtgctgccccggcggactttgagcctgcagcctggcggtgggggtggaggtggtgaggatgcccccagggcccggccggaggggaccccccggcgagctgccaagacagtggcccacactgaaggctaccccagcttcctgtccgtggaccactcgggcctggggctgggccctgcctatggatctctccagaatccctatggaatgaccttccaaccgccaccgccgacacccagcgcccgccaagtgcccgagccaggggagcgcagccggaccatgcctcgcaccgtgcccggctctaccatgaagatgggctccctggagcgaaagaaattacggtattcagacctggactttgagaaggtgatgcacacccggaaacggcattcagaactctaccacgagctcaaccagaagttccacactttcgaccgctaccgcagccagtccacggccaaggataagcccagccctggggagcgccccagcttgtcccaacatcggcgccatcagagctggagcaccttcaaatctatgacactgggctcgctgccccccaagccccgagaacggctgactctgcaccgggcagcagcctgggagcccacagaaccaccggatggtgacttccagacagaggtgtgagtgccacgc

SEQ ID NO: 338518 - DNA, 4665 bp, Artificial Sequence
  derived and/or modified sequence
atgacccccgcctgccccctgctgctgagcgtgatcctgagcctgagactggccaccgccttcgaccccgcccccagcgcctgcagcgccctggccagcggcgtgctgtacggcgccttcagcctgcaggacctgttccccaccatcgccagcggctgcagctggaccctggagaaccccgaccccaccaagtacagcctgtacctgagattcaacagacaggagcaggtgtgcgcccacttcgcccccagactgctgcccctggaccactacctggtgaacttcacctgcctgagacccagccccgaggaggccgtggcccaggccgagagcgaggtgggcagacccgaggaggaggaggccgaggccgccgccggcctggagctgtgcagcggcagcggccccttcaccttcctgcacttcgacaagaacttcgtgcagctgtgcctgagcgccgagcccagcgaggcccccagactgctggcccccgccgccctggccttcagattcgtggaggtgctgctgatcaacaacaacaacagcagccagttcacctgcggcgtgctgtgcagatggagcgaggagtgcggcagagccgccggcagagcctgcggcttcgcccagcccggctgcagctgccccggcgaggccggcgccggcagcaccaccaccaccagccccggcccccccgccgcccacaccctgagcaacgccctggtgcccggcggccccgccccccccgccgaggccgacctgcacagcggcagcagcaacgacctgttcaccaccgagatgagatacggcgaggagcccgaggaggagcccaaggtgaagacccagtggcccagaagcgccgacgagcccggcctgtacatggcccagaccggcgaccccgccgccgaggagtggagcccctggagcgtgtgcagcctgacctgcggccagggcctgcaggtgagaaccagaagctgcgtgagcagcccctacggcaccctgtgcagcggccccctgagagagaccagaccctgcaacaacagcgccacctgccccgtgcacggcgtgtgggaggagtggggcagctggagcctgtgcagcagaagctgcggcagaggcagcagaagcagaatgagaacctgcgtgcccccccagcacggcggcaaggcctgcgagggccccgagctgcagaccaagctgtgcagcatggccgcctgccccgtggagggccagtggctggagtggggcccctggggcccctgcagcaccagctgcgccaacggcacccagcagagaagcagaaagtgcagcgtggccggccccgcctgggccacctgcaccggcgccctgaccgacaccagagagtgcagcaacctggagtgccccgccaccgacagcaagtggggcccctggaacgcctggagcctgtgcagcaagacctgcgacaccggctggcagagaagattcagaatgtgccaggccaccggcacccagggctacccctgcgagggcaccggcgaggaggtgaagccctgcagcgagaagagatgccccgccttccacgagatgtgcagagacgagtacgtgatgctgatgacctggaagaaggccgccgccggcgagatcatctacaacaagtgcccccccaacgccagcggcagcgccagcagaagatgcctgctgagcgcccagggcgtggcctactggggcctgcccagcttcgccagatgcatcagccacgagtacagatacctgtacctgagcctgagagagcacctggccaagggccagagaatgctggccggcgagggcatgagccaggtggtgagaagcctgcaggagctgctggccagaagaacctactacagcggcgacctgctgttcagcgtggacatcctgagaaacgtgaccgacaccttcaagagagccacctacgtgcccagcgccgacgacgtgcagagattcttccaggtggtgagcttcatggtggacgccgagaacaaggagaagtgggacgacgcccagcaggtgagccccggcagcgtgcacctgctgagagtggtggaggacttcatccacctggtgggcgacgccctgaaggccttccagagcagcctgatcgtgaccgacaacctggtgatcagcatccagagagagcccgtgagcgccgtgagcagcgacatcaccttccccatgagaggcagaagaggcatgaaggactgggtgagacacagcgaggacagactgttcctgcccaaggaggtgctgagcctgagcagccccggcaagcccgccaccagcggcgccgccggcagccccggcagaggcagaggccccggcaccgtgccccccggccccggccacagccaccagagactgctgcccgccgaccccgacgagagcagctacttcgtgatcggcgccgtgctgtacagaaccctgggcctgatcctgcccccccccagaccccccctggccgtgaccagcagagtgatgaccgtgaccgtgagaccccccacccagccccccgccgagcccctgatcaccgtggagctgagctacatcatcaacggcaccaccgacccccactgcgccagctgggactacagcagagccgacgccagcagcggcgactgggacaccgagaactgccagaccctggagacccaggccgcccacaccagatgccagtgccagcacctgagcaccttcgccgtgctggcccagccccccaaggacctgaccctggagctggccggcagccccagcgtgcccctggtgatcggctgcgccgtgagctgcatggccctgctgaccctgctggccatctacgccgccttctggagattcatcaagagcgagagaagcatcatcctgctgaacttctgcctgagcatcctggccagcaacatcctgatcctggtgggccagagcagagtgctgagcaagggcgtgtgcaccatgaccgccgccttcctgcacttcttcttcctgagcagcttctgctgggtgctgaccgaggcctggcagagctacctggccgtgatcggcagaatgagaaccagactggtgagaaagagattcctgtgcctgggctggggcctgcccgccctggtggtggccgtgagcgtgggcttcaccagaaccaagggctacggcaccagcagctactgctggctgagcctggagggcggcctgctgtacgccttcgtgggccccgccgccgtgatcgtgctggtgaacatgctgatcggcatcatcgtgttcaacaagctgatggccagagacggcatcagcgacaagagcaagaagcagagagccggcagcgagagatgcccctgggccagcctgctgctgccctgcagcgcctgcggcgccgtgcccagccccctgctgagcagcgccagcgccagaaacgccatggccagcctgtggagcagctgcgtggtgctgcccctgctggccctgacctggatgagcgccgtgctggccatgaccgacagaagaagcgtgctgttccaggccctgttcgccgtgttcaacagcgcccagggcttcgtgatcaccgccgtgcactgcttcctgagaagagaggtgcaggacgtggtgaagtgccagatgggcgtgtgcagagccgacgagagcgaggacagccccgacagctgcaagaacggccagctgcagatcctgagcgacttcgagaaggacgtggacctggcctgccagaccgtgctgttcaaggaggtgaacacctgcaaccccagcaccatcaccggcaccctgagcagactgagcctggacgaggacgaggagcccaagagctgcctggtgggccccgagggcagcctgagcttcagccccctgcccggcaacatcctggtgcccatggccgccagccccggcctgggcgagcccccccccccccaggaggccaaccccgtgtacatgtgcggcgagggcggcctgagacagctggacctgacctggctgagacccaccgagcccggcagcgagggcgactacatggtgctgcccagaagaaccctgagcctgcagcccggcggcggcggcggcggcggcgaggacgcccccagagccagacccgagggcacccccagaagagccgccaagaccgtggcccacaccgagggctaccccagcttcctgagcgtggaccacagcggcctgggcctgggccccgcctacggcagcctgcagaacccctacggcatgaccttccagccccccccccccacccccagcgccagacaggtgcccgagcccggcgagagaagcagaaccatgcccagaaccgtgcccggcagcaccatgaagatgggcagcctggagagaaagaagctgagatacagcgacctggacttcgagaaggtgatgcacaccagaaagagacacagcgagctgtaccacgagctgaaccagaagttccacaccttcgacagatacagaagccagagcaccgccaaggacaagcccagccccggcgagagacccagcctgagccagcacagaagacaccagagctggagcaccttcaagagcatgaccctgggcagcctgccccccaagcccagagagagactgaccctgcacagagccgccgcctgggagcccaccgagccccccgacggcgacttccagaccgaggtgtag

SEQ ID NO: 338519 - protein, 1466 aa, Artificial Sequence
  derived and/or modified sequence
MTPACPLLLSVILSLRLATAFDPAPSACSALASGVLYGAFSLQDLFPTIASGCSWTLENPDPTKYSLYLRFNRQEQVCAHFAPRLLPLDHYLVNFTCLRPSPEEAVAQAESEVGRPEEEEAEAAAGLELCSGSGPFTFLHFDKNFVQLCLSAEPSEAPRLLAPAALAFRFVEVLLINNNNSSQFTCGVLCRWSEECGRAAGRACGFAQPGCSCPGEAGAGSTTTTSPGPPAAHTLSNALVPGGPAPPAEADLHSGSSNDLFTTEMRYGEEPEEEPKVKTQWPRSADEPGLYMAQTGDPAAEEWSPWSVCSLTCGQGLQVRTRSCVSSPYGTLCSGPLRETRPCNNSATCPVEGQWLEWGPWGPCSTSCANGTQQRSRKCSVAGPAWATCTGALTDTRECSNLECPATDSKWGPWNAWSLCSKTCDTGWQRRFRMCQATGTQGYPCEGTGEEVKPCSEKRCPAFHEMCRDEYVMLMTWKKAAAGEIIYNKCPPNASGSASRRCLLSAQGVAYWGLPSFARCISHEYRYLYLSLREHLAKGQRMLAGEGMSQVVRSLQELLARRTYYSGDLLFSVDILRNVTDTFKRATYVPSADDVQRFFQVVSFMVDAENKEKWDDAQQVSPGSVHLLRVVEDFIHLVGDALKAFQSSLIVTDNLVISIQREPVSAVSSDITFPMRGRRGMKDWVRHSEDRLFLPKEVLSLSSPGKPATSGAAGSPGRGRGPGTVPPGPGHSHQRLLPADPDESSYFVIGAVLYRTLGLILPPPRPPLAVTSRVMTVTVRPPTQPPAEPLITVELSYIINGTTDPHCASWDYSRADASSGDWDTENCQTLETQAAHTRCQCQHLSTFAVLAQPPKDLTLELAGSPSVPLVIGCAVSCMALLTLLAIYAAFWRFIKSERSIILLNFCLSILASNILILVGQSRVLSKGVCTMTAAFLHFFFLSSFCWVLTEAWQSYLAVIGRMRTRLVRKRFLCLGWGLPALVVAVSVGFTRTKGYGTSSYCWLSLEGGLLYAFVGPAAVIVLVNMLIGIIVFNKLMARDGISDKSKKQRAGASLWSSCVVLPLLALTWMSAVLAMTDRRSVLFQALFAVFNSAQGFVITAVHCFLRREVQDVVKCQMGVCRADESEDSPDSCKNGQLQILSDFEKDVDLACQTVLFKEVNTCNPSTITGTLSRLSLDEDEEPKSCLVGPEGSLSFSPLPGNILVPMAASPGLGEPPPPQEANPVYMCGEGGLRQLDLTWLRPTEPGSEGDYMVLPRRTLSLQPGGGGGGGEDAPRARPEGTPRRAAKTVAHTEGYPSFLSVDHSGLGLGPAYGSLQNPYGMTFQPPPPTPSARQVPEPGERSRTMPRTVPGSTMKMGSLERKKLRYSDLDFEKVMHTRKRHSELYHELNQKFHTFDRYRSQSTAKDKPSPGERPSLSQHRRHQSWSTFKSMTLGSLPPKPRERLTLHRAAAWEPTEPPDGDFQTEV

SEQ ID NO: 338520 - protein, 847 aa, Artificial Sequence
  derived and/or modified sequence
GKGHRMTPACPLLLSVILSLRLATAFDPAPSACSALASGVLYGAFSLQDLFPTIASGCSWTLENPDPTKYSLYLRFNRQEQVCAHFAPRLLPLDHYLVNFTCLRPSPEEAVAQAESEVGRPEEEEAEAAAGLELCSGSGPFTFLHFDKNFVQLCLSAEPSEAPRLLAPAALAFRFVEVLLINNNNSSQFTCGVLCRWSEECGRAAGRACGFAQPGCSCPGEAGAGSTTTTSPGPPAAHTLSNALVPGGPAPPAEADLHSGSSNDLFTTEMRYGEEPEEEPKVKTQWPRSADEPGLYMAQTGDPAAEEWSPWSVCSLTCGQGLQVRTRSCVSSPYGTLCSGPLRETRPCNNSATCPVEGQWLEWGPWGPCSTSCANGTQQRSRKCSVAGPAWATCTGALTDTRECSNLECPATDSKWGPWNAWSLCSKTCDTGWQRRFRMCQATGTQGYPCEGTGEEVKPCSEKRCPAFHEMCRDEYVMLMTWKKAAAGEIIYNKCPPNASGSASRRCLLSAQGVAYWGLPSFARCISHEYRYLYLSLREHLAKGQRMLAGEGMSQVVRSLQELLARRTYYSGDLLFSVDILRNVTDTFKRATYVPSADDVQRFFQVVSFMVDAENKEKWDDAQQVSPGSVHLLRVVEDFIHLVGDALKAFQSSLIVTDNLVISIQREPVSAVSSDITFPMRGRRGMKDWVRHSEDRLFLPKEVLSLSSPGKPATSGAAGSPGRGRGPGTVPPGPGHSHQRLLPADPDESSYFVIGAVLYRTLGLILPPPRPPLAVTSRVMTVTVRPPTQPPAEPLITVELSYIINGTTDPHCASWDYSRADASSGDWDTENCQTLETQAAHTRCQCQ

SEQ ID NO: 338521 - DNA, 4401 bp, Artificial Sequence
  derived and/or modified sequence
atgacgcccgcctgccctcttttgctatctgttatcctctctctcaggttggcgacagccttcgaccccgcacccagcgcttgctccgcactcgcctcaggggtgctttatggagccttctccctccaagacctgtttccgacaatagcctccggttgcagctggaccctggagaatcctgacccgactaagtacagtttgtacctgaggttcaatagacaggagcaggtgtgcgcacacttcgccccccggttattgccacttgaccactatcttgtgaacttcacttgtttgagaccttctcccgaagaggctgtggcacaggctgagtccgaggttggcagaccagaggaagaagaagccgaggcagccgccggcctcgagctctgttctgggagtggaccttttaccttcctgcactttgacaagaacttcgtgcagctgtgtctgagcgctgagccatccgaggcgcctcggctgctagcacctgctgccctggcattccgctttgtggaggtcttactcattaacaataacaacagttctcagtttacatgcggcgtgctttgccggtggagcgaagaatgcgggagagctgcaggcagagcatgtggctttgcccaaccaggatgttcttgccccggggaggcaggagccggctcgacgactactacaagtcctggcccccctgccgcccatacgctgtcaaatgccctggtgccgggcggccccgcccctccggctgaagctgacctgcactccgggagctcgaacgatctgttcactactgagatgaggtacggcgaagagcccgaggaggagccaaaggttaagactcaatggcctaggtctgcagatgagccagggctgtacatggcccaaacgggggacccagccgcggaggaatggagtccttggtcggtctgctccttgacatgcggccagggtctgcaggtgcggacacgcagctgcgtatctagtccttacggaaccctgtgctccgggcccctgagggaaacccgaccctgtaataactccgccacctgtccagtggaggggcagtggctggaatggggcccatgggggccatgcagcacttcttgtgctaatggcacacagcagagatccagaaaatgcagcgtggccggacctgcctgggcaacatgcacaggcgccctaaccgacactcgagaatgcagtaacctcgagtgccctgccacagacagcaaatggggcccttggaacgcatggagtctatgttcaaaaacttgtgacacaggatggcaaaggcggttccgtatgtgccaggccaccggaacccaggggtacccatgcgaaggtaccggggaggaagtgaagccatgcagcgaaaagaggtgccccgcttttcatgagatgtgtagggacgagtacgttatgctgatgacatggaagaaggccgccgctggggaaataatctataataagtgccctccgaatgcctcaggcagtgcaagcagacgatgtttgcttagtgcccagggcgtcgcttattgggggcttcctagtttcgcgagatgcatatcccatgagtacagatacctctatctgtctctgagggagcacttggctaaaggacaaaggatgctcgccggggagggtatgtcacaggtagttcgctcactacaggagttgttggcgcgcaggacgtactattcaggggatctcttgttctccgttgacatccttcggaacgtgaccgacacctttaagcgagccacatacgttccctccgcagacgatgtacagcgctttttccaggttgtaagttttatggttgacgcggaaaacaaagagaagtgggatgatgcgcagcaggtgagtccaggctcagtccatcttctgagggtcgtcgaggacttcatccacctcgtgggggacgccctgaaagctttccagtcaagtttgatcgtgacagacaacctggtgatttcaattcaacgggagcccgtgagcgccgtgtcctcagatatcacatttcctatgcgaggcaggcgtggcatgaaggactgggtccgccacagcgaggacaggctgttccttcctaaggaagtgctgtccctcagcagtccaggaaaaccagcaacatccggggctgccggaagtccgggccgaggtcgaggcccaggcacagtgcccccaggccccggccatagccaccagaggctgctccccgcagacccagacgagtcttcatacttcgtgatcggggcagtgctgtaccgcacgctcgggcttatcctcccgcctccccggccacccctagccgttacctctagggttatgacagttactgtgcgcccccccactcaacctcctgcagagccccttattaccgtggaactgagctacatcataaatgggacgacggacccccactgtgcttcgtgggattactctcgcgcagatgcttccagtggtgactgggacactgagaactgtcagacactggagacacaggcagcacacacaaggtgtcaatgccagcacctgagcactttcgccgtgctggctcagccacctaaagatctcactctggagcttgctggaagcccttctgttcccttagtgatcggttgtgccgtgagttgtatggcgctcctgactctgctcgccatttacgcagcattttggcggttcataaaatccgagcgcagtattattctactgaacttctgtttgtcgattctggcttcgaatattttgatactggtggggcagtcaagagttctctcaaaaggagtgtgcaccatgaccgctgcattcctgcatttcttctttctgtctagtttctgttgggttttgacagaggcttggcagagctacctggcagtgattgggagaatgcgcacacgcctggtccggaaaagatttttgtgcttgggctggggcctgccagctctagtggttgcagtctctgtgggattcaccagaactaaagggtatggcactagctcctattgctggctctccctcgaaggcggactgttatacgcctttgtgggacccgccgctgtcatcgtgctggtgaatatgctcatcggaattattgtgtttaacaagctaatggcccgggacggcatctcagacaagtctaagaaacagcgtgcaggcgcctcactgtggtcaagctgcgtggttctgcccctcttggccctgacctggatgtcagcagtactcgcgatgaccgacaggcggtcggtgctctttcaggccttgttcgccgtgtttaactcagcgcaggggtttgtgatcaccgccgtgcactgctttttacgcagggaggtgcaggatgtcgtcaagtgtcagatgggggtctgcagggctgatgagagtgaggactcccctgattcctgcaaaaatggacagctgcagatcctgtccgatttcgagaaggacgttgatttagcctgtcaaacagtgctgttcaaggaagtgaatacctgtaacccatctaccattactggcacactgagccgtttaagcctggacgaagatgaggaacctaaaagttgtttagtgggacccgagggaagcctatcgttctccccccttcctggaaacatcctggtcccaatggccgcctctcctggcttgggcgaaccacctccaccccaggaggcaaaccctgtctatatgtgtggagagggaggattgaggcagctggaccttacctggcttcgtcctacggagcctggctctgagggggactatatggtactgccacgccggaccctctccttgcagcccggtggcgggggtggcggaggtgaggatgccccacgcgctagacccgaagggacaccccgcagggcagcaaagacagtcgcccacacagaagggtaccccagcttcctgtccgtcgatcactctggcttggggctgggacccgcctacgggtccctgcagaatccatatggaatgactttccaaccaccgccacctacgccctctgccaggcaagttcccgaacctggtgaaaggagccgtactatgcctcgaacagttccagggtctacaatgaagatgggatctttggaaagaaaaaaactgagatacagcgaccttgactttgagaaggtgatgcacacccgcaaaagacatagcgaactgtatcacgaattgaaccagaagttccacactttcgacagatatcggagtcagagcaccgccaaggataaaccatccccgggtgagaggccgtcactgagtcagcataggcgtcaccagagctggtcaacctttaaaagtatgactttgggatctcttccaccaaagccacgagagcgtctaacccttcatagggctgctgcctgggagcccacggagcccccagacggggacttccagacagaagtctag

SEQ ID NO: 338522 - DNA, 2544 bp, Artificial Sequence
  derived and/or modified sequence
gggaagggtcacaggatgacccctgcttgtccactgctcctttccgtgatcctttccctgagattggccactgcatttgacccagctccttcagcgtgcagtgccctggcatctggggtgttgtacggggcttttagcctgcaggatctcttcccaaccatagcttccgggtgttcttggacactggaaaatcctgacccaactaagtattcactttatctacgatttaaccgccaggagcaagtgtgcgcccatttcgccccgagactgttgccactggaccactaccttgtgaattttacatgtttgaggccttcaccagaggaagcggttgctcaggcagagtctgaggtgggccgaccagaggaagaggaggctgaagcagctgcgggactagaactttgctctgggagcgggccgttcacatttctgcattttgataagaactttgtgcaactgtgtctcagcgctgaaccctccgaagccccacgcctccttgcccccgctgcgctggcctttagattcgtggaggttctgttgattaataataataatagcagtcagttcacatgtggcgttctatgcaggtggtcagaggaatgcggacgggccgccgggcgagcatgtgggttcgctcaacccggatgctcttgtcccggagaggcgggagccggtagcaccacgactaccagtcctggaccacccgccgcgcacacccttagtaatgctttggtgcccgggggaccagcacctcccgccgaggcagatttacactccggtagcagtaacgatctatttaccaccgagatgcgctacggcgaagagccagaggaggagccaaaggttaagacccagtggcccagatcagcagacgagccaggcctttatatggcacagacgggggaccctgccgccgaggagtggtccccttggagcgtttgtagcctcacttgcggtcagggcctccaggtgagaacgagatcatgtgtcagctcaccatacggaaccctgtgctctgggccgctcagagagacacgaccatgtaataatagcgctacctgtcccgtggaaggtcagtggttggaatggggaccatgggggccgtgcagcacatcttgtgccaatggtacacagcagcgctcaaggaaatgttctgttgccggaccagcctgggcaacatgcactggggctctgactgatacacgggagtgcagcaatctagaatgtcctgctacagattctaagtgggggccatggaacgcctggtctttgtgctccaaaacctgtgacaccgggtggcagaggaggttccgcatgtgccaggcgaccggaacgcaaggctatccatgtgagggaacgggggaggaggtgaagccctgctcagagaaacgctgtccggccttccacgagatgtgcagagatgaatacgtgatgttaatgacctggaaaaaggcagctgccggggaaattatctataacaaatgtccgccaaatgcctcaggctctgcttcgaggcggtgtctcctgtccgcacagggagtggcctattgggggctgccctcatttgctagatgtatttcccacgaatataggtatctctacctgagtctccgtgagcacctagccaaaggccaacgtatgctcgcgggcgaaggtatgtcacaggttgtacgaagccttcaggagctgctggccagacgaacatactactcgggagatctcttgttttccgtcgatatactgcggaacgtgactgataccttcaaacgagccacatacgttccaagtgctgatgacgtacagcgattcttccaggtggtctcattcatggtggatgccgaaaacaaagagaaatgggacgacgcacaacaggtgagccctggctctgtgcacctgctgagggtggtagaagattttattcacctcgtaggggatgcgctcaaggccttccagtcctcactcatagtgaccgacaacctcgtgatctcaatccagcgggaaccggtgagcgcagtgtcctccgatatcacattcccaatgcgggggagaaggggaatgaaagactgggttagacacagtgaggatcgactcttccttccaaaggaagtcctgtctttgtcctcacccggtaagccagcaacctctggagctgcaggcagcccgggaagaggaaggggtcctgggacagtgccgcctggtcccggacacagtcatcagagactgctcccagccgatcctgacgagtcttcgtatttcgtcataggagctgtcctgtatagaacactagggcttatcttaccaccgcctagacctcccctcgcagtaacctcccgagtcatgacagtgacagtgaggccccccacccagccacccgcagagcccctgattacagttgaactgtcctacatcatcaacggaacaactgatcctcactgcgcttcatgggattattccagagccgatgcatcatccggggattgggatacagaaaactgtcagacactggagacccaggcggcgcacacacgctgtcagtgtcagtag

SEQ ID NO: 338523 - DNA, 4401 bp, Artificial Sequence
  derived and/or modified sequence
atgaccccagcctgccccctgctgctgagcgtcatcctgagcctgcggctggccacagcctttgatcctgcccccagcgcctgcagcgccctggccagcggcgtgctgtatggagccttcagcctgcaggacctcttccccaccatcgccagcggctgctcctggaccctggagaacccagaccccaccaagtacagcctgtacctgcgcttcaaccggcaggagcaggtgtgtgcccactttgccccccggctgctgcccctggaccactacctggtgaacttcacctgcctgcggcccagccctgaggaggccgtggcccaggccgagagcgaggtgggccggcctgaggaggaggaggccgaggccgctgctggcctggagctgtgcagcggcagcggccccttcaccttcctgcactttgacaagaactttgtgcagctgtgcctgtctgctgagcccagcgaggccccccggctgctggccccagctgccctggccttccgctttgtggaggtgctgctgatcaacaacaacaacagcagccagttcacctgtggggtgctgtgccgctggagcgaagaatgtggccgggccgccggccgggcctgtggctttgcccagcccggctgcagctgccctggagaggccggggccggcagcaccaccaccaccagccctggccccccagctgcccacaccctgagcaatgccctggtgcctgggggccctgcccccccagctgaggccgacctgcacagcggcagcagcaatgacctcttcaccacagagatgagatatggagaggagcctgaggaggagcccaaggtgaagacccagtggcccaggtctgcagatgagcccggcctgtacatggcccagacaggagaccctgctgctgaggagtggagcccctggagcgtgtgcagcctgacctgtggccagggcctgcaggtgaggaccaggagctgtgtgagcagcccctacggcaccctgtgcagcggccccctgcgggagacccggccctgcaacaacagcgccacctgccctgtggagggccagtggctggagtggggcccctggggcccctgcagcaccagctgtgccaacggcacccagcagaggagcaggaagtgcagcgtggccggccctgcctgggccacctgcaccggggccctgacagacacccgggagtgcagcaacctggagtgcccagccacagacagcaagtggggcccctggaatgcctggagcctgtgcagcaagacctgtgacaccggctggcagaggcgcttcaggatgtgccaggccaccggcacccagggctacccctgtgagggcaccggggaggaggtgaagccctgcagcgagaagcgctgcccagccttccacgagatgtgcagagatgaatatgtgatgctgatgacctggaagaaggctgctgctggggagatcatctacaacaagtgccccccaaatgccagcggcagcgccagccgccgctgcctgctgagcgcccagggcgtggcctactggggcctgcccagctttgcccgctgcatcagccatgagtaccgctacctgtacctgagcctgcgggagcacctggccaagggccagaggatgctggccggggagggcatgagccaggtggtgcgcagcctgcaggagctgctggcccggaggacctactacagcggggacctgctcttctctgtggacatcctgagaaatgtgacagacaccttcaagagggccacctacgtgcccagcgcagatgatgtgcagcgcttcttccaggtggtgtccttcatggtggatgctgagaacaaggagaagtgggatgatgcccagcaggtgtccccaggctctgtgcacctgctgcgggtggtggaggacttcatccacctggtgggagatgccctgaaggccttccagagcagcctcatcgtgacagacaacctggtgatcagcatccagcgggagcctgtgtctgctgtgtccagtgacatcaccttccccatgaggggccggcggggcatgaaggactgggtgcgccacagtgaagatagactcttcctgcccaaggaggtgctgagcctgagcagccctgggaagccagccaccagcggggctgctggcagccctggccggggccggggccctggcaccgtgcccccaggccctggccacagccaccagaggctgctgcctgctgaccctgatgagagcagctactttgtgattggagctgtgctgtaccgcaccctgggcctcatcctgcccccaccccggccccccctggccgtgaccagccgggtgatgacagtgacagtgcggccccccacccagcccccagctgagcccctcatcaccgtggagctgagctacatcatcaatggcaccacagacccccactgtgcctcctgggactacagcagagcagatgccagcagcggggactgggacacagagaactgccagaccctggagacccaggccgcccacacccgctgccagtgccagcacctgagcacctttgctgtgctggcccagccccccaaggacctgaccctggagctggccggcagccccagcgtgcccctggtgattggctgtgctgtgtcctgcatggccctgctgaccctgctggccatctatgctgccttctggaggttcatcaagtctgagaggagcatcatcctgctgaacttctgcctgagcatcctggccagcaacatcctgatcctggtgggccagagccgggtgctgagcaagggcgtgtgcaccatgacagctgccttcctgcacttcttcttcctgagcagcttctgctgggtgctgacagaggcctggcagagctacctggccgtgattggaaggatgaggacccggctggtgaggaagcgcttcctgtgcctgggctggggcctgcctgccctggtggtggccgtgtctgtgggcttcaccaggaccaagggctacggcaccagcagctactgctggctgagcctggagggcggcctgctgtatgcctttgtgggccctgctgctgtgattgtgctggtgaacatgctgattggcatcatcgtgttcaacaagctgatggccagagatggcatcagtgacaagagcaagaagcagagagctggggccagcctgtggagcagctgtgtggtgctgcccctgctggccctgacctggatgtctgctgtgctggccatgacagaccggcgctctgtgctcttccaggccctgtttgctgtgttcaacagcgcccagggcttcgtcatcacagctgtgcactgcttcctgcggcgggaggtgcaggatgtggtgaagtgccagatgggcgtgtgcagagcagatgaaagtgaggacagcccagacagctgcaagaatggccagctgcagatcctgagtgactttgagaaggatgtggacctggcctgccagacagtgctcttcaaggaggtgaacacctgcaaccccagcaccatcaccggcaccctgagccggctgagcctggatgaagatgaggagcccaagagctgcctggtgggccctgagggcagcctgtccttcagccccctgcccggcaacatcctggtgcccatggccgccagccctggcctgggggagcccccaccaccccaggaggccaaccctgtgtacatgtgtggggagggcggcctgcggcagctggacctgacctggctgcggcccacagagcccggcagcgagggggactacatggtgctgcccaggaggaccctgagcctgcagcccggcggcggcggcggcggcggagaagatgccccccgggcccggcctgagggcaccccaagaagagctgccaagacagtggcccacacagagggctaccccagcttcctgtctgtggaccacagcggcctgggcctgggccctgcctacggcagcctgcagaacccctacggcatgaccttccagcccccaccacccaccccatctgcccggcaggtgcctgagcccggggagaggagcaggaccatgcccaggacagtgcccggcagcaccatgaagatgggcagcctggagaggaagaagctgcgctacagcgacctggactttgagaaggtgatgcacaccaggaagaggcacagcgagctgtaccacgagctgaaccagaagttccacacctttgaccgctaccgcagccagagcacagccaaggacaagcccagccctggagagcggcccagcctgagccagcaccggcggcaccagagctggagcaccttcaagtccatgaccctgggcagcctgccccccaagccccgggagcggctgaccctgcacagagctgctgcctgggagcccacagagcccccagatggagacttccagacagaggtgtag

SEQ ID NO: 338524 - DNA, 2544 bp, Artificial Sequence
  derived and/or modified sequence
gggaagggccacaggatgaccccagcctgccccctgctgctgagcgtcatcctgagcctgcggctggccacagcctttgatcctgcccccagcgcctgcagcgccctggccagcggcgtgctgtatggagccttcagcctgcaggacctcttccccaccatcgccagcggctgctcctggaccctggagaacccagaccccaccaagtacagcctgtacctgcgcttcaaccggcaggagcaggtgtgtgcccactttgccccccggctgctgcccctggaccactacctggtgaacttcacctgcctgcggcccagccctgaggaggccgtggcccaggccgagagcgaggtgggccggcctgaggaggaggaggccgaggccgccgccggcctggagctgtgcagcggcagcggccccttcaccttcctgcactttgacaagaactttgtgcagctgtgcctgtctgctgagcccagcgaggccccccggctgctggccccagctgccctggccttccgctttgtggaggtgctgctgatcaacaacaacaacagcagccagttcacctgtggggtgctgtgccgctggagcgaggagtgtggccgggctgctggccgggcctgtggctttgcccagcccggctgcagctgccctggagaggccggggccggcagcaccaccaccaccagccctggccccccagctgcccacaccctgagcaatgccctggtgcctgggggccctgcccctcctgctgaggccgacctgcacagcggcagcagcaatgacctcttcaccacagagatgagatatggagaggagcctgaggaggagcccaaggtgaagacccagtggcccaggtctgcagatgagcccggcctgtacatggcccagacaggagaccctgctgctgaggagtggagcccctggagcgtgtgcagcctgacctgtggccagggcctgcaggtgaggaccaggagctgtgtgagcagcccctacggcaccctgtgcagcggccccctgcgggagacccggccctgcaacaacagcgccacctgccctgtggagggccagtggctggagtggggcccctggggcccctgcagcaccagctgtgccaacggcacccagcagaggagcaggaaatgttctgtggccggccctgcctgggccacctgcacaggagccctgacagacaccagagaatgtagcaacctggagtgcccagccacagacagcaagtggggcccctggaatgcctggagcctgtgcagcaagacctgtgacaccggctggcagaggcgcttcaggatgtgccaggccaccggcacccagggctacccctgtgagggcactggagaggaggtgaagccctgcagcgagaagcgctgcccagccttccacgagatgtgcagagatgaatatgtgatgctgatgacctggaagaaggctgctgctggggagatcatctacaacaagtgccccccaaatgccagcggcagcgccagccgccgctgcctgctgagcgcccagggcgtggcctactggggcctgcccagctttgcccgctgcatcagccatgagtaccgctacctgtacctgagcctgcgggagcacctggccaagggccagaggatgctggccggggagggcatgagccaggtggtgcgcagcctgcaggagctgctggcccggaggacctactacagcggggacctgctcttctctgtggacatcctgagaaatgtgacagacaccttcaagagggccacctacgtgcccagcgcagatgatgtgcagcgcttcttccaggtggtgtccttcatggtggatgctgagaacaaggagaagtgggatgatgcccagcaggtgtccccaggctctgtgcacctgctgcgggtggtggaggacttcatccacctggtgggagatgccctgaaggccttccagagcagcctgattgtgacagacaacctggtgatcagcatccagcgggagcctgtgtctgctgtgtccagtgacatcaccttccccatgagaggaagaagaggcatgaaggactgggtgcgccacagcgaggacaggctcttcctgcccaaggaggtgctgagcctgagcagccctgggaagccagccaccagcggggccgccggcagccctggccggggccggggccctggcaccgtgcccccaggccctggccacagccaccagaggctgctgcctgctgaccctgatgagagcagctacttcgtcatcggggctgtgctgtaccgcaccctgggcctcatcctgcccccacccaggcctcccctggccgtgaccagccgggtgatgacagtgacagtgcggccccccacccagcccccagctgagcccctcatcaccgtggagctgagctacatcatcaatggcaccacagacccccactgtgcctcctgggactacagcagagcagatgccagcagcggggactgggacacagagaactgccagaccctggagacccaggccgcccacacccgctgccagtgccagtag

SEQ ID NO: 338525 - DNA, 4401 bp, Artificial Sequence
  derived and/or modified sequence
atgacccccgcctgccccctgctgctgagcgtgatcctgagcctgcggctcgccactgccttcgaccctgccccatccgcatgtagtgcgttggccagcggagttctatacggggccttcagtctgcaagacctatttccaacaatcgcttcaggatgttcctggaccctggagaatcccgaccctacaaaatacagcctgtacctacgatttaaccgccaggagcaagtctgcgcccatttcgccccgagactgctgcccctggatcattatttggtgaacttcacatgcttgcgaccatctcctgaagaggcggtggcccaggctgagagcgaagttggaaggcccgaggaagaggaagccgaagctgctgccgggctggaactatgcagtgggagtggaccctttacttttctccacttcgataagaactttgtgcagctatgcctgtccgccgaacccagtgaggcgccacgactgctggcccccgcagctcttgcctttcggttcgtcgaagttctgctgatcaacaacaataattcaagccagttcacatgtggcgttctctgccgctggagtgaggagtgtgggcgagctgccgggagggcttgtggcttcgcgcagccggggtgcagctgcccaggcgaggccggcgcagggtccaccactacaacttctcccggacccccggccgcccatacactttcgaatgccctcgtgcccggcgggcctgccccccctgctgaggcagatctccattctggatctagtaacgatctcttcacaaccgagatgcggtatggggaggagcctgaggaagagcccaaggtgaagacacagtggccacggtccgcagatgaacccgggctctacatggcacagacaggggaccccgcagccgaagagtggagcccctggtcggtgtgctctctaacgtgcggacagggtctgcaggtgcgtacgaggtcatgtgtgagtagcccgtacggtactttgtgcagcggtccactcagagaaaccaggccatgcaacaactcggcaacctgtcccgtggagggacaatggctggaatggggtccatggggcccttgttccaccagctgcgctaacggcacccagcagagatcccggaagtgctcagtggccggccctgcgtgggcaacatgcaccggcgccctgaccgacactagggagtgctctaacttagagtgtcccgccaccgattcgaagtgggggccatggaacgcctggagtctatgtagcaagacctgcgatactggctggcagaggaggtttaggatgtgtcaggccaccggtactcaaggttatccatgtgagggaactggagaggaggttaagccttgtagcgagaagcggtgccccgcctttcacgaaatgtgtcgggacgaatatgttatgctgatgacctggaagaaggccgccgccggcgaaatcatctacaataaatgccctcctaatgcttcgggctccgcttcccggcgatgcctgctgagtgcacagggcgtggcctactggggtctcccgtccttcgcacggtgcatcagccacgagtatcgctatctttacttgagtcttagggaacacctggcaaaggggcagcgtatgctcgccggggaggggatgtctcaggtggtccgtagccttcaggaactgctggcgcgcagaacatactatagtggagatctactattcagtgtggatattcttcggaatgttactgacacctttaaacgcgctacatacgtgccctctgctgatgacgtgcagaggttcttccaggtggtgtcatttatggtggatgccgagaacaaagagaagtgggacgacgcacagcaggtgtccccaggctctgttcatttacttcgcgtcgtagaggacttcattcacctggtgggggacgcgctgaaagcattccagtcttccctcattgttaccgacaacctggtgatctccatccaacgagagcccgttagcgctgtctcttcagatattacgttccctatgcgtggtcgcagagggatgaaggattgggttaggcacagtgaggaccggctctttttgccgaaggaggtgctttcgctcagctcgccaggaaaacctgccacctccggggccgccggctcaccgggccggggccgcggcccagggactgtgcctccaggccccgggcattcccaccagcgacttctgcctgctgaccctgatgaatcttcctattttgttataggagccgtcctgtatcggacactgggcctgatcctaccgccccctagaccaccactcgccgtcacaagccgggtcatgactgtgacagtgcggccacctacgcagccaccagccgagcccctcatcaccgtggagctgagctatattatcaatggaacaaccgacccacattgtgctagctgggactattctcgcgctgatgctagtagtggtgactgggacaccgagaattgccagacgctggagacccaagcagcccacacacgttgccaatgtcagcacctgtcaactttcgcggtgctagcccagcctcccaaggacctaacactggaactggctggatcccccagcgtgcccttagtaattggctgtgctgtgtcgtgtatggcgctactgacactcctggccatctacgctgccttctggcgtttcattaagagtgaaaggtctataatccttcttaacttttgcctctctatcttggcatcaaacatccttattctagttggtcagagccgggtcttatctaagggagtgtgcaccatgacagccgcattccttcacttcttcttcttgtctagtttctgttgggtgttaaccgaggcttggcagtcctatctagctgtgattggaagaatgaggacccgactcgtccggaagcgatttctctgcctgggatggggcctcccagctttagtggttgccgtgtcagtggggtttacccgcacaaagggctacggaacctcctcatattgctggctgagccttgagggaggactgctgtatgcctttgttggacctgccgcagtcatcgtcctggtgaatatgctcataggcataatcgtgtttaataagttgatggccagggacggcataagcgataagtccaaaaaacagagagctggggcctcactctggagtagttgtgtagtgctgcccttactggctctgacctggatgtcagccgtgctggctatgacagacaggaggtccgtgctgtttcaggccctttttgccgtcttcaatagcgctcagggtttcgtgattacagctgttcactgctttttgagaagagaagtacaggatgtcgtcaaatgtcagatgggagtatgtagagccgacgagtccgaagacagcccggactcgtgcaaaaatggccagctgcaaatcctctccgacttcgagaaagatgtggacctagcttgccagacagtactttttaaggaggtcaacacatgtaatccctctacgattaccgggaccttatctaggttgtctctggatgaagacgaggagccaaaatcatgccttgtcgggccggaagggagcctttcctttagcccattgccaggaaacatactagttccaatggctgctagcccaggactgggcgagccacctccaccacaagaggctaacccagtgtatatgtgtggggaaggcggactcaggcagcttgatctcacgtggttgaggcctacagagccaggctcagaaggagactatatggtgttgccaaggagaaccctgagcctgcagccaggcgggggtggcggtggaggcgaggatgcacctcgcgcacgacccgagggaacccccaggagggctgccaaaacagttgctcacacggagggataccctagtttcctatcggtcgatcactcaggcctcggtcttggcccagcctatggctccctgcagaacccatacggtatgaccttccagccacctcctccgacccccagcgctcgacaggtgcccgagccaggcgagagatcaagaactatgccgcggaccgtccctggaagtacgatgaaaatggggagcctggaaagaaaaaagctgaggtattccgatctggattttgagaaagttatgcacacccgcaagcggcattccgagctgtaccacgagctgaatcaaaagtttcatacctttgatagatatagaagtcaatcaacggcaaaggataaaccctccccgggggagaggccatctctttcgcaacacaggcgccatcaaagctggagcactttcaaatcgatgactctgggatctttaccaccaaaaccaagagaacgccttacactgcacagagctgccgcttgggaacccaccgaaccgcccgacggggacttccagacggaagtctag

SEQ ID NO: 338526 - DNA, 2544 bp, Artificial Sequence
  derived and/or modified sequence
ggcaagggccaccggatgacccccgcctgccccctgctgctgagcgtcattctatccctgaggctagccactgcctttgatcccgccccctcagcctgtagcgccttggcttccggcgtactgtacggggcctttagtctgcaggacctttttccaactatcgccagcggctgtagttggactttggagaatcccgacccgaccaagtactccctctacctaaggttcaatcgacaggaacaggtttgcgctcacttcgcacctcgcctactcccgctggatcactacctagtgaactttacttgtctgaggccctcacctgaggaagccgttgctcaggctgagtctgaggtagggcggccagaggaggaggaagctgaggcagctgcaggtctggagctgtgtagtggaagtggaccttttaccttcctgcatttcgacaaaaattttgtacaactatgtctgtctgctgagccatccgaagctccacgcctcctggccccagccgccctggcctttagattcgtcgaagtgctccttatcaacaataacaatagctcccaattcacctgcggtgtgctctgccgctggagcgaggagtgcgggcgcgctgctggccgagcttgtggctttgctcagccaggctgtagttgtcctggggaagccggggctggatcgaccacaaccacctcacccggtccacctgccgctcacaccctgtccaacgcacttgttcccggggggccggctccccccgcggaagccgacttgcattcaggctcctccaacgatctcttcactaccgaaatgcggtatggggaggagcctgaggaagagcctaaggtgaaaacacaatggccacgatctgccgacgagcccgggctgtacatggcacagaccggtgatccggctgctgaggagtggtcaccatggagtgtgtgttcattaacatgtggccaaggcctccaggtgcgcacccgaagttgtgtgagttccccttacggcacgctttgtagcggtccacttcgagagacccgaccttgtaataattccgccacatgccctgtcgaaggacagtggttggagtggggaccctgggggccttgtagcacttcctgtgctaacggaactcagcagcgcagcaggaagtgctctgtagccgggcctgcttgggccacctgcacaggggccctcacggatacaagggaatgcagcaacctggagtgtcccgcaacagacagtaagtggggaccctggaacgcctggagtttgtgttctaagacatgcgatactggatggcagcgacggttccgaatgtgtcaggccacaggaactcagggctacccttgtgagggtacgggtgaggaggtcaagccatgctctgagaagcgttgtccagcctttcatgaaatgtgtagggatgagtacgttatgctgatgacctggaagaaggcagctgccggggaaattatctataataagtgcccaccaaacgcatcaggcagcgccagcagaagatgcctccttagtgcccaaggggtcgcctactggggtctgccatcgttcgctaggtgcatctcacatgaataccgatacctttacctcagcctgcgggagcatctggctaagggccagaggatgctggccggcgaagggatgtcacaggtggtacgtagcctccaagaactcctagcacgtcggacctactatagtggtgatttgcttttttcggtagacattctccgcaatgtcacagacacattcaaacgcgccacctacgttccatcggccgatgacgtccagcgattcttccaagtggtaagctttatggtggatgctgaaaacaaggaaaaatgggatgatgcacagcaagtctcacccggctccgtgcatcttttgcgcgttgtggaggatttcattcacctggtgggagacgccctcaaagcattccagtcctctctgatcgtgacggataacttagtcatctccatccagcgtgagccagtgtctgccgtcagctcagacatcacattcccaatgcggggcaggcgtgggatgaaggactgggtaaggcatagcgaagacaggttgttcttaccaaaggaggttctgagcctctctagcccgggcaagcccgccacatctggggctgcaggttctcccgggcgagggcggggtccgggaaccgtgccacctggaccggggcacagccaccagaggcttctgcccgccgatccagacgagtcgtcatatttcgtaatcggtgccgtactctatagaactcttggactcatactgcccccacccaggccacctcttgccgtgacaagtcgggttatgacagtgaccgtgagacccccaacccagccgccagctgagcctttgatcacggttgaattaagctacattattaatggaaccacggatccacactgcgccagctgggactacagtagggccgatgcttcctcgggggactgggacaccgaaaattgccagacactagaaacacaagccgcgcacactcgatgtcaatgccagtag

SEQ ID NO: 338527 - DNA, 4401 bp, Artificial Sequence
  derived and/or modified sequence
atgactccagcatgtcccctgctgctaagcgtgatccttagtttacggctagcaactgccttcgacccagccccatccgcctgttcagctctcgcctccggggtgctctatggggctttcagcttacaggacctgttccccactattgcatcgggatgttcatggaccttggagaaccccgatcccacaaagtactctctttacttgagatttaaccggcaagagcaggtctgtgctcactttgccccacggcttttacccctagaccactatctggtgaatttcacctgcttgcgcccttcccctgaagaggccgtggcgcaggccgagtccgaagtcggacgaccagaggaagaagaggctgaagccgcagcgggtctggagctctgctctgggagcggaccattcacttttttgcacttcgacaagaacttcgtccagctgtgcctgtcagctgagccgtctgaggcaccgaggctgctggccccagcggcactcgcattcagattcgtggaagtcctcctgatcaacaacaataactcatctcaatttacgtgtggggtcctctgtcggtggtccgaggaatgtggaagagccgcaggtcgtgcctgtgggtttgctcagcccggttgttcatgtcccggtgaagccggagccggatccacgacaacaacatcacccggacccccagcagcccacactctgtcaaatgccctggtgccaggcggacccgctcctccggctgaagctgaccttcactcaggttcaagcaatgacctcttcacgactgagatgaggtatggcgaagaacctgaagaggaaccaaaagtgaagacacagtggcccagaagcgctgacgaacctgggctgtacatggcccagacaggagatcccgctgccgaagagtggtctccatggtccgtctgtagtctaacttgtggtcaaggcctccaagtgcgaacacggtcatgcgtgagctccccgtacggaactctgtgttccggccctttacgggaaacgcggccttgcaacaacagtgctacctgccccgtggagggccaatggctcgagtggggcccatggggcccttgttcaacatcctgcgcaaatggaacccagcagcgctctcgtaaatgctctgtagcgggacccgcttgggcaacgtgtacgggtgccctcacagatactagggagtgctctaacctcgagtgccctgcgaccgactctaagtggggtccttggaacgcatggtccctgtgctcgaagacatgtgacactggttggcaacggcgtttccgaatgtgccaggcaacaggtactcagggctatccttgcgaagggacaggggaagaggtgaaaccttgctcagaaaagaggtgtcctgccttccacgaaatgtgcagggacgagtatgtgatgctgatgacatggaagaaggcagctgccggagagatcatctacaacaaatgtccacccaatgcaagcggctctgctagccggagatgccttctgagcgcccagggggttgcttactgggggctgcccagcttcgctcgctgtatttcccatgagtatcggtacttatacctatcgcttcgcgagcacctggcaaagggacaaagaatgcttgcaggggaagggatgagtcaagtagtcaggagtctacaggagttgctggcgaggcggacatactatagcggcgacctcctcttctccgtggacatactgagaaacgtgacagatacatttaagagagccacatacgttcccagtgccgacgacgtgcagagattcttccaggtggtgtcatttatggtagacgccgagaacaaagagaagtgggatgatgcccaacaggtttcccctggcagcgtgcatttgctgcgcgtggtggaagactttatccatcttgtaggggacgcactgaaggccttccagtcgagcctcatcgtgacagacaacctggtgataagtatccagcgcgagccagtctccgcagttagttctgacattaccttcccaatgcggggacggcgtggcatgaaggactgggtgaggcattccgaggatcgactttttttgcccaaggaagtgttgagcctttcctccccaggaaagcccgctacttccggcgcagccggttccccaggtagaggccgaggccctggaacagtcccaccaggcccagggcatagtcatcagcgcttacttccagcagaccctgatgagagctcctactttgttatcggagccgttctgtaccggaccctggggctgattttgcctcctccacggcctccacttgctgttacaagtagagtcatgactgtgacagtccggccaccgactcaaccccctgccgagcccctgataactgtcgaactttcatatataattaatggaaccacagatccacactgcgcatcctgggactactccagggcagatgccagctccggcgattgggatacagagaactgtcagactcttgagacccaagccgctcataccagatgccagtgtcagcacctctcgacattcgcagtactcgcccagcctcctaaagatctgactctggaacttgccggatccccatccgttccgctggtgattggctgcgccgtcagttgcatggccctcctgacccttctagccatttatgctgcattttggcggtttattaagtccgagagatccattatcttactgaatttctgcctgtctattctggccagcaacatccttatcctagtaggacagagtcgggttctttcaaagggcgtatgcacgatgacagctgctttcctgcactttttcttcttaagctctttctgctgggtccttacggaagcttggcagtcctaccttgctgttatcgggagaatgaggacacgactcgtacgtaagcgctttctatgtttgggatgggggctccctgctctggtagtagccgtctctgttggatttactcgtacaaagggctacggtacgtcctcctactgctggctctcactggagggcggactcttatatgcatttgtgggaccagctgcagtcatcgtgctggtgaacatgctgatcgggatcattgtcttcaacaagctgatggccagagatggaatttccgataaatctaagaaacaacgggcaggagcgagtctctggtcatcctgcgtggttcttcccttacttgccctgacttggatgagcgccgtgctggcaatgacagatcgcaggtccgtactcttccaggcgctcttcgccgtcttcaatagcgcacaggggttcgtgataactgcagtgcactgttttctgagaagggaggtgcaagatgtggtgaaatgtcaaatgggggtgtgtcgcgcagacgaaagtgaagactctcccgactcttgtaagaacggtcaactccagatcctttcagactttgagaaggacgtcgatcttgcatgtcagaccgtgctgtttaaagaagtgaacacgtgcaatccgtcaaccattactggaactttatcgcgactatcgctggacgaggatgaggagcctaaaagctgtctggtgggccctgagggttctctgagcttctcgcctcttcccggtaatatcctagtcccaatggctgcttcacctggcctcggagaaccacccccaccccaagaagcaaacccagtctacatgtgcggcgaaggcggactgcggcagttagatctgacttggctgcgtcccacagagcccggaagtgagggagactatatggttctccctcggagaaccttatcacttcagccaggagggggtggaggcggaggtgaagatgctccacgcgctcgtccagagggcacaccaaggcgggcagccaagaccgtagcccacaccgagggctatcctagtttcctgagtgtagatcattcaggattaggccttggacccgcatatgggagcctacagaacccctatggaatgaccttccagcccccacctccgactccttcagccagacaggtcccagagcctggggagcggagtcgtacaatgccaaggacggttccaggatctaccatgaagatgggctctctggagcgtaagaagctacggtattctgatttagacttcgagaaggttatgcacacacgcaagaggcatagcgaactctaccatgagctcaatcagaaatttcatacattcgataggtacagatcacagtcgactgcgaaggataaaccatcccccggtgagcgccctagccttagccagcacaggcggcaccagtcctggagcactttcaagagcatgacactgggaagtctacctcccaaaccacgggagcgtctgacattacatcgggcagctgcgtgggagcctaccgagcctccggacggagactttcagactgaggtatag

SEQ ID NO: 338528 - DNA, 2544 bp, Artificial Sequence
  derived and/or modified sequence
ggcaaggggcaccggatgacacccgcttgcccgctgcttctcagcgtcatcttgtcattgcggctggcaacagccttcgatcctgcaccgtctgcctgctccgcgcttgctagcggagttctctatggggcattcagtcttcaagatctgttccctactatcgcctcagggtgttcttggacactcgagaatcccgacccaaccaaatacagcctgtatcttcgtttcaaccggcaggagcaggtttgtgcccacttcgccccacgtctccttcctttggatcattatctggttaactttacctgtctgagacctagccctgaagaggccgtcgcacaggccgagagcgaagtcggtcgccctgaggaagaagaagccgaggcagccgcaggcctagagctctgtagtggctccgggcctttcacttttctgcattttgacaaaaatttcgtgcaactctgtttgtccgcagagccgagtgaggcacctcgcctcttagctccggcagccctggcttttcggttcgtggaggtgctattgattaataataacaacagttctcagttcacctgtggcgtgctatgtcgatggagtgaggagtgtggcagggccgcaggaagggcctgtggtttcgctcaacctggttgttcgtgccccggagaagccggtgcaggatccactacaaccaccagccccggaccaccggctgctcataccctgagcaatgctctggtccctggaggcccagcgcctccagcagaagctgacttgcactccgggtccagtaacgatctatttaccaccgagatgaggtatggcgaggaacccgaagaagagccgaaggtcaagactcagtggcctcggtcggcggatgaacctgggctttacatggcccagacaggggatcccgcagccgaagaatggagcccatggtctgtgtgtagtttaacttgcggccagggccttcaagtacggactcgcagctgtgtgtctagcccatacgggactctctgttctggtccactgagggagacccggccatgcaacaacagtgctacttgtccagtcgaaggacagtggctggagtggggaccgtggggcccttgcagcacatcctgcgctaacggcacccaacagaggagccggaagtgtagtgttgccggacccgcttgggccacgtgcaccggggcactaactgacactagagaatgtagtaacctggaatgcccggcaacagactcaaagtggggaccatggaatgcctggtccctatgtagtaagacctgtgacaccggctggcagagacgcttccgcatgtgccaagcaacagggacccagggctacccttgtgagggcacgggtgaggaagtgaagccttgctctgagaagcgttgcccggcattccatgaaatgtgtcgggacgagtatgttatgctgatgacctggaaaaaggcggcagcaggagagataatctataacaaatgccctcctaacgctagcggctccgccagtaggcgctgtctcctttccgcccagggtgtggcctactggggactcccatctttcgctcggtgtataagtcatgagtacagatatctgtacctgagccttagagagcacctggctaagggacaaaggatgctcgccggagagggtatgtcacaggtagtaaggtcactgcaggagctgctcgcacgcaggacttactactctggcgatttgctcttctccgtcgacatcctgaggaacgtgacagatacattcaagcgcgctacttatgtgcccagcgcggacgacgtgcagcggtttttccaggtggtcagcttcatggtggatgcggagaataaggagaaatgggacgatgcccagcaggtgtcgccaggctctgtccatttgcttcgcgtagtcgaagactttatccatctggtgggtgatgcattgaaagcgtttcaatccagcttgatcgtgaccgacaacctcgttatttccatccagcgcgaaccggtctcagctgttagcagcgacataaccttcccgatgaggggcagacgaggtatgaaggattgggtacggcactccgaggaccgcctttttcttcccaaagaggtgctgtctctttcctcaccaggtaagcccgctacgtcaggtgctgctggctctccgggacgaggccgtggtccaggaactgtgccccctgggcctggacacagccatcaacggctcctgccggctgaccccgacgaaagttcctactttgttattggcgctgtgctttataggactctcgggctgatattgccccctcctcgtcccccactcgcggtcacttctcgcgtcatgactgtgacagtcagaccacccacacagcctcccgcagaaccgctgattactgttgaactgagctatatcataaacggcacaaccgatccgcactgcgccagttgggattactctcgagcggacgcttcgtctggagactgggatacggaaaactgtcagacactcgagacacaggccgctcacacaagatgccagtgccagtag

SEQ ID NO: 338529 - DNA, 5176 bp, Artificial Sequence
  derived and/or modified sequence
actcggcccggcgcgcgctgcgggcagcggccggagcggccggaggaaccgggttcggcggcagcggcggcggcgctcagagaccgaagaggatgcggcaccggctctcagagcccggggctgcggccgccgcccgcaaataggaggcggcgcgcggcgcgggcggtgctcggggcgggggagcgggggagcggggggcggcgcggcaaggaggcggcggcggcggcggcggcaggagcccgcgcccggcccggcgccgcccgcccgcccgccccgcgctgctccgcggcgccttttctgcacccgccgcccgggagagcgggagcctcggccctccgcgcggctgcagctacctaccctgcgcccggcccggtccccgacttagggatggcaaacttgcgccccgtggccgcccccgccagcgccggcccccgctcctgctgctgacggcgcccagggcaagggacataggatgaccccagcctgtcccctcttactgtctgtgattctgtccctgcgcctggccaccgccttcgaccccgcccccagtgcctgctctgccctggcctcgggtgtgctctacggggccttctcgctgcaggacctctttcctaccatcgcctcgggctgctcctggaccctggagaaccctgaccccaccaagtactccctctacctgcgcttcaaccgccaggagcaggtgtgcgcacactttgccccccgcctgctgcccctggaccactacctggtcaactttacctgcctgcggcctagccccgaggaggcggtggcccaggcggagtcagaggtggggcggccagaagaggaggaggcagaggcggcagcggggttggagctgtgcagcggctcaggcccctttaccttcctgcacttcgacaagaacttcgtgcagctgtgcctgtcggctgagccctccgaggccccgcgcctgctggcgcccgctgccctagccttccgctttgtcgaggtcttgctcatcaacaacaacaactctagccaattcacctgtggtgtgctctgccgctggagtgaggagtgtggccgcgctgccggcagggcctgcggctttgctcagccaggctgcagctgccctggagaggcgggggccggctccaccaccaccacatctccaggccctcctgctgcccacaccctgtccaatgccctggtgcccgggggcccagccccacctgctgaggccgatttgcactcggggagcagcaatgatctgttcacaaccgagatgagatatggtgaggagccggaagaggaaccgaaagtgaaaacccagtggccgaggtctgcagatgagcctgggctatacatggcgcagacaggcgacccggcggctgaggagtggtccccgtggagcgtgtgttccctgacgtgtgggcagggtctgcaggtgcggacccgctcctgtgtgtcctccccctatgggaccctgtgcagcgggcccctgcgggagaccaggccctgcaacaattcagccacctgcccagtggaaggccagtggttagaatggggtccctggggcccatgctccacgtcctgtgccaatgggacccaacagcgcagccggaagtgcagcgtggcgggcccagcctgggccacatgcacgggtgccctcactgacacccgggagtgcagcaacctcgagtgcccggccactgatagcaagtgggggccatggaatgcgtggagcctgtgctctaagacgtgtgacacaggctggcagcgccgcttccgcatgtgccaggccacgggcacgcagggctacccctgcgagggcaccggagaggaggtgaagccttgtagtgagaagaggtgtccagccttccatgagatgtgcagggatgagtacgtgatgctgatgacgtggaagaaggcagctgctggcgagatcatctacaacaagtgccccccgaatgcctcagggtctgccagccgccgctgtctcctcagtgcccaaggcgtggcgtactgggggctgcccagctttgctcgctgcatctcccatgagtaccgctacctgtatctgtcacttagggagcacctggccaaggggcagcgcatgctggcaggcgagggcatgtcgcaggtggtgcgcagcctgcaggagctactggcccggcgcacctactatagtggggacctgctcttctctgtggacattctgaggaatgtcactgacacctttaagagggccacctacgtgccctcggctgatgatgtgcagcgcttcttccaggtggtgagcttcatggtggatgcggaaaacaaggagaagtgggacgatgctcagcaggtgtcccctggctctgtgcacctgctccgtgtcgtggaggacttcattcacctggtgggcgatgctctcaaggccttccagagctctctgattgtcacagataatctagtgatcagcattcagcgagagcccgtctcagctgtgtccagtgacatcacgttccccatgcggggccgccggggcatgaaggactgggtgcggcactcagaggaccgcctcttcctgcccaaggaggtgctcagcctctcctccccagggaagccagccacatctggggcagcaggcagccctggcagggggaggggcccaggaacggtgcctcctggcccaggccactcccaccagcgcctcctcccagcagaccctgatgagtcctcctactttgtgatcggtgctgtactctaccgcacccttggcctcatcctgccgcctcccaggcccccgctggccgtcacatcccgggtgatgacagtgactgtgcgcccccctacccagcctccagctgagcccctcatcactgtggagctctcctacatcatcaatgggaccacggatccccattgcgccagctgggactactccagagcagatgccagctcaggagactgggacactgaaaattgccagaccctggagacccaggcagctcacacccgctgccagtgccagcacctgtccacctttgctgtactagcccagccgcccaaggacctgaccctggagctggcgggctccccctcggtccccctggtgatcggctgtgcagtgtcgtgcatggcgctgctcaccctgctcgccatctatgccgccttttggaggttcataaaatctgaacgctccatcatcttgctgaacttctgcctgtccatcttggcatccaacatcctgatcctcgtgggccagtcccgggtgctgagcaagggcgtgtgcaccatgacggctgccttcctgcacttcttctttctctcctccttttgctgggtgcttaccgaggcctggcagtcctacctggctgtcattgggcggatgcgcacccgcctcgttcgcaagcgcttcctctgcctgggctggggtctgcctgccctggtggtggccgtgtctgttggctttacccgaacgaaaggatacggtacatccagctactgctggctctccctggagggcggcctgctctacgcctttgtgggccctgcagccgtcattgtcctggtgaacatgctcatcggaatcatcgtcttcaacaagctcatggcacgtgatggcatctccgacaaatccaagaagcagagggccggggcctcactctggagctcctgcgtggtgctgcccctgctggcgctcacctggatgtctgccgtcctggctatgacagaccgccgttccgtcctcttccaggccctctttgctgtcttcaactccgcgcagggctttgtcatcactgctgtgcactgcttcctgcgccgagaggtccaggatgtggtgaagtgccagatgggggtgtgccgggctgatgagagcgaagactcccctgactcgtgtaagaacgggcagctgcagatcctgtcagactttgaaaaggatgtggatctggcttgtcaaacagtgctgttcaaggaggtcaacacttgcaacccgtccaccatcacgggcacactatcccgcctgtccctggatgaggatgaggagcccaagtcctgcctcgtgggccctgagggcagcctcagcttctcaccactgcctgggaatatcctggtgcccatggcagcctcaccagggctgggggagcctccgcccccacaggaggccaaccctgtttacatgtgtggggagggtggcctgcggcagctggacctcacatggctgcggcccactgagccaggctctgagggagactacatggtgctgccccggcggactttgagcctgcagcctggcggtgggggtggaggtggtgaggatgcccccagggcccggccggaggggaccccccggcgagctgccaagacagtggcccacactgaaggctaccccagcttcctgtccgtggaccactcgggcctggggctgggccctgcctatggatctctccagaatccctatggaatgaccttccaaccgccaccgccgacacccagcgcccgccaagtgcccgagccaggggagcgcagccggaccatgcctcgcaccgtgcccggctctaccatgaagatgggctccctggagcgaaagaaattacggtattcagacctggactttgagaaggtgatgcacacccggaaacggcattcagaactctaccacgagctcaaccagaagttccacactttcgaccgctaccgcagccagtccacggccaaggataagcccagccctggggagcgccccagcttgtcccaacatcggcgccatcagagctggagcaccttcaaatctatgacactgggctcgctgccccccaagccccgagaacggctgactctgcaccgggcagcagcctgggagcccacagaaccaccggatggtgacttccagacagaggtgtgagtgccacgctggactgcccactgcatataaatatatatatctctctattttcacactccactttggaactacccaggagccagcgccctctcccctctcccgagggctgggcagggaggcgccgtggactcagccaggctgggggagccggacatggcttggcctggggtcccagggcccttccttgtttctcagaggcccctcagccactggaaccccatcttcagcccagcctgtccgtccctgtcccgggctggggaggggggaggggaactttgttgggaataaacttcactctgtgga

SEQ ID NO: 338530 - DNA, 2541 bp, Artificial Sequence
  derived and/or modified sequence
ggcaagggacataggatgaccccagcctgtcccctcttactgtctgtgattctgtccctgcgcctggccaccgccttcgaccccgcccccagtgcctgctctgccctggcctcgggtgtgctctacggggccttctcgctgcaggacctctttcctaccatcgcctcgggctgctcctggaccctggagaaccctgaccccaccaagtactccctctacctgcgcttcaaccgccaggagcaggtgtgcgcacactttgccccccgcctgctgcccctggaccactacctggtcaactttacctgcctgcggcctagccccgaggaggcggtggcccaggcggagtcagaggtggggcggccagaagaggaggaggcagaggcggcagcggggttggagctgtgcagcggctcaggcccctttaccttcctgcacttcgacaagaacttcgtgcagctgtgcctgtcggctgagccctccgaggccccgcgcctgctggcgcccgctgccctagccttccgctttgtcgaggtcttgctcatcaacaacaacaactctagccaattcacctgtggtgtgctctgccgctggagtgaggagtgtggccgcgctgccggcagggcctgcggctttgctcagccaggctgcagctgccctggagaggcgggggccggctccaccaccaccacatctccaggccctcctgctgcccacaccctgtccaatgccctggtgcccgggggcccagccccacctgctgaggccgatttgcactcggggagcagcaatgatctgttcacaaccgagatgagatatggtgaggagccggaagaggaaccgaaagtgaaaacccagtggccgaggtctgcagatgagcctgggctatacatggcgcagacaggcgacccggcggctgaggagtggtccccgtggagcgtgtgttccctgacgtgtgggcagggtctgcaggtgcggacccgctcctgtgtgtcctccccctatgggaccctgtgcagcgggcccctgcgggagaccaggccctgcaacaattcagccacctgcccagtggaaggccagtggttagaatggggtccctggggcccatgctccacgtcctgtgccaatgggacccaacagcgcagccggaagtgcagcgtggcgggcccagcctgggccacatgcacgggtgccctcactgacacccgggagtgcagcaacctcgagtgcccggccactgatagcaagtgggggccatggaatgcgtggagcctgtgctctaagacgtgtgacacaggctggcagcgccgcttccgcatgtgccaggccacgggcacgcagggctacccctgcgagggcaccggagaggaggtgaagccttgtagtgagaagaggtgtccagccttccatgagatgtgcagggatgagtacgtgatgctgatgacgtggaagaaggcagctgctggcgagatcatctacaacaagtgccccccgaatgcctcagggtctgccagccgccgctgtctcctcagtgcccaaggcgtggcgtactgggggctgcccagctttgctcgctgcatctcccatgagtaccgctacctgtatctgtcacttagggagcacctggccaaggggcagcgcatgctggcaggcgagggcatgtcgcaggtggtgcgcagcctgcaggagctactggcccggcgcacctactatagtggggacctgctcttctctgtggacattctgaggaatgtcactgacacctttaagagggccacctacgtgccctcggctgatgatgtgcagcgcttcttccaggtggtgagcttcatggtggatgcggaaaacaaggagaagtgggacgatgctcagcaggtgtcccctggctctgtgcacctgctccgtgtcgtggaggacttcattcacctggtgggcgatgctctcaaggccttccagagctctctgattgtcacagataatctagtgatcagcattcagcgagagcccgtctcagctgtgtccagtgacatcacgttccccatgcggggccgccggggcatgaaggactgggtgcggcactcagaggaccgcctcttcctgcccaaggaggtgctcagcctctcctccccagggaagccagccacatctggggcagcaggcagccctggcagggggaggggcccaggaacggtgcctcctggcccaggccactcccaccagcgcctcctcccagcagaccctgatgagtcctcctactttgtgatcggtgctgtactctaccgcacccttggcctcatcctgccgcctcccaggcccccgctggccgtcacatcccgggtgatgacagtgactgtgcgcccccctacccagcctccagctgagcccctcatcactgtggagctctcctacatcatcaatgggaccacggatccccattgcgccagctgggactactccagagcagatgccagctcaggagactgggacactgaaaattgccagaccctggagacccaggcagctcacacccgctgccagtgccag

SEQ ID NO: 338531 - DNA, 4401 bp, Artificial Sequence
  derived and/or modified sequence
atgacccccgcctgccccctgctgctgagcgtgatcctgagcctgagactggccaccgccttcgaccccgcccccagcgcctgcagcgccctggccagcggcgtgctgtacggcgccttcagcctgcaggacctgttccccaccatcgccagcggctgcagctggaccctggagaaccccgaccccaccaagtacagcctgtacctgagattcaacagacaggagcaggtgtgcgcccacttcgcccccagactgctgcccctggaccactacctggtgaacttcacctgcctgagacccagccccgaggaggccgtggcccaggccgagagcgaggtgggcagacccgaggaggaggaggccgaggccgccgccggcctggagctgtgcagcggcagcggccccttcaccttcctgcacttcgacaagaacttcgtgcagctgtgcctgagcgccgagcccagcgaggcccccagactgctggcccccgccgccctggccttcagattcgtggaggtgctgctgatcaacaacaacaacagcagccagttcacctgcggcgtgctgtgcagatggagcgaggagtgcggcagagccgccggcagagcctgcggcttcgcccagcccggctgcagctgccccggcgaggccggcgccggcagcaccaccaccaccagccccggcccccccgccgcccacaccctgagcaacgccctggtgcccggcggccccgccccccccgccgaggccgacctgcacagcggcagcagcaacgacctgttcaccaccgagatgagatacggcgaggagcccgaggaggagcccaaggtgaagacccagtggcccagaagcgccgacgagcccggcctgtacatggcccagaccggcgaccccgccgccgaggagtggagcccctggagcgtgtgcagcctgacctgcggccagggcctgcaggtgagaaccagaagctgcgtgagcagcccctacggcaccctgtgcagcggccccctgagagagaccagaccctgcaacaacagcgccacctgccccgtggagggccagtggctggagtggggcccctggggcccctgcagcaccagctgcgccaacggcacccagcagagaagcagaaagtgcagcgtggccggccccgcctgggccacctgcaccggcgccctgaccgacaccagagagtgcagcaacctggagtgccccgccaccgacagcaagtggggcccctggaacgcctggagcctgtgcagcaagacctgcgacaccggctggcagagaagattcagaatgtgccaggccaccggcacccagggctacccctgcgagggcaccggcgaggaggtgaagccctgcagcgagaagagatgccccgccttccacgagatgtgcagagacgagtacgtgatgctgatgacctggaagaaggccgccgccggcgagatcatctacaacaagtgcccccccaacgccagcggcagcgccagcagaagatgcctgctgagcgcccagggcgtggcctactggggcctgcccagcttcgccagatgcatcagccacgagtacagatacctgtacctgagcctgagagagcacctggccaagggccagagaatgctggccggcgagggcatgagccaggtggtgagaagcctgcaggagctgctggccagaagaacctactacagcggcgacctgctgttcagcgtggacatcctgagaaacgtgaccgacaccttcaagagagccacctacgtgcccagcgccgacgacgtgcagagattcttccaggtggtgagcttcatggtggacgccgagaacaaggagaagtgggacgacgcccagcaggtgagccccggcagcgtgcacctgctgagagtggtggaggacttcatccacctggtgggcgacgccctgaaggccttccagagcagcctgatcgtgaccgacaacctggtgatcagcatccagagagagcccgtgagcgccgtgagcagcgacatcaccttccccatgagaggcagaagaggcatgaaggactgggtgagacacagcgaggacagactgttcctgcccaaggaggtgctgagcctgagcagccccggcaagcccgccaccagcggcgccgccggcagccccggcagaggcagaggccccggcaccgtgccccccggccccggccacagccaccagagactgctgcccgccgaccccgacgagagcagctacttcgtgatcggcgccgtgctgtacagaaccctgggcctgatcctgcccccccccagaccccccctggccgtgaccagcagagtgatgaccgtgaccgtgagaccccccacccagccccccgccgagcccctgatcaccgtggagctgagctacatcatcaacggcaccaccgacccccactgcgccagctgggactacagcagagccgacgccagcagcggcgactgggacaccgagaactgccagaccctggagacccaggccgcccacaccagatgccagtgccagcacctgagcaccttcgccgtgctggcccagccccccaaggacctgaccctggagctggccggcagccccagcgtgcccctggtgatcggctgcgccgtgagctgcatggccctgctgaccctgctggccatctacgccgccttctggagattcatcaagagcgagagaagcatcatcctgctgaacttctgcctgagcatcctggccagcaacatcctgatcctggtgggccagagcagagtgctgagcaagggcgtgtgcaccatgaccgccgccttcctgcacttcttcttcctgagcagcttctgctgggtgctgaccgaggcctggcagagctacctggccgtgatcggcagaatgagaaccagactggtgagaaagagattcctgtgcctgggctggggcctgcccgccctggtggtggccgtgagcgtgggcttcaccagaaccaagggctacggcaccagcagctactgctggctgagcctggagggcggcctgctgtacgccttcgtgggccccgccgccgtgatcgtgctggtgaacatgctgatcggcatcatcgtgttcaacaagctgatggccagagacggcatcagcgacaagagcaagaagcagagagccggcgccagcctgtggagcagctgcgtggtgctgcccctgctggccctgacctggatgagcgccgtgctggccatgaccgacagaagaagcgtgctgttccaggccctgttcgccgtgttcaacagcgcccagggcttcgtgatcaccgccgtgcactgcttcctgagaagagaggtgcaggacgtggtgaagtgccagatgggcgtgtgcagagccgacgagagcgaggacagccccgacagctgcaagaacggccagctgcagatcctgagcgacttcgagaaggacgtggacctggcctgccagaccgtgctgttcaaggaggtgaacacctgcaaccccagcaccatcaccggcaccctgagcagactgagcctggacgaggacgaggagcccaagagctgcctggtgggccccgagggcagcctgagcttcagccccctgcccggcaacatcctggtgcccatggccgccagccccggcctgggcgagcccccccccccccaggaggccaaccccgtgtacatgtgcggcgagggcggcctgagacagctggacctgacctggctgagacccaccgagcccggcagcgagggcgactacatggtgctgcccagaagaaccctgagcctgcagcccggcggcggcggcggcggcggcgaggacgcccccagagccagacccgagggcacccccagaagagccgccaagaccgtggcccacaccgagggctaccccagcttcctgagcgtggaccacagcggcctgggcctgggccccgcctacggcagcctgcagaacccctacggcatgaccttccagccccccccccccacccccagcgccagacaggtgcccgagcccggcgagagaagcagaaccatgcccagaaccgtgcccggcagcaccatgaagatgggcagcctggagagaaagaagctgagatacagcgacctggacttcgagaaggtgatgcacaccagaaagagacacagcgagctgtaccacgagctgaaccagaagttccacaccttcgacagatacagaagccagagcaccgccaaggacaagcccagccccggcgagagacccagcctgagccagcacagaagacaccagagctggagcaccttcaagagcatgaccctgggcagcctgccccccaagcccagagagagactgaccctgcacagagccgccgcctgggagcccaccgagccccccgacggcgacttccagaccgaggtgtag

SEQ ID NO: 338532 - DNA, 2544 bp, Artificial Sequence
  derived and/or modified sequence
ggcaagggccacagaatgacccccgcctgccccctgctgctgagcgtgatcctgagcctgagactggccaccgccttcgaccccgcccccagcgcctgcagcgccctggccagcggcgtgctgtacggcgccttcagcctgcaggacctgttccccaccatcgccagcggctgcagctggaccctggagaaccccgaccccaccaagtacagcctgtacctgagattcaacagacaggagcaggtgtgcgcccacttcgcccccagactgctgcccctggaccactacctggtgaacttcacctgcctgagacccagccccgaggaggccgtggcccaggccgagagcgaggtgggcagacccgaggaggaggaggccgaggccgccgccggcctggagctgtgcagcggcagcggccccttcaccttcctgcacttcgacaagaacttcgtgcagctgtgcctgagcgccgagcccagcgaggcccccagactgctggcccccgccgccctggccttcagattcgtggaggtgctgctgatcaacaacaacaacagcagccagttcacctgcggcgtgctgtgcagatggagcgaggagtgcggcagagccgccggcagagcctgcggcttcgcccagcccggctgcagctgccccggcgaggccggcgccggcagcaccaccaccaccagccccggcccccccgccgcccacaccctgagcaacgccctggtgcccggcggccccgccccccccgccgaggccgacctgcacagcggcagcagcaacgacctgttcaccaccgagatgagatacggcgaggagcccgaggaggagcccaaggtgaagacccagtggcccagaagcgccgacgagcccggcctgtacatggcccagaccggcgaccccgccgccgaggagtggagcccctggagcgtgtgcagcctgacctgcggccagggcctgcaggtgagaaccagaagctgcgtgagcagcccctacggcaccctgtgcagcggccccctgagagagaccagaccctgcaacaacagcgccacctgccccgtggagggccagtggctggagtggggcccctggggcccctgcagcaccagctgcgccaacggcacccagcagagaagcagaaagtgcagcgtggccggccccgcctgggccacctgcaccggcgccctgaccgacaccagagagtgcagcaacctggagtgccccgccaccgacagcaagtggggcccctggaacgcctggagcctgtgcagcaagacctgcgacaccggctggcagagaagattcagaatgtgccaggccaccggcacccagggctacccctgcgagggcaccggcgaggaggtgaagccctgcagcgagaagagatgccccgccttccacgagatgtgcagagacgagtacgtgatgctgatgacctggaagaaggccgccgccggcgagatcatctacaacaagtgcccccccaacgccagcggcagcgccagcagaagatgcctgctgagcgcccagggcgtggcctactggggcctgcccagcttcgccagatgcatcagccacgagtacagatacctgtacctgagcctgagagagcacctggccaagggccagagaatgctggccggcgagggcatgagccaggtggtgagaagcctgcaggagctgctggccagaagaacctactacagcggcgacctgctgttcagcgtggacatcctgagaaacgtgaccgacaccttcaagagagccacctacgtgcccagcgccgacgacgtgcagagattcttccaggtggtgagcttcatggtggacgccgagaacaaggagaagtgggacgacgcccagcaggtgagccccggcagcgtgcacctgctgagagtggtggaggacttcatccacctggtgggcgacgccctgaaggccttccagagcagcctgatcgtgaccgacaacctggtgatcagcatccagagagagcccgtgagcgccgtgagcagcgacatcaccttccccatgagaggcagaagaggcatgaaggactgggtgagacacagcgaggacagactgttcctgcccaaggaggtgctgagcctgagcagccccggcaagcccgccaccagcggcgccgccggcagccccggcagaggcagaggccccggcaccgtgccccccggccccggccacagccaccagagactgctgcccgccgaccccgacgagagcagctacttcgtgatcggcgccgtgctgtacagaaccctgggcctgatcctgcccccccccagaccccccctggccgtgaccagcagagtgatgaccgtgaccgtgagaccccccacccagccccccgccgagcccctgatcaccgtggagctgagctacatcatcaacggcaccaccgacccccactgcgccagctgggactacagcagagccgacgccagcagcggcgactgggacaccgagaactgccagaccctggagacccaggccgcccacaccagatgccagtgccagtag

SEQ ID NO: 338533 - protein, 1499 aa, Artificial Sequence
  derived and/or modified sequence
MTPACPLLLSVILSLRLATAFDPAPSACSALASGVLYGAFSLQDLFPTIASGCSWTLENPDPTKYSLYLRFNRQEQVCAHFAPRLLPLDHYLVNFTCLRPSPEEAVAQAESEVGRPEEEEAEAAAGLELCSGSGPFTFLHFDKNFVQLCLSAEPSEAPRLLAPAALAFRFVEVLLINNNNSSQFTCGVLCRWSEECGRAAGRACGFAQPGCSCPGEAGAGSTTTTSPGPPAAHTLSNALVPGGPAPPAEADLHSGSSNDLFTTEMRYGEEPEEEPKVKTQWPRSADEPGLYMAQTVHGVWEEWGSWSLCSRSCGRGSRSRMRTCVPPQHGGKACEGPELQTKLCSMAACPVEGQWLEWGPWGPCSTSCANGTQQRSRKCSVAGPAWATCTGALTDTRECSNLECPATDSKWGPWNAWSLCSKTCDTGWQRRFRMCQATGTQGYPCEGTGEEVKPCSEKRCPAFHEMCRDEYVMLMTWKKAAAGEIIYNKCPPNASGSASRRCLLSAQGVAYWGLPSFARCISHEYRYLYLSLREHLAKGQRMLAGEGMSQVVRSLQELLARRTYYSGDLLFSVDILRNVTDTFKRATYVPSADDVQRFFQVVSFMVDAENKEKWDDAQQVSPGSVHLLRVVEDFIHLVGDALKAFQSSLIVTDNLVISIQREPVSAVSSDITFPMRGRRGMKDWVRHSEDRLFLPKEVLSLSSPGKPATSGAAGSPGRGRGPGTVPPGPGHSHQRLLPADPDESSYFVIGAVLYRTLGLILPPPRPPLAVTSRVMTVTVRPPTQPPAEPLITVELSYIINGTTDPHCASWDYSRADASSGDWDTENCQTLETQAAHTRCQCQHLSTFAVLAQPPKDLTLELAGSPSVPLVIGCAVSCMALLTLLAIYAAFWRFIKSERSIILLNFCLSILASNILILVGQSRVLSKGVCTMTAAFLHFFFLSSFCWVLTEAWQSYLAVIGRMRTRLVRKRFLCLGWGLPALVVAVSVGFTRTKGYGTSSYCWLSLEGGLLYAFVGPAAVIVLVNMLIGIIVFNKLMARDGISDKSKKQRAGSERCPWASLLLPCSACGAVPSPLLSSASARNAMASLWSSCVVLPLLALTWMSAVLAMTDRRSVLFQALFAVFNSAQGFVITAVHCFLRREVQDVVKCQMGVCRADESEDSPDSCKNGQLQILSDFEKDVDLACQTVLFKEVNTCNPSTITGTLSRLSLDEDEEPKSCLVGPEGSLSFSPLPGNILVPMAASPGLGEPPPPQEANPVYMCGEGGLRQLDLTWLRPTEPGSEGDYMVLPRRTLSLQPGGGGGGGEDAPRARPEGTPRRAAKTVAHTEGYPSFLSVDHSGLGLGPAYGSLQNPYGMTFQPPPPTPSARQVPEPGERSRTMPRTVPGSTMKMGSLERKKLRYSDLDFEKVMHTRKRHSELYHELNQKFHTFDRYRSQSTAKDKPSPGERPSLSQHRRHQSWSTFKSMTLGSLPPKPRERLTLHRAAAWEPTEPPDGDFQTEV

SEQ ID NO: 338534 - DNA, 4500 bp, Artificial Sequence
  derived and/or modified sequence
atgacgcccgcctgccctctactgcttagtgttatactttcgctgcgcctggcaacagcattcgacccagccccttcagcctgtagtgccttggccagcggtgtcctgtatggcgccttctctctgcaagacttgtttcctaccattgcctccggctgcagttggacattggagaaccccgaccccaccaaatactctctgtatttgcgatttaaccgacaggagcaagtgtgcgcgcacttcgcaccccgactcctgcccctcgatcactaccttgtgaatttcacatgcctgaggccctcaccagaggaggccgtggcacaagccgagagtgaagttgggcgccctgaagaggaagaggccgaggcagcagccggtctggaactgtgctccggttccggcccattcaccttcctgcacttcgacaagaactttgtgcaactctgcctctctgcagagccctctgaggcacccagactcttggccccagccgcactcgcgttccggtttgtggaagtgctcttaataaataacaacaatagcagccagttcacctgtggagtgctgtgcaggtggtctgaagaatgtgggcgagctgcggggagggcctgtggtttcgcccagccaggatgctcttgtcccggtgaggccggcgctgggtcaactacgacgaccagtcccggcccacctgccgcccatactctctcaaacgctcttgtaccaggcggccccgcacctcctgccgaagcagaccttcattccggaagtagtaatgatttgtttactacagaaatgaggtacggagaggagcccgaagaggaacccaaggtgaagacacagtggccaagatctgccgacgaaccgggattgtatatggcacaaacagtgcatggcgtctgggaggaatggggcagctggtccttgtgcagccgatcctgcggtagagggtcaaggagcagaatgcgaacctgcgtcccaccacaacacggcgggaaggcgtgcgaagggcctgagctgcagaccaaactatgcagtatggccgcatgcccagtggagggacaatggctcgagtggggaccctgggggccttgctctacttcttgtgctaatggtactcagcagcggtccaggaagtgctcagttgcaggcccagcttgggcaacgtgcaccggggcgctgactgataccagggagtgtagtaacttagagtgccccgcaacagacagcaaatggggaccttggaatgcctggagtttatgctccaaaacttgtgacactggatggcaaaggagatttcgaatgtgccaggcaacgggcacccagggatatccttgcgaagggactggggaagaggttaaaccttgtagcgaaaagcgatgtcctgctttccacgagatgtgcagggacgagtatgttatgctgatgacctggaagaaagcggctgcaggggaaattatttacaataaatgtccccctaacgccagcgggtcggcctctcggaggtgcctgctcagcgcccaaggggtggcctattggggcctgccatcctttgcgcggtgtatttcccacgaatacaggtacctgtacctctctcttcgggagcaccttgccaaaggtcagcggatgttggccggagaggggatgtcacaggtggtgaggtccctgcaggagctcttggctcgccggacatactatagtggagatttgttattttccgtggatatccttcgaaacgtcactgatacgttcaaaagggcaacctacgtgccaagcgccgatgacgtacagagattcttccaggttgtgagcttcatggtggacgcagagaataaagagaagtgggacgatgcccagcaggttagcccgggctccgtgcacctgttacgggtggtggaagattttatccacttggtgggagacgcactcaaggcattccagtcgagtctgattgtaacagacaacctcgttatttctatacaaagggaacccgtgtccgccgtttcaagcgacataactttcccaatgcgtgggaggagagggatgaaagactgggttagacattccgaagatcgactgtttctccccaaggaggtgctgtcgttgagcagccctggcaaaccggccacctcgggtgccgcagggtctccgggacgcgggcgcgggccaggcaccgtgccacccggcccggggcactcccatcagaggcttctcccggccgatcctgacgaaagttcctatttcgtgataggggctgttctatatcgcacacttgggcttattctccctcctccccgaccaccactggcagtgacttcgcgggtgatgactgtgaccgtgcgcccacctacccagccacctgccgaacctttgatcacagtggaattatcctatatcatcaatggaactactgacccgcactgtgcatcttgggactacagcagagctgacgcaagttcaggcgactgggacaccgagaattgccagaccttggagacccaggcagcgcacacacgctgtcagtgccaacacctcagtacctttgcagttctcgctcaaccaccaaaagatttaaccttagagctggccggatctccgtcagtcccattggtgatcgggtgcgctgtgagctgcatggcccttcttaccctgttagcgatctacgccgccttttggcgtttcattaaaagcgaaaggagcatcattctcctgaacttctgtctgagtattcttgcatccaacatactgattctagtcggtcagagccgggtgctgtccaagggcgtgtgtacaatgacagcagcgtttctgcacttcttcttcctgagttccttttgttgggtgctgaccgaagcctggcagagctatttggccgtcatcgggagaatgcggacgagattagttcgcaagaggttcctgtgtctggggtggggactgcccgccttggtggtggccgtttcagtgggattcactcggaccaaaggttacggcacgagctcatactgctggctctcacttgaaggcggtttactgtatgcatttgtgggcccagctgctgtcattgtgctggtgaacatgttgatcgggataatcgtattcaataaactgatggctcgggatgggatatcagataagagtaagaaacagcgcgctgggagcgaaaggtgtccatgggcaagcttgctgctgccatgcagtgcttgtggagccgttccatcccccttgttgagctccgcctcagctcgcaatgccatggcttccctatggtctagttgtgtggtgctacctctgctggcactgacctggatgagcgccgtgctcgcaatgaccgatagacggtctgtcctcttccaagcacttttcgccgtgttcaactcagctcaggggtttgttatcaccgctgtacattgttttctgcgcagggaagtgcaggatgtggtcaaatgtcagatgggcgtgtgtagagccgatgaatctgaggattcgcctgattcgtgtaaaaacggccagctgcaaatcctgagtgactttgaaaaagatgtcgatttggcttgtcagactgtgctcttcaaggaggtcaacacatgcaacccctcgacaattaccggaactctgtcacgattgtcacttgacgaggacgaggaaccgaaatcttgcctggtcgggccagagggctccctgtcattctcacccttgcccggtaatatcttggtcccaatggcagcctcgcctggtctcggtgagcctccccctccacaggaagccaatcccgtctacatgtgcggagaagggggtcttaggcagttggatttaacatggttacgcccaacagagcccggttctgagggcgattatatggtgctgccgagaaggacactttcattgcagcctgggggcgggggcggcggcggggaagatgcacctagggcccgcccagaaggcaccccacggagagcagccaagaccgtcgctcacacagaagggtacccttcatttctgtccgtggatcacagcggattaggccttggccctgcttacgggtctctgcaaaacccttacgggatgaccttccagcctcccccacctacacccagcgcgagacaggtcccagaacctggagagcgctctcgcaccatgcctcgcacagtcccagggtcgaccatgaaaatggggagcctggaacgcaagaaattgcgatacagcgacttggattttgaaaaagttatgcacacccgcaagcggcacagtgagctttaccatgaactgaaccaaaagtttcacaccttcgacagatatagatcccagtccacagccaaggacaaacccagccctggagagcgcccaagtctcagccaacacaggcggcaccagtcttggtccacttttaagagtatgacccttggcagtctcccacctaagcccagggaacgcttgacacttcacagagcggcagcatgggaacctactgaaccgcccgatggcgacttccagaccgaagtctag

SEQ ID NO: 338535 - DNA, 4500 bp, Artificial Sequence
  derived and/or modified sequence
atgaccccagcctgccccctgctgctgagcgtcatcctgagcctgcggctggccacagcctttgatcctgcccccagcgcctgcagcgccctggccagcggcgtgctgtatggagccttcagcctgcaggacctcttccccaccatcgccagcggctgctcctggaccctggagaacccagaccccaccaagtacagcctgtacctgcgcttcaaccggcaggagcaggtgtgtgcccactttgccccccggctgctgcccctggaccactacctggtgaacttcacctgcctgcggcccagccctgaggaggccgtggcccaggccgagagcgaggtgggccggcctgaggaggaggaggccgaggccgctgctggcctggagctgtgcagcggcagcggccccttcaccttcctgcactttgacaagaactttgtgcagctgtgcctgtctgctgagcccagcgaggccccccggctgctggccccagctgccctggccttccgctttgtggaggtgctgctgatcaacaacaacaacagcagccagttcacctgtggggtgctgtgccgctggagcgaagaatgtggccgggccgccggccgggcctgtggctttgcccagcccggctgcagctgccctggagaggccggggccggcagcaccaccaccaccagccctggccccccagctgcccacaccctgagcaatgccctggtgcctgggggccctgcccccccagctgaggccgacctgcacagcggcagcagcaatgacctcttcaccacagagatgagatatggagaggagcctgaggaggagcccaaggtgaagacccagtggcccaggtctgcagatgagcccggcctgtacatggcccagacagtgcatggagtgtgggaggagtggggctcctggagcctgtgcagccgcagctgtggccggggcagccgcagcaggatgaggacctgtgtgcccccccagcacggcggcaaggcctgtgagggccctgagctgcagaccaagctgtgcagcatggccgcctgccctgtggagggccagtggctggagtggggcccctggggcccctgcagcaccagctgtgccaacggcacccagcagaggagcaggaagtgcagcgtggccggccctgcctgggccacctgcaccggggccctgacagacacccgggagtgcagcaacctggagtgcccagccacagacagcaagtggggcccctggaatgcctggagcctgtgcagcaagacctgtgacaccggctggcagaggcgcttcaggatgtgccaggccaccggcacccagggctacccctgtgagggcaccggggaggaggtgaagccctgcagcgagaagcgctgcccagccttccacgagatgtgcagagatgaatatgtgatgctgatgacctggaagaaggctgctgctggggagatcatctacaacaagtgccccccaaatgccagcggcagcgccagccgccgctgcctgctgagcgcccagggcgtggcctactggggcctgcccagctttgcccgctgcatcagccatgagtaccgctacctgtacctgagcctgcgggagcacctggccaagggccagaggatgctggccggggagggcatgagccaggtggtgcgcagcctgcaggagctgctggcccggaggacctactacagcggggacctgctcttctctgtggacatcctgagaaatgtgacagacaccttcaagagggccacctacgtgcccagcgcagatgatgtgcagcgcttcttccaggtggtgtccttcatggtggatgctgagaacaaggagaagtgggatgatgcccagcaggtgtccccaggctctgtgcacctgctgcgggtggtggaggacttcatccacctggtgggagatgccctgaaggccttccagagcagcctcatcgtgacagacaacctggtgatcagcatccagcgggagcctgtgtctgctgtgtccagtgacatcaccttccccatgaggggccggcggggcatgaaggactgggtgcgccacagtgaagatagactcttcctgcccaaggaggtgctgagcctgagcagccctgggaagccagccaccagcggggctgctggcagccctggccggggccggggccctggcaccgtgcccccaggccctggccacagccaccagaggctgctgcctgctgaccctgatgagagcagctactttgtgattggagctgtgctgtaccgcaccctgggcctcatcctgcccccaccccggccccccctggccgtgaccagccgggtgatgacagtgacagtgcggccccccacccagcccccagctgagcccctcatcaccgtggagctgagctacatcatcaatggcaccacagacccccactgtgcctcctgggactacagcagagcagatgccagcagcggggactgggacacagagaactgccagaccctggagacccaggccgcccacacccgctgccagtgccagcacctgagcacctttgctgtgctggcccagccccccaaggacctgaccctggagctggccggcagccccagcgtgcccctggtgattggctgtgctgtgtcctgcatggccctgctgaccctgctggccatctatgctgccttctggaggttcatcaagtctgagaggagcatcatcctgctgaacttctgcctgagcatcctggccagcaacatcctgatcctggtgggccagagccgggtgctgagcaagggcgtgtgcaccatgacagctgccttcctgcacttcttcttcctgagcagcttctgctgggtgctgacagaggcctggcagagctacctggccgtgattggaaggatgaggacccggctggtgaggaagcgcttcctgtgcctgggctggggcctgcctgccctggtggtggccgtgtctgtgggcttcaccaggaccaagggctacggcaccagcagctactgctggctgagcctggagggcggcctgctgtatgcctttgtgggccctgctgctgtgattgtgctggtgaacatgctgattggcatcatcgtgttcaacaagctgatggccagagatggcatcagtgacaagagcaagaagcagagagctggcagcgagcgctgcccctgggccagcctgctgctgccctgcagcgcctgtggggctgtgcccagccccctgctgagcagcgccagcgccagaaatgccatggccagcctgtggagcagctgtgtggtgctgcccctgctggccctgacctggatgtctgctgtgctggccatgacagacagaagatctgtgctcttccaggccctgtttgctgtgttcaacagcgcccagggctttgtgatcacagctgtgcactgcttcctgcggcgggaggtgcaggatgtggtgaagtgccagatgggcgtgtgcagagcagatgaaagtgaggacagcccagacagctgcaagaatggccagctgcagatcctgagtgactttgagaaggatgtggacctggcctgccagacagtgctcttcaaggaggtgaacacctgcaaccccagcaccatcaccggcaccctgagccggctgagcctggatgaagatgaggagcccaagagctgcctggtgggccctgagggcagcctgtccttcagccccctgcccggcaacatcctggtgcccatggccgccagccctggcctgggggagcccccaccaccccaggaggccaaccctgtgtacatgtgtggggagggcggcctgcggcagctggacctgacctggctgcggcccacagagcccggcagcgagggggactacatggtgctgcccaggaggaccctgagcctgcagcccggcggcggcggcggcggcggggaggatgccccccgggcccggcctgagggcaccccccggcgggccgccaagacagtggcccacacagagggctaccccagcttcctgtctgtggaccacagcggcctgggcctgggccctgcctacggcagcctgcagaacccctacggcatgaccttccagcccccaccacccacccccagcgcccggcaggtgcctgagcctggagagaggagcaggaccatgcccaggacagtgcccggcagcaccatgaagatgggcagcctggagaggaagaagctgcgctacagcgacctggactttgagaaggtgatgcacaccaggaagaggcacagcgagctgtaccacgagctgaaccagaagttccacacctttgaccgctaccgcagccagagcacagccaaggacaagcccagccctggagagcggcccagcctgagccagcacagaagacaccagagctggagcaccttcaagtccatgaccctgggcagcctgccccccaagccccgggagcggctgaccctgcacagagctgctgcctgggagcccacagagcccccagatggagacttccagacagaggtgtag

SEQ ID NO: 338536 - DNA, 4500 bp, Artificial Sequence
  derived and/or modified sequence
atgacccccgcctgccccctgctgctgagcgtgatcctgagcctgagactggccactgccttcgaccctgcaccatcagcttgtagcgcactggccagtggggtcctatacggggccttcagtctgcaagacctcttcccaacgatagcctcaggttgctcttggaccctggaaaatcccgaccccacaaaatattctctgtacttgagattcaatagacaggaacaggtgtgcgctcatttcgctccaaggctcttacccctggatcattatctagtgaactttacttgcttgaggccttcccctgaggaagcagtcgctcaggcagaatcagaagtagggcggccggaggaggaggaagctgaagccgcagccggtcttgagctgtgttcggggagcgggcctttcaccttcctccatttcgataagaacttcgttcagctatgtctttccgccgagccatccgaagctcctcgattgcttgcccctgccgccctcgcctttcggttcgtggaggtgctgctgatcaataataataactcatcccagtttacctgtggagtgctgtgtcggtggagtgaagaatgcggcagggccgctggacgggcatgtggatttgcccagcctggctgcagttgcccaggggaggccggtgctggttctacaaccaccacttcccccggccccccagccgcccacacgttgtctaacgcactggtccccggcggacctgcacctccggctgaagctgacctgcatagtggcagtagcaatgacctgttcacaaccgaaatgaggtatggcgaggaaccagaagaggagccgaaggtgaagacgcaatggccacgtagcgccgatgagcccggcctctacatggcccagaccgtgcatggagtgtgggaagaatggggctcatggtcactttgcagccgttcctgtggtagaggctccaggagtcgcatgcgaacctgtgtgccaccacaacacggaggtaaagcgtgtgagggtcccgagctccagaccaaactatgctccatggctgcctgtccagtcgagggccagtggctggaatggggtccctggggcccttgtagtacctcctgcgctaacggaactcagcagcgctcccggaagtgttccgtagcaggccccgcttgggccacatgtaccggcgctttgacggatactagggaatgttcaaacctagaatgccctgctaccgattccaaatggggaccctggaatgcctggtccttatgcagcaagacttgtgacaccggctggcagcgaaggttccgtatgtgtcaggccaccggaacgcaaggatatccatgtgaaggaactggagaggaagtaaaaccatgttccgagaagcgctgtcctgcgtttcacgagatgtgtagagatgaatacgttatgctgatgacctggaaaaaggccgctgcaggcgagatcatttacaataaatgcccacctaacgcgtccggtagtgccagcagacggtgcctgttgagcgctcagggcgtcgcttattggggcttgccctcatttgcccgatgtattagccatgagtaccggtatctctaccttagtctgagggaacatttggcgaaaggccagcgaatgctcgcgggtgaaggcatgagccaagtggtgagatccctgcaagaattgttggctcggcggacatattatagcggcgatctgttattctccgtggatattcttcgcaacgtgacagacacgtttaagagagccacatacgtgccgtctgccgacgatgtacagcggttttttcaagtggtcagctttatggtagatgccgagaacaaagagaaatgggatgatgcgcagcaagtttcccctggatctgtacatctgctgcgggtagtcgaggacttcatccatctcgtgggagatgccctcaaggcatttcaaagttcactgatagttactgacaatctggtcattagcattcaaagggaaccagtctccgccgtgagcagcgatatcacgtttcccatgaggggccggcggggaatgaaggactgggttagacattccgaggaccgattattcttgcccaaggaagtgctgtccctttcatcgcccggaaaacctgccacttctggtgctgctggtagtcccggtaggggaagaggaccaggcactgttccgcctggcccaggtcacagtcaccagcgcctgcttccagctgacccagacgagtcatcatattttgtgattggggccgtcctctatagaacactgggcctgatcttgcccccccctaggccgccactagccgtgacaagcagggtcatgacagtaacagtgcgccctccaacgcagcccccagccgagccactgataaccgtggaattgagttatataatcaacggaaccactgatccccattgcgcctcatgggactattcaagggcagatgcctcatctggggactgggatacagaaaactgtcagacgctcgagacacaggcagctcatacccggtgccagtgccagcatctgagcacttttgcagtgttggcccaacccccaaaggacctcacattggagctcgctgggtcaccctccgtcccgctggtcatcggctgtgctgttagctgcatggccctgctgaccttgctggccatctacgcagctttttggcgatttatcaagtcagaacggtctatcattctcctaaatttctgcctgtctattctcgcttctaatatactcatcctggttggacagagcagagtgctgagcaagggcgtttgtaccatgacagccgccttcctgcacttcttcttcctctcctcattttgttgggtactcactgaggcttggcagtcttatctcgccgtcattggtcgcatgcgtacgaggttggtgcgtaagaggttcttgtgccttggttgggggctgcccgctttagtggtggctgtgtcagtgggctttactaggacaaagggctacggcacgtcctcctattgctggctcagcttagagggaggactcctctacgccttcgtcggacctgcggctgtgattgttctggtcaatatgctgatagggattatcgtcttcaataaactcatggcgcgagatggaatcagcgacaagagcaaaaaacagcgagctgggtccgagcgctgcccttgggcaagtctcttactgccatgctccgcttgcggagccgtacccagcccactgctgtctagcgcgagcgccagaaacgccatggcttctctctggagcagttgtgtggtcctgcccctgttagctctcacttggatgtccgccgtgttagcaatgacggatcggcgctctgtgctcttccaggcgcttttcgcggtttttaattcagcccagggcttcgtgatcaccgcagtgcactgttttctgcggcgagaagtgcaggacgtggtcaaatgccagatgggggtatgccgcgcagatgagtccgaagactcacctgactcgtgtaagaacgggcagctgcagatcctgtccgacttcgaaaaggatgttgatctcgcatgccagactgtgctgttcaaggaagtgaacacatgcaacccgagcacaattaccggaaccctatctagactgagcctggacgaggacgaggagcctaagtcttgcctggtggggccagagggatccttgagtttcagccccctgcctggcaacatcctggtcccaatggctgctagtcctggcctcggcgaaccaccaccaccccaggaggcaaatcccgtttacatgtgtggtgaaggtggcctccgccagcttgatctcacatggctgagaccaacggagccggggtccgaaggagactacatggttctccccaggaggaccctcagcctgcagcccggagggggaggaggcggaggcgaagatgcacctagggcacgtcctgaaggaaccccgaggcgagcagcaaagactgtcgctcacaccgaaggatatcctagcttcctctccgtggaccatagcggcctcgggcttggccctgcgtacggctcactccaaaatccttacggcatgacattccaacctccgccccccacccctagtgcccggcaggtgccagagccaggcgagcggtctcggaccatgccacgcactgtgcccgggtctactatgaaaatgggttccctagagcgtaaaaagctgcgatattccgatctggacttcgagaaagttatgcacacaagaaaacggcattctgagctgtaccacgagttgaaccaaaagtttcatacattcgaccgataccgatcccagtctacagccaaggataagcccagcccaggcgaaaggccatctctatcacagcacagacgccaccagagctggtccacctttaagtctatgaccctaggttcgctgccccctaagccacgcgaacgccttactctgcaccgagccgctgcctgggagcccaccgaaccaccagacggggacttccagaccgaggtctag

SEQ ID NO: 338537 - DNA, 4500 bp, Artificial Sequence
  derived and/or modified sequence
atgactccagcgtgcccgctgctactgtctgtaattctgtccctgcgcctcgctacagctttcgaccccgctccatccgcatgtagtgcactggcatccggcgtgttgtatggagcttttagcctgcaggatttgttccccaccatcgcttccggatgctcatggaccctggagaaccccgacccaacgaaatactcactgtacttaaggttcaatcggcaggaacaggtgtgtgcacacttcgcccctcggctgctacccctggaccactacctggtgaattttacatgtctcagaccctcccccgaggaagcagtcgcccaggccgagtctgaggtcgggcgtccggaagaagaagaggctgaagctgcagccggactggagctgtgcagtgggagtgggccattcacttttttgcactttgacaagaacttcgtgcagttatgcctgagtgccgagccaagcgaggcaccgaggttgctcgcacctgctgccttagccttccggttcgtggaagtcttgctgatcaataataataactcctcccagtttacctgcggcgtcctgtgcagatggagcgaagagtgcggaagagccgcaggcagggcctgcggcttcgcccagcccggttgttcctgtcccggtgaggcgggtgctggtagtaccaccacaaccagcccgggaccgccagctgcacatacgctgagtaatgcccttgttcccggtggaccagctcctccagccgaggccgatcttcattccgggtctagtaatgacttgtttaccaccgagatgcggtacggcgaggaacctgaagaggaacctaaggtgaaaacacagtggccaagaagtgctgatgaaccgggactgtacatggctcagaccgtgcatggagtctgggaggagtggggctcttggtctctatgctctaggtcttgtggtcgtgggagccgcagccggatgaggacgtgtgtccccccacaacatggaggtaaggcctgtgagggcccagaactccagaccaaactgtgctccatggccgcatgtcctgtggagggtcagtggttggaatgggggccttggggcccatgttccacatcttgcgccaatggcacgcagcagcgctccagaaagtgctcagtcgctggccctgcttgggcaacttgcacaggggcactcaccgacactagggagtgtagcaacctggagtgcccagccaccgattccaaatgggggccatggaatgcctggtctctctgttcaaagacatgcgacaccgggtggcagagacggtttagaatgtgccaagcaactgggactcagggatacccctgcgaggggacaggagaggaagtgaaaccttgtagcgaaaagcgctgcccggctttccacgagatgtgccgggacgaatatgtcatgttaatgacatggaagaaggcagctgctggtgaaatcatatacaataaatgtcctcccaacgccagtgggagtgctagccgcaggtgcctcctgagcgcccaaggagttgcctattggggtcttccttctttcgcacggtgtatttcacacgaatacagatacctgtatctatctctgcgggagcatttggcaaagggtcagagaatgctcgccggtgaggggatgagccaggtggtccgctccctgcaggagctcctggcccgaaggacctactattccggagacctcttgttttctgtggatatcctacggaacgtcaccgacaccttcaaacgggctacttatgtgccctctgccgatgacgtacaacggttcttccaagtcgtctcctttatggtggatgccgagaacaaggagaaatgggacgatgctcaacaggtcagtccaggctcagttcacctgctaagggtggtggaagatttcatccacctggtgggagacgccctgaaggctttccaatcctcattaatcgttaccgacaacttggtcatctcaatacagcgtgaacccgtcagcgctgtgtcgtcggacatcacctttcctatgcgaggtcggaggggcatgaaggactgggtccgacacagcgaagatcggttattcctgcccaaggaggtgctgtcgttatcttctcccggaaaaccagcaacttcaggcgctgcgggaagtcctggccgaggacggggacccggtacagtgcctcccggacccggacattctcaccagcggctgttaccggctgacccagatgagtctagttacttcgtgatcggtgcggttctataccgtactctggggcttatcttgccccctcctaggcccccattggctgtgacttctagagtcatgaccgtgaccgtgcgaccacctactcagcctcctgcggagccattgataactgtggagctgtcttacatcatcaatgggaccactgatccacattgcgcatcttgggattattccagggcagacgcatccagcggagattgggatacagaaaattgccagacactggaaactcaggcggcacatacaagatgccagtgccagcatctgagtacctttgccgttttggcccagccgccaaaagaccttacactggaactggctggatccccttcagtacctctcgtgattggctgcgctgtttcgtgcatggctctattgacccttctagcgatctacgccgcattctggagatttattaagagtgagcgatcgattattcttctgaatttctgcttgtccattctggcaagcaacatactgattttggtgggccaaagtcgggtgctgtcaaaaggagtatgtaccatgacagcggcttttctgcacttctttttcctgagctctttttgctgggtgctaacagaggcctggcagtcttatttggcagtcattggtcgcatgcggactcggttggtcagaaagcgatttttatgtctggggtggggtctccccgcacttgtagtggccgtatctgtagggttcacccgcacgaaagggtatggcaccagtagttactgctggctgtctcttgaggggggattgttatatgcttttgtggggccagccgcagtgatcgtgctagttaacatgctgatcggcattatcgtgtttaacaagcttatggccagggatgggatctccgataagtcaaagaagcagcgggctggctcagagcgctgcccatgggcctccctcctcctgccttgcagcgcatgcggtgctgtaccctcccctttgttgtcctccgcaagtgccaggaacgccatggcttccctctggtcttcatgcgttgtgttacctttgctggctctgacatggatgagcgcggtgttggccatgaccgacaggaggtctgtcctgttccaggcactctttgcggtgtttaactccgcccaaggcttcgtcataactgccgtccactgttttctccgaagggaagtgcaggacgttgtaaagtgccaaatgggggtatgcagggcggatgagtctgaggatagccccgattcctgtaagaacggccaattgcagattctgtccgacttcgagaaggacgtggatcttgcatgccagaccgtgctttttaaggaggtgaacacctgtaatccttccacaatcacgggaactctgtcaaggctatccctcgatgaagacgaagagcctaaatcatgcctggtgggacccgaaggctcactcagctttagccccttacccggtaacatcctcgtgcccatggccgcttctccaggtctaggggagcctccaccccctcaagaggcgaacccagtgtatatgtgtggggaggggggattgcggcagctggatctgacctggcttcggcctaccgaacccggttctgagggtgactatatggtgctgcctagaagaacactctcactgcaacctggcggaggcggaggcggtggtgaagatgctcctcgagcgagacccgagggcacaccaaggagggcagcaaaaacagttgcacacactgaaggctatccgtctttcctgtcagtggatcactctgggttgggactgggcccagcctatggcagtcttcagaatccctatggtatgaccttccagccccctccaccgaccccttcggcacgtcaggtcccggagccaggagagcgatcacggaccatgccacgaacagtgccaggatcaactatgaagatgggcagcttggaaagaaagaagttgcggtatagtgatttggactttgaaaaagtaatgcataccagaaagaggcattcagaactgtatcacgaactaaaccagaaattccatacattcgatcggtatcggtcccagagtaccgccaaagacaaaccctctcccggagagcgcccaagtcttagtcagcatagacgacaccagtcttggtctactttcaagtcaatgaccctgggctcactgccaccgaagcctagagagcgcctgaccctgcatagagccgctgcatgggagccaacagagcccccagatggcgactttcagacagaagtgtag

SEQ ID NO: 338538 - DNA, 4857 bp, Artificial Sequence
  derived and/or modified sequence
ccagcgccggcccccgctcctgctgctgacggcgcccagggcaagggacataggatgaccccagcctgtcccctcttactgtctgtgattctgtccctgcgcctggccaccgccttcgaccccgcccccagtgcctgctctgccctggcctcgggtgtgctctacggggccttctcgctgcaggacctctttcctaccatcgcctcgggctgctcctggaccctggagaaccctgaccccaccaagtactccctctacctgcgcttcaaccgccaggagcaggtgtgcgcacactttgccccccgcctgctgcccctggaccactacctggtcaactttacctgcctgcggcctagccccgaggaggcggtggcccaggcggagtcagaggtggggcggccagaagaggaggaggcagaggcggcagcggggttggagctgtgcagcggctcaggcccctttaccttcctgcacttcgacaagaacttcgtgcagctgtgcctgtcggctgagccctccgaggccccgcgcctgctggcgcccgctgccctagccttccgctttgtcgaggtcttgctcatcaacaacaacaactctagccaattcacctgtggtgtgctctgccgctggagtgaggagtgtggccgcgctgccggcagggcctgcggctttgctcagccaggctgcagctgccctggagaggcgggggccggctccaccaccaccacatctccaggccctcctgctgcccacaccctgtccaatgccctggtgcccgggggcccagccccacctgctgaggccgatttgcactcggggagcagcaatgatctgttcacaaccgagatgagatatggtgaggagccggaagaggaaccgaaagtgaaaacccagtggccgaggtctgcagatgagcctgggctatacatggcgcagacagtgcacggcgtgtgggaggagtgggggtcctggagcctgtgctcccgcagctgcgggcgggggtcccggagccggatgcggacctgcgtgcccccccagcacggcggcaaggcctgcgagggtcctgagctgcagactaagctctgcagtatggctgcctgcccggtggaaggccagtggttagaatggggtccctggggcccatgctccacgtcctgtgccaatgggacccaacagcgcagccggaagtgcagcgtggcgggcccagcctgggccacatgcacgggtgccctcactgacacccgggagtgcagcaacctcgagtgcccggccactgatagcaagtgggggccatggaatgcgtggagcctgtgctctaagacgtgtgacacaggctggcagcgccgcttccgcatgtgccaggccacgggcacgcagggctacccctgcgagggcaccggagaggaggtgaagccttgtagtgagaagaggtgtccagccttccatgagatgtgcagggatgagtacgtgatgctgatgacgtggaagaaggcagctgctggcgagatcatctacaacaagtgccccccgaatgcctcagggtctgccagccgccgctgtctcctcagtgcccaaggcgtggcgtactgggggctgcccagctttgctcgctgcatctcccatgagtaccgctacctgtatctgtcacttagggagcacctggccaaggggcagcgcatgctggcaggcgagggcatgtcgcaggtggtgcgcagcctgcaggagctactggcccggcgcacctactatagtggggacctgctcttctctgtggacattctgaggaatgtcactgacacctttaagagggccacctacgtgccctcggctgatgatgtgcagcgcttcttccaggtggtgagcttcatggtggatgcggaaaacaaggagaagtgggacgatgctcagcaggtgtcccctggctctgtgcacctgctccgtgtcgtggaggacttcattcacctggtgggcgatgctctcaaggccttccagagctctctgattgtcacagataatctagtgatcagcattcagcgagagcccgtctcagctgtgtccagtgacatcacgttccccatgcggggccgccggggcatgaaggactgggtgcggcactcagaggaccgcctcttcctgcccaaggaggtgctcagcctctcctccccagggaagccagccacatctggggcagcaggcagccctggcagggggaggggcccaggaacggtgcctcctggcccaggccactcccaccagcgcctcctcccagcagaccctgatgagtcctcctactttgtgatcggtgctgtactctaccgcacccttggcctcatcctgccgcctcccaggcccccgctggccgtcacatcccgggtgatgacagtgactgtgcgcccccctacccagcctccagctgagcccctcatcactgtggagctctcctacatcatcaatgggaccacggatccccattgcgccagctgggactactccagagcagatgccagctcaggagactgggacactgaaaattgccagaccctggagacccaggcagctcacacccgctgccagtgccagcacctgtccacctttgctgtactagcccagccgcccaaggacctgaccctggagctggcgggctccccctcggtccccctggtgatcggctgtgcagtgtcgtgcatggcgctgctcaccctgctcgccatctatgccgccttttggaggttcataaaatctgaacgctccatcatcttgctgaacttctgcctgtccatcttggcatccaacatcctgatcctcgtgggccagtcccgggtgctgagcaagggcgtgtgcaccatgacggctgccttcctgcacttcttctttctctcctccttttgctgggtgcttaccgaggcctggcagtcctacctggctgtcattgggcggatgcgcacccgcctcgttcgcaagcgcttcctctgcctgggctggggtctgcctgccctggtggtggccgtgtctgttggctttacccgaacgaaaggatacggtacatccagctactgctggctctccctggagggcggcctgctctacgcctttgtgggccctgcagccgtcattgtcctggtgaacatgctcatcggaatcatcgtcttcaacaagctcatggcacgtgatggcatctccgacaaatccaagaagcagagggccgggtcggagcggtgcccctgggccagcctgctcctcccctgctcagcgtgtggagcggtccccagccccctgctcagctcagcctcggccaggaacgccatggcctcactctggagctcctgcgtggtgctgcccctgctggcgctcacctggatgtctgccgtcctggctatgacagaccgccgttccgtcctcttccaggccctctttgctgtcttcaactccgcgcagggctttgtcatcactgctgtgcactgcttcctgcgccgagaggtccaggatgtggtgaagtgccagatgggggtgtgccgggctgatgagagcgaagactcccctgactcgtgtaagaacgggcagctgcagatcctgtcagactttgaaaaggatgtggatctggcttgtcaaacagtgctgttcaaggaggtcaacacttgcaacccgtccaccatcacgggcacactatcccgcctgtccctggatgaggatgaggagcccaagtcctgcctcgtgggccctgagggcagcctcagcttctcaccactgcctgggaatatcctggtgcccatggcagcctcaccagggctgggggagcctccgcccccacaggaggccaaccctgtttacatgtgtggggagggtggcctgcggcagctggacctcacatggctgcggcccactgagccaggctctgagggagactacatggtgctgccccggcggactttgagcctgcagcctggcggtgggggtggaggtggtgaggatgcccccagggcccggccggaggggaccccccggcgagctgccaagacagtggcccacactgaaggctaccccagcttcctgtccgtggaccactcgggcctggggctgggccctgcctatggatctctccagaatccctatggaatgaccttccaaccgccaccgccgacacccagcgcccgccaagtgcccgagccaggggagcgcagccggaccatgcctcgcaccgtgcccggctctaccatgaagatgggctccctggagcgaaagaaattacggtattcagacctggactttgagaaggtgatgcacacccggaaacggcattcagaactctaccacgagctcaaccagaagttccacactttcgaccgctaccgcagccagtccacggccaaggataagcccagccctggggagcgccccagcttgtcccaacatcggcgccatcagagctggagcaccttcaaatctatgacactgggctcgctgccccccaagccccgagaacggctgactctgcaccgggcagcagcctgggagcccacagaaccaccggatggtgacttccagacagaggtgtgagtgccacgctggactgcccactgcatataaatatatatatctctctattttcacactccactttggaactacccaggagccagcgccctctcccctctcccgagggctgggcagggaggcgccgtggactcagccaggctgggggagccggacatggcttggcctggggtcccagggcccttccttgtttctcagaggcccctcagccactggaaccccatcttcagcccagcctgtccgtccctgtcccgggctggggaggggggaggggaactttgttgggaataaacttcactctgtgga

SEQ ID NO: 338539 - DNA, 4500 bp, Artificial Sequence
  derived and/or modified sequence
atgacccccgcctgccccctgctgctgagcgtgatcctgagcctgagactggccaccgccttcgaccccgcccccagcgcctgcagcgccctggccagcggcgtgctgtacggcgccttcagcctgcaggacctgttccccaccatcgccagcggctgcagctggaccctggagaaccccgaccccaccaagtacagcctgtacctgagattcaacagacaggagcaggtgtgcgcccacttcgcccccagactgctgcccctggaccactacctggtgaacttcacctgcctgagacccagccccgaggaggccgtggcccaggccgagagcgaggtgggcagacccgaggaggaggaggccgaggccgccgccggcctggagctgtgcagcggcagcggccccttcaccttcctgcacttcgacaagaacttcgtgcagctgtgcctgagcgccgagcccagcgaggcccccagactgctggcccccgccgccctggccttcagattcgtggaggtgctgctgatcaacaacaacaacagcagccagttcacctgcggcgtgctgtgcagatggagcgaggagtgcggcagagccgccggcagagcctgcggcttcgcccagcccggctgcagctgccccggcgaggccggcgccggcagcaccaccaccaccagccccggcccccccgccgcccacaccctgagcaacgccctggtgcccggcggccccgccccccccgccgaggccgacctgcacagcggcagcagcaacgacctgttcaccaccgagatgagatacggcgaggagcccgaggaggagcccaaggtgaagacccagtggcccagaagcgccgacgagcccggcctgtacatggcccagaccgtgcacggcgtgtgggaggagtggggcagctggagcctgtgcagcagaagctgcggcagaggcagcagaagcagaatgagaacctgcgtgcccccccagcacggcggcaaggcctgcgagggccccgagctgcagaccaagctgtgcagcatggccgcctgccccgtggagggccagtggctggagtggggcccctggggcccctgcagcaccagctgcgccaacggcacccagcagagaagcagaaagtgcagcgtggccggccccgcctgggccacctgcaccggcgccctgaccgacaccagagagtgcagcaacctggagtgccccgccaccgacagcaagtggggcccctggaacgcctggagcctgtgcagcaagacctgcgacaccggctggcagagaagattcagaatgtgccaggccaccggcacccagggctacccctgcgagggcaccggcgaggaggtgaagccctgcagcgagaagagatgccccgccttccacgagatgtgcagagacgagtacgtgatgctgatgacctggaagaaggccgccgccggcgagatcatctacaacaagtgcccccccaacgccagcggcagcgccagcagaagatgcctgctgagcgcccagggcgtggcctactggggcctgcccagcttcgccagatgcatcagccacgagtacagatacctgtacctgagcctgagagagcacctggccaagggccagagaatgctggccggcgagggcatgagccaggtggtgagaagcctgcaggagctgctggccagaagaacctactacagcggcgacctgctgttcagcgtggacatcctgagaaacgtgaccgacaccttcaagagagccacctacgtgcccagcgccgacgacgtgcagagattcttccaggtggtgagcttcatggtggacgccgagaacaaggagaagtgggacgacgcccagcaggtgagccccggcagcgtgcacctgctgagagtggtggaggacttcatccacctggtgggcgacgccctgaaggccttccagagcagcctgatcgtgaccgacaacctggtgatcagcatccagagagagcccgtgagcgccgtgagcagcgacatcaccttccccatgagaggcagaagaggcatgaaggactgggtgagacacagcgaggacagactgttcctgcccaaggaggtgctgagcctgagcagccccggcaagcccgccaccagcggcgccgccggcagccccggcagaggcagaggccccggcaccgtgccccccggccccggccacagccaccagagactgctgcccgccgaccccgacgagagcagctacttcgtgatcggcgccgtgctgtacagaaccctgggcctgatcctgcccccccccagaccccccctggccgtgaccagcagagtgatgaccgtgaccgtgagaccccccacccagccccccgccgagcccctgatcaccgtggagctgagctacatcatcaacggcaccaccgacccccactgcgccagctgggactacagcagagccgacgccagcagcggcgactgggacaccgagaactgccagaccctggagacccaggccgcccacaccagatgccagtgccagcacctgagcaccttcgccgtgctggcccagccccccaaggacctgaccctggagctggccggcagccccagcgtgcccctggtgatcggctgcgccgtgagctgcatggccctgctgaccctgctggccatctacgccgccttctggagattcatcaagagcgagagaagcatcatcctgctgaacttctgcctgagcatcctggccagcaacatcctgatcctggtgggccagagcagagtgctgagcaagggcgtgtgcaccatgaccgccgccttcctgcacttcttcttcctgagcagcttctgctgggtgctgaccgaggcctggcagagctacctggccgtgatcggcagaatgagaaccagactggtgagaaagagattcctgtgcctgggctggggcctgcccgccctggtggtggccgtgagcgtgggcttcaccagaaccaagggctacggcaccagcagctactgctggctgagcctggagggcggcctgctgtacgccttcgtgggccccgccgccgtgatcgtgctggtgaacatgctgatcggcatcatcgtgttcaacaagctgatggccagagacggcatcagcgacaagagcaagaagcagagagccggcagcgagagatgcccctgggccagcctgctgctgccctgcagcgcctgcggcgccgtgcccagccccctgctgagcagcgccagcgccagaaacgccatggccagcctgtggagcagctgcgtggtgctgcccctgctggccctgacctggatgagcgccgtgctggccatgaccgacagaagaagcgtgctgttccaggccctgttcgccgtgttcaacagcgcccagggcttcgtgatcaccgccgtgcactgcttcctgagaagagaggtgcaggacgtggtgaagtgccagatgggcgtgtgcagagccgacgagagcgaggacagccccgacagctgcaagaacggccagctgcagatcctgagcgacttcgagaaggacgtggacctggcctgccagaccgtgctgttcaaggaggtgaacacctgcaaccccagcaccatcaccggcaccctgagcagactgagcctggacgaggacgaggagcccaagagctgcctggtgggccccgagggcagcctgagcttcagccccctgcccggcaacatcctggtgcccatggccgccagccccggcctgggcgagcccccccccccccaggaggccaaccccgtgtacatgtgcggcgagggcggcctgagacagctggacctgacctggctgagacccaccgagcccggcagcgagggcgactacatggtgctgcccagaagaaccctgagcctgcagcccggcggcggcggcggcggcggcgaggacgcccccagagccagacccgagggcacccccagaagagccgccaagaccgtggcccacaccgagggctaccccagcttcctgagcgtggaccacagcggcctgggcctgggccccgcctacggcagcctgcagaacccctacggcatgaccttccagccccccccccccacccccagcgccagacaggtgcccgagcccggcgagagaagcagaaccatgcccagaaccgtgcccggcagcaccatgaagatgggcagcctggagagaaagaagctgagatacagcgacctggacttcgagaaggtgatgcacaccagaaagagacacagcgagctgtaccacgagctgaaccagaagttccacaccttcgacagatacagaagccagagcaccgccaaggacaagcccagccccggcgagagacccagcctgagccagcacagaagacaccagagctggagcaccttcaagagcatgaccctgggcagcctgccccccaagcccagagagagactgaccctgcacagagccgccgcctgggagcccaccgagccccccgacggcgacttccagaccgaggtgtag

SEQ ID NO: 338540 - protein, 1500 aa, Artificial Sequence
  derived and/or modified sequence
MLSLRGPDTHGKGHRMTPACPLLLSVILSLRLATAFDPAPSACSALASGVLYGAFSLQDLFPTIASGCSWTLENPDPTKYSLYLRFNRQEQVCAHFAPRLLPLDHYLVNFTCLRPSPEEAVAQAESEVGRPEEEEAEAAAGLELCSGSGPFTFLHFDKNFVQLCLSAEPSEAPRLLAPAALAFRFVEVLLINNNNSSQFTCGVLCRWSEECGRAAGRACGFAQPGCSCPGEAGAGSTTTTSPGPPAAHTLSNALVPGGPAPPAEADLHSGSSNDLFTTEMRYGEEPEEEPKVKTQWPRSADEPGLYMAQTVHGVWEEWGSWSLCSRSCGRGSRSRMRTCVPPQHGGKACEGPELQTKLCSMAACPVEGQWLEWGPWGPCSTSCANGTQQRSRKCSVAGPAWATCTGALTDTRECSNLECPATDSKWGPWNAWSLCSKTCDTGWQRRFRMCQATGTQGYPCEGTGEEVKPCSEKRCPAFHEMCRDEYVMLMTWKKAAAGEIIYNKCPPNASGSASRRCLLSAQGVAYWGLPSFARCISHEYRYLYLSLREHLAKGQRMLAGEGMSQVVRSLQELLARRTYYSGDLLFSVDILRNVTDTFKRATYVPSADDVQRFFQVVSFMVDAENKEKWDDAQQVSPGSVHLLRVVEDFIHLVGDALKAFQSSLIVTDNLVISIQREPVSAVSSDITFPMRGRRGMKDWVRHSEDRLFLPKEVLSLSSPGKPATSGAAGSPGRGRGPGTVPPGPGHSHQRLLPADPDESSYFVIGAVLYRTLGLILPPPRPPLAVTSRVMTVTVRPPTQPPAEPLITVELSYIINGTTDPHCASWDYSRADASSGDWDTENCQTLETQAAHTRCQCQHLSTFAVLAQPPKDLTLELAGSPSVPLVIGCAVSCMALLTLLAIYAAFWRFIKSERSIILLNFCLSILASNILILVGQSRVLSKGVCTMTAAFLHFFFLSSFCWVLTEAWQSYLAVIGRMRTRLVRKRFLCLGWGLPALVVAVSVGFTRTKGYGTSSYCWLSLEGGLLYAFVGPAAVIVLVNMLIGIIVFNKLMARDGISDKSKKQRAGASLWSSCVVLPLLALTWMSAVLAMTDRRSVLFQALFAVFNSAQGFVITAVHCFLRREVQDVVKCQMGVCRADESEDSPDSCKNGQLQILSDFEKDVDLACQTVLFKEVNTCNPSTITGTLSRLSLDEDEEPKSCLVGPEGSLSFSPLPGNILVPMAASPGLGEPPPPQEANPVYMCGEGGLRQLDLTWLRPTEPGSEGDYMVLPRRTLSLQPGGGGGGGEDAPRARPEGTPRRAAKTVAHTEGYPSFLSVDHSGLGLGPAYGSLQNPYGMTFQPPPPTPSARQVPEPGERSRTMPRTVPGSTMKMGSLERKKLRYSDLDFEKVMHTRKRHSELYHELNQKFHTFDRYRSQSTAKREKRWSVSSGGAAERSVCTDKPSPGERPSLSQHRRHQSWSTFKSMTLGSLPPKPRERLTLHRAAAWEPTEPPDGDFQTEV

SEQ ID NO: 338541 - DNA, 4503 bp, Artificial Sequence
  derived and/or modified sequence
atgctgtcactgcgggggccggatactcatggaaagggtcaccgcatgactcctgcctgccctctgctgttgtccgtgatcctgagcctgcggctggcaactgcattcgacccagccccgagtgcctgttcggcgcttgcaagcggcgtgctttatggcgcctttagccttcaggatctcttccccacaatcgcatccgggtgctcctggaccctcgagaatccagatcccacaaaatactccctctatctgaggtttaatcgccaggaacaggtgtgcgcacactttgctcccagactgttgccgcttgatcattatctggttaattttacgtgtctaagaccatcccctgaagaagcggttgctcaagctgaatccgaggtcggccgtccagaagaggaggaagccgaggcagcggctgggctggagctgtgctctggttcaggaccttttactttcctgcacttcgataaaaactttgtacagctctgtttaagcgccgagcctagtgaggcgcctcgtctccttgcccccgctgccctcgcctttaggttcgtagaagtgctgctgatcaacaataataactcaagtcaatttacctgtggggtgctgtgtcgatggagtgaagagtgcggacgggccgcaggacgggcctgcgggtttgctcagccaggctgctcttgtcctggggaggctggggctggcagcactacaaccacctcaccaggccctcctgccgcacacacgttgagtaacgctctagttccaggcgggcccgctccccccgccgaagcagacctccacagtggcagtagcaatgacctgttcactactgaaatgcggtatggggaggagccagaggaagaaccaaaagtcaagacccagtggccacggagcgcagatgaaccgggcctgtacatggctcagacagttcatggtgtgtgggaagagtggggctcctggagcctgtgtagtaggtcatgtggcagaggatcacgctcacgaatgcggacatgtgtgcccccccagcatggcggaaaggcgtgcgaggggcccgaacttcagacaaaactctgctctatggcagcatgccctgtggagggtcagtggttggaatggggaccgtggggaccttgttctacctcttgcgcgaatggcacccagcagcgctcgagaaaatgttctgtcgctggcccagcttgggcaacctgtacgggtgccttaaccgacacaagggaatgtagcaatctggagtgtcctgccaccgattccaaatgggggccttggaacgcgtggtcactgtgtagtaaaacttgcgataccggttggcagagacggtttagaatgtgccaggcaactggcactcaaggatatccctgtgaaggtactggcgaagaggttaaaccctgtagcgaaaaacggtgccccgctttccatgagatgtgtagggacgaatacgttatgcttatgacttggaagaaggcagccgcaggagaaataatctacaataaatgcccaccaaatgctagtgggtcagcttcgcggaggtgtctcctgagtgctcagggggtagcttattggggcctaccaagctttgctagatgtatctcgcacgagtatcgttatctctatctatcactgagagagcatcttgcaaaaggacagcggatgctagctggcgaaggtatgtctcaggtcgttagatccttgcaggagttactggccaggaggacttattattcaggagacctgctgttttctgttgatattctaaggaacgtcacggatacattcaagcgcgctacctatgtcccgtcagctgatgatgtccagcgattttttcaagttgtgtccttcatggtagacgccgagaataaggagaaatgggatgacgcccaacaggtatcccccgggtctgtgcatttacttcgagtggtggaagacttcatccatctcgttggggatgcactgaaagctttccagagttccctgattgtcacagacaatctggtcatttccatccaacgcgagcctgtcagcgctgtttcttccgatattacgttcccaatgaggggacgaaggggaatgaaagactgggtgcggcatagcgaagatcggttgttcctgccaaaggaggttctcagtctgagctcccccggaaagcccgccacatcaggggctgcagggagcccagggcggggacgagggccgggcacggtgccaccagggcccggccactctcaccaacggctcctccccgcagatcccgatgagtcctcgtacttcgtgattggagcggtgctgtacagaactctgggtctgatcctccctcctccgcgtccccctcttgcagtgacctcgcgtgtgatgactgtcacagtgagacctcccacccagccccccgcagagccccttattacagtggagctgtcatatataattaatggcacgaccgatccacattgcgcttcctgggattatagcagagctgacgcctcgagcggggattgggatacagagaactgtcagacacttgaaacacaggccgctcacacaaggtgccagtgtcagcacttatctacatttgcagtgctagcccagcctcccaaggacctaacattagaactagccggctcgcctagtgttcctctggtgattggatgcgcagtgagctgcatggccctgctgacattgctggctatttatgcagccttctggcgcttcataaagtccgaaaggagcatcatcctcctcaacttttgtctaagcatcctggcatccaacattcttatcctggtggggcagtctagggtcctgagcaaaggagtgtgcacaatgacggcagccttcttacatttcttcttcctttcttcgttctgttgggtgctcaccgaggcgtggcagtcatacttggccgtcatcggtagaatgagaacaagactcgttagaaaaagattcctgtgcttaggatggggcctacccgctcttgtcgtggcggtaagtgtgggattcacaagaacaaaggggtacggcacctcttcatattgctggttgagccttgaaggcgggctgctctacgccttcgttggcccagcagctgtgatcgtgctggtgaatatgctgattggtataatcgtgttcaacaagctaatggctagggacggaattagcgataagagtaagaaacagagagcgggcgccagcctgtggtccagctgtgtagtgctgcctctactcgccctgacgtggatgagtgccgtcctggccatgaccgatcgtagatccgtgctgtttcaagcgctctttgctgtgttcaattccgcccagggtttcgtcattaccgcggtgcactgtttcctgcggagggaggttcaggatgtggtcaagtgccaaatgggcgtgtgcagggcggatgaaagcgaggattcccctgatagctgcaagaatggtcagctgcaaattctcagcgatttcgagaaggatgtagacttggcctgccagaccgttctatttaaggaagttaacacctgtaacccttctaccattactgggaccctgagccgcctcagcctcgatgaagacgaagagcctaagtcctgtctggtcggccctgagggatcactaagttttagccctcttccaggcaacatactggtgcctatggcagcatctcctgggcttggggaaccgccaccgccccaggaggcaaacccggtttacatgtgtggagaaggcggcttgcggcaactagatttgacatggcttcggccaaccgagcccggaagcgagggagattatatggtgttgccacgtaggactctctctttacaaccgggaggcgggggtgggggaggcgaggacgcccccagggcacgtcctgaagggacacctcgcagggccgccaaaaccgtagcccatactgaggggtacccatcttttctcagcgtggaccacagtggcctgggactggggcctgcttatggctccttgcagaatccttacggcatgacatttcaacccccgccaccaactcctagcgcacggcaggtccccgagcccggagagcgctcacgcaccatgccccggaccgtcccgggttcaacaatgaaaatgggctccctcgagagaaagaagctgcgctactccgatctcgatttcgaaaaggtgatgcacactcgcaagaggcattccgaattatatcatgagcttaaccagaaattccataccttcgaccggtatcgctctcaatcaacagctaaacgtgagaagagatggtccgtgtcaagtgggggagctgccgaacgatctgtgtgcacagacaagcccagccccggcgagagaccaagtctctctcaacatcggagacaccaatcctggagtacatttaagtcaatgaccctaggcagccttcccccgaagccgcgtgaaagactcaccctgcacagggcagctgcatgggaaccaactgagccaccagatggagactttcagaccgaggtgtag

SEQ ID NO: 338542 - DNA, 4503 bp, Artificial Sequence
  derived and/or modified sequence
atgctgagcctgcggggccctgacacccacggcaagggccacaggatgaccccagcctgccccctgctgctgagcgtcatcctgagcctgcggctggccacagcctttgatcctgcccccagcgcctgcagcgccctggccagcggcgtgctgtatggagccttcagcctgcaggacctcttccccaccatcgccagcggctgctcctggaccctggagaacccagaccccaccaagtacagcctgtacctgcgcttcaaccggcaggagcaggtgtgtgcccactttgccccccggctgctgcccctggaccactacctggtgaacttcacctgcctgcggcccagccctgaggaggccgtggcccaggccgagagcgaggtgggccggcctgaggaggaggaggccgaggccgccgccggcctggagctgtgcagcggcagcggccccttcaccttcctgcactttgacaagaactttgtgcagctgtgcctgtctgctgagcccagcgaggccccccggctgctggccccagctgccctggccttccgctttgtggaggtgctgctgatcaacaacaacaacagcagccagttcacctgtggggtgctgtgccgctggagcgaggagtgtggccgggctgctggccgggcctgtggctttgcccagcccggctgcagctgccctggagaggccggggccggcagcaccaccaccaccagccctggccccccagctgcccacaccctgagcaatgccctggtgcctgggggccctgcccctcctgctgaggccgacctgcacagcggcagcagcaatgacctcttcaccacagagatgagatatggagaggagcctgaggaggagcccaaggtgaagacccagtggcccaggtctgcagatgagcccggcctgtacatggcccagacagtgcacggcgtgtgggaggagtggggctcctggagcctgtgcagccgcagctgtggccggggcagccgcagcaggatgaggacctgtgtgcccccccagcacggcggcaaggcctgtgagggccctgagctgcagaccaagctgtgcagcatggccgcctgccctgtggagggccagtggctggagtggggcccctggggcccctgcagcaccagctgtgccaacggcacccagcagaggagcaggaaatgttctgtggccggccctgcctgggccacctgcacaggagccctgacagacaccagagaatgtagcaacctggagtgcccagccacagacagcaagtggggcccctggaatgcctggagcctgtgcagcaagacctgtgacaccggctggcagaggcgcttcaggatgtgccaggccaccggcacccagggctacccctgtgagggcactggagaggaggtgaagccctgcagcgagaagcgctgcccagccttccacgagatgtgcagagatgaatatgtgatgctgatgacctggaagaaggctgctgctggggagatcatctacaacaagtgccccccaaatgccagcggcagcgccagccgccgctgcctgctgagcgcccagggcgtggcctactggggcctgcccagctttgcccgctgcatcagccatgagtaccgctacctgtacctgagcctgcgggagcacctggccaagggccagaggatgctggccggggagggcatgagccaggtggtgcgcagcctgcaggagctgctggcccggaggacctactacagcggggacctgctcttctctgtggacatcctgagaaatgtgacagacaccttcaagagggccacctacgtgcccagcgcagatgatgtgcagcgcttcttccaggtggtgtccttcatggtggatgctgagaacaaggagaagtgggatgatgcccagcaggtgtccccaggctctgtgcacctgctgcgggtggtggaggacttcatccacctggtgggagatgccctgaaggccttccagagcagcctgattgtgacagacaacctggtgatcagcatccagcgggagcctgtgtctgctgtgtccagtgacatcaccttccccatgagaggaagaagaggcatgaaggactgggtgcgccacagcgaggacaggctcttcctgcccaaggaggtgctgagcctgagcagccctgggaagccagccaccagcggggccgccggcagccctggccggggccggggccctggcaccgtgcccccaggccctggccacagccaccagaggctgctgcctgctgaccctgatgagagcagctacttcgtcatcggggctgtgctgtaccgcaccctgggcctcatcctgcccccacccaggcctcccctggccgtgaccagccgggtgatgacagtgacagtgcggccccccacccagcccccagctgagcccctcatcaccgtggagctgagctacatcatcaatggcaccacagacccccactgtgcctcctgggactacagcagagcagatgccagcagcggggactgggacacagagaactgccagaccctggagacccaggccgcccacacccgctgccagtgccagcacctgagcacctttgctgtgctggcccagccccccaaggacctgaccctggagctggccggcagccccagcgtgcccctggtgattggctgtgctgtgtcctgcatggccctgctgaccctgctggccatctatgctgccttctggaggttcatcaagtctgagaggagcatcatcctgctgaacttctgcctgagcatcctggccagcaacatcctgatcctggtgggccagagccgggtgctgagcaaaggagtgtgcaccatgacagctgccttcctgcacttcttcttcctgagcagcttctgctgggtgctgacagaggcctggcagagctacctggccgtcatcggccgcatgaggacccggctggtgaggaagcgcttcctgtgcctgggctggggcctgcctgccctggtggtggccgtgtctgtgggcttcaccaggaccaagggctacggcaccagcagctactgctggctgagcctggagggcggcctgctgtatgcctttgtgggccctgctgctgtgattgtgctggtgaacatgctgattggcatcatcgtgttcaacaagctgatggccagagatggcatcagtgacaagagcaagaagcagagagctggggccagcctgtggagcagctgtgtggtgctgcccctgctggccctgacctggatgtctgctgtgctggccatgacagacagaagatctgtgctcttccaggccctgtttgctgtgttcaacagcgcccagggctttgtgatcacagctgtgcactgcttcctgcggcgggaggtgcaggatgtggtgaagtgccagatgggcgtgtgcagagcagatgaaagtgaggacagcccagacagctgcaagaatggccagctgcagatcctgagtgactttgagaaggatgtggacctggcctgccagacagtgctcttcaaggaggtgaacacctgcaaccccagcaccatcaccggcaccctgagccggctgagcctggatgaagatgaggagcccaagagctgcctggtgggccctgagggcagcctgtccttcagccccctgcccggcaacatcctggtgcccatggccgccagccctggcctgggggagcccccaccaccccaggaggccaaccctgtgtacatgtgtggggagggcggcctgcggcagctggacctgacctggctgcggcccacagagcccggcagcgagggggactacatggtgctgcccaggaggaccctgagcctgcagcccggcggcggcggcggcggcggggaggatgccccccgggcccggcctgagggcaccccccggcgggccgccaagacagtggcccacacagagggctaccccagcttcctgtctgtggaccacagcggcctgggcctgggccctgcctacggcagcctgcagaacccctacggcatgaccttccagcccccaccacccacccccagcgcccggcaggtgcctgagcctggagagaggagcaggaccatgcccaggacagtgcccggcagcaccatgaagatgggcagcctggagaggaagaagctgcgctacagcgacctggactttgagaaggtgatgcacaccaggaagaggcacagcgagctgtaccacgagctgaaccagaagttccacacctttgaccgctaccgcagccagagcacagccaagcgggagaagcgctggagcgtgtcctctggaggagctgctgagaggtctgtgtgcacagacaagcccagccctggagagcggcccagcctgagccagcaccggcggcaccagagctggagcaccttcaagtccatgaccctgggcagcctgccccccaagccccgggagcggctgaccctgcacagagctgctgcctgggagcccacagagcccccagatggagacttccagacagaggtgtag

SEQ ID NO: 338543 - DNA, 4503 bp, Artificial Sequence
  derived and/or modified sequence
atgctgagcctgcggggccccgacacccacggcaagggccaccggatgacacctgcctgtccccttctactgagcgtgatcttgtcactgcgcttggctacggcttttgaccccgccccctccgcctgctctgcgctggcaagtggcgtgttatacggggccttctcactgcaggacctgttcccgaccatcgccagcgggtgttcctggacgctggaaaacccggatcccacgaagtatagcctatacctgagatttaacaggcaggagcaagtgtgtgcgcacttcgctccccgactgttgcccttagaccattacttagtgaacttcacctgccttagaccatcaccggaagaggccgttgcacaagccgagtcagaggtcggtaggccagaagaggaggaagctgaggccgcagccgggctggaactgtgtagcggctctggcccctttaccttccttcactttgacaagaattttgtgcagctatgcctatcagcagaaccatctgaggccccacgcttgctggcacctgccgctttggcgttccgatttgtggaggttttattaatcaacaacaataactcttctcagtttacctgcggcgtgctctgtaggtggtcagaagaatgcggccgggcggcaggccgggcttgcggatttgctcagcccgggtgcagctgtccaggcgaagctggtgccgggagtaccacgacaacttcccctgggccacctgccgcccatacactaagcaacgccctcgtgcctggcggaccggcacctcctgccgaagccgacctccattccggcagctccaacgacctattcacaacagaaatgagatacggtgaggaacctgaagaagagcccaaggtgaagacacagtggccaaggtccgccgatgagccaggactctatatggctcagactgtacacggcgtgtgggaagagtgggggagttggtccctttgttctcggtcatgcgggcggggatcaaggtcacgcatgagaacatgtgtaccaccacagcatgggggaaaagcatgcgaagggccagagcttcagactaagttatgcagcatggccgcttgtccagttgagggccagtggctggagtggggtccctggggaccttgtagcacatcttgcgccaatggtactcagcaaagaagcaggaagtgctctgtggccggccctgcctgggccacctgcacgggggcactgaccgacacccgcgagtgttccaatctcgagtgtccggccaccgattcaaaatgggggccgtggaatgcttggtctctatgtagtaagacctgtgacacgggatggcaaagaaggttcaggatgtgccaggcaacaggcactcagggctatccatgcgagggaaccggcgaagaggtaaagccctgtagtgaaaagcggtgtcctgccttccatgaaatgtgtcgcgacgaatacgtaatgctaatgacatggaaaaaggcagccgctggcgagatcatatacaataagtgcccacccaatgccagtggcagcgcaagtcggagatgtcttttgtctgcccagggcgtcgcttactggggcctaccttcattcgccagatgtatcagccatgagtaccgctatctctacctgtcactgagggaacatcttgccaaagggcagagaatgctggcaggcgagggtatgagccaagtggtgcgcagcctacaagagttattggctagaagaacatactactctggggaccttctattctcagtggatatcctccggaacgtgacggatacttttaaaagagcaacctatgtgccgagtgctgatgatgtgcagcgcttcttccaggtagtctcattcatggttgacgcagaaaataaggaaaaatgggatgacgcccagcaggtgtcccccggttccgtgcacttactgcgggttgtggaagacttcattcatctcgttggggacgctctcaaggccttccagagctccttgattgtcacagataatttggtaatctccatccagagggagccagttagtgccgtcagtagcgatataactttccctatgcggggacggcgggggatgaaggactgggttcggcactctgaagaccggctgttcctgccaaaggaggtactttctctctccagcccagggaaaccggctacttccggtgcagccgggtccccagggcgcggccgtggcccaggcaccgtccctcctggcccaggacatagccaccagcgtctcctacctgctgacccggacgagtccagctacttcgtgatcggagctgttctctaccgcactttaggcctgatcctgcctccccctaggccacctctggcagtgacctctagagtcatgactgttaccgtccggccgccgacacagccacccgctgaaccgctcattaccgtcgagctgagctacatcataaacggtactaccgacccacactgcgcatcttgggattatagtcgcgctgatgcctcttctggagactgggataccgagaattgtcagactctggagacgcaggcagcacataccagatgtcagtgtcagcacctgtccacattcgccgtactggcccaaccgccgaaggacctgacactagaactagccggtagtccgagtgtgccactggtaataggctgcgccgtgtcttgcatggcattactcactttgttggccatctatgccgctttctggaggtttatcaagtccgagaggtctataatcctcctaaatttctgcttaagcatcttggcatccaatatactcatactcgttggacagtctcgggtgctgagtaaaggcgtatgcacgatgactgcagcctttctgcacttcttttttctgagctccttctgttgggtattgaccgaagcatggcagagttacctagctgtgatcgggcgtatgcggactagattggtcagaaagcgttttctctgcctcggatggggcttgcctgcacttgttgtggcagtgagcgtcggctttacaaggacaaagggatacggcacttcttcatattgttggctttcgctggagggaggcctcctgtatgcgttcgtgggtcctgcagctgtcattgtcctggttaatatgctgattggaataatcgtctttaataagctgatggccagggacgggatttcggacaagtcaaagaagcaacgagcaggcgccagtctgtggtcctcttgtgtcgtcctgccactgctggccttgacttggatgagcgccgttctggcaatgaccgatcgtcgctctgtgctttttcaggccctgttcgctgtgttcaactcagcacaaggattcgtcatcacggccgtccattgctttctcaggagggaggtccaggatgtggtcaagtgccagatgggagtctgccgggcagatgagagcgaagactcacccgatagttgtaagaatggccaattgcagatcctgtcagacttcgaaaaggatgtggacctggcttgccagactgtgctgttcaaagaggtcaacacatgcaatcccagcaccattaccggcacacttagtcgactttcactcgacgaggatgaggagcctaaaagttgcttggtcgggccagaaggatcattgtcgttctctcctttgcctgggaacatcctcgtgccaatggccgccagccccgggctcggcgagccaccacctccccaggaggcaaacccagtttatatgtgtggcgagggagggttacgacagctagatctgacgtggctgcggccgacagaacccggctcagaaggagattacatggtgctcccccggagaaccctctccttgcaaccggggggcggaggcgggggaggagaggacgcgcctagggcaaggccagaaggcacgccaaggcgcgcggccaaaacagttgctcatacagagggctatccatcattcttgagcgtggatcacagcggcctgggcctgggaccagcctacggctcgctccaaaacccatacggtatgacatttcagcccccaccccctacaccttcagcccgccaggtgcccgagccaggagagcggtcaaggaccatgcccaggaccgtgcccggttccactatgaagatgggctctctcgagcggaaaaaacttaggtattcagatctcgatttcgaaaaagtgatgcacactaggaagcgacacagcgagctgtatcatgaactgaaccagaaatttcatacgttcgaccgctatcgaagccagtctaccgcaaaacgcgaaaaaagatggtcggtaagcagcggaggtgccgcagaacgaagtgtctgcactgataaaccttccccaggcgaaagaccaagtctgagccagcacaggcgccatcagagctggtcaactttcaagagcatgacgctaggtagtctcccacctaagcctcgtgagcgcctgacactccaccgggctgcggcctgggagcccacagaaccacccgatggcgactttcagaccgaagtatag

SEQ ID NO: 338544 - DNA, 4503 bp, Artificial Sequence
  derived and/or modified sequence
atgttatctttacgtgggccagatactcacgggaagggccataggatgaccccggcttgtcctctgctactcagtgtgattctctctttgaggcttgccacggccttcgatcctgccccaagcgcctgctccgccctagccagcggtgtgctctacggagccttctctcttcaagatctgttccccacgatcgcatccggctgttcttggaccttggagaacccagaccccaccaaatactccctttacctgcgtttcaaccggcaggagcaggtgtgcgctcatttcgcgccacgcttgttaccactggatcactacctggtgaactttacatgcctgcgtcccagcccagaagaagcagtcgcacaggcagagagcgaagtgggtaggcctgaggaagaagaagctgaagccgctgctggactggagctgtgttctggctcaggccctttcacattccttcactttgataaaaattttgtccagctgtgtctgtctgcagagcctagcgaagccccaagactgctggcaccggcagcgttagctttccggtttgtcgaagttttgctgatcaataacaataactccagccagttcacctgcggggtgctgtgtcgttggtcagaggagtgtgggagggccgcaggacgcgcttgtggttttgcccagcccggttgcagctgtccaggagaggccggtgcaggcagcaccactaccacctcaccgggaccacctgctgctcacacattgtccaatgcactagtgcccggaggacctgcccctccggctgaagctgatctgcatagtggatctagtaacgacctgttcactactgaaatgagatacggagaagaacctgaggaagagcccaaggttaagactcagtggccacggtcagcagacgagcctggtttgtatatggcgcaaacagtacatggtgtctgggaagagtgggggagttggtccctgtgctctcgttcatgcggtaggggtagccgaagcaggatgaggacttgcgttcctcctcagcatggcggaaaggcgtgcgagggacccgaactgcagaccaagctgtgctccatggctgcatgcccagtagaggggcagtggctggagtggggtccctggggaccgtgctcgactagttgcgccaatggcactcagcagaggtccaggaagtgcagcgtggcgggtccggcatgggctacctgcaccggcgctctcacggatacaagagagtgttcgaatctggagtgccctgccacggactcaaaatggggcccttggaatgcctggtcattgtgctctaaaacatgcgatacaggttggcagagacgatttcggatgtgccaagcaaccggaacacaaggctacccctgcgagggaacaggcgaggaggtcaaaccttgctcggaaaagagatgcccagcattccatgagatgtgcagagacgagtatgttatgctcatgacctggaagaaagcagctgcaggcgaaatcatctacaacaaatgcccaccaaatgcttcgggtagcgcctctcggaggtgtttgctgagcgcgcaaggagtggcctattgggggttgccatctttcgcccgttgcatctcgcatgagtacagatatctttatttgagcctacgggagcatctggctaagggacagaggatgcttgcaggagaaggcatgagccaggtagtgcgatccttgcaggaactgctggcccgtcgcacatactattccggcgatttgttgttctccgtcgacattcttaggaatgtgacagacaccttcaaacgggctacttacgtcccctcagccgacgatgtccagcgcttcttccaggtggtgagcttcatggtcgatgctgaaaataaggagaagtgggacgacgcgcagcaggtgtcgcctggttcagtgcacctgttgcgtgtcgtggaggattttatacatttggtcggagatgctctaaaagcgttccagagtagcctcatcgttaccgataacttagttatttctatccaacgtgaaccagtgtcagctgtctcatccgacattactttcccgatgaggggcagacggggaatgaaggactgggtgcgacactcggaggaccggctctttctccctaaggaagtgctgtctctgagctctccgggaaaacctgccactagcggcgcagcaggctccccaggcagagggagagggccaggcaccgtccccccaggcccaggacacagccaccagagactgctcccggcagacccggatgagtctagttactttgtgattggggcagtgctctacaggactctgggacttatactaccacctccgagacccccattagctgtgacgagtagggtaatgacagtaaccgtaagaccccctacacagcctccagctgaacccctaattacggtggaattaagctacattattaatgggacaaccgacccccactgtgctagctgggactacagcagagccgatgcaagcagcggggattgggatacagagaattgccaaacgctggaaactcaagctgcacatacccgctgccaatgtcagcacctgtccaccttcgcggttctggctcagcctccaaaagatctaacactggaactcgcgggaagcccttccgtaccgctagtaattgggtgcgctgttagctgcatggccctactaacactgttggctatttatgctgctttctggagatttattaagtccgagcggtctatcatcctgcttaacttttgtctcagcattttggcctcaaatatactgattctcgtggggcagagcagggtgctctctaagggtgtctgtacgatgactgctgccttcttgcattttttcttcctaagctctttttgctgggtcctgactgaggcatggcaatcttacctggccgttatcggcagaatgcgaaccagactggtgcgtaaaaggttcctatgtctgggctgggggctgcctgccctcgtcgtcgccgtgagtgtgggtttcacacgtaccaaaggctatgggacctcttcgtattgctggcttagtctagaggggggtctgctgtatgcattcgttggacccgctgcggttattgttctcgtgaatatgctgatcgggatcatcgtgtttaataagctcatggcccgagatggaattagtgacaagagtaagaaacagagggcaggggcatctctttggtcaagctgtgtggttttacccttgttggctctcacatggatgagcgccgtcctagccatgacagaccggaggagcgtgctgtttcaggctctgttcgccgtgtttaactccgcacagggatttgtgatcactgccgtgcactgctttctccggagagaagttcaggacgtggtcaaatgccaaatgggggtgtgtagggccgatgaatcagaagactcacctgatagctgtaagaacggccagttacagatcctcagcgacttcgaaaaagacgtcgatctcgcatgtcagaccgtactttttaaggaagtcaacacgtgcaatcctagcactatcacgggaaccttaagccgcttaagtctggacgaggatgaggaaccgaaatcgtgcttagttggccctgagggcagcctttctttctcgccactgccgggaaacattctggtgcccatggcagccagcccaggcctgggggagccacctccacctcaggaggctaatcccgtgtatatgtgcggcgaaggcggactgcggcagttggatctaacttggctgagaccaacagagcctggaagcgaaggcgattatatggtcctgccacgcagaaccctgagcttgcagcctggaggtggtggcggagggggtgaggacgctcctcgggcaagacccgagggaacacctcggagggccgctaagacagtggcccatacagagggatacccctcattcctcagcgtggaccattcgggtctgggcctaggtcccgcttatgggtctcttcagaatccatatggcatgaccttccagcctcccccacccacaccttcagcaagacaggtgccggaacctggcgagcgctcacggactatgccaagaaccgtccccggttccacaatgaagatggggagcctggagcgtaaaaaactccgatattctgacttggatttcgaaaaagttatgcatacaaggaaacgacatagcgaactttatcacgagttgaatcagaaatttcacacatttgacaggtatagaagccagagcactgccaaacgtgagaaacgctggtctgtctcaagcggtggagccgcagaaaggtccgtgtgcaccgataaacccagccccggtgagcggccttctctgtcacagcaccgtcgacaccagtcctggagtacatttaagtctatgaccctcggttctctgcctccaaagccacgcgagcggctgacattgcacagggcagctgcctgggagcccactgaacctcctgatggcgattttcagaccgaggtgtag

SEQ ID NO: 338545 - DNA, 4879 bp, Artificial Sequence
  derived and/or modified sequence
ggggagggagatccagcttcagacatgcaaaggaagaccccgcagaggatcctgcctgacacttagctgtcatatgctgagcctcagagggccagatactcatggcaagggacataggatgaccccagcctgtcccctcttactgtctgtgattctgtccctgcgcctggccaccgccttcgaccccgcccccagtgcctgctctgccctggcctcgggtgtgctctacggggccttctcgctgcaggacctctttcctaccatcgcctcgggctgctcctggaccctggagaaccctgaccccaccaagtactccctctacctgcgcttcaaccgccaggagcaggtgtgcgcacactttgccccccgcctgctgcccctggaccactacctggtcaactttacctgcctgcggcctagccccgaggaggcggtggcccaggcggagtcagaggtggggcggccagaagaggaggaggcagaggcggcagcggggttggagctgtgcagcggctcaggcccctttaccttcctgcacttcgacaagaacttcgtgcagctgtgcctgtcggctgagccctccgaggccccgcgcctgctggcgcccgctgccctagccttccgctttgtcgaggtcttgctcatcaacaacaacaactctagccaattcacctgtggtgtgctctgccgctggagtgaggagtgtggccgcgctgccggcagggcctgcggctttgctcagccaggctgcagctgccctggagaggcgggggccggctccaccaccaccacatctccaggccctcctgctgcccacaccctgtccaatgccctggtgcccgggggcccagccccacctgctgaggccgatttgcactcggggagcagcaatgatctgttcacaaccgagatgagatatggtgaggagccggaagaggaaccgaaagtgaaaacccagtggccgaggtctgcagatgagcctgggctatacatggcgcagacagtgcacggcgtgtgggaggagtgggggtcctggagcctgtgctcccgcagctgcgggcgggggtcccggagccggatgcggacctgcgtgcccccccagcacggcggcaaggcctgcgagggtcctgagctgcagactaagctctgcagtatggctgcctgcccggtggaaggccagtggttagaatggggtccctggggcccatgctccacgtcctgtgccaatgggacccaacagcgcagccggaagtgcagcgtggcgggcccagcctgggccacatgcacgggtgccctcactgacacccgggagtgcagcaacctcgagtgcccggccactgatagcaagtgggggccatggaatgcgtggagcctgtgctctaagacgtgtgacacaggctggcagcgccgcttccgcatgtgccaggccacgggcacgcagggctacccctgcgagggcaccggagaggaggtgaagccttgtagtgagaagaggtgtccagccttccatgagatgtgcagggatgagtacgtgatgctgatgacgtggaagaaggcagctgctggcgagatcatctacaacaagtgccccccgaatgcctcagggtctgccagccgccgctgtctcctcagtgcccaaggcgtggcgtactgggggctgcccagctttgctcgctgcatctcccatgagtaccgctacctgtatctgtcacttagggagcacctggccaaggggcagcgcatgctggcaggcgagggcatgtcgcaggtggtgcgcagcctgcaggagctactggcccggcgcacctactatagtggggacctgctcttctctgtggacattctgaggaatgtcactgacacctttaagagggccacctacgtgccctcggctgatgatgtgcagcgcttcttccaggtggtgagcttcatggtggatgcggaaaacaaggagaagtgggacgatgctcagcaggtgtcccctggctctgtgcacctgctccgtgtcgtggaggacttcattcacctggtgggcgatgctctcaaggccttccagagctctctgattgtcacagataatctagtgatcagcattcagcgagagcccgtctcagctgtgtccagtgacatcacgttccccatgcggggccgccggggcatgaaggactgggtgcggcactcagaggaccgcctcttcctgcccaaggaggtgctcagcctctcctccccagggaagccagccacatctggggcagcaggcagccctggcagggggaggggcccaggaacggtgcctcctggcccaggccactcccaccagcgcctcctcccagcagaccctgatgagtcctcctactttgtgatcggtgctgtactctaccgcacccttggcctcatcctgccgcctcccaggcccccgctggccgtcacatcccgggtgatgacagtgactgtgcgcccccctacccagcctccagctgagcccctcatcactgtggagctctcctacatcatcaatgggaccacggatccccattgcgccagctgggactactccagagcagatgccagctcaggagactgggacactgaaaattgccagaccctggagacccaggcagctcacacccgctgccagtgccagcacctgtccacctttgctgtactagcccagccgcccaaggacctgaccctggagctggcgggctccccctcggtccccctggtgatcggctgtgcagtgtcgtgcatggcgctgctcaccctgctcgccatctatgccgccttttggaggttcataaaatctgaacgctccatcatcttgctgaacttctgcctgtccatcttggcatccaacatcctgatcctcgtgggccagtcccgggtgctgagcaagggcgtgtgcaccatgacggctgccttcctgcacttcttctttctctcctccttttgctgggtgcttaccgaggcctggcagtcctacctggctgtcattgggcggatgcgcacccgcctcgttcgcaagcgcttcctctgcctgggctggggtctgcctgccctggtggtggccgtgtctgttggctttacccgaacgaaaggatacggtacatccagctactgctggctctccctggagggcggcctgctctacgcctttgtgggccctgcagccgtcattgtcctggtgaacatgctcatcggaatcatcgtcttcaacaagctcatggcacgtgatggcatctccgacaaatccaagaagcagagggccggggcctcactctggagctcctgcgtggtgctgcccctgctggcgctcacctggatgtctgccgtcctggctatgacagaccgccgttccgtcctcttccaggccctctttgctgtcttcaactccgcgcagggctttgtcatcactgctgtgcactgcttcctgcgccgagaggtccaggatgtggtgaagtgccagatgggggtgtgccgggctgatgagagcgaagactcccctgactcgtgtaagaacgggcagctgcagatcctgtcagactttgaaaaggatgtggatctggcttgtcaaacagtgctgttcaaggaggtcaacacttgcaacccgtccaccatcacgggcacactatcccgcctgtccctggatgaggatgaggagcccaagtcctgcctcgtgggccctgagggcagcctcagcttctcaccactgcctgggaatatcctggtgcccatggcagcctcaccagggctgggggagcctccgcccccacaggaggccaaccctgtttacatgtgtggggagggtggcctgcggcagctggacctcacatggctgcggcccactgagccaggctctgagggagactacatggtgctgccccggcggactttgagcctgcagcctggcggtgggggtggaggtggtgaggatgcccccagggcccggccggaggggaccccccggcgagctgccaagacagtggcccacactgaaggctaccccagcttcctgtccgtggaccactcgggcctggggctgggccctgcctatggatctctccagaatccctatggaatgaccttccaaccgccaccgccgacacccagcgcccgccaagtgcccgagccaggggagcgcagccggaccatgcctcgcaccgtgcccggctctaccatgaagatgggctccctggagcgaaagaaattacggtattcagacctggactttgagaaggtgatgcacacccggaaacggcattcagaactctaccacgagctcaaccagaagttccacactttcgaccgctaccgcagccagtccacggccaagagggagaagcggtggagtgtgtcctcgggtggggcagccgagcggagcgtgtgcaccgataagcccagccctggggagcgccccagcttgtcccaacatcggcgccatcagagctggagcaccttcaaatctatgacactgggctcgctgccccccaagccccgagaacggctgactctgcaccgggcagcagcctgggagcccacagaaccaccggatggtgacttccagacagaggtgtgagtgccacgctggactgcccactgcatataaatatatatatctctctattttcacactccactttggaactacccaggagccagcgccctctcccctctcccgagggctgggcagggaggcgccgtggactcagccaggctgggggagccggacatggcttggcctggggtcccagggcccttccttgtttctcagaggcccctcagccactggaaccccatcttcagcccagcctgtccgtccctgtcccgggctggggaggggggaggggaactttgttgggaataaacttcactctgtgga

SEQ ID NO: 338546 - DNA, 4503 bp, Artificial Sequence
  derived and/or modified sequence
atgctgagcctgagaggccccgacacccacggcaagggccacagaatgacccccgcctgccccctgctgctgagcgtgatcctgagcctgagactggccaccgccttcgaccccgcccccagcgcctgcagcgccctggccagcggcgtgctgtacggcgccttcagcctgcaggacctgttccccaccatcgccagcggctgcagctggaccctggagaaccccgaccccaccaagtacagcctgtacctgagattcaacagacaggagcaggtgtgcgcccacttcgcccccagactgctgcccctggaccactacctggtgaacttcacctgcctgagacccagccccgaggaggccgtggcccaggccgagagcgaggtgggcagacccgaggaggaggaggccgaggccgccgccggcctggagctgtgcagcggcagcggccccttcaccttcctgcacttcgacaagaacttcgtgcagctgtgcctgagcgccgagcccagcgaggcccccagactgctggcccccgccgccctggccttcagattcgtggaggtgctgctgatcaacaacaacaacagcagccagttcacctgcggcgtgctgtgcagatggagcgaggagtgcggcagagccgccggcagagcctgcggcttcgcccagcccggctgcagctgccccggcgaggccggcgccggcagcaccaccaccaccagccccggcccccccgccgcccacaccctgagcaacgccctggtgcccggcggccccgccccccccgccgaggccgacctgcacagcggcagcagcaacgacctgttcaccaccgagatgagatacggcgaggagcccgaggaggagcccaaggtgaagacccagtggcccagaagcgccgacgagcccggcctgtacatggcccagaccgtgcacggcgtgtgggaggagtggggcagctggagcctgtgcagcagaagctgcggcagaggcagcagaagcagaatgagaacctgcgtgcccccccagcacggcggcaaggcctgcgagggccccgagctgcagaccaagctgtgcagcatggccgcctgccccgtggagggccagtggctggagtggggcccctggggcccctgcagcaccagctgcgccaacggcacccagcagagaagcagaaagtgcagcgtggccggccccgcctgggccacctgcaccggcgccctgaccgacaccagagagtgcagcaacctggagtgccccgccaccgacagcaagtggggcccctggaacgcctggagcctgtgcagcaagacctgcgacaccggctggcagagaagattcagaatgtgccaggccaccggcacccagggctacccctgcgagggcaccggcgaggaggtgaagccctgcagcgagaagagatgccccgccttccacgagatgtgcagagacgagtacgtgatgctgatgacctggaagaaggccgccgccggcgagatcatctacaacaagtgcccccccaacgccagcggcagcgccagcagaagatgcctgctgagcgcccagggcgtggcctactggggcctgcccagcttcgccagatgcatcagccacgagtacagatacctgtacctgagcctgagagagcacctggccaagggccagagaatgctggccggcgagggcatgagccaggtggtgagaagcctgcaggagctgctggccagaagaacctactacagcggcgacctgctgttcagcgtggacatcctgagaaacgtgaccgacaccttcaagagagccacctacgtgcccagcgccgacgacgtgcagagattcttccaggtggtgagcttcatggtggacgccgagaacaaggagaagtgggacgacgcccagcaggtgagccccggcagcgtgcacctgctgagagtggtggaggacttcatccacctggtgggcgacgccctgaaggccttccagagcagcctgatcgtgaccgacaacctggtgatcagcatccagagagagcccgtgagcgccgtgagcagcgacatcaccttccccatgagaggcagaagaggcatgaaggactgggtgagacacagcgaggacagactgttcctgcccaaggaggtgctgagcctgagcagccccggcaagcccgccaccagcggcgccgccggcagccccggcagaggcagaggccccggcaccgtgccccccggccccggccacagccaccagagactgctgcccgccgaccccgacgagagcagctacttcgtgatcggcgccgtgctgtacagaaccctgggcctgatcctgcccccccccagaccccccctggccgtgaccagcagagtgatgaccgtgaccgtgagaccccccacccagccccccgccgagcccctgatcaccgtggagctgagctacatcatcaacggcaccaccgacccccactgcgccagctgggactacagcagagccgacgccagcagcggcgactgggacaccgagaactgccagaccctggagacccaggccgcccacaccagatgccagtgccagcacctgagcaccttcgccgtgctggcccagccccccaaggacctgaccctggagctggccggcagccccagcgtgcccctggtgatcggctgcgccgtgagctgcatggccctgctgaccctgctggccatctacgccgccttctggagattcatcaagagcgagagaagcatcatcctgctgaacttctgcctgagcatcctggccagcaacatcctgatcctggtgggccagagcagagtgctgagcaagggcgtgtgcaccatgaccgccgccttcctgcacttcttcttcctgagcagcttctgctgggtgctgaccgaggcctggcagagctacctggccgtgatcggcagaatgagaaccagactggtgagaaagagattcctgtgcctgggctggggcctgcccgccctggtggtggccgtgagcgtgggcttcaccagaaccaagggctacggcaccagcagctactgctggctgagcctggagggcggcctgctgtacgccttcgtgggccccgccgccgtgatcgtgctggtgaacatgctgatcggcatcatcgtgttcaacaagctgatggccagagacggcatcagcgacaagagcaagaagcagagagccggcgccagcctgtggagcagctgcgtggtgctgcccctgctggccctgacctggatgagcgccgtgctggccatgaccgacagaagaagcgtgctgttccaggccctgttcgccgtgttcaacagcgcccagggcttcgtgatcaccgccgtgcactgcttcctgagaagagaggtgcaggacgtggtgaagtgccagatgggcgtgtgcagagccgacgagagcgaggacagccccgacagctgcaagaacggccagctgcagatcctgagcgacttcgagaaggacgtggacctggcctgccagaccgtgctgttcaaggaggtgaacacctgcaaccccagcaccatcaccggcaccctgagcagactgagcctggacgaggacgaggagcccaagagctgcctggtgggccccgagggcagcctgagcttcagccccctgcccggcaacatcctggtgcccatggccgccagccccggcctgggcgagcccccccccccccaggaggccaaccccgtgtacatgtgcggcgagggcggcctgagacagctggacctgacctggctgagacccaccgagcccggcagcgagggcgactacatggtgctgcccagaagaaccctgagcctgcagcccggcggcggcggcggcggcggcgaggacgcccccagagccagacccgagggcacccccagaagagccgccaagaccgtggcccacaccgagggctaccccagcttcctgagcgtggaccacagcggcctgggcctgggccccgcctacggcagcctgcagaacccctacggcatgaccttccagccccccccccccacccccagcgccagacaggtgcccgagcccggcgagagaagcagaaccatgcccagaaccgtgcccggcagcaccatgaagatgggcagcctggagagaaagaagctgagatacagcgacctggacttcgagaaggtgatgcacaccagaaagagacacagcgagctgtaccacgagctgaaccagaagttccacaccttcgacagatacagaagccagagcaccgccaagagagagaagagatggagcgtgagcagcggcggcgccgccgagagaagcgtgtgcaccgacaagcccagccccggcgagagacccagcctgagccagcacagaagacaccagagctggagcaccttcaagagcatgaccctgggcagcctgccccccaagcccagagagagactgaccctgcacagagccgccgcctgggagcccaccgagccccccgacggcgacttccagaccgaggtgtag

SEQ ID NO: 338547 - protein, 1175 aa, Artificial Sequence
  derived and/or modified sequence
MAQTVHGVWEEWGSWSLCSRSCGRGSRSRMRTCVPPQHGGKACEGPELQTKLCSMAACPVEGQWLEWGPWGPCSTSCANGTQQRSRKCSVAGPAWATCTGALTDTRECSNLECPATDSKWGPWNAWSLCSKTCDTGWQRRFRMCQATGTQGYPCEGTGEEVKPCSEKRCPAFHEMCRDEYVMLMTWKKAAAGEIIYNKCPPNASGSASRRCLLSAQGVAYWGLPSFARCISHEYRYLYLSLREHLAKGQRMLAGEGMSQVVRSLQELLARRTYYSGDLLFSVDILRNVTDTFKRATYVPSADDVQRFFQVVSFMVDAENKEKWDDAQQVSPGSVHLLRVVEDFIHLVGDALKAFQSSLIVTDNLVISIQREPVSAVSSDITFPMRGRRGMKDWVRHSEDRLFLPKEVLSLSSPGKPATSGAAGSPGRGRGPGTVPPGPGHSHQRLLPADPDESSYFVIGAVLYRTLGLILPPPRPPLAVTSRVMTVTVRPPTQPPAEPLITVELSYIINGTTDPHCASWDYSRADASSGDWDTENCQTLETQAAHTRCQCQHLSTFAVLAQPPKDLTLELAGSPSVPLVIGCAVSCMALLTLLAIYAAFWRFIKSERSIILLNFCLSILASNILILVGQSRVLSKGVCTMTAAFLHFFFLSSFCWVLTEAWQSYLAVIGRMRTRLVRKRFLCLGWGLPALVVAVSVGFTRTKGYGTSSYCWLSLEGGLLYAFVGPAAVIVLVNMLIGIIVFNKLMARDGISDKSKKQRAGASLWSSCVVLPLLALTWMSAVLAMTDRRSVLFQALFAVFNSAQGFVITAVHCFLRREVQDVVKCQMGVCRADESEDSPDSCKNGQLQILSDFEKDVDLACQTVLFKEVNTCNPSTITGTLSRLSLDEDEEPKSCLVGPEGSLSFSPLPGNILVPMAASPGLGEPPPPQEANPVYMCGEGGLRQLDLTWLRPTEPGSEGDYMVLPRRTLSLQPGGGGGGGEDAPRARPEGTPRRAAKTVAHTEGYPSFLSVDHSGLGLGPAYGSLQNPYGMTFQPPPPTPSARQVPEPGERSRTMPRTVPGSTMKMGSLERKKLRYSDLDFEKVMHTRKRHSELYHELNQKFHTFDRYRSQSTAKDKPSPGERPSLSQHRRHQSWSTFKSMTLGSLPPKPRERLTLHRAAAWEPTEPPDGDFQTEV

SEQ ID NO: 338548 - DNA, 3528 bp, Artificial Sequence
  derived and/or modified sequence
atggcccaaacggtgcacggggtctgggaagaatgggggtcttggagcctatgttctcgttcttgtggtcgcggttcgcgctcaaggatgaggacatgtgtcccaccgcaacacggcggtaaggcctgcgaggggcccgaacttcagacaaagttgtgtagtatggctgcctgcccagtcgagggacagtggcttgagtggggcccttggggtccctgcagtaccagctgcgctaacggcactcagcagcgctctaggaagtgtagtgttgcaggtcctgcatgggccacatgtaccggagccctcaccgatactagggagtgctccaatctagaatgtccagctacagacagtaagtgggggccatggaacgcgtggagcctttgtagcaagacctgcgataccggctggcagcgaaggtttcggatgtgccaagctacaggaactcagggctacccatgtgaggggaccggcgaggaggttaaaccgtgctcagaaaaacggtgcccagcctttcatgagatgtgtcgcgatgaatacgtcatgctgatgacttggaagaaggccgctgctggggagatcatttacaacaagtgcccacctaatgcaagcggaagcgcgtcccggcgctgtttgttgagcgctcagggcgtggcttactggggcctcccttctttcgcacggtgcatttctcatgagtaccggtatctgtatctctccctgagggagcacttagccaaaggacagcggatgctcgccggggagggaatgagccaagtggtgcgaagcttgcaggagttactagcaagacggacatactatagcggagacttgctgttcagcgtggatatacttagaaatgtgaccgacaccttcaagagggccacgtacgtcccttccgccgatgacgttcagcgtttttttcaggtggtgagcttcatggtggatgccgaaaacaaggagaagtgggacgatgctcaacaagtgtcacccggctcagtgcatctgctgagagtggtcgaagacttcattcacctagtaggtgatgcactcaaggccttccaaagttctcttatcgtcactgacaacttggtgatctccatccagcgcgagcccgtctctgctgtctcgtccgatattacctttcctatgcggggccggcgtggaatgaaggactgggttagacacagcgaggaccggctcttcctgcctaaagaggtcctgtctctgtctagtcccggaaaaccagccacgtctggcgcagcaggatcccccggacggggtcgtgggccaggaaccgtgccccctgggcccggacattctcaccaaagattgctgcctgccgaccccgacgagtcttcctacttcgtgatcggcgctgtgctttacaggacactgggcttgattctcccgcctccacgaccacccctcgctgtcacatccagagtgatgacagttacggttcgaccacctacccagccaccggctgagcccctcatcaccgtcgaactgtcctacattatcaatggcactacagaccctcactgcgcctcgtgggattattctagagcagatgcttcctcaggagactgggatacagagaattgccagaccctggaaactcaggccgctcatacccggtgtcaatgtcagcatttgagtacatttgcagtgctggcccagcctcctaaggacctgactctcgaattggctggtagtcccagcgtgcccctggtcatcggatgtgccgtgtcctgcatggcactgctgactctgttggccatctatgccgctttttggaggttcattaagagtgagagatcaataatcctacttaatttctgtctgagcattctggcctctaacatcttgatattggtcggtcaatctcgcgtgctgtccaagggggtgtgcacaatgacggccgccttcctccattttttcttcctgtcttccttctgctgggtactcactgaggcttggcaatcatatttagccgtgatcggtaggatgcgtacacgcctcgttagaaaacggtttttgtgcttgggttggggcttgccagcgcttgtggtagccgtttcagtgggcttcacccgcaccaaggggtacggaacatcatcgtactgctggctgtccttggagggcggccttctttacgccttcgttggccctgcagctgttattgttttggtcaatatgctgattgggataatcgtctttaacaaactgatggccagggacggaatttctgacaagtcaaagaagcagagagcaggggcatccctgtggtcaagttgcgtcgttctgccccttctcgctctgacttggatgagcgctgttctggcgatgacggatcgacggtcggtcctgtttcaagctttgtttgctgtgtttaactccgcccagggcttcgtaattaccgctgtgcactgctttctacgcagggaggtccaggatgtcgtcaaatgccagatgggcgtgtgtcgggcagatgaaagcgaagatagtcctgattcttgcaagaacggccagctccagatccttagcgattttgagaaggatgtcgaccttgcatgtcagactgtcctgtttaaagaagtcaacacttgcaacccttcaacgattaccggaacactaagtcgtctgagtttagatgaggacgaagaaccaaaatcctgcctggtcggacccgaaggctctctgagcttctctcctttgccaggcaatatactggtccctatggccgcatcacctggtctaggtgagccgcctccaccacaggaggctaacccggtctatatgtgtggggagggcgggttacgccaactcgacttgacctggcttcggccgaccgaacctggcagcgaaggcgattatatggtgctaccccgcagaactctcagcctccagcccggaggcgggggcgggggaggcgaggacgccccgcgcgcacggccagagggcactcccaggcgagccgccaaaaccgtggctcatacagaaggatatcctagtttcctgagtgttgaccatagcggcctgggccttggcccagcttacgggagtcttcagaatccatacggcatgacatttcagcccccacctcccaccccttctgccagacaggtacccgagcccggggagcggagtagaactatgccacggactgtccccggtagtacgatgaaaatgggttccctggagcggaaaaaacttcggtacagcgacctggattttgagaaagttatgcatactcgcaagaggcacagtgaattgtatcacgaacttaaccagaagtttcacaccttcgatcgctacaggtcccaatctactgctaaggataagccaagtcccggtgaaagacccagcctgagtcaacatcggaggcatcagtcttggtccacatttaagagcatgaccctgggatctctacccccgaaaccacgtgagcggctgaccctgcatcgggccgccgcgtgggagcctacagagccgccagatggtgattttcagaccgaggtgtag

SEQ ID NO: 338549 - DNA, 3528 bp, Artificial Sequence
  derived and/or modified sequence
atggcccagacagtgcacggcgtgtgggaggagtggggctcctggagcctgtgcagccgcagctgtggccggggcagccgcagcaggatgaggacctgtgtgcccccccagcacggcggcaaggcctgtgagggccctgagctgcagaccaagctgtgcagcatggccgcctgccctgtggagggccagtggctggagtggggcccctggggcccctgcagcaccagctgtgccaacggcacccagcagaggagcaggaaatgttctgtggccggccctgcctgggccacctgcacaggagccctgacagacaccagagaatgtagcaacctggagtgcccagccacagacagcaagtggggcccctggaatgcctggagcctgtgcagcaagacctgtgacaccggctggcagaggcgcttcaggatgtgccaggccaccggcacccagggctacccctgtgagggcactggagaggaggtgaagccctgcagcgagaagcgctgcccagccttccacgagatgtgcagagatgaatatgtgatgctgatgacctggaagaaggctgctgctggggagatcatctacaacaagtgccccccaaatgccagcggcagcgccagccgccgctgcctgctgagcgcccagggcgtggcctactggggcctgcccagctttgcccgctgcatcagccatgagtaccgctacctgtacctgagcctgcgggagcacctggccaagggccagaggatgctggccggggagggcatgagccaggtggtgcgcagcctgcaggagctgctggcccggaggacctactacagcggggacctgctcttctctgtggacatcctgagaaatgtgacagacaccttcaagagggccacctacgtgcccagcgcagatgatgtgcagcgcttcttccaggtggtgtccttcatggtggatgctgagaacaaggagaagtgggatgatgcccagcaggtgtccccaggctctgtgcacctgctgcgggtggtggaggacttcatccacctggtgggagatgccctgaaggccttccagagcagcctgattgtgacagacaacctggtgatcagcatccagcgggagcctgtgtctgctgtgtccagtgacatcaccttccccatgagaggaagaagaggcatgaaggactgggtgcgccacagcgaggacaggctcttcctgcccaaggaggtgctgagcctgagcagccctgggaagccagccaccagcggggccgccggcagccctggccggggccggggccctggcaccgtgcccccaggccctggccacagccaccagaggctgctgcctgctgaccctgatgagagcagctacttcgtcatcggggctgtgctgtaccgcaccctgggcctcatcctgcccccacccaggcctcccctggccgtgaccagccgggtgatgacagtgacagtgcggccccccacccagcccccagctgagcccctcatcaccgtggagctgagctacatcatcaatggcaccacagacccccactgtgcctcctgggactacagcagagcagatgccagcagcggggactgggacacagagaactgccagaccctggagacccaggccgcccacacccgctgccagtgccagcacctgagcacctttgctgtgctggcccagccccccaaggacctgaccctggagctggccggcagccccagcgtgcccctggtgattggctgtgctgtgtcctgcatggccctgctgaccctgctggccatctatgctgccttctggaggttcatcaagtctgagaggagcatcatcctgctgaacttctgcctgagcatcctggccagcaacatcctgatcctggtgggccagagccgggtgctgagcaaaggagtgtgcaccatgacagctgccttcctgcacttcttcttcctgagcagcttctgctgggtgctgacagaggcctggcagagctacctggccgtcatcggccgcatgaggacccggctggtgaggaagcgcttcctgtgcctgggctggggcctgcctgccctggtggtggccgtgtctgtgggcttcaccaggaccaagggctacggcaccagcagctactgctggctgagcctggagggcggcctgctgtatgcctttgtgggccctgctgctgtgattgtgctggtgaacatgctgattggcatcatcgtgttcaacaagctgatggccagagatggcatcagtgacaagagcaagaagcagagagctggggccagcctgtggagcagctgtgtggtgctgcccctgctggccctgacctggatgtctgctgtgctggccatgacagacagaagatctgtgctcttccaggccctgtttgctgtgttcaacagcgcccagggctttgtgatcacagctgtgcactgcttcctgcggcgggaggtgcaggatgtggtgaagtgccagatgggcgtgtgcagagcagatgaaagtgaggacagcccagacagctgcaagaatggccagctgcagatcctgagtgactttgagaaggatgtggacctggcctgccagacagtgctcttcaaggaggtgaacacctgcaaccccagcaccatcaccggcaccctgagccggctgagcctggatgaagatgaggagcccaagagctgcctggtgggccctgagggcagcctgtccttcagccccctgcccggcaacatcctggtgcccatggccgccagccctggcctgggggagcccccaccaccccaggaggccaaccctgtgtacatgtgtggggagggcggcctgcggcagctggacctgacctggctgcggcccacagagcccggcagcgagggggactacatggtgctgcccaggaggaccctgagcctgcagcccggcggcggcggcggcggcggggaggatgccccccgggcccggcctgagggcaccccccggcgggccgccaagacagtggcccacacagagggctaccccagcttcctgtctgtggaccacagcggcctgggcctgggccctgcctacggcagcctgcagaacccctacggcatgaccttccagcccccaccacccacccccagcgcccggcaggtgcctgagcctggagagaggagcaggaccatgcccaggacagtgcccggcagcaccatgaagatgggcagcctggagaggaagaagctgcgctacagcgacctggactttgagaaggtgatgcacaccaggaagaggcacagcgagctgtaccacgagctgaaccagaagttccacacctttgaccgctaccgcagccagagcacagccaaggacaagcccagccctggagagcggcccagcctgagccagcacagaagacaccagagctggagcaccttcaagtccatgaccctgggcagcctgccccccaagccccgggagcggctgaccctgcacagagctgctgcctgggagcccacagagcccccagatggagacttccagacagaggtgtag

SEQ ID NO: 338550 - DNA, 3528 bp, Artificial Sequence
  derived and/or modified sequence
atggcccagaccgtgcacggcgtgtgggaggagtggggcagctggtccctctgctcacggagttgtggcagaggctcacgctctcgcatgcgcacatgcgtccctccgcagcatgggggcaaggcttgcgagggaccagagctccagactaaattgtgctcaatggctgcctgccctgttgagggccagtggttggaatggggtccgtggggtccttgttctacctcatgtgcaaatggtactcagcagcggtcgcggaaatgttctgtagctggacccgcttgggccacctgcacaggagcgcttactgacacgagagagtgtagtaatttggagtgccctgctactgacagcaagtggggtccatggaatgcctggagtttatgttccaaaacatgcgataccggatggcaaagacgtttcagaatgtgccaggctactggcacgcagggctacccttgcgaagggaccggggaggaagtcaaaccttgttctgagaaaaggtgccccgcgttccacgaaatgtgtagggacgagtacgtgatgctgatgacctggaagaaagcagctgcaggcgaaatcatctacaacaaatgtccgcctaacgcatcggggagtgcctccagacggtgcttgctgtccgcccaaggtgtagcttattggggtctgccttcgttcgccaggtgtatttctcacgagtatcgatatttatacctgagtctgcgagagcacctggcaaaggggcagagaatgttagcaggagaaggaatgtctcaggtggtccgctcactgcaggagctgctggctcggcgcacatactacagcggcgacctactctttagtgttgacatcttgagaaatgtgactgatacgtttaagagagcaacctacgttcccagcgctgacgacgtgcagaggttttttcaagttgtgagttttatggtggacgcagagaataaggaaaagtgggacgacgcccagcaggtgagtcccggcagcgttcatctgctccgagtcgtggaggatttcatacacctggttggggatgctctgaaggcgttccagtcaagcttgatcgtaaccgataacctggtcatttctatccagcgagagcctgtttctgccgtgagctcagacataactttccccatgcgcgggcggcggggcatgaaggactgggtgaggcacagtgaggatagattgttccttcccaaggaggtgctttctctgagctcgcccggcaaaccggctacttccggagcagccgggagcccaggcagaggacgcgggcccgggaccgtccccccgggcccagggcactctcaccagaggctcttgccagccgaccctgacgagagctcttacttcgtgataggcgcagtcctgtaccgaaccttgggcctgatccttcccccccctcgtccaccattagcagttacgagtagagttatgacggtaactgtcagacctcctactcagcccccggctgagccgctgatcactgttgaactgagctatatcattaatgggacaacagaccctcactgcgcttcctgggattattcccgagctgatgcatcctctggcgactgggatactgagaactgtcaaacactagagacccaagccgctcacacaaggtgtcaatgtcaacacctgtctacgttcgctgtgttagctcaaccacctaaagatctgaccctagagctggctggcagcccgtcagtgccactagtgattggatgcgctgtttcgtgtatggctctgctaacactccttgccatctacgcagcgttttggcggtttattaagtccgaaaggtccatcattcttctgaacttttgcctatccattctggcctctaacatcctaatcctggtaggacagtctagggtcctgagtaagggagtgtgtactatgaccgctgcctttctacatttcttctttctaagctcattctgctgggtgttaactgaggcgtggcaatcttacttagcggtgattggaagaatgcgcacaaggttagttcgaaaaagatttctgtgcttaggctggggactccccgccctggtggttgcagtctctgttggattcactaggactaaaggatatggtacctcgtcttactgttggctcagcttggagggaggcctgctgtatgcattcgtgggccccgctgccgtgatcgtgcttgtgaatatgctgatcggaatcattgtgtttaataaactgatggcacgcgatggaatttctgacaagtcaaagaagcaaagggctggagcgtccctgtggtcttcatgcgtcgtattgccgttgctggctctgacatggatgtcagccgtcctggctatgactgacaggcgatctgtactttttcaggcactgtttgccgtttttaattctgcccagggctttgtcattacagcagtccactgttttctgcggagagaggttcaggacgttgtgaagtgccagatgggcgtgtgcagagccgatgaaagcgaagattcccccgatagttgtaaaaacgggcaactgcagattctgagcgacttcgagaaggatgtggacctggcttgtcagactgtactatttaaggaagtaaacacctgtaatccatctacgatcaccggcacccttagtcgcctctccctggatgaggatgaagagccaaaatcctgcctggttggccctgagggtagtttgtctttctcacctttgcccggaaacatacttgtcccaatggccgcgtcgccaggacttggcgagccaccgcccccacaggaagccaaccctgtatacatgtgcggtgaggggggactcaggcagctggacctgacctggctgaggccgacggagccgggcagcgagggagattacatggtcctgcctagacggacgcttagtctgcaacccggtggtgggggcgggggcggcgaagatgccccgcgggcgcgccctgagggtacgccccgccgcgcagctaagaccgttgcgcacacggaaggctaccccagctttctttccgtcgaccacagcggactcggactgggtcccgcttacggatctctgcagaacccctatggcatgactttccagcctcctccccctacacctagtgccaggcaggttccagagccgggggaacgatctcgcacaatgccacgcacagtcccaggaagcacaatgaaaatgggcagcctggagcgcaagaagctgcgttattccgatctagatttcgaaaaggtgatgcatactagaaaacgacattcggagctgtaccatgaactaaatcaaaagtttcatacctttgaccgataccggtcacagtcaaccgctaaagataagcccagccccggggaaagaccctccctgagccaacaccgccggcatcagagctggagtacatttaaatctatgaccttgggctcactaccaccgaaacctcgggaacgcctcaccttgcatagggctgccgcgtgggagccaacggaaccccccgatggagacttccagactgaggtgtag

SEQ ID NO: 338551 - DNA, 3528 bp, Artificial Sequence
  derived and/or modified sequence
atggctcagactgtgcatggtgtgtgggaggagtggggcagttggtcgctgtgttcccgtagctgcggtcgagggagcaggtccagaatgcgcacctgtgtcccccctcagcacggcggtaaggcttgtgagggaccagagttacagacaaagttatgctctatggcagcttgccccgtcgagggacagtggcttgagtggggaccatggggaccatgcagtaccagttgcgctaacggcacacagcagaggagtaggaagtgtagtgtggccggaccagcttgggccacttgcactggagcgctcaccgatacccgcgaatgttctaatttagagtgtccggcaaccgatagcaagtggggaccctggaatgcctggtcgctctgttctaagacatgtgataccgggtggcaacgcaggttcaggatgtgtcaggctaccggtacccagggttatccatgtgaggggactggagaggaagtaaagccttgctccgaaaagaggtgccccgctttccacgaaatgtgcagagacgaatacgttatgttaatgacatggaaaaaagccgcagctggggagattatctataataagtgtcctcctaatgcttctggatccgccagtcgaagatgtctgctgtccgcacaaggggtggcctactgggggctcccgagtttcgccaggtgtatctcccacgagtatagatacctctatctttccctgagagagcatctggccaagggacagcggatgttggccggagagggcatgagtcaggttgtacgatcccttcaggagctgttggcacgaagaacctattactcaggggaccttctgttcagtgttgatattctgaggaatgttaccgatacgtttaaaagagctacatatgtgcccagtgccgatgacgtgcaacgattcttccaggtcgtgagttttatggtagacgccgagaacaaggagaagtgggatgacgcccagcaggtgtctccagggtccgtccacttactgcgggtggtcgaagattttatacaccttgtgggggatgcccttaaggcatttcagtctagcctgatcgtcacagacaatctcgtcatctcgatccaaagagaaccagtaagcgccgtgtcttccgatatcacatttcccatgagggggaggcggggtatgaaggattgggttcgtcacagcgaagatagactgttcctgcccaaagaggtcctctccctgagttcacccggtaagcctgccacatcaggagcagcaggatcacctggcaggggcaggggcccagggactgtgccccctgggccaggacattctcaccaacgcctgcttcccgcagatccagacgagtcaagttacttcgtcatcggcgctgttctgtacaggaccctcgggctgatcttaccaccgcctcgtccgcctctcgcagtaacatcgcgcgtcatgacggtgacagttcggccacccacgcagccgccagcagagcctctcatcacggttgaactgtcctatattattaatggaacgacagatccccactgcgcatcttgggactatagccgggctgatgccagctctggcgactgggacacggagaactgtcagacactcgagacgcaggccgcacacactaggtgccagtgtcagcacctttcaacctttgccgtactcgcacagcctcctaaagaccttactctagaactggcagggtcacctagtgttcctctagtgattgggtgcgctgtttcctgtatggctctactgaccctcttggctatctatgccgcattctggcgcttcattaaaagcgagcgcagcataattctgctaaacttctgccttagcattcttgcgtccaatatcctaattttggtgggccaatctagagtgctgagcaagggtgtctgcaccatgaccgccgcttttctgcatttcttttttctaagctcattttgctgggtacttacagaggcatggcagagctaccttgcggtgatcggaaggatgagaaccaggctggtgcgtaagaggttcctgtgtttgggttgggggctgcccgctctagtggttgctgtgtctgtcggtttcacaaggaccaaagggtatggtacatctagttactgttggctgtctctcgaaggtggcctgctgtacgcctttgttgggcctgccgcagtcatcgtgctggtgaacatgctcattggcattattgtcttcaacaagctgatggctcgggacggcatctcagacaaatccaaaaagcagcgggctggcgcatctctgtggagtagctgtgtcgtacttcctctgttagccctgacatggatgagcgcagtgctggccatgacagaccggcgtagtgtgttatttcaggccttgttcgccgtcttcaacagcgcccaaggttttgtgattaccgcagtgcactgcttcctgcggagggaggtgcaagacgtggtaaagtgtcagatgggggtgtgcagagctgacgagagtgaggactcgcctgattcatgcaaaaacgggcaactgcagattttaagtgactttgagaaggacgtggacttagcttgtcagacagtcctatttaaggaagttaacacctgcaatccttcaacgattacaggcactctcagtcgcctgagcctcgacgaggacgaagaacccaagtcttgcctagtcggaccagaggggagcctttctttctcaccccttccaggcaacattctggtgccgatggccgcatccccaggccttggtgagcccccaccaccacaggaggccaaccccgtgtacatgtgtggggagggcggtctacgacagctcgatctaacctggctccggcctacagagcccggaagtgagggcgactatatggtccttccacggagaacacttagcctgcagcccggtggtggcggaggcggtggggaagacgctcctcgggcacgacccgagggtaccccaagaagagccgcaaagaccgttgcccacactgagggttacccatcgttcctgagtgtagatcattcaggattggggctgggccctgcatacggatctctgcagaacccatatggcatgaccttccagccccctccacccacccccagtgcgcgtcaggtcccggagccaggggagcggtcccggacaatgccgaggactgtgcccggtagcaccatgaagatggggtcactggagagaaagaaactgcgttatagcgatttagactttgaaaaggtgatgcacacccggaagcgacacagtgaactttatcatgaactcaatcaaaaatttcatacatttgatagatatcgctcacagagcacagcaaaggacaaacccagccccggtgagcggccttccttatcccagcaccggcgtcaccaatcttggagcacctttaagtcgatgacacttggcagtcttcccccaaaaccacgggagaggctgactcttcacagggctgcagcctgggagcctactgagccccctgacggagacttccagactgaagtgtag

SEQ ID NO: 338552 - DNA, 3702 bp, Artificial Sequence
  derived and/or modified sequence
ggtgaggagccggaagaggaaccgaaagtgaaaacccagtggccgaggtctgcagatgagcctgggctatacatggcgcagacagtgcacggcgtgtgggaggagtgggggtcctggagcctgtgctcccgcagctgcgggcgggggtcccggagccggatgcggacctgcgtgcccccccagcacggcggcaaggcctgcgagggtcctgagctgcagactaagctctgcagtatggctgcctgcccggtggaaggccagtggttagaatggggtccctggggcccatgctccacgtcctgtgccaatgggacccaacagcgcagccggaagtgcagcgtggcgggcccagcctgggccacatgcacgggtgccctcactgacacccgggagtgcagcaacctcgagtgcccggccactgatagcaagtgggggccatggaatgcgtggagcctgtgctctaagacgtgtgacacaggctggcagcgccgcttccgcatgtgccaggccacgggcacgcagggctacccctgcgagggcaccggagaggaggtgaagccttgtagtgagaagaggtgtccagccttccatgagatgtgcagggatgagtacgtgatgctgatgacgtggaagaaggcagctgctggcgagatcatctacaacaagtgccccccgaatgcctcagggtctgccagccgccgctgtctcctcagtgcccaaggcgtggcgtactgggggctgcccagctttgctcgctgcatctcccatgagtaccgctacctgtatctgtcacttagggagcacctggccaaggggcagcgcatgctggcaggcgagggcatgtcgcaggtggtgcgcagcctgcaggagctactggcccggcgcacctactatagtggggacctgctcttctctgtggacattctgaggaatgtcactgacacctttaagagggccacctacgtgccctcggctgatgatgtgcagcgcttcttccaggtggtgagcttcatggtggatgcggaaaacaaggagaagtgggacgatgctcagcaggtgtcccctggctctgtgcacctgctccgtgtcgtggaggacttcattcacctggtgggcgatgctctcaaggccttccagagctctctgattgtcacagataatctagtgatcagcattcagcgagagcccgtctcagctgtgtccagtgacatcacgttccccatgcggggccgccggggcatgaaggactgggtgcggcactcagaggaccgcctcttcctgcccaaggaggtgctcagcctctcctccccagggaagccagccacatctggggcagcaggcagccctggcagggggaggggcccaggaacggtgcctcctggcccaggccactcccaccagcgcctcctcccagcagaccctgatgagtcctcctactttgtgatcggtgctgtactctaccgcacccttggcctcatcctgccgcctcccaggcccccgctggccgtcacatcccgggtgatgacagtgactgtgcgcccccctacccagcctccagctgagcccctcatcactgtggagctctcctacatcatcaatgggaccacggatccccattgcgccagctgggactactccagagcagatgccagctcaggagactgggacactgaaaattgccagaccctggagacccaggcagctcacacccgctgccagtgccagcacctgtccacctttgctgtactagcccagccgcccaaggacctgaccctggagctggcgggctccccctcggtccccctggtgatcggctgtgcagtgtcgtgcatggcgctgctcaccctgctcgccatctatgccgccttttggaggttcataaaatctgaacgctccatcatcttgctgaacttctgcctgtccatcttggcatccaacatcctgatcctcgtgggccagtcccgggtgctgagcaagggcgtgtgcaccatgacggctgccttcctgcacttcttctttctctcctccttttgctgggtgcttaccgaggcctggcagtcctacctggctgtcattgggcggatgcgcacccgcctcgttcgcaagcgcttcctctgcctgggctggggtctgcctgccctggtggtggccgtgtctgttggctttacccgaacgaaaggatacggtacatccagctactgctggctctccctggagggcggcctgctctacgcctttgtgggccctgcagccgtcattgtcctggtgaacatgctcatcggaatcatcgtcttcaacaagctcatggcacgtgatggcatctccgacaaatccaagaagcagagggccggggcctcactctggagctcctgcgtggtgctgcccctgctggcgctcacctggatgtctgccgtcctggctatgacagaccgccgttccgtcctcttccaggccctctttgctgtcttcaactccgcgcagggctttgtcatcactgctgtgcactgcttcctgcgccgagaggtccaggatgtggtgaagtgccagatgggggtgtgccgggctgatgagagcgaagactcccctgactcgtgtaagaacgggcagctgcagatcctgtcagactttgaaaaggatgtggatctggcttgtcaaacagtgctgttcaaggaggtcaacacttgcaacccgtccaccatcacgggcacactatcccgcctgtccctggatgaggatgaggagcccaagtcctgcctcgtgggccctgagggcagcctcagcttctcaccactgcctgggaatatcctggtgcccatggcagcctcaccagggctgggggagcctccgcccccacaggaggccaaccctgtttacatgtgtggggagggtggcctgcggcagctggacctcacatggctgcggcccactgagccaggctctgagggagactacatggtgctgccccggcggactttgagcctgcagcctggcggtgggggtggaggtggtgaggatgcccccagggcccggccggaggggaccccccggcgagctgccaagacagtggcccacactgaaggctaccccagcttcctgtccgtggaccactcgggcctggggctgggccctgcctatggatctctccagaatccctatggaatgaccttccaaccgccaccgccgacacccagcgcccgccaagtgcccgagccaggggagcgcagccggaccatgcctcgcaccgtgcccggctctaccatgaagatgggctccctggagcgaaagaaattacggtattcagacctggactttgagaaggtgatgcacacccggaaacggcattcagaactctaccacgagctcaaccagaagttccacactttcgaccgctaccgcagccagtccacggccaaggataagcccagccctggggagcgccccagcttgtcccaacatcggcgccatcagagctggagcaccttcaaatctatgacactgggctcgctgccccccaagccccgagaacggctgactctgcaccgggcagcagcctgggagcccacagaaccaccggatggtgacttccagacagaggtgtgagtgccacgctggactgcccactgcatataaatatatatatctctctattttcacactccactttggaactacccaggagccagcgccctctcccctctcccg

SEQ ID NO: 338553 - DNA, 3528 bp, Artificial Sequence
  derived and/or modified sequence
atggcccagaccgtgcacggcgtgtgggaggagtggggcagctggagcctgtgcagcagaagctgcggcagaggcagcagaagcagaatgagaacctgcgtgcccccccagcacggcggcaaggcctgcgagggccccgagctgcagaccaagctgtgcagcatggccgcctgccccgtggagggccagtggctggagtggggcccctggggcccctgcagcaccagctgcgccaacggcacccagcagagaagcagaaagtgcagcgtggccggccccgcctgggccacctgcaccggcgccctgaccgacaccagagagtgcagcaacctggagtgccccgccaccgacagcaagtggggcccctggaacgcctggagcctgtgcagcaagacctgcgacaccggctggcagagaagattcagaatgtgccaggccaccggcacccagggctacccctgcgagggcaccggcgaggaggtgaagccctgcagcgagaagagatgccccgccttccacgagatgtgcagagacgagtacgtgatgctgatgacctggaagaaggccgccgccggcgagatcatctacaacaagtgcccccccaacgccagcggcagcgccagcagaagatgcctgctgagcgcccagggcgtggcctactggggcctgcccagcttcgccagatgcatcagccacgagtacagatacctgtacctgagcctgagagagcacctggccaagggccagagaatgctggccggcgagggcatgagccaggtggtgagaagcctgcaggagctgctggccagaagaacctactacagcggcgacctgctgttcagcgtggacatcctgagaaacgtgaccgacaccttcaagagagccacctacgtgcccagcgccgacgacgtgcagagattcttccaggtggtgagcttcatggtggacgccgagaacaaggagaagtgggacgacgcccagcaggtgagccccggcagcgtgcacctgctgagagtggtggaggacttcatccacctggtgggcgacgccctgaaggccttccagagcagcctgatcgtgaccgacaacctggtgatcagcatccagagagagcccgtgagcgccgtgagcagcgacatcaccttccccatgagaggcagaagaggcatgaaggactgggtgagacacagcgaggacagactgttcctgcccaaggaggtgctgagcctgagcagccccggcaagcccgccaccagcggcgccgccggcagccccggcagaggcagaggccccggcaccgtgccccccggccccggccacagccaccagagactgctgcccgccgaccccgacgagagcagctacttcgtgatcggcgccgtgctgtacagaaccctgggcctgatcctgcccccccccagaccccccctggccgtgaccagcagagtgatgaccgtgaccgtgagaccccccacccagccccccgccgagcccctgatcaccgtggagctgagctacatcatcaacggcaccaccgacccccactgcgccagctgggactacagcagagccgacgccagcagcggcgactgggacaccgagaactgccagaccctggagacccaggccgcccacaccagatgccagtgccagcacctgagcaccttcgccgtgctggcccagccccccaaggacctgaccctggagctggccggcagccccagcgtgcccctggtgatcggctgcgccgtgagctgcatggccctgctgaccctgctggccatctacgccgccttctggagattcatcaagagcgagagaagcatcatcctgctgaacttctgcctgagcatcctggccagcaacatcctgatcctggtgggccagagcagagtgctgagcaagggcgtgtgcaccatgaccgccgccttcctgcacttcttcttcctgagcagcttctgctgggtgctgaccgaggcctggcagagctacctggccgtgatcggcagaatgagaaccagactggtgagaaagagattcctgtgcctgggctggggcctgcccgccctggtggtggccgtgagcgtgggcttcaccagaaccaagggctacggcaccagcagctactgctggctgagcctggagggcggcctgctgtacgccttcgtgggccccgccgccgtgatcgtgctggtgaacatgctgatcggcatcatcgtgttcaacaagctgatggccagagacggcatcagcgacaagagcaagaagcagagagccggcgccagcctgtggagcagctgcgtggtgctgcccctgctggccctgacctggatgagcgccgtgctggccatgaccgacagaagaagcgtgctgttccaggccctgttcgccgtgttcaacagcgcccagggcttcgtgatcaccgccgtgcactgcttcctgagaagagaggtgcaggacgtggtgaagtgccagatgggcgtgtgcagagccgacgagagcgaggacagccccgacagctgcaagaacggccagctgcagatcctgagcgacttcgagaaggacgtggacctggcctgccagaccgtgctgttcaaggaggtgaacacctgcaaccccagcaccatcaccggcaccctgagcagactgagcctggacgaggacgaggagcccaagagctgcctggtgggccccgagggcagcctgagcttcagccccctgcccggcaacatcctggtgcccatggccgccagccccggcctgggcgagcccccccccccccaggaggccaaccccgtgtacatgtgcggcgagggcggcctgagacagctggacctgacctggctgagacccaccgagcccggcagcgagggcgactacatggtgctgcccagaagaaccctgagcctgcagcccggcggcggcggcggcggcggcgaggacgcccccagagccagacccgagggcacccccagaagagccgccaagaccgtggcccacaccgagggctaccccagcttcctgagcgtggaccacagcggcctgggcctgggccccgcctacggcagcctgcagaacccctacggcatgaccttccagccccccccccccacccccagcgccagacaggtgcccgagcccggcgagagaagcagaaccatgcccagaaccgtgcccggcagcaccatgaagatgggcagcctggagagaaagaagctgagatacagcgacctggacttcgagaaggtgatgcacaccagaaagagacacagcgagctgtaccacgagctgaaccagaagttccacaccttcgacagatacagaagccagagcaccgccaaggacaagcccagccccggcgagagacccagcctgagccagcacagaagacaccagagctggagcaccttcaagagcatgaccctgggcagcctgccccccaagcccagagagagactgaccctgcacagagccgccgcctgggagcccaccgagccccccgacggcgacttccagaccgaggtgtag

SEQ ID NO: 338554 - protein, 325 aa, Artificial Sequence
  derived and/or modified sequence
MSSMVVTANGNDSKKFKGEDKMDGAPSRVLHIRKLPGEVTETEVIALGLPFGKVTNILMLKGKNQAFLELATEEAAITMVNYYSAVTPHLRNQPIYIQYSNHKELKTDNTLNQRAQAVLQAVTAVQTANTPLSGTTVSESAVTPAQSPVLRIIIDNMYYPVTLDVLHQIFSKFGAVLKIITFTKNNQFQALLQYGDPVNAQQAKLALDGQNIYNACCTLRIDFSKLVNLNVKYNNDKSRDYTRPDLPSGDGQPALDPAIAAAFAKETSLLAVPGALSPLAIPNAAAAAAAAAAGRVGMPGVSAGGNTVLLVSNLNEEVFMEMCSV

SEQ ID NO: 338555 - DNA, 1700 bp, Artificial Sequence
  derived and/or modified sequence
agtttctggaaaaacgactataaaaacccagaaccatgctgcatctttgcgaacctgagtcaagacggaatgctgagtgagaatcgtcactgaggttgcagttggcgtgaagagaggatctgacgaactactctcaggcagtgttctcagtagtccgaactctaatatgagcagcatggtagttacagccaatggtaatgatagtaaaaaatttaaaggagaagataaaatggatggtgctccttctcgtgtacttcatattcgaaaattacctggggaagtaacagaaactgaagttattgctttaggcttaccttttggtaaggtgaccaacatccttatgctgaaaggaaaaaatcaggcatttttggaactagcaaccgaggaagcagctattactatggttaattactattctgctgtgacacctcatcttcgtaaccaaccaatatatatccagtactcgaatcacaaagaactaaagacagataatacattaaaccaacgtgctcaggcagttcttcaagctgtgacagctgtccagacagcaaatactcctcttagtggcaccacagttagcgagagtgcagtgactccagcccagagtccagtacttagaataattattgacaacatgtactaccctgtaacacttgatgttcttcaccaaatattttctaagtttggtgctgtattgaagataatcacatttacaaaaaataaccagtttcaagctttgctccagtatggtgatccagtaaatgctcaacaagcaaaactagccctagatggtcagaatatttataatgcctgctgtaccctaaggattgatttttccaaacttgtgaatttgaatgtaaaatacaacaatgataaaagtagggattatactcgacctgatcttccatctggggatggacaacctgcattggacccagctattgctgcagcatttgccaaggagacatccctcttagctgttccaggagctctgagtcctttggccattccaaatgctgctgcagcagctgctgcagctgctgctggccgagtgggtatgcctggagtctcagctggtggcaatacagtcctgttggttagcaatttaaatgaagaggtgtttatggagatgtgcagcgtgtgaagattttatacaataagaaagacagcgctctaatacagatggctgatggaaaccaatcacaacttgccatgaatcatcttaatggacagaaaatgtatggaaaaattattcgtgttactctgtctaaacatcagactgtacagctacctcgagagggacttgatgatcaagggctaacaaaagattttggtaattccccattgcatcgttttaagaaacctggatccaaaaattttcaaaacatttttcctccttctgccacccttcacctatctaatatccctccatcagtagcagaagaggatctacgaacactgttcgctaacactgggggcactgtgaaagcatttaagttttttcaagatcacaaaatggctcttcttcagatggcaacagtggaagaagctattcaggccttgattgatcttcataattataaccttggagaaaaccatcatctgagagtgtctttctccaagtcaacaatttaaaaatgggaagatgaagattgggggtgaatcacattgttcaatgtcatcacctatttgactgttca

SEQ ID NO: 338556 - DNA, 2935 bp, Artificial Sequence
  derived and/or modified sequence
gggatgaagagaggatctgacgaactactctcaggcagtgttctcagtagtccgaactctaatatgagcagcatggtagttacagccaatggtaatgatagtaaaaaatttaaaggagaagataaaatggatggtgctccttctcgtgtacttcatattcgaaaattacctggggaagtaacagaaactgaagttattgctttaggcttaccttttggtaaggtgaccaacatccttatgctgaaaggaaaaaatcaggcatttttggaactagcaaccgaggaagcagctattactatggttaattactattctgctgtgacacctcatcttcgtaaccaaccaatatatatccagtactcgaatcacaaagaactaaagacagataatacattaaaccaacgtgctcaggcagttcttcaagctgtgacagctgtccagacagcaaatactcctcttagtggcaccacagttagcgagagtgcagtgactccagcccagagtccagtacttagaataattattgacaacatgtactaccctgtaacacttgatgttcttcaccaaatattttctaagtttggtgctgtattgaagataatcacatttacaaaaaataaccagtttcaagctttgctccagtatggtgatccagtaaatgctcaacaagcaaaactagccctagatggtcagaatatttataatgcctgctgtaccctaaggattgatttttccaaacttgtgaatttgaatgtaaaatacaacaatgataaaagtagggattatactcgacctgatcttccatctggggatggacaacctgcattggacccagctattgctgcagcatttgccaaggagacatccctcttagggcttcctgttgcagctgttccaggagctctgagtcctttggccattccaaatgctgctgcagcagctgctgcagctgctgctggccgagtgggtatgcctggagtctcagctggtggcaatacagtcctgttggttagcaatttaaatgaagaggtgtttatggagatgtgcagcgtgtgaagattttatacaataagaaagacagcgctctaatacagatggctgatggaaaccaatcacaacttgccatgaatcatcttaatggacagaaaatgtatggaaaaattattcgtgttactctgtctaaacatcagactgtacagctacctcgagagggacttgatgatcaagggctaacaaaagattttggtaattccccattgcatcgttttaagaaacctggatccaaaaattttcaaaacatttttcctccttctgccacccttcacctatctaatatccctccatcagtagcagaagaggatctacgaacactgttcgctaacactgggggcactgtgaaagcatttaagttttttcaaagagatcacaaaatggctcttcttcagatggcaacagtggaagaagctattcaggccttgattgatcttcataattataaccttggagaaaaccatcatctgagagtgtctttctccaagtcaacaatttaaaaatgggaagatgaagattgggggtgaatcacattgttcaatgtcatcacctatttgactgttcagaaaagtggggaccagagtttgattttttttgtttttgtttttttggggtttcttttttttttccatgctgttatcattccttggttataaaatgaaatggcatatgtaaaggcagagttgttaactgctatatttcatctgttctatagggaagccattttgtctgtttaaaatttcagtttaattttgctttttttttttttttttttttcctttcaacttagttgacatacgtgccttaaaaaggaaaactagtgttgctattgtgcatttactagaaaaaaggaattggttgtttagggcacactgttatatgggaattaaaatatgtttaggcaggggtgtgtaaaaaggttaagtttttgtttctcctgcttggaacttattttgaattactggcttgtcacctttttttctatttaatcaaataagatacatgatattgaaagaataaagcagcatttttagtttttactaccttaggctttattgctttgaaaacaacattggccttttgtatctcacaattctggtctagattcagttatgaatgtaggcattagttaaaattaacaagatgcagagtattaatttcttaagacaacaaagtgatttctgtaagtttgagccctatgtggaaagcattgtggaatcttaaccttttcgtacacactcttgtgggacgtatcatataaatgtcagcactaagtaatgtcttgtttgtggctgaatatttttcgtagatgtttttgaagttgacatgacttacgtgcatttaaatatatattgccatccttagtttgtaattaagatttggaatatggttgtggatttctgagcatgtgcagactggtctagctagttcaggaactggtgcatgtatttttcaaagataaagaaagtgtactgcgaaaatatgcaggaagattaattttgtggcagttttctaaaactgacaaccaggtgggaccaaagtttatgtgcctttagtcttaatttaccttgcattgtaatattcagttttaataaatcttcaaaatattttgtatttaggaatagatctgactttaataaaaacatggctcagaatctacaggtcaaattaatttgaacagttcttgtcaatccgaattgttgattctgtttaaatgaccaatactttttgaaattgatgtacttagtttcaagattcatagattctgttatctatgtagacagaatggtcatgtatattttctattagttgagtttttacatctttagaaatgtaaaattcagtatagtttgaaagcggcacaattaaaaattaattttctaac

SEQ ID NO: 338557 - DNA, 1650 bp, Artificial Sequence
  derived and/or modified sequence
atggcagctttcagcaaatatctgactgctcgcaactctagtctggctggcgccgcctttcttctcctgtgcttactgcacaagcggcgaagggcactaggcctccatgggaagaaatcagggaaacctccgctccagaacaatgagaaggagggcaaaaaagagcgtgccgttgtggataaggtgttcttttccagactgatccaaatcttaaaaataatggttccacggacattctgtaaagaaacggggtatctggttttgattgcagttatgttagttagcaggacctattgcgacgtgtggatgatccaaaacggcaccctcatcgaatcaggaatcattgggaggtcacgcaaggattttaaaaggtatcttctgaatttcatcgctgctatgccattaatttcgttagttaataacttcctcaagtatggactgaatgagcttaagctgtgcttcagagtgcggcttaccaaatacctgtacgaagagtatctgcaggcctttacgtactataagatgggaaatctcgacaacagaatcgcgaatccagaccagctcctgactcaggacgtggagaagttttgcaatagcgttgtggatttgtattccaacttgtccaagccatttttggacatagtcctgtatatctttaaattgactagtgccatcggcgcgcaaggtcctgcctctatgatggcctacctggtcgtttcaggactcttcttgacccgccttaggcgacctatcggcaagatgactattactgaacagaagtatgaaggcgagtaccggtatgtgaatagtcgattaatcaccaactcattcactgcaagaatcactgagctcatgcaagtcctgaaagacctgaatcatgggaagtacgaaaggaccatggtgtcccagcaggaaaagggaatcgagggagttcaggttatcccccttatcccaggcgccggggagataattatcgccgacaacattataaaattcgaccacgtgcccctggccactccaaacggcgatgtgctgatcagagacttgaatttcgaagtcaggtctggagcaaacgtgctcatttgcgggccaaacggatgtggcaagtcatctctgtttagggttctgggagagctgtggccactctttggaggccgtttaacaaagcccgagcggggaaagctgttctatgtcccacagaggccctatatgacactgggaaccctgcgcgaccaagtcatctaccctgatgggcgcgaggaccagaagagaaaaggtatatctgatcttgtgcttaaggagtatttggacaacgtgcaactcggacacatcctggagagggagggcggctgggattcggtgcaagactggatggatgtgttgtctggaggggaaaagcagaggatggcgatggcacggctgttttatcacaagccccagttcgcgatactggatgagtgtacttcggcggtctctgtcgatgtggagggctatatttacagtcactgccggaaagttggaatcaccctgtttacagtgagccataggaaatcattgtggaaacaccatgagtattatctgcacatggacggacgaggcaattacgagttcaaacagatcaccgaagataccgtggagtttgggtcctag

SEQ ID NO: 338558 - DNA, 1650 bp, Artificial Sequence
  derived and/or modified sequence
atggccgccttcagcaagtacctgacagccaggaacagcagcctggccggggccgccttcctgctgctgtgcctgctgcacaagagaagaagagccctgggcctgcacggcaagaagagcggcaagccacccctgcagaacaatgagaaggagggcaagaaggagagagctgtggtggacaaggtgttcttcagccgcctcatccagatcctgaagatcatggtgcccaggaccttctgcaaggagaccggctacctggtgctgattgctgtgatgctggtgtccaggacctactgtgatgtgtggatgatccagaatggcaccctcatcgagagcggcatcatcggccgcagcaggaaggacttcaagcgctacctgctgaacttcatcgccgccatgcccctcatcagcctggtgaacaacttcctgaagtatggcctgaatgagctgaagctgtgcttccgggtgcggctgaccaagtacctgtatgaggagtacctgcaggccttcacctactacaagatgggcaacctggacaaccgcatcgccaacccagaccagctgctgacccaggatgtggagaagttctgcaacagcgtggtggacctgtacagcaacctgagcaagcccttcctggacatcgtgctgtacatcttcaagctgaccagcgccatcggggcccagggccctgcctccatgatggcctacctggtggtgtctggcctcttcctgacccggctgcggcggcccatcggcaagatgaccatcacagagcagaagtatgaaggagagtaccgctacgtgaacagccgcctcatcaccaacagcttcaccgcccgcatcacagagctgatgcaggtgctgaaggacctgaaccacggcaagtatgaaagaaccatggtgtcccagcaggagaagggcatcgagggcgtgcaggtgatccccctcatccctggggccggggagatcatcatcgctgacaacatcatcaagtttgaccacgtgcccctggccaccccaaatggagatgtgctgatccgggacctgaactttgaggtgcgcagcggggccaacgtgctgatctgtggccccaacggctgcggcaagagcagcctcttccgggtgctgggggagctgtggcccctgtttggaggccgcctgaccaagccagagcggggcaagctgttctacgtgccccagaggccctacatgaccctgggcaccctgcgggaccaggtgatctacccagatggccgggaggaccagaagaggaagggcatcagtgacctggtgctgaaggagtacctggacaacgtgcagctgggccacatcctggagcgggagggcggctgggacagcgtgcaggactggatggatgtgctgagcggcggggagaagcagaggatggccatggcccggctcttctaccacaagccccagtttgccatcctggatgagtgcaccagcgctgtgtctgtggatgtggagggctacatctacagccactgcaggaaggtgggcatcaccctcttcaccgtgagccacaggaagagcctgtggaagcaccacgagtactacctgcacatggatggccggggcaactatgagttcaagcagatcacagaggacacagtggagtttggcagctag

SEQ ID NO: 338559 - DNA, 1650 bp, Artificial Sequence
  derived and/or modified sequence
atggccgccttcagcaagtacctgaccgcccggaacagcagcctggcaggagcagccttccttctcctctgtctcctacataaaagacgaagggcactcggactgcatggaaagaagagtggaaaacccccccttcagaataacgagaaagagggaaagaaagagcgggcagtggtcgataaagttttcttcagccggctcatccagattctgaaaatcatggtcccccgcactttctgtaaggagaccggctatcttgtgctgatcgccgtgatgttggtgagcaggacctactgtgatgtatggatgatccagaacggcactctgatcgaaagcggtattataggccgttctcggaaagatttcaaacgatacttgctcaatttcatagccgccatgccgctcatatccctggttaataacttccttaagtatggcctcaacgagcttaagctctgcttccgcgtgagactgactaaatacctgtacgaagagtacctccaggcgttcacttattataagatggggaatctggataaccgtatcgccaatccagatcagctgctgactcaagacgtggaaaaattctgtaatagtgtggtggacctgtattcgaacctgagcaaacctttcttggacatcgtcctgtacatattcaaactaacaagtgcgatcggagcccagggaccagccagcatgatggcgtacctggttgtttcaggccttttccttacaagactgcggcgccccattgggaagatgacaatcactgagcagaagtatgagggagagtatcggtatgtgaacagccgtcttattacaaactcctttaccgcccgtatcaccgaattaatgcaagtgctgaaggatctcaatcacggaaagtatgagcgcactatggtgtctcagcaggagaagggtattgagggggtgcaggtaatccctctgatccccggggccggggagatcattatcgccgacaacataatcaaattcgaccatgtgcccctggccacccccaatggggatgtgctgatccgggatctgaatttcgaggtgagatcaggcgccaacgtactgatttgcggccctaacggttgcggcaagagctctctgttccgtgtgctcggcgagttatggcccttatttggcggcagattaactaagcccgagaggggtaaacttttttatgttcctcagcgtccctacatgacactcggtacgctgcgggaccaagttatttaccctgatggccgtgaggaccagaagcgaaagggcatttcagatctggtgctcaaagagtaccttgacaatgtgcagctgggccatattctggagcgcgaaggagggtgggactctgtccaggactggatggatgttctgagcggaggggaaaagcagcgcatggccatggcccgcctcttttatcacaaaccccagtttgccattcttgacgaatgcacctcggccgtgtcggtcgatgtggagggttatatctactcccattgccgtaaggtaggcatcacactcttcaccgtctctcacagaaaaagtttgtggaagcaccacgaatactatcttcacatggatggcagagggaactacgaatttaaacagattactgaggacaccgtggagttcggatcgtag

SEQ ID NO: 338560 - DNA, 1650 bp, Artificial Sequence
  derived and/or modified sequence
atggccgcattttccaaatatctgaccgcccgtaatagctctttagccggagctgccttcctgctactctgtcttctccacaaacggaggcgggctttgggactccatggaaaaaagagcggaaagcctcctctgcagaacaatgagaaggagggtaaaaaggagcgggcagtggtcgacaaagtgttcttttctcgcttgatccagatcctgaagataatggttccgagaacattttgtaaagagacggggtacctggttcttattgctgtgatgctcgtgagtcggacatattgtgatgtgtggatgattcagaacgggacattgattgaaagcggcatcattggacgcagcagaaaggactttaagcgctatctgctgaatttcattgccgcaatgcccctgatctctctggtgaacaattttctcaagtacggacttaatgagcttaaattatgtttcagagtgagactaactaagtatctgtatgaggagtaccttcaggcattcacttactataagatgggtaatctcgataacagaatcgccaaccctgaccagttgctcacccaagacgtggaaaaattctgtaattctgtggttgatttgtactccaacctgtctaagccgttcctcgatatcgtactctacattttcaaactgacctccgccattggagctcaaggccctgcgtcaatgatggcttatctggtcgtgtcaggcctcttcctgacgagactcaggagacccatcggcaagatgactattacggaacagaaatacgagggcgagtaccgatatgtaaatagtaggcttattaccaactcctttactgcacggattacagaattgatgcaggtactgaaagacctgaatcacgggaaatatgaaaggaccatggtctctcagcaggaaaaggggattgaaggagtccaagttattcccctaatcccaggcgctggggagataattattgccgataacatcataaagtttgatcatgtgccgttggctactcctaacggagatgtgctcattagagacctgaacttcgaggtcagaagtggggctaacgtgctcatttgcgggcctaacggatgcggaaagtcaagtctgttcagggtactcggggaactctggccgctgttcggcggtcgattaacgaaaccagagagaggcaaactcttttacgtaccccagcgaccatacatgacactgggaaccctcagagaccaggtgatataccccgacggacgcgaagaccaaaagaggaaaggaattagcgatctcgtgctcaaggaatacttggataatgtacagcttggccacatactggagcgcgaagggggatgggacagcgttcaagattggatggacgtgctgagcgggggagagaagcagagaatggccatggcacgtcttttttaccacaaaccacagtttgctatactcgacgagtgcacttctgctgtgtccgtagatgtagagggctacatatatagtcactgtaggaaagtggggattaccttatttactgtgtcacaccggaagtccctgtggaagcaccacgagtactacctgcacatggacggcagaggcaattatgaatttaagcaaatcacggaagacaccgtcgagtttgggtcctag

SEQ ID NO: 338561 - DNA, 3286 bp, Artificial Sequence
  derived and/or modified sequence
ctctgctctcctcccagtctcccccgcgctgcgtgcagtaaggtagccgccgccgccgccgccgccgcgtcccctcgccggctcgctggtaccggcagtgccatggcggccttcagcaagtacttgacggcgcgaaactcctcgctggctggtgccgcgttcctgctgctctgcctgctccacaagcggcgccgcgccctcggcctgcacggtaagaaaagtggaaaaccaccattacagaacaatgagaaagaggggaaaaaggagcgagctgtggtggacaaggtgtttttctcaaggctcatacagattctgaaaatcatggtccctagaacattttgtaaagagacaggttacttggtacttattgctgttatgctggtgtctcgaacatattgtgatgtttggatgattcaaaatgggacactaattgaaagtggtatcattggtcgtagcaggaaagatttcaagagatacttactcaacttcatcgctgccatgcctcttatctctctggttaataacttcttgaagtatgggttaaatgagcttaaactgtgcttccgagtaaggctcactaaatacctctatgaggagtatcttcaagctttcacatattataaaatggggaatctggacaacagaatagctaatccagaccagctgcttacacaagatgtagaaaaattttgtaacagtgtagtcgatctgtattcaaatcttagtaagccatttttagacatagttttgtatatctttaagttaacgagtgcaattggagctcagggcccagcgagcatgatggcctacttggttgtttctgggctattcctaactcgacttcgaagacccattggtaagatgacaataactgagcaaaagtatgaaggagaatatagatatgttaattctcggctcatcacaaacagttttactgctcggattacagaattaatgcaagtactgaaggatttaaatcatggcaaatatgagcgcacaatggtctcacaacaggaaaagggtattgaaggagtacaagtcattcccttgatacctggtgctggagaaatcattattgcagataacattataaagtttgatcatgttcctttagcaacgccaaatggagatgttttgatccgagaccttaattttgaagttcgatctggggctaatgttctaatttgtggtccaaatggctgcggaaagagttcacttttccgtgttcttggtgaattatggcctctttttggaggacgtctaactaaacctgaaagaggaaaattattttatgttcctcagagaccttacatgacccttggaacacttcgagatcaagtgatatatccagatggacgagaagatcagaaaaggaagggaatttctgacctagtactgaaggaatacttagacaatgtccagttgggtcatatccttgaacgtgaaggaggctgggacagtgttcaggattggatggacgtactcagtggtggagaaaagcaaagaatggcgatggcaagattattttatcataaaccccagtttgccattttggatgaatgcacaagtgcagttagtgtcgacgtggaaggctacatttatagtcattgtcgaaaggttggcatcactctcttcactgtgtctcataggaaatctctttggaaacatcatgagtactacctgcatatggatggcagaggcaactatgaattcaaacagataacagaagatacagttgagtttggctcttagagaaatctggagaactatacctgcttcagtgaaataattacagaatatacttagaaaggcaaagtacattgtaaaataaagttgagcttagttttttttaaaaaaaaaaacaaagcaacaaattaactagatacagaataatggagaacaagttgttaaaacatttaatattatataggatattgctaattgtgtatatgttggtttaattaataatatgtactaagaatgtccttattcttgtggttaaaaacctgcctaaattaaattgggcttcaatcactgtaacctgattcatcctgggatgtaaaccattcgaagtcagctaattggacttttatggctctatcttttccttcagtgaagaaccctatttaaaactgggtcatcatttgtcctgttctagcaagatagtcttcagtttcattttcctgtgccctgtggtagttggaaacaaatcataatgtattatttaaatgtttaacatcattgcataacagcgtttattatacagtggcagatttctttagctgccacagtaatactcattccttgtgtgtgtcttggagtgcatttgactccaggaaaagccattttggttttccttaactaaatgataaatgtacccctctcagtctgcagtattgagttgtttaaagtatatgtgcagtcttgcttacaaggaggggttaccatgtatcacacctaatcttcccaatgtttgggatattaaaacacaaagtccttaacatgccaggctcaaggtcttataagagttctagatttttaagagaattagacaaatttgtgtgtgttagaagcccattcattagaagtgtggtggttatttggtattaaactccaaatgagccataggaaggcactacatgaaataatgcactgagtatgcaatgctatcactgtctttgactgtgattttatgtttaaaaagtatgttctaaaattattatatatacatgggtgaattatgtttccgaggcactgttttatctctgtgaatcttgaataacttttttatatttgggttatgatgtcaaacgatcctaagcgaagatgatttcagttcatcaaatcatcattaatgactttatgtattatttgcacagggagaattgaaactgagtataatcaataagctagatacgaaatcagtttctcaaactgagcttcagaaaggggcattttgtactcttgtttttgcataactggttttgtttttttgcagaattaactataacaatcactggctaccgaagtaaactgatgtactgaattccataatacataacattcaatttttaccacttctgtttagcgaacttgtatacttattttctgttcagattaaaaaaaaaaaaaaaaaactcagatatcctatacaacctttgcttgttctttttattctggtatctaaatactgagaagttcatttataattcagccttgacttgaaaacatagatagtttaatcttgacttgaaaaacacaaaaataaattcagaaaatgctttta

SEQ ID NO: 338562 - DNA, 1650 bp, Artificial Sequence
  derived and/or modified sequence
atggccgccttcagcaagtacctgaccgccagaaacagcagcctggccggcgccgccttcctgctgctgtgcctgctgcacaagagaagaagagccctgggcctgcacggcaagaagagcggcaagccccccctgcagaacaacgagaaggagggcaagaaggagagagccgtggtggacaaggtgttcttcagcagactgatccagatcctgaagatcatggtgcccagaaccttctgcaaggagaccggctacctggtgctgatcgccgtgatgctggtgagcagaacctactgcgacgtgtggatgatccagaacggcaccctgatcgagagcggcatcatcggcagaagcagaaaggacttcaagagatacctgctgaacttcatcgccgccatgcccctgatcagcctggtgaacaacttcctgaagtacggcctgaacgagctgaagctgtgcttcagagtgagactgaccaagtacctgtacgaggagtacctgcaggccttcacctactacaagatgggcaacctggacaacagaatcgccaaccccgaccagctgctgacccaggacgtggagaagttctgcaacagcgtggtggacctgtacagcaacctgagcaagcccttcctggacatcgtgctgtacatcttcaagctgaccagcgccatcggcgcccagggccccgccagcatgatggcctacctggtggtgagcggcctgttcctgaccagactgagaagacccatcggcaagatgaccatcaccgagcagaagtacgagggcgagtacagatacgtgaacagcagactgatcaccaacagcttcaccgccagaatcaccgagctgatgcaggtgctgaaggacctgaaccacggcaagtacgagagaaccatggtgagccagcaggagaagggcatcgagggcgtgcaggtgatccccctgatccccggcgccggcgagatcatcatcgccgacaacatcatcaagttcgaccacgtgcccctggccacccccaacggcgacgtgctgatcagagacctgaacttcgaggtgagaagcggcgccaacgtgctgatctgcggccccaacggctgcggcaagagcagcctgttcagagtgctgggcgagctgtggcccctgttcggcggcagactgaccaagcccgagagaggcaagctgttctacgtgccccagagaccctacatgaccctgggcaccctgagagaccaggtgatctaccccgacggcagagaggaccagaagagaaagggcatcagcgacctggtgctgaaggagtacctggacaacgtgcagctgggccacatcctggagagagagggcggctgggacagcgtgcaggactggatggacgtgctgagcggcggcgagaagcagagaatggccatggccagactgttctaccacaagccccagttcgccatcctggacgagtgcaccagcgccgtgagcgtggacgtggagggctacatctacagccactgcagaaaggtgggcatcaccctgttcaccgtgagccacagaaagagcctgtggaagcaccacgagtactacctgcacatggacggcagaggcaactacgagttcaagcagatcaccgaggacaccgtggagttcggcagctag

SEQ ID NO: 338563 - DNA, 462 bp, Artificial Sequence
  derived and/or modified sequence
atgcctcagctgtgcacccgggcgagctctagcgagattccaggaagactcctcacaacacttcagtcagcccagggccagaaattcctccacttcgctaagagcgatagctttctcgacgacatatttgccgcttggatggcccagcgcctcaagacccacctcctaactgaaacgtggcagcgcaagagacaggagctcccgagtaactgctctcttccgtaccacgtttacaatatcaaagcaatcaaactaagcagacactcttacttttccagctaccaagaccacgcgaagtggtgtatcagtcagaagggtaccaaaaaccgatggacctgtatcggcgatctcaacaggtctccacatcaggcttttagatcaggggggtttatatgcacccaaaattggcagatctatcaggccttccaaggtcttgtgctatactatgagtcttgcaagtag

SEQ ID NO: 338564 - DNA, 462 bp, Artificial Sequence
  derived and/or modified sequence
atgccccagctgtgcacccgggccagcagcagcgagatccctggccgcctgctgaccaccctgcagagcgcccagggccagaagttcctgcactttgccaagagtgacagcttcctggatgacatctttgctgcctggatggcccagaggctgaagacccacctgctgacagagacctggcagaggaagaggcaggagctgcccagcaactgcagcctgccctaccacgtgtacaacatcaaggccatcaagctgagccgccacagctacttcagcagctaccaggaccacgccaagtggtgcatcagccagaagggcaccaagaaccgctggacctgcatcggggacctgaacagaagcccccaccaggccttccgcagcggcggcttcatctgcacccagaactggcagatctaccaggccttccagggcctggtgctgtactatgagagctgcaagtag

SEQ ID NO: 338565 - DNA, 462 bp, Artificial Sequence
  derived and/or modified sequence
atgccccagctgtgcacccgggccagcagcagcgagatccccggccggctgctcaccactctccaaagtgcacaaggacagaagtttctccatttcgcaaagtccgacagcttcctggacgacatctttgccgcatggatggcccagagactgaagacccatctgctgactgaaacctggcaaaggaaacgacaagaactgccatcaaactgcagtcttccataccacgtatataatatcaaggcgattaagctcagtagacactcctattttagttcttatcaggatcacgcgaagtggtgcatctcccaaaaaggtaccaagaaccggtggacttgcataggtgacctaaaccggtctcctcaccaggcgtttagatctggtggattcatctgtacccagaactggcagatctaccaggccttccagggtctggttctgtattacgagtcctgtaagtag

SEQ ID NO: 338566 - DNA, 462 bp, Artificial Sequence
  derived and/or modified sequence
atgccccagctgtgtacccgcgcttccagcagtgagatccctggaagacttttaactactctccaaagcgcacagggacagaagttccttcatttcgccaagtccgactcattcctcgatgatatatttgccgcttggatggctcagagactaaaaactcacctcttgactgagacctggcagcgcaaacgacaagagctcccttctaactgctctctgccgtaccacgtctataatatcaaagccatcaagctgagtcggcatagctatttcagctcttaccaggaccacgctaagtggtgcatctcacagaagggtaccaaaaacagatggacttgcatcggagacctgaaccggtctccgcaccaggccttccgatctggagggttcatatgtactcagaactggcagatctatcaggcctttcagggactagtgctttattatgaatcctgtaagtag

SEQ ID NO: 338567 - DNA, 462 bp, Artificial Sequence
  derived and/or modified sequence
atgccccagctgtgcaccagagccagcagcagcgagatccccggcagactgctgaccaccctgcagagcgcccagggccagaagttcctgcacttcgccaagagcgacagcttcctggacgacatcttcgccgcctggatggcccagagactgaagacccacctgctgaccgagacctggcagagaaagagacaggagctgcccagcaactgcagcctgccctaccacgtgtacaacatcaaggccatcaagctgagcagacacagctacttcagcagctaccaggaccacgccaagtggtgcatcagccagaagggcaccaagaacagatggacctgcatcggcgacctgaacagaagcccccaccaggccttcagaagcggcggcttcatctgcacccagaactggcagatctaccaggccttccagggcctggtgctgtactacgagagctgcaagtag

SEQ ID NO: 338568 - protein, 979 aa, Artificial Sequence
  derived and/or modified sequence
MRGYHGDRGSHPRPARFADQQHMDVGPAARAPYLLGSREAFSTEPRFCAPRAGLGHISPEGPLSLSEGPSVGPEGGPAGAGVGGGSSTFPRMYPGQGPFDTCEDCVGHPQGKGAPRLPPTLLDQFEKQLPVQQDGFHTLPYQRGPAGAGPGPAPGTGTAPEPRSESPSRIRHLVHSVQKLFAKSHSLEAPGKRDYNGPKAEGRGGSGGDSYPGPGSGGPHTSHHHHHHHHHHHHQSRHGKRSKSKDRKGDGRHQAKSTGWWSSDDNLDSDSGFLAGGRPPGEPGGPFCLEGPDGSYRDLSFKGRSGGSEGRCLACTGMSMSLDGQSVKRSAWHTMMVSQGRDGYPGAGPGKGLLGPETKAKARTYHYLQVPQDDWGGYPTGGKDGEIPCRRMRSGSYIKAMGDEESGDSDGSPKTSPKAVARRFTTRRSSSVDQARINCCVPPRIHPRSSIPGYSRSLTTGQLSDELNQQLEAVCGSVFGELESQAVDALDLPGCFRMRSHSYLRAIQAGCSQDDDCLPLLATPAAVSGRPGSSFNFRKAPPPIPPGSQAPPRISITAQSSTDSAHESFTAAEGPARRCSSADGLDGPAMGARTLELAPVPPRASPKPPTLIIKTIPGREELRSLARQRKWRPSIGVQVETISDSDTENRSRREFHSIGVQVEEDKRRARFKRSNSVTAGVQADLELEGLAGLATVATEDKALQFGRSFQRHASEPQPGPRAPTYSVFRTVHTQGQWAYREGYPLPYEPPATDGSPGPAPAPTPGPGAGRRDSWIERGSRSLPDSGRASPCPRDGEWFIKMLRAEVEKLEHWCQQMEREAEDYELPEEILEKIRSAVGSTQLLLSQKVQQFFRLCQQSMDPTAFPVPTFQDLAGFWDLLQLSIEDVTLKFLELQQLKANSWKLLEPKEEKKVPPPIPKKPLRGRGVPVKERSLDSVDRQRQEARKRLLAAKRAASFRHSSATESADSIEIYIPEAQTRL

SEQ ID NO: 338569 - protein, 265 aa, Artificial Sequence
  derived and/or modified sequence
MSMSLDGQSVKRSAWHTMMVSQGRDGYPGAGPGKGLLGPETKAKARTYHYLQVPQDDWGGYPTGGKDGEIPCRRMRSGSYIKAMGDEESGDSDGSPKTSPKAVARRFTTRRSSSVDQARINCCVPPRIHPRSSIPGYSRSLTTGQLSDELNQQMEREAEDYELPEEILEKIRSAVGSTQLLLSQKVQQFFRLCQQSMDPTAFPVPTFQDLAGFWDLLQLSIEDVTLKFLELQQLKANSWKLLEPKEEKKVPPPIPTRPPGPSHSR

SEQ ID NO: 338570 - DNA, 2940 bp, Artificial Sequence
  derived and/or modified sequence
atgagaggctaccacggcgacagaggcagccaccccagacccgccagattcgccgaccagcagcacatggacgtgggccccgccgccagagccccctacctgctgggcagcagagaggccttcagcaccgagcccagattctgcgcccccagagccggcctgggccacatcagccccgagggccccctgagcctgagcgagggccccagcgtgggccccgagggcggccccgccggcgccggcgtgggcggcggcagcagcaccttccccagaatgtaccccggccagggccccttcgacacctgcgaggactgcgtgggccacccccagggcaagggcgcccccagactgccccccaccctgctggaccagttcgagaagcagctgcccgtgcagcaggacggcttccacaccctgccctaccagagaggccccgccggcgccggccccggccccgcccccggcaccggcaccgcccccgagcccagaagcgagagccccagcagaatcagacacctggtgcacagcgtgcagaagctgttcgccaagagccacagcctggaggcccccggcaagagagactacaacggccccaaggccgagggcagaggcggcagcggcggcgacagctaccccggccccggcagcggcggcccccacaccagccaccaccaccaccaccaccaccaccaccaccaccaccagagcagacacggcaagagaagcaagagcaaggacagaaagggcgacggcagacaccaggccaagagcaccggctggtggagcagcgacgacaacctggacagcgacagcggcttcctggccggcggcagaccccccggcgagcccggcggccccttctgcctggagggccccgacggcagctacagagacctgagcttcaagggcagaagcggcggcagcgagggcagatgcctggcctgcaccggcatgagcatgagcctggacggccagagcgtgaagagaagcgcctggcacaccatgatggtgagccagggcagagacggctaccccggcgccggccccggcaagggcctgctgggccccgagaccaaggccaaggccagaacctaccactacctgcaggtgccccaggacgactggggcggctaccccaccggcggcaaggacggcgagatcccctgcagaagaatgagaagcggcagctacatcaaggccatgggcgacgaggagagcggcgacagcgacggcagccccaagaccagccccaaggccgtggccagaagattcaccaccagaagaagcagcagcgtggaccaggccagaatcaactgctgcgtgccccccagaatccaccccagaagcagcatccccggctacagcagaagcctgaccaccggccagctgagcgacgagctgaaccagcagctggaggccgtgtgcggcagcgtgttcggcgagctggagagccaggccgtggacgccctggacctgcccggctgcttcagaatgagaagccacagctacctgagagccatccaggccggctgcagccaggacgacgactgcctgcccctgctggccacccccgccgccgtgagcggcagacccggcagcagcttcaacttcagaaaggcccccccccccatcccccccggcagccaggccccccccagaatcagcatcaccgcccagagcagcaccgacagcgcccacgagagcttcaccgccgccgagggccccgccagaagatgcagcagcgccgacggcctggacggccccgccatgggcgccagaaccctggagctggcccccgtgccccccagagccagccccaagccccccaccctgatcatcaagaccatccccggcagagaggagctgagaagcctggccagacagagaaagtggagacccagcatcggcgtgcaggtggagaccatcagcgacagcgacaccgagaacagaagcagaagagagttccacagcatcggcgtgcaggtggaggaggacaagagaagagccagattcaagagaagcaacagcgtgaccgccggcgtgcaggccgacctggagctggagggcctggccggcctggccaccgtggccaccgaggacaaggccctgcagttcggcagaagcttccagagacacgccagcgagccccagcccggccccagagcccccacctacagcgtgttcagaaccgtgcacacccagggccagtgggcctacagagagggctaccccctgccctacgagccccccgccaccgacggcagccccggccccgcccccgcccccacccccggccccggcgccggcagaagagacagctggatcgagagaggcagcagaagcctgcccgacagcggcagagccagcccctgccccagagacggcgagtggttcatcaagatgctgagagccgaggtggagaagctggagcactggtgccagcagatggagagagaggccgaggactacgagctgcccgaggagatcctggagaagatcagaagcgccgtgggcagcacccagctgctgctgagccagaaggtgcagcagttcttcagactgtgccagcagagcatggaccccaccgccttccccgtgcccaccttccaggacctggccggcttctgggacctgctgcagctgagcatcgaggacgtgaccctgaagttcctggagctgcagcagctgaaggccaacagctggaagctgctggagcccaaggaggagaagaaggtgcccccccccatccccaagaagcccctgagaggcagaggcgtgcccgtgaaggagagaagcctggacagcgtggacagacagagacaggaggccagaaagagactgctggccgccaagagagccgccagcttcagacacagcagcgccaccgagagcgccgacagcatcgagatctacatccccgaggcccagaccagactgtag

SEQ ID NO: 338571 - DNA, 798 bp, Artificial Sequence
  derived and/or modified sequence
atgagcatgagcctggacggccagagcgtgaagagaagcgcctggcacaccatgatggtgagccagggcagagacggctaccccggcgccggccccggcaagggcctgctgggccccgagaccaaggccaaggccagaacctaccactacctgcaggtgccccaggacgactggggcggctaccccaccggcggcaaggacggcgagatcccctgcagaagaatgagaagcggcagctacatcaaggccatgggcgacgaggagagcggcgacagcgacggcagccccaagaccagccccaaggccgtggccagaagattcaccaccagaagaagcagcagcgtggaccaggccagaatcaactgctgcgtgccccccagaatccaccccagaagcagcatccccggctacagcagaagcctgaccaccggccagctgagcgacgagctgaaccagcagatggagagagaggccgaggactacgagctgcccgaggagatcctggagaagatcagaagcgccgtgggcagcacccagctgctgctgagccagaaggtgcagcagttcttcagactgtgccagcagagcatggaccccaccgccttccccgtgcccaccttccaggacctggccggcttctgggacctgctgcagctgagcatcgaggacgtgaccctgaagttcctggagctgcagcagctgaaggccaacagctggaagctgctggagcccaaggaggagaagaaggtgcccccccccatccccaccagaccccccggccccagccacagcagatag

SEQ ID NO: 338572 - DNA, 3587 bp, Artificial Sequence
  derived and/or modified sequence
atgaggggttaccatggcgaccgaggcagccatccccgcccagcccgctttgctgaccaacagcatatggacgtgggccctgctgccagggccccatacctgctgggctccagggaggccttctccaccgagccccgcttctgtgccccgagagctggcctgggacacatttctcctgaagggcccctgagcctgagtgaggggccgtcggtaggccctgagggagggccagcgggggccggggttggggggggtagcagcaccttccccaggatgtaccctggccagggccccttcgacacctgtgaagactgtgtgggccacccacagggcaagggtgccccccgcctgcctcctacactcctggatcagtttgaaaagcagttgccagttcaacaagatggcttccacacactaccataccagcgagggccagcaggggcagggcccgggccagcgccagggacgggcactgccccagagccccgcagtgagagccctagccgcatccggcacctggttcattctgtgcagaagctctttgccaagtcccactctctggaggcgccggggaagcgggactataatgggcccaaggctgagggaagaggtggctctggaggagacagctaccccggcccgggctctggaggcccccacacctcccatcaccaccatcaccaccaccatcaccaccaccaccagtcccggcacggcaagaggagcaagagcaaggaccgcaagggggatgggcggcaccaggccaagtccacaggctggtggagttccgatgacaacttggacagtgatagcggcttcctggcgggtgggaggccccctggggagcctggtggtcccttctgcctggagggtccagatgggtcctaccgggacttgagcttcaaggggcgctcgggcgggtcggaaggccgctgccttgcctgcactggcatgtccatgtcactggatggacagtcggtcaagcgaagtgcctggcataccatgatggtcagccagggccgggatggatacccgggggccgggccaggcaaggggctcctgggtccggagaccaaggccaaagccaggacttatcactatctgcaggtgccgcaagatgactgggggggttaccccaccggtggcaaggatggggagatcccctgccgcaggatgcggagcggcagctacatcaaagccatgggggatgaggagagcggagactcagacggcagccccaagacatctcccaaagcagtcgcccgacgcttcaccacccgtcgctcctccagcgtggaccaggccaggatcaactgctgtgtcccaccccggatccacccccggagctccatccctggctacagccgttccctcaccactggacagctcagcgatgagttgaaccagcagctggaggccgtgtgcgggtcggtgtttggggagctggagtcccaggccgtggacgccctggacctgcccggctgtttccgcatgcggagccacagctacctccgggccatccaggccggctgctctcaagacgacgactgcctgcccctcctcgctacccctgccgctgtctcagggaggcccggctcctccttcaacttcagaaaggccccgccccccatcccgccgggaagccaggccccgccccgcatctccatcaccgcccagagcagcaccgactccgcgcacgagagcttcacggcggccgagggccccgcccggcgctgcagctccgccgacgggctggacggccccgccatgggtgcgcgcacactggagttggcgccggtgccgccccgggccagccccaagccccccacactcatcatcaagaccatccctggcagggaggagctgcggagcctggcgcggcagcggaagtggcggccgtccattggggtgcaggtggagacgatctcagattcggacaccgagaacaggagccggagggagttccactctattggcgtgcaggtggaagaggacaagaggcgagcaaggttcaagcgctccaatagtgtgacggctggcgtgcaggcagacctggagctggagggcctggcaggcctggccacggtggccacagaagacaaggccctgcagtttggacgctccttccagaggcacgcctctgagccccagcctgggccccgggcccccacctactcagtcttccgcacggtccacacgcagggccagtgggcctaccgcgagggctacccactgccgtacgagccgccggccaccgatgggtcgcccggccctgcccccgcccccacccccggccctggggccggccgccgtgactcctggatagagcgcggttcacgtagcctccccgactcaggccgcgcatccccctgcccacgcgacggcgagtggttcatcaagatgctgcgggcagaggtggagaagctggagcactggtgccagcagatggagcgtgaggcggaggactatgagctacccgaggagatcctggagaagatccgcagtgctgtgggcagcacacaacttctcctgtcccagaaggttcagcagttcttccggctgtgtcagcaaagcatggatcccactgcgttccctgtgcccaccttccaggacctggcgggtttctgggacctcctacagctctccatcgaggatgtgaccctcaagttcctggagctacagcaactcaaggccaacagctggaaactcctggagcctaaggaggagaagaaggtccctccgccgataccaaagaagcccctgcggggccggggcgtgccggtgaaggagcgctccctggactccgtggaccggcagcggcaggaagcgcgcaagcggctcctggcggccaagcgcgccgcttccttccgccacagctcggccaccgagagcgccgacagcatcgagatctacatccccgaggcccagaccaggctgtgaccggtccggcccgcccagcccggcccgggcccgcggttctccacccgtactgtacacccagcgtcgaggtcactgtgaacgcgggccgccccgtgcgcccgccccaccggcaccggacgccccggcccccgggcccgtcacactctcgtgggttttttaccttcctgatcccacgcgaaggcgcccgggctgggcagggggccgtgcctctccgccctgcgcccctcacctggatcccctgcccacctggtccgacgctttgtccccacctcctccccatgggcaccatctctgccattctttcccccacgggccaggccgggccgggtccctcatctgggctctgcgtccccccctcccccaccccgcggggctgggcttcgtggggatcaagcttcgtggctttttatgaagaatcccgaaccctgcctaggagcccgccccaccctcccaggggctccatcctcagccctctgcccactgggcccagggaccacagtggctggaccaacccaggaccagggcgcctgggcctctcccctttcccagcggctggggaggggagatgggggcttcccctcaccacacctgtggctgttcccacatccccttgaatatcccaggaaaaataaaacggcagaactgca

SEQ ID NO: 338573 - DNA, 3856 bp, Artificial Sequence
  derived and/or modified sequence
cgcagccggcgcggcccctcagctgggggctccgcagtgccgggccccggtccctgcccgcctgcccaacgccgcagcgcccccggcccgggccgccggcaccatgtaacccggccggagcccgagccgggccaggattcagtggtcctgagccttctgaagttaggcttctgcctggtggtggggatcctgacatcaaggatgggacaccctggatggaggttcctggggcctggcccccaagactatgaagagcctttgctgaggccatgaggggttaccatggcgaccgaggcagccatccccgcccagcccgctttgctgaccaacagcatatggacgtgggccctgctgccagggccccatacctgctgggctccagggaggccttctccaccgagccccgcttctgtgccccgagagctggcctgggacacatttctcctgaagggcccctgagcctgagtgaggggccgtcggtaggccctgagggagggccagcgggggccggggttggggggggtagcagcaccttccccaggatgtaccctggccagggccccttcgacacctgtgaagactgtgtgggccacccacagggcaagggtgccccccgcctgcctcctacactcctggatcagtttgaaaagcagttgccagttcaacaagatggcttccacacactaccataccagcgagggccagcaggggcagggcccgggccagcgccagggacgggcactgccccagagccccgcagtgagagccctagccgcatccggcacctggttcattctgtgcagaagctctttgccaagtcccactctctggaggcgccggggaagcgggactataatgggcccaaggctgagggaagaggtggctctggaggagacagctaccccggcccgggctctggaggcccccacacctcccatcaccaccatcaccaccaccatcaccaccaccaccagtcccggcacggcaagaggagcaagagcaaggaccgcaagggggatgggcggcaccaggccaagtccacaggctggtggagttccgatgacaacttggacagtgatagcggcttcctggcgggtgggaggccccctggggagcctggtggtcccttctgcctggagggtccagatgggtcctaccgggacttgagcttcaaggggcgctcgggcgggtcggaaggccgctgccttgcctgcactggcatgtccatgtcactggatggacagtcggtcaagcgaagtgcctggcataccatgatggtcagccagggccgggatggatacccgggggccgggccaggcaaggggctcctgggtccggagaccaaggccaaagccaggacttatcactatctgcaggtgccgcaagatgactgggggggttaccccaccggtggcaaggatggggagatcccctgccgcaggatgcggagcggcagctacatcaaagccatgggggatgaggagagcggagactcagacggcagccccaagacatctcccaaagcagtcgcccgacgcttcaccacccgtcgctcctccagcgtggaccaggccaggatcaactgctgtgtcccaccccggatccacccccggagctccatccctggctacagccgttccctcaccactggacagctcagcgatgagttgaaccagcagctggaggccgtgtgcgggtcggtgtttggggagctggagtcccaggccgtggacgccctggacctgcccggctgtttccgcatgcggagccacagctacctccgggccatccaggccggctgctctcaagacgacgactgcctgcccctcctcgctacccctgccgctgtctcagggaggcccggctcctccttcaacttcagaaaggccccgccccccatcccgccgggaagccaggccccgccccgcatctccatcaccgcccagagcagcaccgactccgcgcacgagagcttcacggcggccgagggccccgcccggcgctgcagctccgccgacgggctggacggccccgccatgggtgcgcgcacactggagttggcgccggtgccgccccgggccagccccaagccccccacactcatcatcaagaccatccctggcagggaggagctgcggagcctggcgcggcagcggaagtggcggccgtccattggggtgcaggtggagacgatctcagattcggacaccgagaacaggagccggagggagttccactctattggcgtgcaggtggaagaggacaagaggcgagcaaggttcaagcgctccaatagtgtgacggctggcgtgcaggcagacctggagctggagggcctggcaggcctggccacggtggccacagaagacaaggccctgcagtttggacgctccttccagaggcacgcctctgagccccagcctgggccccgggcccccacctactcagtcttccgcacggtccacacgcagggccagtgggcctaccgcgagggctacccactgccgtacgagccgccggccaccgatgggtcgcccggccctgcccccgcccccacccccggccctggggccggccgccgtgactcctggatagagcgcggttcacgtagcctccccgactcaggccgcgcatccccctgcccacgcgacggcgagtggttcatcaagatgctgcgggcagaggtggagaagctggagcactggtgccagcagatggagcgtgaggcggaggactatgagctacccgaggagatcctggagaagatccgcagtgctgtgggcagcacacaacttctcctgtcccagaaggttcagcagttcttccggctgtgtcagcaaagcatggatcccactgcgttccctgtgcccaccttccaggacctggcgggtttctgggacctcctacagctctccatcgaggatgtgaccctcaagttcctggagctacagcaactcaaggccaacagctggaaactcctggagcctaaggaggagaagaaggtccctccgccgataccaaagaagcccctgcggggccggggcgtgccggtgaaggagcgctccctggactccgtggaccggcagcggcaggaagcgcgcaagcggctcctggcggccaagcgcgccgcttccttccgccacagctcggccaccgagagcgccgacagcatcgagatctacatccccgaggcccagaccaggctgtgaccggtccggcccgcccagcccggcccgggcccgcggttctccacccgtactgtacacccagcgtcgaggtcactgtgaacgcgggccgccccgtgcgcccgccccaccggcaccggacgccccggcccccgggcccgtcacactctcgtgggttttttaccttcctgatcccacgcgaaggcgcccgggctgggcagggggccgtgcctctccgccctgcgcccctcacctggatcccctgcccacctggtccgacgctttgtccccacctcctccccatgggcaccatctctgccattctttcccccacgggccaggccgggccgggtccctcatctgggctctgcgtccccccctcccccaccccgcggggctgggcttcgtggggatcaagcttcgtggctttttatgaagaatcccgaaccctgcctaggagcccgccccaccctcccaggggctccatcctcagccctctgcccactgggcccagggaccacagtggctggaccaacccaggaccagggcgcctgggcctctcccctttcccagcggctggggaggggagatgggggcttcccctcaccacacctgtggctgttcccacatccccttgaatatcccaggaaaaataaaacggcagaactgca

SEQ ID NO: 338574 - DNA, 1746 bp, Artificial Sequence
  derived and/or modified sequence
atgaggggttaccatggcgaccgaggcagccatccccgcccagcccgctttgctgaccaacagcatatggacgtgggccctgctgccagggccccatacctgctgggctccagggaggccttctccaccgagccccgcttctgtgccccgagagctggcctgggacacatttctcctgaagggcccctgagcctgagtgaggggccgtcggtaggccctgagggagggccagcgggggccggggttggggggggtagcagcaccttccccaggatgtaccctggccagggccccttcgacacctgtgaagactgtgtgggccacccacagggcaagggtgccccccgcctgcctcctacactcctggatcagtttgaaaagcagttgccagttcaacaagatggcttccacacactaccataccagcgagggccagcaggggcagggcccgggccagcgccagggacgggcactgccccagagccccgcagtgagagccctagccgcatccggcacctggttcattctgtgcagaagctctttgccaagtcccactctctggaggcgccggggaagcgggactataatgggcccaaggctgagggaagaggtggctctggaggagacagctaccccggcccgggctctggaggcccccacacctcccatcaccaccatcaccaccaccatcaccaccaccaccagtcccggcacggcaagaggagcaagagcaaggaccgcaagggggatgggcggcaccaggccaagtccacaggctggtggagttccgatgacaacttggacagtgatagcggcttcctggcgggtgggaggccccctggggagcctggtggtcccttctgcctggagggtccagatgggtcctaccgggacttgagcttcaaggggcgctcgggcgggtcggaaggccgctgccttgcctgcactggcatgtccatgtcactggatggacagtcggtcaagcgaagtgcctggcataccatgatggtcagccagggccgggatggatacccgggggccgggccaggcaaggggctcctgggtccggagaccaaggccaaagccaggacttatcactatctgcaggtgccgcaagatgactgggggggttaccccaccggtggcaaggatggggagatcccctgccgcaggatgcggagcggcagctacatcaaagccatgggggatgaggagagcggagactcagacggcagccccaagacatctcccaaagcagtcgcccgacgcttcaccacccgtcgctcctccagcgtggaccaggccaggatcaactgctgtgtcccaccccggatccacccccggagctccatccctggctacagccgttccctcaccactggacagctcagcgatgagttgaaccagcagatggagcgtgaggcggaggactatgagctacccgaggagatcctggagaagatccgcagtgctgtgggcagcacacaacttctcctgtcccagaaggttcagcagttcttccggctgtgtcagcaaagcatggatcccactgcgttccctgtgcccaccttccaggacctggcgggtttctgggacctcctacagctctccatcgaggatgtgaccctcaagttcctggagctacagcaactcaaggccaacagctggaaactcctggagcctaaggaggagaagaaggtccctccgccgataccaacccggcccccgggcccgtcacactctcgt

SEQ ID NO: 338575 - DNA, 2940 bp, Artificial Sequence
  derived and/or modified sequence
atgcgtggataccatggtgatagaggctcacatccaagacccgcccggtttgctgaccagcagcacatggatgtcggccccgctgcccgggcaccatatctccttggctctcgagaagccttttcaacagaacctagattctgcgccccaagggccggactgggtcacatttcccccgaaggccccttgtccctgtctgaggggccgtccgtaggccccgagggtggaccagctggggctggcgtaggggggggaagctctacttttcccaggatgtaccccggccagggcccatttgacacttgtgaggactgtgtggggcacccccagggcaagggcgcacctcgcctcccccctactcttctggaccagttcgagaaacaattgcccgtgcagcaggatggatttcacactttaccctaccagcgcggacctgccggagcagggcccggtcctgccccggggaccggaaccgcccccgagcctcgcagcgagtcaccatccagaattcggcatctggtgcacagcgtacagaaactgttcgctaagtctcactccctggaagcccccggcaaacgcgattataatggtccaaaagccgagggaaggggaggatcagggggcgatagctatcctggacctggttctggcggaccacatactagccaccaccatcaccatcaccatcatcaccaccaccatcaaagcaggcacggcaagcgtagcaaatctaaagatcgtaaaggcgatggaagacatcaggcaaagagtacagggtggtggtcaagcgatgataatctggactcagattcaggattcctcgccggaggtcggcctcctggggagcctggcggaccattctgcctggaaggccccgacggtagctacagagatttgtcttttaaggggagaagcgggggtagtgaaggcagatgtttggcatgcacagggatgtctatgtcccttgacggacagtccgtcaaacggagcgcctggcataccatgatggtgagtcagggtcgcgacggatacccaggggccggcccgggcaaaggcctgttggggcctgagacaaaggccaaagccagaacttaccattatctgcaggttccccaagatgactggggagggtaccccacaggtggcaaggatggcgaaatcccttgcaggcgtatgcgctccggaagctatataaaggccatgggcgacgaggaatctggagacagtgatggttcacctaagacttctcctaaggcggtcgcacggcgcttcactacaaggcggagctcatctgtagaccaagccaggatcaactgttgcgtgccccccagaatccatcccagatctagcattccgggctatagccgatccctgactaccggccaactgtcggacgagttgaatcagcagctcgaggccgtgtgcggcagtgttttcggggaactggaatcccaggctgtggatgcactggatctgcccggatgctttcgcatgagatcacatagctatctccgggctatccaggccggatgctcacaggatgacgactgtctgccccttctggccaccccagctgcggtaagcgggaggcctgggtcaagttttaacttccgcaaagctccacccccaatacctcccgggagtcaggctcccccaaggattagtatcaccgctcaaagttccactgactccgcccacgaatccttcactgcagccgaaggcccagctaggagatgctcatccgctgacggtctcgacggccctgccatgggggcacgaactctggagctcgcccctgtaccccctcgcgcctccccgaaaccaccaacattaatcatcaaaactatccctggacgggaagagcttcgcagcctagctagacagcgaaaatggaggcctagtatcggcgtgcaggtcgaaaccatctccgactccgatacagagaatcgtagcaggcgcgagttccatagcatcggagtacaagtagaggaggacaaacgtagggccaggtttaaaagatctaacagcgtgacagctggcgtgcaggctgacctcgaactggaaggcttagccggtctcgccacagttgccacagaagacaaagccctccagtttgggagatcgttccagaggcatgccagtgaaccacagccaggtcccagggctccaacatatagcgtctttcgtactgtacacacacagggccagtgggcatatagagagggctaccctctgccatacgagccaccagccactgacgggtctccgggcccagctccggctccgactccagggcccggtgcgggacgcagagatagttggatcgagagagggagtcgctctctgcccgattccggcagagcttcgccatgcccccgggatggtgaatggttcattaagatgttgagagctgaagtagagaagctcgagcattggtgccagcagatggaaagggaagcagaagactatgagttgcccgaagaaattctcgaaaagattcgctcggcagtgggctccacgcagttactgctgagccagaaagtgcagcagttttttcggctctgccaacaaagcatggatcctaccgccttccctgtgcccaccttccaagacctcgctggattctgggacctgctgcaactcagcatcgaggacgtgaccttaaagtttctagagctgcaacaattaaaagctaacagctggaaactacttgaaccaaaggaggaaaagaaggttcctcccccgatacccaaaaaacctttgcgcgggagaggtgtgcctgtaaaggaacgttctctggactcggtcgaccgtcagaggcaggaagctcgcaagcgcctcttggcagcaaagcgtgcggcatcatttagacactcatctgcaacagaaagcgcagattctatcgagatctatattcccgaagcccagacacgactgtag

SEQ ID NO: 338576 - DNA, 798 bp, Artificial Sequence
  derived and/or modified sequence
atgtcaatgagtttggatggtcagtccgtgaagcgatccgcttggcacaccatgatggttagtcagggtcgagatgggtatcccggagccgggcccggaaaaggactgctggggcctgaaactaaagcgaaggcccgaacctatcattacctacaggtgcctcaggacgattggggcggttatcccactggcgggaaggacggggaaattccgtgccggcggatgagatcggggtcttatattaaggcgatgggggatgaggagtctggagattccgatggttcacccaaaaccagtccaaaggccgtggcccgtcgattcaccacaaggcgcagctcttctgtggaccaagctcgtataaactgttgcgtgccaccacgcatacaccctcgcagtagcattcccggttatagcaggtctctcactacggggcagctgagtgacgaactcaatcaacaaatggaacgtgaggccgaggactatgagttgccagaagagatcttggaaaaaatcaggagcgcggtgggaagtacacagcttctcctaagccaaaaggtccagcagtttttccgcctctgtcaacaatctatggacccaacagccttcccagtgcctaccttccaagacctggccggtttctgggatctcctgcagttaagtatagaggacgtcaccctcaagttcctggaattgcagcagctgaaggccaacagttggaaactgctggagcccaaagaagagaaaaaggtacctcctccaatcccaacaagacctcccggaccatctcactctaggtag

SEQ ID NO: 338577 - DNA, 2940 bp, Artificial Sequence
  derived and/or modified sequence
atgaggggctaccatggagaccggggcagccaccccaggcctgccaggtttgctgaccagcagcacatggatgtgggccctgctgcccgggccccctacctgctgggcagccgggaggccttcagcacagagccccgcttctgtgccccccgggccggcctgggccacatcagccctgagggccccctgagcctgtctgagggccccagcgtgggccctgagggcggccctgctggggccggcgtgggcggcggcagcagcaccttccccaggatgtacccaggccagggcccctttgacacctgtgaggactgtgtgggccacccccagggcaagggggccccccggctgccccccaccctgctggaccagtttgagaagcagctgcctgtgcagcaggacggcttccacaccctgccctaccagaggggccctgctggggccggccctggccctgcccctggcaccggcacagcccctgagcccaggtctgagagccccagccgcatccgccacctggtgcacagcgtgcagaagctgtttgccaagagccacagcctggaggcccctgggaagagggactacaacggccccaaggccgagggccggggcggcagcggcggggacagctacccaggccctggcagcggcggcccccacaccagccaccaccaccaccaccaccaccaccaccaccaccaccagagccgccacggcaagaggagcaagagcaaggacagaaaaggagatggccgccaccaggccaagagcacaggctggtggagcagtgatgacaacctggacagcgacagcggcttcctggccggcggccggcccccaggagagcccggcggccccttctgcctggagggcccagatggcagctacagagacctgtccttcaagggccgcagcggcggcagcgagggccgctgcctggcctgcaccggcatgtccatgagcctggatggccagagcgtgaagaggtctgcctggcacaccatgatggtgtcccagggcagagatggctacccaggagctggccctgggaagggcctgctgggccctgagaccaaggccaaggcccggacctaccactacctgcaggtgccccaggatgactggggcggctaccccaccggcggcaaggatggagagatcccctgcaggaggatgaggagcggcagctacatcaaggccatgggagatgaggagagcggggacagtgatggcagccccaagaccagccccaaggctgtggcccggcgcttcaccaccaggaggagcagctctgtggaccaggcccgcatcaactgctgcgtgcccccacgcatccaccccaggagcagcatccctggctacagccgcagcctgaccaccggccagctgagtgatgagctgaaccagcagctggaggccgtgtgtggctctgtgtttggagagctggagagccaggccgtggatgccctggacctgcccggctgcttcaggatgaggagccacagctacctgcgggccatccaggccggctgcagccaggatgatgactgcctgcccctgctggccaccccagctgctgtgtctggccggcccggcagcagcttcaacttcaggaaggcccccccacccatccccccaggcagccaggccccaccccgcatcagcatcacagcccagagcagcacagacagcgcccacgagagcttcaccgctgctgagggccctgcccggcgctgcagcagcgcagatggcctggatggccctgccatgggcgcccggaccctggagctggcccctgtgcccccccgggccagccccaagccacccaccctcatcatcaagaccatccctggccgggaggagctgcggagcctggcccggcagaggaagtggaggcccagcattggagtgcaggtggagaccatcagtgacagcgacacagagaacagaagccggcgggagttccacagcattggagtgcaggtggaggaggacaagagaagagcccgcttcaagaggagcaacagcgtgacagctggggtgcaggccgacctggagctggagggcctggccggcctggccaccgtggccacagaggacaaggccctgcagtttggccgctccttccagagacatgccagcgagccccagcccggcccccgggcccccacctacagcgtcttcagaacagtgcacacccagggccagtgggcctaccgggagggctaccccctgccctatgagcccccagccacagatggcagccctggccctgccccagcccccaccccaggccctggggccggccggcgggacagctggattgagcggggcagccgcagcctgcctgattctggccgggccagcccctgccccagagatggagagtggttcatcaagatgctgcgggcagaggtggagaagctggagcactggtgccagcagatggagcgggaggctgaagattatgagctgcctgaggagatcctggagaagatccgctctgctgtgggcagcacccagctgctgctgagccagaaggtgcagcagttcttccggctgtgccagcagagcatggaccccacagccttccctgtgcccaccttccaggacctggccggcttctgggacctgctgcagctgagcattgaagatgtgaccctgaagttcctggagctgcagcagctgaaggccaacagctggaagctgctggagcccaaggaggagaagaaggtgcccccacccatccccaagaagcccctgcggggccggggcgtgcctgtgaaggagaggagcctggacagcgtggaccggcagaggcaggaggccaggaagaggctgctggccgccaagagagctgccagcttccgccacagcagcgccacagagagcgctgacagcattgagatctacatccctgaggcccagacccggctgtag

SEQ ID NO: 338578 - DNA, 798 bp, Artificial Sequence
  derived and/or modified sequence
atgtccatgagcctggatggccagagcgtgaagaggtctgcctggcacaccatgatggtgtcccagggcagagatggctacccaggggccggccctgggaagggcctgctgggccctgagaccaaggccaaggcccggacctaccactacctgcaggtgccccaggatgactggggcggctaccccactggaggcaaggatggagagatcccctgcaggaggatgaggagcggcagctacatcaaggccatgggagatgaggagagcggggacagtgatggcagccccaagaccagccccaaggctgtggcccggcgcttcaccacccggcgcagcagctctgtggaccaggcccgcatcaactgctgcgtgcccccacgcatccaccccaggagcagcatccctggctacagccgcagcctgaccaccggccagctgagtgatgagctgaaccagcagatggagcgggaggctgaagattatgagctgcctgaggagatcctggagaagatccgctctgctgtgggcagcacccagctgctgctgagccagaaggtgcagcagttcttccggctgtgccagcagagcatggaccccacagccttccctgtgcccaccttccaggacctggccggcttctgggacctgctgcagctgagcattgaagatgtgaccctgaagttcctggagctgcagcagctgaaggccaacagctggaagctgctggagcccaaggaggagaagaaggtgcccccacccatccccacccggcccccaggccccagccacagcaggtag

SEQ ID NO: 338579 - DNA, 2940 bp, Artificial Sequence
  derived and/or modified sequence
atgcggggctaccacggcgaccggggcagccacccccggcccgcccgatttgccgatcagcaacacatggacgtgggccccgctgctagagccccttatttgctggggtctcgcgaggctttctcaactgaaccccggttctgtgccccgcgcgccgggttgggtcacatttctcccgagggccccctgagtctgtcagaagggccaagcgtgggacccgagggaggtccagcgggtgccggagtgggtgggggaagctcaacctttccgcggatgtatcccggacaaggacccttcgatacatgtgaggactgcgtcgggcatccacaaggaaaaggagcccccagattgcctccgactctgctcgatcagttcgagaaacagcttcccgttcagcaggacggatttcacactcttccttaccagcggggcccggcgggagctggacccgggccagcacccggcaccgggacggccccggagccgaggagtgagagcccgagccgcattagacatctggtgcactccgttcagaagctgttcgccaagtcccactctttggaggccccgggcaagagggattataacggacccaaagcagaggggagggggggaagcggcggcgattcttaccccggtcctggttctggaggcccacacacatcccatcatcaccaccaccatcaccaccaccaccaccaccagagccgtcatggaaaacgaagcaaatcgaaggaccggaagggcgacggcaggcaccaggccaagagtaccgggtggtggtcgagcgatgacaatctcgacagcgactccgggttcctggcgggtggacgaccaccaggtgaacccggaggtccgttttgcctcgaaggacccgacggatcatatagggaccttagttttaaaggccggtcaggaggtagcgagggacggtgtctggcctgtacgggtatgtcaatgtccttagatggtcaaagcgtcaagaggtccgcctggcatactatgatggtgtctcagggcagagacggatatccaggtgcaggccccggcaagggcctgctggggccagaaaccaaagctaaggcgaggacctaccactaccttcaggttccccaggacgactggggagggtatcccacaggcggaaaagatggagagatcccctgccgccgtatgcgctcaggtagctacatcaaggctatgggagatgaagaatctggagattccgatgggtctccgaaaaccagccccaaggctgtggcgcggcgttttaccacccggagatcctccagtgtagaccaggccaggattaactgttgcgtgccccctaggatccatcctcgctcttcaatcccgggctactcgcgaagcctgacaaccgggcagctgtctgacgagttaaaccagcagctggaagctgtatgtggctctgttttcggagagttggagtcccaggccgttgatgctctcgacctgcctggttgctttcgcatgagatcacattcatatctcagggccatacaggcaggttgttctcaagatgacgactgtttgcctctgctggcaaccccggctgccgtcagtggccggcctgggagttccttcaactttaggaaggcgccaccaccgattcctccaggcagtcaggctccccctcggatctctataaccgcccagagctccacagacagtgcgcacgaaagctttactgcagccgaagggcccgctaggcgctgcagctccgccgacggcctggatggccccgcaatgggcgctcgcacactggaattggcgcccgttccacccagggcttcacccaagcctccgacactcattatcaaaactattccaggccgggaggaacttcgttcactcgctagacagaggaagtggaggccctccattggggtacaagtcgagactattagcgattcagacaccgagaacagatccaggcgcgagtttcacagcatcggtgtacaggtggaggaggacaaacgaagagctaggtttaagaggagtaatagtgtcacggccggggttcaggctgacctggaactcgagggactggctgggcttgctaccgttgcaactgaggacaaggcgctccagtttggccgcagttttcagagacacgcttccgaaccccagccaggaccacgggcccctacatattcggtctttcgtaccgtgcacacccagggccagtgggcatacagggagggctatcctctgccctatgagccacccgccacagatggctctcctggacctgcccccgcccccacacctggccctggagccggcaggcgggactcttggattgagcgaggttctagatccctgccagactcgggcagagcctctccttgcccgagagacggcgagtggtttattaagatgttaagggctgaggtcgaaaaattggagcactggtgccagcagatggagcgggaagctgaagattacgagttgcctgaggagattttggaaaaaatccgaagtgcggtggggagcacacagctgttgctgagtcagaaagttcaacagttttttcgtctgtgtcagcagagtatggatcctactgcattccctgttccaaccttccaggatctcgcaggcttttgggatctgctgcagctgagtatagaagacgtcaccttgaaattcctcgagctgcaacaactgaaagccaatagctggaagctgctggagcccaaagaagaaaagaaagtgccaccacctatccccaaaaagccgttaaggggaagaggtgtgcctgttaaagagcgatccctcgacagcgtcgataggcagcgccaggaagccaggaagagactcctggcagccaagagagccgcctccttccgtcacagctccgcaaccgaatctgccgatagtatagaaatttacattccagaggcccagaccaggttgtag

SEQ ID NO: 338580 - DNA, 798 bp, Artificial Sequence
  derived and/or modified sequence
atgagcatgagcctggacggccagagcgtgaagcggagcgcctggcacacaatgatggtaagtcagggccgggacggataccctggtgcaggacctgggaaggggctgttgggtcccgaaacgaaagctaaggcaagaacctaccattatctccaggtacctcaggatgactgggggggttaccctaccggaggcaaggacggagaaattccatgccgacggatgaggtccggaagttatatcaaagctatgggcgacgaggaatctggagactccgacgggagccccaaaacgtcgcctaaggcagtggccaggcggtttacgacacggagaagttcgtcggttgaccaggcccgcataaactgctgcgtccctcccaggatacatcctagatcgtcaataccaggttatagccggtcattgactaccggacaactgtctgacgagctcaatcagcagatggaacgcgaagctgaggactatgagctgccggaagaaatcctcgaaaaaatcaggtccgcagttgggagtacgcaactccttctgtcccagaaggtgcagcagttctttcgactgtgtcagcagtctatggacccaactgctttccccgtgcctacttttcaggacctggccgggttctgggacctcctgcagctatccatcgaagacgtgaccctgaagtttttggagctgcagcaactaaaggcaaactcatggaaactgttagagcctaaggaggagaaaaaggtcccacctcccatccccaccagaccccctgggccttcgcatagtagatag

SEQ ID NO: 338581 - DNA, 2940 bp, Artificial Sequence
  derived and/or modified sequence
atgcgtggctaccacggagatcgcggttcccaccccagacctgccagatttgccgaccagcagcacatggacgttggacccgctgccagagccccttatctgctgggtagccgggaagcttttagcactgaaccccgattctgcgcacctcgcgcaggcttggggcatatatcccccgaaggacccctcagtttgagcgaaggaccctccgtgggcccagagggaggccctgccggagccggagtgggaggtggctctagcacctttccgcgaatgtaccccggtcagggaccttttgacacttgtgaggactgcgtcggacacccccaggggaagggtgcccctcgactaccaccgactctgctagaccagttcgagaagcagctccccgtacagcaggacggtttccacacactgccatatcagagagggcctgccggagctggtcccggtcccgctcctggcacgggaacagcacctgagcctcggagtgagagcccatcccgcatacgacacctggtacatagtgtccagaagctcttcgccaagtcccatagtctggaggcaccaggcaagcgtgactacaacgggcctaaagctgagggaagaggtggatccggcggagacagttatccgggacctgggtccggtggcccacatacttctcatcatcatcaccaccaccatcaccatcatcatcatcagagccggcatggaaagaggtctaaaagcaaagaccgcaaaggtgacggcaggcaccaagcaaaaagtaccggttggtggtcctccgatgacaacctggattccgactcaggattcctggcagggggtcggccacccggtgagccgggaggacccttttgcctggaggggccagacggttcataccgtgacctgagtttcaagggcaggagcgggggatcagagggaagatgcctggcttgtacaggcatgtccatgagcctcgacggtcaaagcgtcaaacgcagcgcctggcataccatgatggtgtcccaggggagagacggatacccaggcgctggccctgggaagggcctgctcgggcctgagacaaaggcaaaagcccgaacttaccactatttacaggtgccacaggacgattggggaggctacccaaccggtgggaaggatggtgagatcccctgccggagaatgcgaagcggaagttatataaaagccatgggcgacgaagagtccggtgactcggatggatctccaaagaccagcccaaaagccgtagctcgccgtttcacgactcggcgttccagcagtgtggaccaggccagaatcaactgttgcgtcccaccaagaatccatccaaggagctctatcccgggatactcccggagcctgaccactggacagctatcggacgagctgaaccagcagttagaggcggtgtgcggcagcgtctttggcgagctcgaaagtcaagccgtggacgcactagacctgccgggatgcttccggatgcgctcccatagttatctgagagctatccaggctggctgctctcaggatgacgactgtctgccgctgctggccacacctgccgctgtcagtggtaggccaggatcatcatttaacttccgtaaggcaccaccccctattccccctgggtcacaggcacctccccgaatttccataactgcgcagtcatccacagactcggcccacgagtctttcacagccgctgagggtcctgccaggagatgctctagtgctgacggcctggacgggcctgccatgggggctcgtaccttggagctcgcccctgtccctccacgtgcaagtcccaagccgcctacccttatcatcaaaaccattccgggtcgagaagagttgcggtccctggctagacagcgcaagtggcgaccctcaatcggcgttcaggtcgaaacgattagcgactccgataccgagaacaggtctcgcagggaattccactctatcggcgtgcaggttgaagaagataaaaggagggcaagattcaagagaagtaactcagtgaccgctggggtgcaggcagacctggagttagagggccttgcgggactggcgacagtggctaccgaagataaagctctccagttcggaagatcattccagcgccatgcttcagaaccccagcctggcccaagggcacccacttattctgtgtttcgcactgtgcacactcaaggccagtgggcttaccgcgaggggtaccctcttccttatgaaccccctgccacagacggcagtcccggtcctgcccctgcccctaccccgggaccgggagccggtcgtagggattcctggatcgaacggggttctaggtcccttcccgacagcgggagggccagcccatgcccgagggatggagaatggtttataaaaatgctaagagcagaagtagagaagctggaacactggtgccagcagatggagagagaggcagaggattatgagctccccgaggagatcctcgagaagattagaagcgcggtcggtagcacacagctgttattatcccagaaggtacaacagtttttccggctgtgccaacagagtatggatcccaccgccttccccgtgcctaccttccaggatctggcaggattctgggatcttcttcagctgagtatcgaggacgtgactttaaagttcctggaactgcagcaactcaaggcaaatagctggaaactcctggagcctaaagaagagaaaaaagtgccacctcccatcccaaaaaaacccctgcgtggtaggggcgtccctgtaaaggagagatccttagacagcgtcgatagacagaggcaagaggccagaaaacggttgctagctgccaaacgggcagcctcattcagacactccagtgcaaccgaatcagccgactccatcgaaatctatattcctgaggctcagactcgcctatag

SEQ ID NO: 338582 - DNA, 798 bp, Artificial Sequence
  derived and/or modified sequence
atgtctatgtcactggatggccagagtgttaaaagatctgcctggcacaccatgatggtgagccagggccgtgacggataccctggtgccggacccggaaagggcctcttagggccagagacgaaagccaaggctcgaacctatcactatctgcaggttccacaggatgattgggggggataccccaccgggggaaaggatggagagattccgtgcaggagaatgcggtctggctcctatattaaagcaatgggcgacgaggagtcaggcgactcagacggttctcccaaaacgagccctaaggcagtcgccagacggtttacgacacgtaggtcttcctcagtggaccaggctagaattaattgctgtgtgccccctagaatccatcctcggtctagcatcccaggatattctagatcattgaccactggtcaactgtcagatgagttaaaccagcaaatggagagagaggccgaggattacgagctgccagaggagattcttgagaaaatccgcagtgcagtcggtagtactcagctgctgttatcccaaaaggtgcagcagttttttcgcctatgccagcagagtatggacccaaccgccttcccagtgccaacatttcaagatctcgctggcttttgggatctgctgcagctctctattgaagacgtgaccttaaaatttctcgaactgcagcaattgaaagctaatagctggaagctactggaacctaaggaggaaaaaaaggtgcctccgccaataccaacccgaccacccggtccttcccactcacggtag

SEQ ID NO: 338583 - DNA, 2940 bp, Artificial Sequence
  derived and/or modified sequence
atgcgcgggtatcatggggataggggctctcacccccgccctgcccggttcgctgaccagcagcacatggacgtaggccctgccgctcgagccccgtacttgctcggctctcgcgaggccttctctactgagcccagattctgcgcacctagagcaggactgggccacatcagcccagaaggaccattgagtctcagcgaaggaccatctgtgggacccgagggcggaccggctggcgctggggtgggcggtggcagttccacttttccacgcatgtacccaggacagggccctttcgatacctgtgaggattgcgtgggacatcctcagggaaaaggtgctccgcgtctgcctcccacattgctggaccagtttgagaagcagcttcctgtgcagcaggacggcttccacacgctcccctatcagcgggggcctgctggcgccggcccagggcccgcccctggaacaggaacggcccccgaaccgcgtagcgagagcccatctcgtatcagacatcttgtacactcggttcagaagctcttcgccaaaagccactcactggaggccccaggcaagagagactacaatgggcctaaagccgaggggcgaggcggttcgggcggcgattcctatcctggccctgggtctggagggcctcacacctcccaccatcaccatcatcaccaccaccaccatcaccatcagtctcgacacgggaagaggagtaagtccaaggaccgaaaaggcgatggcaggcatcaagccaagtccaccgggtggtggagtagcgacgacaatttggattctgactcggggttcctcgctgggggcaggccccccggcgagcccggcggtcccttttgcttagaggggcccgacggatcctacagagatctgtccttcaagggtaggtccggcgggtctgaaggacggtgcctcgcttgcaccggcatgagcatgtctctagatgggcagtctgtgaagaggtccgcctggcacactatgatggtttcccagggtcgcgatggttaccccggcgccgggccagggaaaggcctgctggggcccgagactaaagcgaaagcccgaacataccattatctccaggttccccaggacgattgggggggctaccccaccggcgggaaggatggcgaaatcccctgcaggcgcatgcggtcagggtcgtatattaaggctatgggagacgaagagagtggagacagcgacggatctccaaagacttccccaaaagcagtggccagaagatttacaacacgacggtccagtagtgtcgaccaggccaggatcaattgttgcgtaccccctagaattcacccccgcagctccattccaggctattcacggagcctgacaacaggccagcttagcgatgaattaaatcagcagctagaagccgtgtgtggaagcgtctttggcgaattggaaagccaggccgtggatgctttggacttacccgggtgcttccgaatgaggtctcatagttacctgcgcgcaatacaggccgggtgttcccaggacgatgattgcctgcctctcctcgcaacccccgcagccgtgagcgggcgcccagggagctctttcaatttcagaaaggcgccaccacctatacctccaggcagccaggcgcccccccgcatctcaattacagctcagtccagcacagacagcgcccatgaatcgtttaccgcggcggagggacccgccagacgctgttcgtcagcagacggccttgatggaccggccatgggggcccgcacgctcgagttggcaccggtccccccaagggcatctccaaaaccccccacccttatcattaaaaccataccgggccgcgaggagcttcggagcctggcaaggcagcgcaagtggagaccgagtattggcgtacaagttgagacaatttccgatagcgacaccgagaataggtcccgccgcgaatttcatagcatcggtgtccaggtagaagaggataagcgtagggcccgctttaagcgctccaactccgttacggctggggtacaagccgacttagaattagagggattagcagggctggcaaccgtcgctacagaggacaaggcccttcagtttgggcggtctttccagaggcatgccagcgagcctcagccaggcccgcgagctccaacttacagtgtgttccggacggtgcacacgcaaggccaatgggcgtacagagagggctaccccctcccttatgaacccccagccacggacggatcaccaggacccgcccctgcgcccacgcctgggccaggcgctggacgccgagattcttggatcgagcgcgggtctcgcagcctgccggattccgggcgcgctagcccatgtccaagggatggagaatggtttataaaaatgctccgcgcggaggtggagaagctggagcattggtgtcagcagatggaaagagaggccgaggactatgaactccccgaggagatcctggagaaaattcggtcggccgttggtagcacacagctgctcctcagtcagaaggtacagcagttcttccgcttgtgccaacagtctatggacccgactgcatttcccgtaccaactttccaggatctagctggtttctgggacctgctccaattatctatcgaagatgtcacactcaagtttctggagttacagcagttgaaggccaactcatggaaactgctggaaccaaaggaagagaaaaaagttccaccaccaatacctaaaaaaccactgcgaggccgcggcgtgccagtaaaagagcgcagccttgactcagtggaccgccaacggcaggaggcacgcaagcggcttctggctgctaaaagagccgcttcatttcggcactcttccgctacagaatccgctgacagcatcgagatctacatccccgaagcccagacacgactgtag

SEQ ID NO: 338584 - DNA, 2940 bp, Artificial Sequence
  derived and/or modified sequence
atgcggggctaccacggcgaccggggcagccacccccggcccgccagattcgccgaccagcagcacatggacgtagggcctgctgccagagctccatacctcctgggaagccgggaagcatttagcaccgagccacgcttttgtgctccccgcgctggcctggggcacatcagtcctgagggtcccctgtccttaagtgagggacccagcgtgggacctgaaggcggacctgctggcgccggcgtggggggaggctcttcgaccttcccccggatgtacccaggtcagggtcccttcgacacatgcgaagactgcgtaggacacccacaggggaagggggccccaaggttgccacccaccctgctggaccagttcgaaaagcagctaccagtgcagcaggacggtttccacacacttccatatcaaaggggtcccgctggagccggccccggaccagccccaggaaccggcacagcccctgagcctcgttcggagtcccctagtcgcatccgccatctggtgcactcggtccagaagctatttgccaaaagccactcactcgaagcccctggaaagagagattataatggaccaaaggccgaaggccggggggggtccggtggagacagctaccccggccccggctcaggagggccacatacatcccaccaccaccatcaccatcaccatcaccatcaccatcagagtaggcatggcaagcggtcaaagagcaaagaccgtaaaggcgatggccggcaccaggctaagtccaccggctggtggtcttccgacgataaccttgattctgattctgggtttctggcagggggtaggccaccgggggaacccggaggccctttctgcctcgaggggcccgacgggagctacagggacctgagcttcaaaggccgtagcgggggatcagaagggcggtgcctggcctgcactggtatgtccatgtcactagacggtcaaagtgttaaaagatcggcttggcatacaatgatggtttcccagggacgcgacggctaccctggggctgggccaggaaagggtctcctggggcccgaaaccaaagcaaaagcaaggacataccactatctccaggtgccacaggatgactggggtgggtatcccaccggagggaaagacggcgagataccatgtcgccggatgcggagtgggagttacattaaggctatgggcgatgaagagagtggagacagtgatgggagccccaagacatctccaaaagctgtggcgagacgatttaccactaggcggagctcatcagtagatcaagcccgcatcaactgctgtgtgccccctagaatccacccacggtcctcgatccccggttattcccgcagcctcaccacaggccagcttagtgacgaactcaatcaacagctggaagccgtgtgcgggagtgtgttcggagagttggagtcccaggctgtggatgctctcgatctgcctggctgtttcagaatgcggtcccacagctacctgagggccatacaggcgggatgtagccaggatgacgactgcttgccactattggcgacacccgccgctgtgagcggacgcccaggttccagttttaactttagaaaggctccccctcctatcccacccggatcccaggccccaccacgcatatccataactgcgcagtcttcaaccgattccgcccacgagtccttcaccgcggctgaaggaccagctaggcgctgtagtagcgcggatggtctggacgggccggcaatgggagcacgaacactcgaattggcacctgtaccaccccgcgcatctccaaagccaccaacattaatcatcaaaacgatccccggccgcgaggaactcaggtctctcgccagacagcgaaagtggcgcccctcgatcggtgtccaggtagaaacaatctcagatagtgatacagaaaaccgatccagacgggaatttcacagtataggcgttcaagtggaagaagataagcgcagggcccggtttaaacgcagtaacagcgtgacagctggcgttcaagcagatttggaactggaaggtttagcaggactagccaccgtggccacagaagacaaggccttgcaattcggtagaagctttcagcggcacgcatctgagccccagcctggcccgagggcacctacctattccgtattccgcacggtgcacacccaaggccaatgggcctaccgggagggctatcctctcccatatgagccacccgcaacagatggtagcccgggaccggctcctgcacccacccctgggccgggtgctggccgcagggactcttggattgaaagaggctcaaggagcctgccagattccggtagggccagcccgtgtccaagggatggcgaatggttcatcaagatgcttcgagcggaggtagagaaactggaacattggtgtcagcaaatggagcgagaagcagaggattacgagctaccagaagagatcctggaaaaaatccgcagtgccgtgggctctactcagctgctgctatcccagaaagtgcagcaattctttcgcctgtgccaacagagcatggaccccactgccttccccgtgccaacttttcaggatctcgctggcttctgggatctgctgcaattgtctatcgaagacgtcaccttgaaatttctggagctacaacagctgaaagcgaatagctggaaactcctcgagccgaaagaggaaaagaaagtcccgccccccattccaaagaagcctttacgaggaagaggggtccctgttaaggaacgaagcctggacagcgtggaccgccagcgccaggaagcacggaaaagactgctggctgctaagagggcagccagtttcagacactcttctgcgactgaatcagcggactctatagagatttacattccagaggctcagacgcggctctag

SEQ ID NO: 338585 - DNA, 2940 bp, Artificial Sequence
  derived and/or modified sequence
atgagaggttaccacggggaccgtggctctcatccacggccagcaaggtttgccgatcaacaacacatggacgttggacctgccgctagggcaccatatctcttgggatctagagaagccttcagcaccgagcctagattttgtgcgccacgggcaggtctaggccatatttcccccgagggtcctctgagcctgtcagaaggcccaagcgtaggtccagaggggggaccagcaggagccggagtggggggagggtcatccacgtttcctcggatgtaccccggacaagggccttttgatacttgtgaggactgtgtggggcacccacagggtaagggagctccaaggttacccccaaccctgttggatcagttcgagaagcaactacctgttcaacaggatggctttcatacacttccatatcaaaggggtcctgccggagcaggacccggacccgcacctggtacagggacagcaccggagccccgttccgaaagcccatcccggatccgtcacttggtacacagcgtgcagaagctgttcgccaagtcccatagcctcgaggctcccggtaaaagggactataatggccctaaagccgagggtcggggtggcagcggcggtgattcctacccaggcccaggctcaggcggtcctcacacatctcaccaccaccatcatcaccaccaccaccaccatcaccagtctcgccacggaaagcgatccaagtcaaaggaccggaagggcgacggacgacatcaggctaagagcaccgggtggtggagctctgacgacaacctcgattccgacagtggatttttggctggcggaaggcctcccggtgagcccggtggacctttctgtttggaagggccagatggttcctatagggacttaagttttaaaggtcgctctggcggttccgagggtaggtgcctcgcgtgcactgggatgtcaatgtcactagacgggcaatctgtaaaaaggagcgcttggcacaccatgatggtgagtcaggggcgagatggttatcctggggctggaccgggaaaaggtctccttgggcctgagacgaaggccaaagccaggacctaccattacctccaggtgccacaggacgactggggaggttaccccacaggtggcaaggacggtgaaatcccctgccgtcgcatgcggagcgggagctatataaaggccatgggggacgaagagagcggagatagcgacgggagccctaagacttctcccaaagcagtcgctcgtcgtttcaccacccggcgatcctcgtccgttgaccaggctaggattaactgctgcgtgcctccaaggatccatcccagaagctcaatcccagggtattctcgaagtctgacaaccggacagctgtctgatgagctgaatcaacagttggaggcggtctgcggcagtgtgtttggagagctcgagtctcaagctgtagatgcattagatttgcccggttgcttccgaatgaggtcccattcatatctgagagctatacaggcaggatgttcgcaggacgatgattgtctgccgctgttggccactcccgcagcggtcagtgggcgtcccggaagttccttcaacttccggaaagccccacctccaattccaccgggttcgcaggcacctcctaggatttccatcaccgctcagtcatccacagattccgcgcatgagtctttcactgccgctgaaggacccgctagaaggtgttcctccgccgatggactcgatggacctgccatgggtgctagaaccctcgagctggcgccagtgcccccaagggctagccctaaacctcctacgttaattattaaaacaatccccggaagggaagaactaaggagcctcgcccgacagaggaagtggagaccaagtattggagtgcaggtcgagacaatttccgactcagatacggaaaacagatccagacgggagttccacagtatcggcgtgcaggtagaagaagataagagacgcgcaagatttaagcgctccaatagcgttaccgctggggtgcaggccgatctcgagttggaaggcctcgccggactcgctaccgtcgccactgaggacaaagcactccaattcggcaggtcatttcagagacacgcttctgaaccccagcccggtcctcgcgcacctacatactccgtgtttcggactgtgcatacccagggtcagtgggcataccgcgagggatatccgctgccctatgaaccaccagccaccgacgggagccccggacctgcacccgctccaaccccaggtcccggagctggacggcgagattcttggattgaaagaggatctcggagccttccagatagtgggagagcatctccctgtcccagggacggggagtggtttataaagatgcttcgtgccgaagtggagaagctcgagcactggtgccagcagatggagcgggaggcggaagattatgagctgcccgaagagatattggagaaaattcggtcagccgtagggtctacacaactgctccttagtcagaaagtccagcagttctttagattatgccagcaatccatggacccaacagcttttcccgtgccgacattccaggacttggccggattctgggaccttctgcagttgtccatcgaagacgttaccctgaagtttctggagctgcaacagctgaaggccaactcatggaagctgttagagcccaaggaggagaagaaagttcccccacctattccaaagaagcccctcagaggacgtggagtgcctgtgaaggagcgatccctggattccgtcgacaggcagcgccaggaggcccgaaaacggctgctggctgcgaaaagagctgcttcatttcgacatagttcagcaactgagtccgccgattccatagagatttacattcccgaggcccagactaggttgtag

SEQ ID NO: 338586 - DNA, 1206 bp, Artificial Sequence
  derived and/or modified sequence
atgtacttcattaaccagagactcttcctgcgtctatggcgagtgccggtgatgcgggcatcacactgttatcagtcacagggctggagaccagtcgcagtcggacaggacctgacagttatggctgctctcggccttggttttttgacatccaatttccgacgacatagctggagcagcgtcgcctttaatctgtttatgctagcactgggcgtacagtgggccatcttgttggatggatttctctcccagtttccccccgggaaggttgttataaccctctttagtattagactcgctacaatgtctgcgatgtccgttctcatctccgcaggggctgtgctgggcaaggtgaacttagcccaactcgtggtcatggtgcttgtagaagttactgccctgggcaccctccggatggtcatttccaacatatttaatactgactaccatatgaatcttaggcacttttatgtgtttgctgcttactttggactcacagtggcttggtgccttcctaaaccattacctaagggaaccgaagacaacgaccagagagctacaattcccagcctttccgccatgttaggggcgttattcctgtggatgttttggcctagcgtaaactccgctctgctgcgctcccctatccagcggaagaacgctatgttcaatacctactacgcgctagctgtgtcagttgtgacagccatttccggctccagcctggcccacccccagcggaagatcagcatgacctatgtccacagcgcagtcctcgccggcggtgtggccgtgggtacatcatgtcacctgattccttccccttggcttgccatggtgctggggctcgtcgctggactgatctcaattgggggagctaaatgcctgcctgtgtgctgcaaccgcgtcttagggatacatcacatatcagtgatgcattctattttctcactcctgggactactgggggagatcacatacatcgtccttctggtgctgcacactgtctggaacgggaatggaatgattggatttcaggtgcttctgtcaatcggcgaattgtcactggctattgtaattgccttgacatcaggattgctcaccggtctcttgctgaatctgaagatctggaaggctccccacgtagctaaatatttcgacgatcaagtgttctggaagttcccccacctggcagtgggcttctag

SEQ ID NO: 338587 - DNA, 1206 bp, Artificial Sequence
  derived and/or modified sequence
atgtacttcattaaccaacgcttgtttttgagactgtggcgagtgcctgttatgcgagccagtcactgttaccagtcacaaggctggcggcccgtggctgtcggacaggatctgactgtcatggctgctctgggcctgggattcctgacaagcaatttccgcaggcactcatggagttcggtggcctttaatctgttcatgctggccctgggggtacagtgggccatacttctcgatggattcctgtcacaatttccgcccgggaaggttgtgatcaccctgttttctatcagattagccacgatgtctgcgatgtccgttctgatcagcgctggcgccgtcctgggaaaggtcaacctcgcacaacttgttgtgatggtgctggtcgaagttactgctttggggactctgcgtatggtaatctctaatatctttaacactgactaccatatgaacctcagacacttctatgttttcgcagcttacttcggcctcactgtggcctggtgcttgcccaagccccttcctaaggggaccgaggataacgaccaaagggcaaccattcctagtctgagtgccatgcttggagcgctgtttttgtggatgttttggcccagcgtgaatagcgccttactcagaagtcccattcaacggaaaaatgcaatgttcaacacgtattatgctctcgctgttagcgtggtaacagctatctctgggtctagtctggcacatccacagcgcaaaatcagcatgacttacgttcatagcgctgtgctggccgggggtgtggctgtagggaccagttgccatctcatcccatcaccctggcttgctatggtgctggggctggtagctggactgatttctatcggcggcgctaagtgcttacctgtgtgttgtaacagggtgttgggaattcatcatatctcggtgatgcatagcattttctccttgctcggcctcctgggggagatcacttacatcgtattgttggttctccacaccgtgtggaatggcaacggtatgattgggttccaagtgcttctttctatcggcgagttatcgctggctatcgtcattgcactgacttctggcttgctcaccggactgttactgaacctgaagatctggaaggccccccacgttgccaagtactttgacgaccaggtgttttggaagttcccgcacctggctgtggggttctag

SEQ ID NO: 338588 - DNA, 1206 bp, Artificial Sequence
  derived and/or modified sequence
atgtacttcatcaaccagaggctcttcctgcggctgtggagggtgcctgtgatgagggccagccactgctaccagagccagggctggaggcctgtggccgtgggccaggacctgactgtgatggccgccctgggcctgggcttcctgaccagcaacttccgccgccacagctggagctctgtggccttcaacctcttcatgctggccctgggcgtgcagtgggccatcctgctggatggcttcctgagccagttccccccaggcaaggtggtgatcaccctcttcagcatccggctggccaccatgtctgccatgtctgtgctgatctctgctggagctgtgctgggcaaggtgaacctggcccagctggtggtgatggtgctggtggaggtgacagccctgggcaccctgaggatggtgatcagcaacatcttcaacacagactaccacatgaacctgcggcacttctacgtgtttgctgcctacttcggcctgactgtggcctggtgcctgcccaagcccctgcccaagggcacagaggacaatgaccagagggccaccatccccagcctgagcgccatgctgggcgccctcttcctgtggatgttctggcccagcgtgaacagcgccctgctgcggagccccatccagaggaagaatgccatgttcaacacctactatgccctggccgtgtctgtggtgacagccatcagcggcagcagcctggcccacccccagaggaagatctccatgacctacgtgcacagcgctgtgctggccggcggcgtggccgtgggcaccagctgccacctgatccccagcccctggctggccatggtgctgggcctggtggccggcctcatcagcatcggcggggccaagtgcctgcctgtgtgctgcaacagagtgctgggcatccaccacatctctgtgatgcacagcatcttcagcctgctgggcctgctgggggagatcacctacatcgtgctgctggtgctgcacacagtgtggaatggaaatggcatgattggcttccaggtgctgctgagcattggagagctgagcctggccatcgtcatcgccctgaccagcggcctgctgaccggcctgctgctgaacctgaagatctggaaggcccctcatgtggccaagtactttgatgaccaggtgttctggaagttcccccacctggccgtgggcttctag

SEQ ID NO: 338589 - DNA, 1206 bp, Artificial Sequence
  derived and/or modified sequence
atgtacttcatcaaccagcggctgttcctgcggctgtggcgggtgcccgtgatgcgggccagtcactgttatcagagtcagggctggcggcccgtggctgtcggccaggatcttacagtaatggcagccttgggactgggttttctgactagcaatttccggagacattcttggtccagcgtggcatttaatctgtttatgctcgcgttaggagtgcagtgggctatcctgctcgacggctttctgtcccagttcccacctggcaaggtagtcatcaccctctttagcatccgacttgctaccatgagtgccatgtcggtgctgatcagcgccggtgctgtcttaggaaaggttaatttggcccagctggtggtaatggtcttagttgaggtgaccgccctcggaaccctgcgtatggttatttctaacatatttaacactgactatcatatgaacctgcggcacttttacgtgtttgctgcttactttgggctgacagttgcatggtgcttacctaaacctctccccaaagggaccgaggacaacgaccaacgggcaaccatcccttctctgtcggctatgctaggtgctttgttcctttggatgttctggccgtccgttaattctgcactgctcaggtcgccaatacagcggaaaaacgctatgttcaatacatactacgccctggctgtcagcgtggtcaccgccatctccggcagttctctggcccacccacagcgaaagatcagtatgacctatgtacacagtgccgtactggctggaggtgtagccgtcggcacatcctgtcatctgatacctagcccttggctagctatggttctggggttagtagccggactcatctcgatcgggggggccaagtgtctgccagtctgctgcaaccgagtgcttggtatccaccatatcagcgtcatgcatagcattttctccctgctgggcctgctgggggaaatcacatatattgtgcttctggtgctgcacactgtatggaacgggaacggtatgatcggcttccaggtcctgctctcgatcggcgaactttccttggccatagtgattgccctgacgtccggtctgctcaccggactgctgctgaatcttaagatctggaaggccccccacgttgctaagtatttcgacgaccaggtgttttggaagtttccccaccttgctgtgggcttctag

SEQ ID NO: 338590 - DNA, 1206 bp, Artificial Sequence
  derived and/or modified sequence
atgtacttcatcaaccagcggctgttcctgcggctgtggcgggtgcctgttatgcgggcctcacactgttaccaaagccagggctggcgacctgtggcagttggacaggacctaactgtgatggctgctttaggcctgggatttctgacatccaatttcaggagacattcttggtcctcagtcgcttttaacctctttatgctcgcactgggtgtgcagtgggctatactgttggatgggttcctgtcacagtttccccccgggaaagtcgtaataacgctgtttagcatccgccttgcaacgatgtcagccatgagtgttttgatttccgcgggagccgttcttgggaaagtgaatctagcacagttggtggtaatggtcttggttgaggtcaccgcccttgggacccttaggatggtcatatctaatatctttaacactgattaccacatgaaccttcggcacttttacgtcttcgccgcctacttcggtttgacagtggcttggtgcctgccaaaaccactgcctaaaggaacagaggataacgatcagagggctactatcccaagtctttctgccatgctcggcgcattgttcctctggatgttttggccttccgtcaattcagcccttttgagatccccgatccagcggaagaatgcaatgtttaacacctactacgccctcgctgtgtcagtggtgaccgcgattagtggctcttctctggctcatccccagcgtaagatctccatgacatatgtccattcagccgttctggccggcggagtcgctgtgggaaccagctgccatctcataccctcaccctggctcgccatggtgttggggctggttgccggcttaatttccatcggtggggcaaaatgcctgcctgtctgttgcaacagagtgctcgggatccaccacatctccgtgatgcacagcatcttcagcctgctcggcctgctgggagaaatcacatacatagtgctgctcgtgttacataccgtttggaacggcaacgggatgattggattccaggtgctgctgagcattggcgagctaagccttgcaatcgtcatagcactgacgagcggtctcctgactgggcttctgctcaacttgaaaatctggaaggcgccacacgtggcgaagtactttgacgaccaggtattctggaagtttcctcatctcgcggtggggttttag

SEQ ID NO: 338591 - DNA, 1206 bp, Artificial Sequence
  derived and/or modified sequence
atgtattttataaatcaaaggctgtttctgaggctctggagagtgcctgtgatgcgcgcttctcactgctatcaatcgcagggctggagacctgtggctgtgggccaagatcttacggtgatggcagcactcggcctgggctttctgacgtctaatttccgacgtcactcctggtcatccgtggctttcaacttgtttatgctggcattgggagtgcagtgggctattcttctggacggtttccttagccaattcccaccagggaaggtggtgattactctgttttcgatcagactcgcaacgatgagcgctatgtccgttctaatctccgccggagcagtcctaggaaaggtgaacttggcccagctcgtggtgatggtgctggttgaagtgacggccttgggaaccctgaggatggtgatttccaatatattcaacaccgactatcatatgaacctccgccacttttatgtgttcgcagcttacttcgggcttacagtggcctggtgtcttccaaagccccttcccaagggcaccgaagataatgatcagcgagcaactatcccttccctctctgcgatgttaggagctttgtttttgtggatgttctggccatctgtgaactccgcactgctccgttctccaattcagcggaagaacgccatgttcaatacttattacgcacttgcggtctcagtcgtcaccgcaatctctggcagctctctggcccatccacagcgcaagatcagcatgacctacgtgcactctgccgtattagctggaggcgtggcagtgggaactagctgccacctgatcccttcgccctggctggcaatggtgttaggactcgtagccggacttatttccatcgggggtgcaaagtgcctgcccgtttgttgtaaccgggttctcggcatccatcacatctccgtgatgcactcaatcttttccctgctgggactgctaggcgaaatcacttacatagtgctgctggtcctgcacacagtgtggaacggtaatgggatgattggattccaggtgctactgtcgattggcgagctatctctggctatagtgatagccctcacttccggtttgctgacagggctgctgctgaacctgaagatatggaaagcccctcatgtcgcaaaatacttcgacgatcaggtgttctggaagtttccacaccttgcggtcggtttttag

SEQ ID NO: 338592 - DNA, 1206 bp, Artificial Sequence
  derived and/or modified sequence
atgtatttcattaaccagcgattattcctgcggttatggcgagtgccagtgatgcgcgcaagccactgttatcaaagccaggggtggagacctgtagcggtgggtcaggacctaaccgtaatggctgctttaggtctcggcttcctgacatccaatttcagaagacattcctggagcagcgtagcctttaacctgtttatgctcgcgttaggggtgcagtgggcgatcttgctcgatggttttctgagccaattcccacctggcaaagttgtaataactctgttctctatcagactcgcaaccatgtccgctatgagcgtgctgatctcagctggagcagtgctgggcaaggtgaatctggcacagcttgtggtgatggtgttggtggaagttacagccctcggaaccctaaggatggtgattagcaacatctttaacacagattaccacatgaatctgcggcacttttatgttttcgctgcttacttcggacttacagtggcgtggtgtctgcctaaacctcttccaaagggcacagaggataatgaccagcgtgctaccatcccctcactctctgccatgcttggcgctctcttcttatggatgttctggccgtctgtgaattctgcacttctgcgatctcccatacagaggaaaaacgctatgttcaatacatattatgcactggctgtgtccgtggtgaccgccatttctggctccagtcttgcacacccacaacgtaaaatttccatgacctacgtgcactctgcagtgcttgccggaggcgtggcagtgggcactagctgtcacctcattccctctccgtggctcgcgatggttctgggactggtggctgggttaatctcgattggaggagccaaatgtttgcctgtatgctgtaatcgggtcctggggatacatcacatcagtgttatgcatagcatattttcacttttaggtttgttaggggagataacctacatcgtgctcctagtgcttcacacagtttggaatgggaatggtatgatcggctttcaggtccttctgtcaatcggggagctgagcctggccatagtcatcgccttaacttctggcctgctgaccggactgttactgaacctgaaaatctggaaggctccccacgtggccaagtactttgatgaccaagttttttggaaatttccacatctggccgtaggattctag

SEQ ID NO: 338593 - DNA, 1810 bp, Artificial Sequence
  derived and/or modified sequence
atgcccggggcgtgtgcggcggtgcggcccgggctccacgtccacaggctgggcagcgctgtgggccccgcgggcgccgagtccgcaggacccgcgagggcactaccgcgaagcatcggcctccgggccgggccgggccggaccgggagcctgctcggcgggtccgggctcctgcaaggcggggacgcggggccggcgacccttcacgcttcgtactcattgagcgccgattttatgccaggcaccgtgctggatctcccagtgcctggaagagaaaacccattctgtttcgaagggcatccagagctggtcacagtggggacccaccctccttttccaggctacgccagaccctgggtgtgtgtacgtttcaatggaagtgaatttaaatgtactttataaatcaaagactttttctgagactttggagagttccagtaatgagagcttctcattgttatcaaagccagggctggagaccagtggcagtcggccaagatctgaccgtgatggcggcccttggcttgggcttcctcacctcaaatttccggagacacagctggagcagtgtggccttcaacctcttcatgctggcgcttggtgtgcagtgggcaatcctgctggacggcttcctgagccagttccctcctgggaaggtggtcatcacactgttcagtattcggctggccaccatgagtgctatgtcggtgctgatctcagcgggtgctgtcttggggaaggtcaacttggcgcagttggtggtgatggtgctggtggaggtgacagctttaggcaccctgaggatggtcatcagtaatatcttcaacacagactaccacatgaacctgaggcacttctacgtgttcgcagcctattttgggctgactgtggcctggtgcctgccaaagcctctacccaagggaacggaggataatgatcagagagcaacgatacccagtttgtctgccatgctgggcgccctcttcttgtggatgttctggccaagtgtcaactctgctctgctgagaagtccaatccaaaggaagaatgccatgttcaacacctactatgctctagcagtcagtgtggtgacagccatctcagggtcatccttggctcacccccaaaggaagatcagcatgacttatgtgcacagtgcggtgttggcaggaggcgtggctgtgggtacctcgtgtcacctgatcccttctccgtggcttgccatggtgctgggtcttgtggctgggctgatctccatcgggggagccaagtgcctgccggtgtgttgtaaccgagtgctggggattcaccacatctccgtcatgcactccatcttcagcttgctgggtctgcttggagagatcacctacattgtgctgctggtgcttcatactgtctggaacggcaatggcatgattggcttccaggtcctcctcagcattggggaactcagcttggccatcgtgatagctctcacgtctggtctcctgacaggtttgctcctaaatctcaaaatatggaaagcacctcatgtggctaaatattttgatgaccaagttttctggaagtttcctcatttggctgttggattttaagcaaaagcatccaagaaaaacaaggcctgttcaaaaacaagacaacttcctctcactgttgcctgcatttgtacgtgagaaacgctcatgacagcaaagtctccttatgtataatgaaacaaggtcagagacagatttgatattaaaaaattaaagactaaaaacttagtttaagagtcaatttaataagtttaaaataaatgtttagtttcatt

SEQ ID NO: 338594 - DNA, 1483 bp, Artificial Sequence
  derived and/or modified sequence
atgtactttataaatcaaagactttttctgagactttggagagttccagtaatgagagcttctcattgttatcaaagccagggctggagaccagtggcagtcggccaagatctgaccgtgatggcggcccttggcttgggcttcctcacctcaaatttccggagacacagctggagcagtgtggccttcaacctcttcatgctggcgcttggtgtgcagtgggcaatcctgctggacggcttcctgagccagttccctcctgggaaggtggtcatcacactgttcagtattcggctggccaccatgagtgctatgtcggtgctgatctcagcgggtgctgtcttggggaaggtcaacttggcgcagttggtggtgatggtgctggtggaggtgacagctttaggcaccctgaggatggtcatcagtaatatcttcaacacagactaccacatgaacctgaggcacttctacgtgttcgcagcctattttgggctgactgtggcctggtgcctgccaaagcctctacccaagggaacggaggataatgatcagagagcaacgatacccagtttgtctgccatgctgggcgccctcttcttgtggatgttctggccaagtgtcaactctgctctgctgagaagtccaatccaaaggaagaatgccatgttcaacacctactatgctctagcagtcagtgtggtgacagccatctcagggtcatccttggctcacccccaaaggaagatcagcatgacttatgtgcacagtgcggtgttggcaggaggcgtggctgtgggtacctcgtgtcacctgatcccttctccgtggcttgccatggtgctgggtcttgtggctgggctgatctccatcgggggagccaagtgcctgccggtgtgttgtaaccgagtgctggggattcaccacatctccgtcatgcactccatcttcagcttgctgggtctgcttggagagatcacctacattgtgctgctggtgcttcatactgtctggaacggcaatggcatgattggcttccaggtcctcctcagcattggggaactcagcttggccatcgtgatagctctcacgtctggtctcctgacaggtttgctcctaaatctcaaaatatggaaagcacctcatgtggctaaatattttgatgaccaagttttctggaagtttcctcatttggctgttggattttaagcaaaagcatccaagaaaaacaaggcctgttcaaaaacaagacaacttcctctcactgttgcctgcatttgtacgtgagaaacgctcatgacagcaaagtctccttatgtataatgaaacaaggtcagagacagatttgatattaaaaaattaaagactaaaaacttagtttaagagtcaatttaataagtttaaaataaatgtttagtttcattaggatgatgctatcaatattttcttggttacagacacattattaaagttttgggttaatttt

SEQ ID NO: 338595 - DNA, 1206 bp, Artificial Sequence
  derived and/or modified sequence
atgtacttcatcaaccagagactgttcctgagactgtggagagtgcccgtgatgagagccagccactgctaccagagccagggctggagacccgtggccgtgggccaggacctgaccgtgatggccgccctgggcctgggcttcctgaccagcaacttcagaagacacagctggagcagcgtggccttcaacctgttcatgctggccctgggcgtgcagtgggccatcctgctggacggcttcctgagccagttcccccccggcaaggtggtgatcaccctgttcagcatcagactggccaccatgagcgccatgagcgtgctgatcagcgccggcgccgtgctgggcaaggtgaacctggcccagctggtggtgatggtgctggtggaggtgaccgccctgggcaccctgagaatggtgatcagcaacatcttcaacaccgactaccacatgaacctgagacacttctacgtgttcgccgcctacttcggcctgaccgtggcctggtgcctgcccaagcccctgcccaagggcaccgaggacaacgaccagagagccaccatccccagcctgagcgccatgctgggcgccctgttcctgtggatgttctggcccagcgtgaacagcgccctgctgagaagccccatccagagaaagaacgccatgttcaacacctactacgccctggccgtgagcgtggtgaccgccatcagcggcagcagcctggcccacccccagagaaagatcagcatgacctacgtgcacagcgccgtgctggccggcggcgtggccgtgggcaccagctgccacctgatccccagcccctggctggccatggtgctgggcctggtggccggcctgatcagcatcggcggcgccaagtgcctgcccgtgtgctgcaacagagtgctgggcatccaccacatcagcgtgatgcacagcatcttcagcctgctgggcctgctgggcgagatcacctacatcgtgctgctggtgctgcacaccgtgtggaacggcaacggcatgatcggcttccaggtgctgctgagcatcggcgagctgagcctggccatcgtgatcgccctgaccagcggcctgctgaccggcctgctgctgaacctgaagatctggaaggccccccacgtggccaagtacttcgacgaccaggtgttctggaagttcccccacctggccgtgggcttctag

SEQ ID NO: 338596 - protein, 372 aa, Artificial Sequence
  derived and/or modified sequence
MSSKYPRSVRRCLPLCALTLEAALILLFYFFTHYDASLEDQKGLVASYQVGQDLTVMAALGLGFLTSNFRRHSWSSVAFNLFMLALGVQWAILLDGFLSQFPPGKVVITLFSIRLATMSAMSVLISAGAVLGKVNLAQLVVMVLVEVTALGTLRMVISNIFNTDYHMNLRHFYVFAAYFGLTVAWCLPKPLPKGTEDNDQRATIPSLSAMLGALFLWMFWPSVNSALLRSPIQRKNAMFNTYYALAVSVVTAISGSSLAHPQRKISMTYVHSAVLAGGVAVGTSCHLIPSPWLAMVLGLVAGLISIGGAKCLPVCCNRVLGIHHISVMHSIFSLLGLLGEITYIVLLVLHTVWNGNGMFAPKSQNMESTSCG

SEQ ID NO: 338597 - DNA, 1119 bp, Artificial Sequence
  derived and/or modified sequence
atgagcagtaaatatcccagaagcgtccggaggtgcctgccactctgcgctcttacattggaggcagcattgattctgcttttctattttttcacccactacgatgcatccctggaggatcagaaaggactcgtggcttcataccaggttgggcaggacctcaccgtgatggctgcattgggcttaggattccttacttccaacttcaggaggcattcttggtcttctgtggccttcaatttgtttatgttggctttgggcgtgcagtgggccatcctgttagatggcttcctatcccaattcccccctggaaaggtcgtgataaccctattctccatccgcctggccaccatgtccgccatgtctgtgttgatttcagcgggcgcagtactcggcaaggttaacctggcacagctggtggtgatggtgctcgtcgaagtgacagctctgggtaccctacgtatggtgatttcaaacatttttaataccgactatcacatgaatctgaggcatttttatgtgtttgcagcctacttcgggttaacagtggcttggtgtctgccaaagccacttccaaaaggaacggaggacaacgatcagagagctaccattccctcactttccgccatgctgggagctctcttcctttggatgttctggcccagcgtaaattccgcccttcttcggtcacctattcagcgtaaaaacgccatgttcaacacgtactatgcgcttgccgtttccgtggtgacagcgatatccgggagctcgttagcccatccccaaagaaagatttccatgacctacgtgcacagcgctgtgcttgcaggaggcgtagctgtggggactagttgtcacttgatcccaagcccctggttggctatggtgctcggcctggtggcaggactcatctcaataggcggcgctaagtgccttcctgtctgttgtaatagagttcttggcatacaccacatatcagtgatgcattctatattttcactattaggcctgctgggcgaaataacctatatagtcctgctggtgcttcatacagtttggaatggcaatgggatgtttgcccccaagtcccaaaacatggagagtacctcctgcggttag

SEQ ID NO: 338598 - DNA, 1119 bp, Artificial Sequence
  derived and/or modified sequence
atgagcagcaagtaccccaggtctgtgcggcgctgcctgcccctgtgtgccctgaccctggaggccgccctgatcctgctcttctacttcttcacccactatgatgccagcctggaggaccagaagggcctggtggccagctaccaggtgggccaggacctgactgtgatggccgccctgggcctgggcttcctgaccagcaacttccgccgccacagctggagctctgtggccttcaacctcttcatgctggccctgggcgtgcagtgggccatcctgctggatggcttcctgagccagttccccccaggcaaggtggtgatcaccctcttcagcatccggctggccaccatgtctgccatgtctgtgctgatctctgctggagctgtgctgggcaaggtgaacctggcccagctggtggtgatggtgctggtggaggtgacagccctgggcaccctgaggatggtgatcagcaacatcttcaacacagactaccacatgaacctgcggcacttctacgtgtttgctgcctacttcggcctgactgtggcctggtgcctgcccaagcccctgcccaagggcacagaggacaatgaccagagggccaccatccccagcctgagcgccatgctgggcgccctcttcctgtggatgttctggcccagcgtgaacagcgccctgctgcggagccccatccagaggaagaatgccatgttcaacacctactatgccctggccgtgtctgtggtgacagccatcagcggcagcagcctggcccacccccagaggaagatctccatgacctacgtgcacagcgctgtgctggccggcggcgtggccgtgggcaccagctgccacctgatccccagcccctggctggccatggtgctgggcctggtggccggcctcatcagcatcggcggggccaagtgcctgcctgtgtgctgcaacagagtgctgggcatccaccacatctctgtgatgcacagcatcttcagcctgctgggcctgctgggggagatcacctacatcgtgctgctggtgctgcacacagtgtggaatggaaatggcatgtttgcccccaagagccagaacatggagagcaccagctgtggctag

SEQ ID NO: 338599 - DNA, 1119 bp, Artificial Sequence
  derived and/or modified sequence
atgagcagcaagtacccccggagcgtgcggcggtgcctgcccctgtgcgccctgacccttgaggccgccctgatcctcctgttctactttttcacacattatgacgcgtccttagaagatcaaaagggtttggtcgcctcttaccaagtgggccaagacctgaccgttatggccgcgttggggttgggctttctgactagtaacttccggcgccattcctggagctctgtggcatttaacttgtttatgttggccctgggggtccagtgggccatcctgctggacggctttctgagtcaatttccccccgggaaggtggtgataaccctctttagcatcaggcttgccactatgtccgccatgtctgttctgatcagtgccggagcagtgctgggtaaggttaaccttgcacaattagtagtgatggttttggtcgaggtgacggcactaggaacactaaggatggtgatttctaatattttcaacacggattaccacatgaacctgcgtcacttctacgtgtttgctgcctacttcgggctgacagtagcatggtgtctgccaaagccgctccccaaggggacagaggataatgatcagcgggctaccattcccagcctctccgctatgctgggggccctcttcttgtggatgttttggccatccgtgaactcggcgttactccgctccccaatccagcgtaagaatgccatgttcaatacttattatgctctcgccgtatctgtagtcacggccatctccgggtcttctcttgctcaccctcagcggaagatcagcatgacctacgtccattccgccgtccttgcaggcggtgttgctgtgggcaccagctgccacctcatcccatccccatggctggcaatggtgcttgggctggtggctggtctgattagtatcgggggagctaaatgcctcccagtgtgctgcaacagggtcctggggatacaccatatcagcgtcatgcatagtatcttctccctgctgggactcctcggagaaatcacctacattgtgctgctggtcttacatacagtatggaacggaaatggtatgtttgctcctaagtcacagaatatggagtccacctcgtgcgggtag

SEQ ID NO: 338600 - DNA, 1119 bp, Artificial Sequence
  derived and/or modified sequence
atgtcctcaaagtaccctcgctcagttagacgctgtcttcccttatgcgccctgacactggaagcagctttgatccttttgttttacttttttacccattacgatgcgtcccttgaagatcagaaaggtctagtcgcctcctatcaagttggccaagacttgactgttatggccgcactgggactgggctttcttacctctaatttccgtcgacacagctggagcagcgtggccttcaatttattcatgctggccctgggagtgcaatgggccatcctgctcgatggattcctgagccagtttccgccaggcaaggtggttattaccttattcagcatcagactcgccacaatgagcgccatgtcggtgcttattagcgcaggcgcagtcctgggtaaggtaaacctcgcacagctcgttgtgatggtgctcgttgaggtgactgccctgggtacactgagaatggtgatctccaatatcttcaacacagactaccatatgaacttaaggcatttctacgtgtttgctgcatattttggcctcacagttgcttggtgcttgcccaaaccacttcccaagggaaccgaagacaacgaccagcgcgcaaccatcccttcactgtctgccatgctgggagcattatttctgtggatgttttggccttctgtgaatagcgctctcctgaggtcacccatacaaagaaagaacgctatgttcaatacttactacgccctcgctgttagcgttgtcaccgcaatcagtggctcctccctcgcgcaccctcagcgcaaaatttccatgacatatgtgcatagcgctgtactggcaggcggagtggccgtaggcacatcctgccatctgattccttcaccttggctcgcgatggtcctcgggctggtggcaggcctaataagcatcgggggagccaagtgcctccccgtctgttgcaatagggtgctggggattcaccatatttcagtcatgcatagcattttttccctgctgggattgttgggcgaaattacgtacattgtgttactagtcctgcacacagtctggaacggcaacggcatgttcgcgccaaaatctcagaacatggaaagtacgagttgtgggtag

SEQ ID NO: 338601 - DNA, 1537 bp, Artificial Sequence
  derived and/or modified sequence
atcgctccctcaagccctcaagtaggtgttggagagaggggtgatgcctggtgctggtggaacccctgcacagagacggacacaggatgagctctaagtacccgcggtctgtccggcgctgcctgcccctctgcgccctaacactggaagcagctctcattctcctcttctatttttttacccactatgacgcttccttagaggatcaaaaggggctcgtggcatcctatcaagtcggccaagatctgaccgtgatggcggcccttggcttgggcttcctcacctcaaatttccggagacacagctggagcagtgtggccttcaacctcttcatgctggcgcttggtgtgcagtgggcaatcctgctggacggcttcctgagccagttccctcctgggaaggtggtcatcacactgttcagtattcggctggccaccatgagtgctatgtcggtgctgatctcagcgggtgctgtcttggggaaggtcaacttggcgcagttggtggtgatggtgctggtggaggtgacagctttaggcaccctgaggatggtcatcagtaatatcttcaacacagactaccacatgaacctgaggcacttctacgtgttcgcagcctattttgggctgactgtggcctggtgcctgccaaagcctctacccaagggaacggaggataatgatcagagagcaacgatacccagtttgtctgccatgctgggcgccctcttcttgtggatgttctggccaagtgtcaactctgctctgctgagaagtccaatccaaaggaagaatgccatgttcaacacctactatgctctagcagtcagtgtggtgacagccatctcagggtcatccttggctcacccccaaaggaagatcagcatgacttatgtgcacagtgcggtgttggcaggaggcgtggctgtgggtacctcgtgtcacctgatcccttctccgtggcttgccatggtgctgggtcttgtggctgggctgatctccatcgggggagccaagtgcctgccggtgtgttgtaaccgagtgctggggattcaccacatctccgtcatgcactccatcttcagcttgctgggtctgcttggagagatcacctacattgtgctgctggtgcttcatactgtctggaacggcaatggcatgtttgctcctaaatctcaaaatatggaaagcacctcatgtggctaaatattttgatgaccaagttttctggaagtttcctcatttggctgttggattttaagcaaaagcatccaagaaaaacaaggcctgttcaaaaacaagacaacttcctctcactgttgcctgcatttgtacgtgagaaacgctcatgacagcaaagtctccttatgtataatgaaacaaggtcagagacagatttgatattaaaaaattaaagactaaaaacttagtttaagagtcaatttaataagtttaaaataaatgtttagtttcattaggatgatgctatcaatattttcttggttacagacacattattaaagttttgggttaatttt

SEQ ID NO: 338602 - DNA, 1119 bp, Artificial Sequence
  derived and/or modified sequence
atgagcagcaagtaccccagaagcgtgagaagatgcctgcccctgtgcgccctgaccctggaggccgccctgatcctgctgttctacttcttcacccactacgacgccagcctggaggaccagaagggcctggtggccagctaccaggtgggccaggacctgaccgtgatggccgccctgggcctgggcttcctgaccagcaacttcagaagacacagctggagcagcgtggccttcaacctgttcatgctggccctgggcgtgcagtgggccatcctgctggacggcttcctgagccagttcccccccggcaaggtggtgatcaccctgttcagcatcagactggccaccatgagcgccatgagcgtgctgatcagcgccggcgccgtgctgggcaaggtgaacctggcccagctggtggtgatggtgctggtggaggtgaccgccctgggcaccctgagaatggtgatcagcaacatcttcaacaccgactaccacatgaacctgagacacttctacgtgttcgccgcctacttcggcctgaccgtggcctggtgcctgcccaagcccctgcccaagggcaccgaggacaacgaccagagagccaccatccccagcctgagcgccatgctgggcgccctgttcctgtggatgttctggcccagcgtgaacagcgccctgctgagaagccccatccagagaaagaacgccatgttcaacacctactacgccctggccgtgagcgtggtgaccgccatcagcggcagcagcctggcccacccccagagaaagatcagcatgacctacgtgcacagcgccgtgctggccggcggcgtggccgtgggcaccagctgccacctgatccccagcccctggctggccatggtgctgggcctggtggccggcctgatcagcatcggcggcgccaagtgcctgcccgtgtgctgcaacagagtgctgggcatccaccacatcagcgtgatgcacagcatcttcagcctgctgggcctgctgggcgagatcacctacatcgtgctgctggtgctgcacaccgtgtggaacggcaacggcatgttcgcccccaagagccagaacatggagagcaccagctgcggctag

SEQ ID NO: 338603 - DNA, 264 bp, Artificial Sequence
  derived and/or modified sequence
atggagcggaacacgatttacaccggatggctgcagtctaacctgatcctggaccctgtcgagaatcaagcactccatcctgtgattatggcattgatcttaatgccatctttacactgcttcgggaacattttgattcttctgtttttgaaatcacctgctcagctattctgccggatcggccgcttcgagaccggagaggagaaaaccagaagaagggagggatccgatgtgaccaccgaggccgcgatcggggtcatgtag

SEQ ID NO: 338604 - DNA, 68 bp, Artificial Sequence
  derived and/or modified sequence
aaaacaaacaacaacgacaaatcatgagaccagagttaagaaacaatgagaccaggctgggtgtggtg

SEQ ID NO: 338605 - DNA, 923 bp, Artificial Sequence
  derived and/or modified sequence
tgcaacagcacgggcggcgactgcttttaccgaggctacacgtcaggcgtggcggctgtccaggactggtaccacttccactatgtggatatcctggccctgctgcccgcggcatgggaggacagccacgggagccaggacggccacttcgtcctctcctgcagttacgatggcctggactgccaggcccgacagttccggaccttccaccaccccacctacggcagctgctacacggtcgatggcgtctggacagctcagcgccccggcatcacccacggtgggtgccagcccctggccggtgcgggggcaggggtgcaggtcaggtggcctcacaccagcccttggcctcccaggagtcggcctggtcctcagggttgagcagcagcctcacctccctctgctgtccacgctggccggcatcagggtcatggttcacggccgtaaccacacgcccttcctggggcaccacagcttcagcgtccggccagggacggaggccaccatcagcatccgagaggacgaggtgcaccggctcgggagcccctacggccactgcaccgccggcggggaaggcgtggaggtggagctgctacacaacacctcctacaccaggcaggcctgcctggtgtcctgcttccagcagctgatggtggagacctgctcctgtggctactacctccaccctctgccggcgggggctgagtactgcagctctgcccggcaccctgcctggggacactgcttctaccgcctctaccaggacctggagacccaccggctcccctgtacctcccgctgccccaggccctgcagggagtctgcattcaagctctccactgggacctccaggtggccttccgccaagtcagctggatggactctggccacgctaggtgaacaggggctgccgcatcagagcc

SEQ ID NO: 338606 - DNA, 582 bp, Artificial Sequence
  derived and/or modified sequence
atgacattgtgtccccaggcttggctccctgaaggaagcgaagaacagctccgctgtgcagaccatccctcatgtggagttctgtcagccggcccatgggggggcggacaggcgtcacacctccagaggtctcccgtcggatgtaccctgccctctatcccgattggcccagtgccatggtcagtatctgagccacggggagagtgtagccctcccggcgctcccgggccacctgctcgacatatggtgtggcctagcctctccccttacccctgccctgcccctaagggtcgaaaactgcagggaccactgcctcccaccgcccaacccttacaggctccgtggcaactcccactcctcgagcaaaaagtccccctcagccagccaagcgctgactgctggccggacgcaggcactggatggaatgaaggtggtgtgttcatctcgctgccgtcccccagtcacgctaccccagctcccactggcctgcaggtgcttctgatgaggtgggacttgatcgaggataagaaggagggtgaaatgacaccaactccgagttctccgtccttcgaaaaggtgtag

SEQ ID NO: 338607 - DNA, 492 bp, Artificial Sequence
  derived and/or modified sequence
atgcagagtgtggacagtatgctgggaaccgtcggcggctgtggaggcggggaagcagccagcaccttttcaaaagatccttctggctgttgcgttgggaatgattgccgggatggcggacggggacttgaacgacggcatggcagatggagtcgcggagaaggcggtgaaagcggcttatgcagtggcgggcagatggcatcggaaattgagtactgggatgggctggccataagtgtgatggaagtggagaaggcttttggttccacaaacgttttgtggaagacggaaccttttagtctgtgggcatgtactgctgcgtgtcctcctagcctgagccccactctactagccctgggactcccaagagatggcaaagagctggctgagcaggggtcactttggaccgtcctggagccagggggagattggagccattcccagagccagctggggactcccgggcgcggtaaaggcgccctgggattttag

SEQ ID NO: 338608 - DNA, 3365 bp, Artificial Sequence
  derived and/or modified sequence
ggaaccgagctgtggcctggggttccatggagcaggtggggcgcggaggaactgagctgtggcctggggttccgtggagcaggttgagtatggaggaactggggttccgtggagcaggtggggcgcagaggaaccgagctgtggaatggggttccgtggagcaggttgagtgtgccggtcgtggacgggtcgtgggcgggactccccagtgtgtcaccactgaggcatcttcgccctcttacgtgtctctgtttctctctctagaagtccaacacctccgagaggactcaaaacacagagtgaccagctcctatgtgcatttcctgggcgacagcgagactccatctcaataaataaaaaaaaaaaagagttgttatcagtagaagggaatgtctggttacagtatggcgttgtgcagatgaaggtcttatcgcagatgaagccaccaggtcacaagcctcagagagaatcaactataaatgcttctcatcagactcaaggcctgaggtgatgctgatgctgtgcctgaattccagcagggaggaggcatgagggcagtgctgtcacagaagacaacaccgctccctcgttacctgtggcccggccacctcagcggcccaaggaggctcacctggtcatggtgcagtgaccacaggacccccacatgccgggagctgggttcgccccaccccaccccctgcaccgggccagcgaggggatggcccagaagagggggaggaccatgtggattcaccagtgctggacatgtgctctgtggctaccccctctgcctactctctggcccgatacaggggtgtgggacaggcctgggtgactccagcatggctttcctctccaggacgtcaccggtggcagctgcttccttccagagccggcaggaggccagaggctccatcctgcttcagagctgccagctgcccccgcaatggctgagcaccgaagcatggacgggagaatggaagcagccacacgggggggctctcacctccagatcgcctgggcctgtggctccccagaggccctgccacctgaagggatggcagcacagacccactcagcacaacgctgcctgcaaacagggccaggctgcagcccagacgccccccagccggggccaccatcagcaccaccaccaccacccaaggaggggcaccaggaggggctggtggagctgcccgcctcgttccgggagctgctcaccttcttctgcaccaatgccaccatccacggcgccatccgcctggtctgctcccgcgggaaccgcctcaagacgacgtcctgggggctgctgtccctgggagccctggtcgcgctctgctggcagctggggctcctctttgagcgtcactggcaccgcccggtcctcatggccgtctctgtgcactcggagcgcaagctgctcccgctggtcaccctgtgtgacgggaacccacgtcggccgagtccggtcctccgccatctggagctgctggacgagtttgccagggagaacattgactccctgtacaacgtcaacctcagcaaaggcagagccgccctctccgccactgtcccccgccacgagccccccttccacctggaccgggagatccgtctgcagaggctgagccactcgggcagccgggtcagagtggggttcagactgtgcaacagcacgggcggcgactgcttttaccgaggctacacgtcaggcgtggcggctgtccaggactggtaccacttccactatgtggatatcctggccctgctgcccgcggcatgggaggacagccacgggagccaggacggccacttcgtcctctcctgcagttacgatggcctggactgccaggcccgacagttccggaccttccaccaccccacctacggcagctgctacacggtcgatggcgtctggacagctcagcgccccggcatcacccacggagtcggcctggtcctcagggttgagcagcagcctcacctccctctgctgtccacgctggccggcatcagggtcatggttcacggccgtaaccacacgcccttcctggggcaccacagcttcagcgtccggccagggacggaggccaccatcagcatccgagaggacgaggtgcaccggctcgggagcccctacggccactgcaccgccggcggggaaggcgtggaggtggagctgctacacaacacctcctacaccaggcaggcctgcctggtgtcctgcttccagcagctgatggtggagacctgctcctgtggctactacctccaccctctgccggcgggggctgagtactgcagctctgcccggcaccctgcctggggacactgcttctaccgcctctaccaggacctggagacccaccggctcccctgtacctcccgctgccccaggccctgcagggagtctgcattcaagctctccactgggacctccaggtggccttccgccaagtcagctggatggactctggccacgctaggtgaacaggggctgccgcatcagagccacagacagaggagcagcctggccaaaatcaacatcgtctaccaggagctcaactaccgctcagtggaggaggcgcccgtgtactcggtgccgcagctgctctcggccatgggcagcctctgcagcctgtggtttggggcctccgtcctctccctcctggagctcctggagctgctgctcgatgcttctgccctcaccctggtgctaggcggccgccggctccgcagggcgtggttctcctggcccagagccagccctgcctcaggggcgtccagcatcaagccagaggccagtcagatgcccccgcctgcaggcggcacgtcagatgacccggagcccagcgggcctcatctcccacgggtgatgcttccaggggttctggcgggagtctcagccgaagagagctgggctgggccccagccccttgagactctggacacctgaaccagacctgccagggctgtgcgatctcttggcctggtccttgcagctgtggcagcagcaggctccccagcggcccagggtgggccagaccagcagcccaggaagcagcacacgcggccgtggggaggcaggcaccgggcatgtcggcgcctctggtcaaaccacctacactgcctggggtgggtctcaaggaggcccggggcggaggggggttcccgcgtgcacacgagtgcggctggacgtgccgacacgcggtgatgtacccatgctccgtgtgtctgtgtctgcatgtccacacgtctgatgcacctgtgtacgtgtgtcaagcctagccacctcagctgcagggaggcagaaggcaaggcaggccccacggacacacttgggctgctctgaaataaagctgttg

SEQ ID NO: 338609 - DNA, 2679 bp, Artificial Sequence
  derived and/or modified sequence
gacatcagcaagccccctgccgcgagcttggagaggcaccccagccccatctggcactcaaggaaatcagctcagagaggttgagtaactcgggaaggccacacagccagtgacgaagctgtgattcacacaggcctgggtgactccagcatggctttcctctccaggacgtcaccggtggcagctgcttccttccagagccggcaggaggccagaggctccatcctgcttcagagctgccagctgcccccgcaatggctgagcaccgaagcatggacgggagaatggaagcagccacacgggggggctctcacctccagatcgcctgggcctgtggctccccagaggccctgccacctgaagggatggcagcacagacccactcagcacaacgctgcctgcaaacagggccaggctgcagcccagacgccccccaggccggggccaccatcagcaccaccaccaccacccaaggaggggcaccaggaggggctggtggagctgcccgcctcgttccgggagctgctcaccttcttctgcaccaatgccaccatccacggcgccatccgcctggtctgctcccgcgggaaccgcctcaagacgacgtcctgggggctgctgtccctgggagccctggtcgcgctctgctggcagctggggctcctctttgagcgtcactggcaccgcccggtcctcatggccgtctctgtgcactcggagcgcaagctgctcccgctggtcaccctgtgtgacgggaacccacgtcggccgagtccggtcctccgccatctggagctgctggacgagtttgccagggagaacattgactccctgtacaacgtcaacctcagcaaaggcagagccgccctctccgccactgtcccccgccacgagccccccttccacctggaccgggagatccgtctgcagaggctgagccactcgggcagccgggtcagagtggggttcagactgtgcaacagcacgggcggcgactgcttttaccgaggctacacgtcaggcgtggcggctgtccaggactggtaccacttccactatgtggatatcctggccctgctgcccgcggcatgggaggacagccacgggagccaggacggccacttcgtcctctcctgcagttacgatggcctggactgccaggcccgacagttccggaccttccaccaccccacctacggcagctgctacacggtcgatggcgtctggacagctcagcgccccggcatcacccacggagtcggcctggtcctcagggttgagcagcagcctcacctccctctgctgtccacgctggccggcatcagggtcatggttcacggccgtaaccacacgcccttcctggggcaccacagcttcagcgtccggccagggacggaggccaccatcagcatccgagaggacgaggtgcaccggctcgggagcccctacggccactgcaccgccggcggggaaggcgtggaggtggagctgctacacaacacctcctacaccaggcaggcctgcctggtgtcctgcttccagcagctgatggtggagacctgctcctgtggctactacctccaccctctgccggcgggggctgagtactgcagctctgcccggcaccctgcctggggacactgcttctaccgcctctaccaggacctggagacccaccggctcccctgtacctcccgctgccccaggccctgcagggagtctgcattcaagctctccactgggacctccaggtggccttccgccaagtcagctggatggactctggccacgctaggtgaacaggggctgccgcatcagagccacagacagaggagcagcctggccaaaatcaacatcgtctaccaggagctcaactaccgctcagtggaggaggcgcccgtgtactcggtgccgcagctgctctcggccatgggcagcctctgcagcctgtggtttggggcctccgtcctctccctcctggagctcctggagctgctgctcgatgcttctgccctcaccctggtgctaggcggccgccggctccgcagggcgtggttctcctggcccagagccagccctgcctcaggggcgtccagcatcaagccagaggccagtcagatgcccccgcctgcaggcggcacgtcagatgacccggagcccagcgggcctcatctcccacgggtgatgcttccaggggttctggcgggagtctcagccgaagagagctgggctgggccccagccccttgagactctggacacctgaaccagacctgccagggctgtgcgatctcttggcctggtccttgcagctgtggcagcagcaggctccccagcggcccagggtgggccagaccagcagcccaggaagcagcacacgcggccgtggggaggcaggcaccgggcatgtcggcgcctctggtcaaaccacctacactgcctggggtgggtctcaaggaggcccggggcggaggggggttcccgcgtgcacacgagtgcggctggacgtgccgacacgcggtgatgtacccatgctccgtgtgtctgtgtctgcatgtccacacgtctgatgcacctgtgtacgtgtgtcaagcctagccacctcagctgcagggaggcagaaggcaaggcaggccccacggacacacttgggctgctctgaaataaagctgttgactcc

SEQ ID NO: 338610 - protein, 669 aa, Artificial Sequence
  derived and/or modified sequence
MAEHRSMDGRMEAATRGGSHLQIAWACGSPEALPPEGMAAQTHSAQRCLQTGPGCSPDAPQPGPPSAPPPPPKEGHQEGLVELPASFRELLTFFCTNATIHGAIRLVCSRGNRLKTTSWGLLSLGALVALCWQLGLLFERHWHRPVLMAVSVHSERKLLPLVTLCDGNPRRPSPVLRHLELLDEFARENIDSLYNVNLSKGRAALSATVPRHEPPFHLDREIRLQRLSHSGSRVRVGFRLCNSTGGDCFYRGYTSGVAAVQDWYHFHYVDILALLPAAWEDSHGSQDGHFVLSCSYDGLDCQARQFRTFHHPTYGSCYTVDGVWTAQRPGITHGVGLVLRVEQQPHLPLLSTLAGIRVMVHGRNHTPFLGHHSFSVRPGTEATISIREDEVHRLGSPYGHCTAGGEGVEVELLHNTSYTRQACLVSCFQQLMVETCSCGYYLHPLPAGAEYCSSARHPAWGHCFYRLYQDLETHRLPCTSRCPRPCRESAFKLSTGTSRWPSAKSAGWTLATLGEQGLPHQSHRQRSSLAKINIVYQELNYRSVEEAPVYSVPQLLSAMGSLCSLWFGASVLSLLELLELLLDASALTLVLGGRRLRRAWFSWPRASPASGASSIKPEASQMPPPAGGTSDDPEPSGPHLPRVMLPGVLAGVSAEESWAGPQPLETLDT

SEQ ID NO: 338611 - protein, 704 aa, Artificial Sequence
  derived and/or modified sequence
MAFLSRTSPVAAASFQSRQEARGSILLQSCQLPPQWLSTEAWTGEWKQPHGGALTSRSPGPVAPQRPCHLKGWQHRPTQHNAACKQGQAAAQTPPRPGPPSAPPPPPKEGHQEGLVELPASFRELLTFFCTNATIHGAIRLVCSRGNRLKTTSWGLLSLGALVALCWQLGLLFERHWHRPVLMAVSVHSERKLLPLVTLCDGNPRRPSPVLRHLELLDEFARENIDSLYNVNLSKGRAALSATVPRHEPPFHLDREIRLQRLSHSGSRVRVGFRLCNSTGGDCFYRGYTSGVAAVQDWYHFHYVDILALLPAAWEDSHGSQDGHFVLSCSYDGLDCQARQFRTFHHPTYGSCYTVDGVWTAQRPGITHGVGLVLRVEQQPHLPLLSTLAGIRVMVHGRNHTPFLGHHSFSVRPGTEATISIREDEVHRLGSPYGHCTAGGEGVEVELLHNTSYTRQACLVSCFQQLMVETCSCGYYLHPLPAGAEYCSSARHPAWGHCFYRLYQDLETHRLPCTSRCPRPCRESAFKLSTGTSRWPSAKSAGWTLATLGEQGLPHQSHRQRSSLAKINIVYQELNYRSVEEAPVYSVPQLLSAMGSLCSLWFGASVLSLLELLELLLDASALTLVLGGRRLRRAWFSWPRASPASGASSIKPEASQMPPPAGGTSDDPEPSGPHLPRVMLPGVLAGVSAEESWAGPQPLETLDT

SEQ ID NO: 338612 - DNA, 2115 bp, Artificial Sequence
  derived and/or modified sequence
atggccttcctgtctcgcacaagtcctgtagcagccgcttcctttcagtccaggcaggaggccagaggatcaatccttctgcagagttgccagctccctcctcaatggctcagcaccgaggcgtggacgggcgaatggaagcagccacacggaggcgccctgacaagcaggagcccaggccctgtcgcacctcaacgtccttgccatttaaagggatggcagcacagacccacgcaacacaacgccgcttgcaagcaaggccaggccgctgcccaaacaccccctagaccgggcccacctagtgccccgccgccaccccctaaggaaggccatcaggaaggcctggtggagttgcctgccagttttcgagagcttctcactttcttctgtacgaatgccaccatccacggcgcaatacgcctggtatgttcacgaggcaacagacttaaaaccacatcatgggggcttctctctctgggcgcgctcgtggccctttgctggcagctgggactgctctttgaaaggcactggcaccggcccgtacttatggctgtttctgtacactctgaaaggaagttactgcccctggtgaccctgtgcgatggaaatcctcgacggcccagtccggtgcttcggcacttagaactgttggacgaattcgcccgcgagaacattgacagcctctacaatgttaatctgtctaaaggaagggccgcactaagcgctacagtgcccagacatgaaccacccttccaccttgaccgggagattcgacttcagcgcctatctcattccggttcgagagtgagagtgggcttccggctgtgtaacagtacgggcggcgattgcttttatcgcggatacacctcgggggtggctgcagtgcaggactggtatcacttccattatgtggatatcttggctctgttgcctgcagcttgggaggactctcacggaagccaggatgggcactttgtcctgtcttgtagctacgacggcctagattgccaggccagacagttccggacgttccatcaccctacgtatggatcctgttatacagtggatggggtctggactgcgcaacggcctggcattactcatggggtgggattagtgcttcgggtggagcagcagccacacctgccactgctgagtacattagcaggcatccgcgtgatggttcacggtcgtaaccacaccccttttcttgggcaccattccttctccgtgcggcctggcaccgaggctaccattagcattagggaggatgaggttcatcggttaggaagtccctatggacattgcacggctggcggcgaaggcgtggaagtggaactgctgcacaatacttcctacactagacaggcttgtctcgtatcatgtttccagcaactcatggtcgaaacatgcagttgcggttattatctccatcctctcccagctggtgccgagtattgtagcagtgctaggcatcctgcatggggccactgtttctatcgactctatcaggatctggagacgcatagattaccctgtacgagccggtgccctcgcccatgcagggagtccgcttttaaactaagcactgggaccagccgctggccaagcgctaagagcgcaggctggactctcgctactttgggtgaacaggggcttccccatcaatcccacaggcagagaagctctcttgctaaaattaacatcgtgtaccaagaactgaattaccgctccgttgaagaagccccagtttactcggttcctcagctgctgtctgcaatgggttcattatgtagcttatggttcggcgcgtctgtactttcgctcttggaactccttgagttgttattagatgcatcggctttaactctggtactgggcgggagaaggctgcgccgcgcgtggttctcgtggccacgagcaagccccgcctctggggcgtcctcgattaagcctgaagcatcccagatgcctccacccgcaggcggcacctccgacgatcccgagcccagcgggcctcacctccctcgggtcatgctgccaggtgtgttagccggcgtgagcgccgaagagagctgggccggtcctcagccgctcgaaaccctggacacctag

SEQ ID NO: 338613 - DNA, 2115 bp, Artificial Sequence
  derived and/or modified sequence
atggccttcctgagcaggaccagccctgtggccgccgccagcttccagagccggcaggaggcccggggcagcatcctgctgcagagctgccagctgcccccccagtggctgagcacagaggcctggacaggagagtggaagcagccccacggcggggccctgaccagccgcagccctggccctgtggccccccagaggccctgccacctgaagggctggcagcaccggcccacccagcacaatgctgcctgcaagcagggccaggccgccgcccagaccccacccaggcctggccccccatctgcccctcctcctccacccaaggagggccaccaggagggcctggtggagctgcctgccagcttccgggagctgctgaccttcttctgcaccaatgccaccatccacggggccatccggctggtgtgcagccggggcaaccggctgaagaccacctcctggggcctgctgagcctgggcgccctggtggccctgtgctggcagctgggcctgctgtttgagcggcactggcacaggcctgtgctgatggctgtgtctgtgcacagcgagaggaagctgctgcccctggtgaccctgtgtgatggcaacccccggcggcccagccctgtgctgcggcacctggagctgctggatgaatttgccagagaaaatattgacagcctgtacaacgtgaacctgagcaagggccgggccgccctgagcgccaccgtgcccaggcatgagccccccttccacctggaccgggagatccggctgcagaggctgagccacagcggcagccgggtgcgggtgggcttccggctgtgcaacagcactggaggagactgcttctaccggggctacaccagcggcgtggccgctgtgcaggactggtaccacttccactacgtggacatcctggccctgctgcctgctgcctgggaggacagccacggcagccaggacggccactttgtgctgagctgcagctatgatggcctggactgccaggcccggcagttccgcaccttccaccaccccacctacggcagctgctacacagtggatggagtgtggacagcccagaggcctggcatcacccacggcgtgggcctggtgctgcgggtggagcagcagccccacctgcccctgctgagcaccctggccggcatccgggtgatggtgcacggcaggaaccacacccccttcctgggccaccacagcttctctgtgcggcctggaacagaggccaccatcagcatcagagaagatgaggtgcaccggctgggcagcccctacggccactgcacagctggaggagagggcgtggaggtggagctgctgcacaacaccagctacacccggcaggcctgcctggtgtcctgcttccagcagctgatggtggagacctgcagctgtggctactacctgcaccccctgcctgctggagctgagtactgcagcagcgcccggcacccagcctggggccactgcttctaccgcctgtaccaggacctggagacccaccggctgccctgcaccagccgctgcccccggccctgccgggagagcgccttcaagctgagcacaggcaccagccgctggcccagcgccaagtctgctggctggaccctggccaccctgggggagcagggcctgccccaccagagccaccggcagaggagcagcctggccaagatcaacatcgtgtaccaggagctgaactacagatctgtggaggaggcccctgtgtacagcgtgccccagctgctgagcgccatgggcagcctgtgcagcctgtggtttggagcctctgtgctgagcctgctggagctgctggagctgctgctggatgccagcgccctgaccctggtgctgggcggccgccgcctgcggcgggcctggttctcctggccccgggccagccctgccagcggggccagcagcatcaagccagaggccagccagatgcctcctcctgctgggggcaccagtgatgatcctgagcccagcggcccccacctgccccgggtgatgctgcccggggtgctggccggcgtgtctgctgaggagagctgggccggcccccagcccctggagaccctggacacctag

SEQ ID NO: 338614 - DNA, 2115 bp, Artificial Sequence
  derived and/or modified sequence
atggccttcctgagccggaccagccccgtggccgccgccagcttccagagccgccaggaagccagaggcagtatcctgctacagtcctgtcagctcccaccccagtggttgagcacggaggcctggacgggagagtggaagcaaccccacgggggagctctcacctcaaggagccccggaccggtcgcaccccagcgcccctgtcatttaaaggggtggcagcatagacccacacagcacaatgccgcctgcaaacaaggacaagctgctgcccagactcctccgaggccagggccgcccagcgccccacctccgccaccaaaagaaggacatcaggaaggtttagtcgaactgcccgcctctttccgagagcttctgacttttttctgtacaaatgctaccatacacggtgctatccggctcgtttgtagccgtggcaatcgacttaagactacatcctggggactactctccctgggagccctggtggctctatgttggcagcttggccttttgttcgagagacactggcacaggcctgtactgatggcggtgtctgtccacagcgaaagaaagttgctccccctggtgactttgtgtgacggaaatcccagacgccctagtcccgtgttgaggcaccttgaactgcttgatgaatttgcccgcgaaaacatagactccctctacaatgtgaatttgtccaaggggagagctgcattgagcgccactgttcccagacatgagcctccctttcacctggaccgagagatcaggctacaaaggctgagccattctggcagccgcgtccgggtgggtttccgcctctgcaatagcaccggcggcgattgcttttaccggggttatactagcggcgtggccgccgttcaagactggtatcatttccattacgtcgacattcttgccctcctgcccgcagcatgggaagattctcatggcagccaagacggccactttgttctgtcgtgcagctatgatggcctggattgtcaagctcgacagttcaggacatttcatcatcctacctacggttcttgctacaccgtagatggagtgtggactgcccagagaccagggataacacacggcgtagggcttgtcttacgtgtggaacagcagcctcacctgcccctgttgtctaccttggctggcattcgtgtgatggttcatggtcggaatcatacaccgttcctggggcaccactctttttccgttcggcccggcacagaagccacgattagtatcagagaggatgaggtgcacagactgggttcgccctatgggcactgtaccgccgggggcgagggagtggaggtcgaactgctgcacaacacatcatacacccggcaggcgtgcttggtgtcctgcttccagcagctcatggtcgagacctgcagctgcgggtactacctccatccactgcccgccggtgccgaatactgctctagcgctagacaccctgcatggggacattgtttctataggttgtaccaggatttggagacccatcgactgccttgtacctcacgctgtcccagaccatgccgtgagtccgcatttaagctgagtaccgggacctccaggtggcccagcgccaaatcagcgggctggactctcgccaccctgggcgaacagggtttgcctcaccagtcacatcgacagcggagctccctggcaaaaatcaacattgtgtaccaggagcttaactaccggtcagtggaggaggctccggtgtatagcgtcccccaacttctatcggcaatgggctccctctgctcactgtggtttggtgcctctgttctctccctgctggagctgctcgagctcctgttggatgcatccgccctgacactggttctaggtggcagaagattgaggcgggcttggttctcatggccacgagccagccccgcgtccggtgcaagctctatcaaacccgaggcaagccagatgccacctcctgccgggggaactagcgacgaccccgaaccaagcggcccacacctccccagggtgatgctgccaggggttctggcaggtgtcagtgcggaagagagttgggctgggcctcagccattggagacactggatacttag

SEQ ID NO: 338615 - DNA, 2115 bp, Artificial Sequence
  derived and/or modified sequence
atggcttttctctctcggacatccccggtggctgccgctagctttcagtcgagacaggaagctcgtgggtcaatcctgctgcagagctgtcagcttccgccacagtggctgagtactgaggcctggaccggggagtggaaacaaccacatggtggggctctcacaagtagatcacctggaccagtggcacctcagaggccgtgtcatctgaaggggtggcagcatagaccaacacagcataacgctgcatgcaagcagggccaagctgccgcacagaccccacccaggcccggtcctccaagcgcaccccctccaccacccaaggaagggcaccaggaaggattggtggaattgccagcaagcttccgggagcttctgacatttttttgcacaaacgctactattcacggcgctattagactagtgtgcagccgtgggaataggttgaagaccacgtcttggggcttactgagcttgggcgcattggtggctttgtgctggcaacttggactgcttttcgagaggcattggcacagaccggttctcatggcagtatctgttcacagcgagaggaaacttctgcccctggttactctttgtgacggcaacccacgcagaccaagtccggtgttgcggcatctggaattattggacgaattcgcccgagaaaatattgacagtctgtataatgtgaaccttagcaaaggtcgtgcggcactgtccgccacagtgccgagacacgaaccaccttttcacctggacagggaaattcgtctccagcggctgtctcacagcggatctcgcgtccgtgtgggattccggttgtgcaattctacaggcggagattgcttctacagaggatacacttccggcgtggccgctgtccaggattggtatcatttccactacgttgacattctggccctcctgcccgctgcttgggaggattctcacgggagtcaagatggccacttcgttctgagctgctcttatgatggcctcgactgccaggccaggcagttccgtacctttcatcatcctacctacggctcttgttacaccgtcgatggggtttggactgcccaacgacctggcatcacgcacggggtgggcttagtcttgagggttgagcaacaaccacacctgccactgctgtcaactctcgcaggtattcgggtgatggtgcatgggcgtaaccatacaccattcttaggtcaccactctttctccgtgcggccaggcacggaagccaccatctcaattcgggaagacgaagttcaccggctaggctccccatatgggcattgcaccgccggtggagagggtgttgaggtcgagctgttgcacaacacatcctatactcggcaagcctgcctggtctcatgttttcagcagctcatggtagaaacctgttcttgtggatactatctgcatcctttacccgctggggcagagtattgtagttctgcacggcaccccgcttggggacactgtttctacagactctaccaggatctagaaacacaccgcttgccctgcaccagtcggtgccccaggccctgccgcgagtccgccttcaagctcagcaccggcacttccaggtggccttcagccaaatcggctggatggacgcttgcgaccctgggcgaacaaggtttaccgcaccaatcccaccgacaacgcagtagtctggccaagatcaatatcgtttaccaggaactgaattatcggagcgtagaggaggctccagtatacagtgtcccccagttgttatctgcaatgggctccctctgttccttgtggttcggtgctagtgtcttgagcttactggagctgttggagctcctgctcgacgccagcgctctgaccctcgttctcggaggacgacggttgcggagagcctggttctcatggcctagggcaagtccagcatccggcgcttctagcataaagcccgaagcaagccaaatgcctcccccagcaggcggaactagcgacgatcccgagccatctggacctcacctgcctagagtcatgttacctggggtcttagccggtgtatccgccgaggaatcttgggctggtccccagcccttagaaacccttgacacatag

SEQ ID NO: 338616 - DNA, 2115 bp, Artificial Sequence
  derived and/or modified sequence
atggccttcctgagcagaaccagccccgtggccgccgccagcttccagagcagacaggaggccagaggcagcatcctgctgcagagctgccagctgcccccccagtggctgagcaccgaggcctggaccggcgagtggaagcagccccacggcggcgccctgaccagcagaagccccggccccgtggccccccagagaccctgccacctgaagggctggcagcacagacccacccagcacaacgccgcctgcaagcagggccaggccgccgcccagaccccccccagacccggcccccccagcgcccccccccccccccccaaggagggccaccaggagggcctggtggagctgcccgccagcttcagagagctgctgaccttcttctgcaccaacgccaccatccacggcgccatcagactggtgtgcagcagaggcaacagactgaagaccaccagctggggcctgctgagcctgggcgccctggtggccctgtgctggcagctgggcctgctgttcgagagacactggcacagacccgtgctgatggccgtgagcgtgcacagcgagagaaagctgctgcccctggtgaccctgtgcgacggcaaccccagaagacccagccccgtgctgagacacctggagctgctggacgagttcgccagagagaacatcgacagcctgtacaacgtgaacctgagcaagggcagagccgccctgagcgccaccgtgcccagacacgagccccccttccacctggacagagagatcagactgcagagactgagccacagcggcagcagagtgagagtgggcttcagactgtgcaacagcaccggcggcgactgcttctacagaggctacaccagcggcgtggccgccgtgcaggactggtaccacttccactacgtggacatcctggccctgctgcccgccgcctgggaggacagccacggcagccaggacggccacttcgtgctgagctgcagctacgacggcctggactgccaggccagacagttcagaaccttccaccaccccacctacggcagctgctacaccgtggacggcgtgtggaccgcccagagacccggcatcacccacggcgtgggcctggtgctgagagtggagcagcagccccacctgcccctgctgagcaccctggccggcatcagagtgatggtgcacggcagaaaccacacccccttcctgggccaccacagcttcagcgtgagacccggcaccgaggccaccatcagcatcagagaggacgaggtgcacagactgggcagcccctacggccactgcaccgccggcggcgagggcgtggaggtggagctgctgcacaacaccagctacaccagacaggcctgcctggtgagctgcttccagcagctgatggtggagacctgcagctgcggctactacctgcaccccctgcccgccggcgccgagtactgcagcagcgccagacaccccgcctggggccactgcttctacagactgtaccaggacctggagacccacagactgccctgcaccagcagatgccccagaccctgcagagagagcgccttcaagctgagcaccggcaccagcagatggcccagcgccaagagcgccggctggaccctggccaccctgggcgagcagggcctgccccaccagagccacagacagagaagcagcctggccaagatcaacatcgtgtaccaggagctgaactacagaagcgtggaggaggcccccgtgtacagcgtgccccagctgctgagcgccatgggcagcctgtgcagcctgtggttcggcgccagcgtgctgagcctgctggagctgctggagctgctgctggacgccagcgccctgaccctggtgctgggcggcagaagactgagaagagcctggttcagctggcccagagccagccccgccagcggcgccagcagcatcaagcccgaggccagccagatgcccccccccgccggcggcaccagcgacgaccccgagcccagcggcccccacctgcccagagtgatgctgcccggcgtgctggccggcgtgagcgccgaggagagctgggccggcccccagcccctggagaccctggacacctag

SEQ ID NO: 338617 - DNA, 2503 bp, Artificial Sequence
  derived and/or modified sequence
actcgggaaggccacacagccagtgacgaagctgtgattcacacaggcctgggtgactccagcatggctttcctctccaggacgtcaccggtggcagctgcttccttccagagccggcaggaggccagaggctccatcctgcttcagagctgccagctgcccccgcaatggctgagcaccgaagcatggacgggagaatggaagcagccacacgggggggctctcacctccaggctgcagcccagacgccccccaggccggggccaccatcagcaccaccaccaccacccaaggaggggcaccaggaggggctggtggagctgcccgcctcgttccgggagctgctcaccttcttctgcaccaatgccaccatccacggcgccatccgcctggtctgctcccgcgggaaccgcctcaagacgacgtcctgggggctgctgtccctgggagccctggtcgcgctctgctggcagctggggctcctctttgagcgtcactggcaccgcccggtcctcatggccgtctctgtgcactcggagcgcaagctgctcccgctggtcaccctgtgtgacgggaacccacgtcggccgagtccggtcctccgccatctggagctgctggacgagtttgccagggagaacattgactccctgtacaacgtcaacctcagcaaaggcagagccgccctctccgccactgtcccccgccacgagccccccttccacctggaccgggagatccgtctgcagaggctgagccactcgggcagccgggtcagagtggggttcagactgtgcaacagcacgggcggcgactgcttttaccgaggctacacgtcaggcgtggcggctgtccaggactggtaccacttccactatgtggatatcctggccctgctgcccgcggcatgggaggacagccacgggagccaggacggccacttcgtcctctcctgcagttacgatggcctggactgccaggcccgacagttccggaccttccaccaccccacctacggcagctgctacacggtcgatggcgtctggacagctcagcgccccggcatcacccacggagtcggcctggtcctcagggttgagcagcagcctcacctccctctgctgtccacgctggccggcatcagggtcatggttcacggccgtaaccacacgcccttcctggggcaccacagcttcagcgtccggccagggacggaggccaccatcagcatccgagaggacgaggtgcaccggctcgggagcccctacggccactgcaccgccggcggggaaggcgtggaggtggagctgctacacaacacctcctacaccaggcaggcctgcctggtgtcctgcttccagcagctgatggtggagacctgctcctgtggctactacctccaccctctgccggcgggggctgagtactgcagctctgcccggcaccctgcctggggacactgcttctaccgcctctaccaggacctggagacccaccggctcccctgtacctcccgctgccccaggccctgcagggagtctgcattcaagctctccactgggacctccaggtggccttccgccaagtcagctggatggactctggccacgctaggtgaacaggggctgccgcatcagagccacagacagaggagcagcctggccaaaatcaacatcgtctaccaggagctcaactaccgctcagtggaggaggcgcccgtgtactcggtgccgcagctgctctcggccatgggcagcctctgcagcctgtggtttggggcctccgtcctctccctcctggagctcctggagctgctgctcgatgcttctgccctcaccctggtgctaggcggccgccggctccgcagggcgtggttctcctggcccagagccagccctgcctcaggggcgtccagcatcaagccagaggccagtcagatgcccccgcctgcaggcggcacgtcagatgacccggagcccagcgggcctcatctcccacgggtgatgcttccaggggttctggcgggagtctcagccgaagagagctgggctgggccccagccccttgagactctggacacctgaaccagacctgccagggctgtgcgatctcttggcctggtccttgcagctgtggcagcagcaggctccccagcggcccagggtgggccagaccagcagcccaggaagcagcacacgcggccgtggggaggcaggcaccgggcatgtcggcgcctctggtcaaaccacctacactgcctggggtgggtctcaaggaggcccggggcggaggggggttcccgcgtgcacacgagtgcggctggacgtgccgacacgcggtgatgtacccatgctccgtgtgtctgtgtctgcatgtccacacgtctgatgcacctgtgtacgtgtgtcaagcctagccacctcagctgcagggaggcagaaggcaaggcaggccccacggacacacttgggctgctctgaaataaagctgttgactccacctg

SEQ ID NO: 338618 - protein, 638 aa, Artificial Sequence
  derived and/or modified sequence
MAEHRSMDGRMEAATRGGSHLQAAAQTPPRPGPPSAPPPPPKEGHQEGLVELPASFRELLTFFCTNATIHGAIRLVCSRGNRLKTTSWGLLSLGALVALCWQLGLLFERHWHRPVLMAVSVHSERKLLPLVTLCDGNPRRPSPVLRHLELLDEFARENIDSLYNVNLSKGRAALSATVPRHEPPFHLDREIRLQRLSHSGSRVRVGFRLCNSTGGDCFYRGYTSGVAAVQDWYHFHYVDILALLPAAWEDSHGSQDGHFVLSCSYDGLDCQARQFRTFHHPTYGSCYTVDGVWTAQRPGITHGVGLVLRVEQQPHLPLLSTLAGIRVMVHGRNHTPFLGHHSFSVRPGTEATISIREDEVHRLGSPYGHCTAGGEGVEVELLHNTSYTRQACLVSCFQQLMVETCSCGYYLHPLPAGAEYCSSARHPAWGHCFYRLYQDLETHRLPCTSRCPRPCRESAFKLSTGTSRWPSAKSAGWTLATLGEQGLPHQSHRQRSSLAKINIVYQELNYRSVEEAPVYSVPQLLSAMGSLCSLWFGASVLSLLELLELLLDASALTLVLGGRRLRRAWFSWPRASPASGASSIKPEASQMPPPAGGTSDDPEPSGPHLPRVMLPGVLAGVSAEESWAGPQPLETLDT

SEQ ID NO: 338619 - protein, 308 aa, Artificial Sequence
  derived and/or modified sequence
  misc_feature (1)..(1): Xaa can be any naturally occurring amino acid
XATARAATAFTEATRQAWRLSRTGTTSTMWISWPCCPRHGRTATGARTATSSSPAVTMAWTARPDSSGPSTTPPTAAATRSMASGQLSAPASPTVGASPWPVRGQGCRSGGLTPALGLPGVGLVLRVEQQPHLPLLSTLAGIRVMVHGRNHTPFLGHHSFSVRPGTEATISIREDEVHRLGSPYGHCTAGGEGVEVELLHNTSYTRQACLVSCFQQLMVETCSCGYYLHPLPAGAEYCSSARHPAWGHCFYRLYQDLETHRLPCTSRCPRPCRESAFKLSTGTSRWPSAKSAGWTLATLGEQGLPHQS

SEQ ID NO: 338620 - DNA, 132 bp, Artificial Sequence
  derived and/or modified sequence
taccggggcatgatgatctacgtgagcaccggcgcctggggctgggccggctcttgcttctggcagtggagcttctgcccgcctgcttgtgtaggctgtattgaggagaggttgcctgtccctagcagctag

SEQ ID NO: 338621 - DNA, 132 bp, Artificial Sequence
  derived and/or modified sequence
tacagaggcatgatgatctacgtgagcaccggcgcctggggctgggccggcagctgcttctggcagtggagcttctgcccccccgcctgcgtgggctgcatcgaggagagactgcccgtgcccagcagctag

SEQ ID NO: 338622 - DNA, 927 bp, Artificial Sequence
  derived and/or modified sequence
tgagctactgcaagggctgcaacagcatttacagaggccacaagacaagcgtggaggctgagcaggaccgggacgacatctacaatgtggatcagttggccctgttgcccacgccatggcaggacagcgacaggtgctcggacagcgacatcctcctcgccagccgtgactatggcctggacagctagaccagacagctcaggaccttccactacaccccccaccgccgccgcaacacgcagcatggcctcagggcagctttccgccccggcgagtcccaccgtgggagcaagcccttggcccgtgcgaggccagggctgcagatcaggaggactgacccccgccctgggcctccctggcgtgggcctagtgctgagggtagaacagcagcctcatttgcctcttctctcaacccttgccggcattagagtgatggttcatggtaggaatcatacacctttcctcggtcatcactccttttctgtgaggcctggtacagaggccactatctcaattagagaagacgaggtgcatcgcctgggatccccatacggccactgcacagcaggaggggagggcgtggaggtcgaactcctacacaatacatcttataccaggcaggcctgtctcgtgtcctgctttcagcagctgatggtagagacttgcagctgtgggtattatcttcatcctcttccggctggagccgaatactgcagttccgctcgccacccagcgtgggggcactgtttttaccgtctctaccaggacctcgagacccaccgtcttccctgtacttcacgttgcccacggccatgcagggaatccgcattcaaactttcaacaggcactagtcgctggccaagcgccaaatccgccggatggacactggctactctcggcgagcaaggcctgccccatcagtcttag

SEQ ID NO: 338623 - DNA, 927 bp, Artificial Sequence
  derived and/or modified sequence
tgagccacagcccgggccgccacagccttcacagaggccacccggcaggcctggaggctgagcaggacaggcaccaccagcaccatgtggatctcctggccctgctgccccaggcatggccgcacagccaccggggccaggacagccaccagcagcagccctgctgtgaccatggcctggacagcccggccagacagcagcggccccagcaccaccccacccacagctgctgccaccaggtccatggccagcggccagctgagcgccccagccagccccaccgtgggcgccagcccctggcctgtgcggggccagggctgccgcagcggcggcctgaccccagccctgggcctgcccggggtgggcctggtgctgcgggtggagcagcagccccacctgcccctgctgagcaccctggccggcatccgggtgatggtgcatggaagaaaccacacccccttcctgggccaccacagcttctctgtgcggcccggcacagaggccaccatcagcatccgggaggatgaggtgcaccggctgggcagcccctacggccactgcacagctggaggagaaggagtggaggtggagctgctgcacaacaccagctacacccggcaggcctgcctggtgtcctgcttccagcagctgatggtggagacctgcagctgtggctactacctgcaccccctgcctgctggagctgagtactgcagcagcgcccggcacccagcctggggccactgcttctaccgcctgtaccaggacctggagacccaccggctgccctgcaccagccgctgcccccggccctgccgggagagcgccttcaagctgagcacaggcaccagccgctggcccagcgccaagtctgctggctggaccctggccaccctgggggagcagggcctgccccaccagagctag

SEQ ID NO: 338624 - DNA, 927 bp, Artificial Sequence
  derived and/or modified sequence
tgagccaccgcccgggccgccaccgccttcaccgaggccacccggcaggcatggaggctctcacgtaccggtacaacgagtacgatgtggatctcctggccatgctgtcctcgacacgggcgaaccgccaccggcgcgcgcaccgctacctccagcagccctgctgtcactatggcatggaccgctcggcctgattcgtcaggtcccagtactacgcctcctaccgcggccgccacgaggtctatggcatctggtcagctctccgcacccgcgtcgccaactgtgggggcgtctccttggccggtgaggggacagggttgcaggagtgggggactgacccccgctctgggacttccaggagtgggtctcgtcctgcgtgtggaacagcaaccgcacctccctcttctttctacactggcaggcatacgagtgatggtacacggaagaaaccacaccccgttcctcggccaccattcattctctgtccggcccgggacagaagctaccatctccatacgtgaggacgaagtgcacaggttgggcagtccatacggccactgcacagccgggggcgagggagtggaggtagagctcttgcataacacttcctacactagacaggcctgtcttgtcagttgtttccagcagctgatggtggaaacttgttcctgcggatattacctccaccccctgccagccggcgccgagtattgctcaagtgcccgccatcccgcgtggggccattgcttttacagactgtaccaggacctggagacacatcggcttccctgcacgtcaagatgccctcgcccttgcagggagtctgccttcaagctcagcactggaacctcaagatggccctccgccaaatctgccggttggacgctcgccactctgggagagcagggcttgccgcaccagtcatag

SEQ ID NO: 338625 - DNA, 927 bp, Artificial Sequence
  derived and/or modified sequence
taagccacagccagagccgcaactgctttcacagaggccacccggcaagcgtggaggctgtctaggactgggaccacctctactatgtggatttcatggccatgctgcccaagacatggcaggactgcgacaggtgcaaggaccgctacctcctccagcccagctgtgaccatggcttggacggccagaccagattccagcggcccttctacaacccccccaaccgctgccgcaacgcgcagcatggcaagtggtcagctgtctgcccctgcctccccaaccgttggcgcttccccatggccagtgaggggacagggctgtaggtccgggggacttacccctgctctcggacttccaggcgtgggactcgtgttgagggtcgaacagcagcctcacctgcctttactcagtactctagccggaattagagttatggtgcatggacgcaatcatacacccttcctcggacaccactccttttctgtcagacctgggaccgaagcaaccatctccataagggaggatgaagttcacaggctgggaagtccgtacggtcattgtaccgcaggaggagagggtgttgaggtcgagctgttgcacaacacatcgtacaccagacaggcatgtctcgtgtcatgtttccagcaactaatggtcgaaacttgctcctgtggatactatctgcatcccctgcccgctggagctgagtattgttcatcggctcgacaccctgcctgggggcactgtttctataggctttatcaagatctggagacccatagattgccttgcacatcaaggtgccctcgaccctgtcgggagtccgcgtttaagttgtcgaccggtacctcccggtggccctccgcaaagagtgctggctggactctggccacactaggcgagcaaggtctgccacaccagtcctag

SEQ ID NO: 338626 - DNA, 927 bp, Artificial Sequence
  derived and/or modified sequence
tgagccaccgccagagccgccaccgccttcaccgaggccaccagacaggcctggagactgagcagaaccggcaccaccagcaccatgtggatcagctggccctgctgccccagacacggcagaaccgccaccggcgccagaaccgccaccagcagcagccccgccgtgaccatggcctggaccgccagacccgacagcagcggccccagcaccaccccccccaccgccgccgccaccagaagcatggccagcggccagctgagcgcccccgccagccccaccgtgggcgccagcccctggcccgtgagaggccagggctgcagaagcggcggcctgacccccgccctgggcctgcccggcgtgggcctggtgctgagagtggagcagcagccccacctgcccctgctgagcaccctggccggcatcagagtgatggtgcacggcagaaaccacacccccttcctgggccaccacagcttcagcgtgagacccggcaccgaggccaccatcagcatcagagaggacgaggtgcacagactgggcagcccctacggccactgcaccgccggcggcgagggcgtggaggtggagctgctgcacaacaccagctacaccagacaggcctgcctggtgagctgcttccagcagctgatggtggagacctgcagctgcggctactacctgcaccccctgcccgccggcgccgagtactgcagcagcgccagacaccccgcctggggccactgcttctacagactgtaccaggacctggagacccacagactgccctgcaccagcagatgccccagaccctgcagagagagcgccttcaagctgagcaccggcaccagcagatggcccagcgccaagagcgccggctggaccctggccaccctgggcgagcagggcctgccccaccagagctag

SEQ ID NO: 338627 - DNA, 1917 bp, Artificial Sequence
  derived and/or modified sequence
atggctgagcaccgctctatggacggacgaatggaggcagccacacggggagggagtcacctgcaggccgctgctcagactcccccccggcctggccccccatcagcaccacccccacctcccaaagagggccaccaagaaggccttgtggagctgcccgcatcctttagggagttgctgacttttttttgcactaatgcaaccattcatggagcgattcggttagtatgtagtcggggaaatcgcttgaaaacgacctcctggggcctgttgagcctaggggccctcgtggccctgtgctggcagctaggcctactcttcgagaggcattggcatagacctgtcttaatggcagtgtcagttcactcagaacgtaaacttcttccccttgtgacactttgtgacggaaacccccgacgccctagtccggtcctgagacacctggaattgctcgacgagttcgctagggaaaatattgacagtctctacaacgttaatctcagtaaagggcgggccgctttatccgcaaccgtgccccgtcacgagccaccctttcacctggaccgagaaattcggctgcagagattgtcccatagcggcagtagggtaagagtgggcttccgactgtgtaattctactggcggcgattgcttttatagggggtacacatcaggagtagcagccgttcaggattggtatcactttcactacgttgacatactggccctactgcccgccgcctgggaggattcgcatggcagccaagatggtcacttcgttctatcttgctcttacgatgggctagactgccaggctcggcagtttcggacgtttcaccatcctacatacggtagctgttacactgttgacggcgtgtggaccgcccaaaggcccggaattacacacggcgtgggcctggtattgagagtggaacagcaacctcaccttccactgctgagcactctggctggtatccgagtaatggtgcacgggagaaaccatactcctttccttggacaccatagtttcagtgtgagaccgggaacagaagccaccataagcatccgggaggatgaggtccacagactagggtccccatacggccactgcaccgcaggaggcgagggagttgaggtggaactactgcacaatacttcatacacacgccaggcttgcctggtctcttgctttcagcagcttatggtggaaacatgttcctgcgggtattatctgcatcctctgcctgctggcgccgagtattgtagcagtgctagacacccagcatggggccactgcttttatcgtttatatcaagatcttgaaacacaccgactgccatgcacgtcgaggtgccctcgcccctgtcgcgaatcggcctttaaactgtccactggtacaagcaggtggccatccgcgaaatctgctggttggacattggcaaccctgggagagcagggcctgccacatcagagtcatagacaaagatcatctcttgcaaagataaatattgtgtatcaggagctcaactatcggagcgtagaagaagcccccgtatacagcgttccacaactattgtccgctatggggtctctttgcagcttgtggttcggcgctagcgtgctaagtctgctggagctgttggaactgctactggatgcgtctgctttgactctggtgcttggcggcaggagactccgcagagcatggttctcctggccacgcgcgtccccggcatcgggagcgtctagcattaagcccgaagcaagccagatgccacccccagccggggggaccagcgatgaccctgaaccctcaggaccccaccttccacgggtgatgctgcccggggtacttgctggtgtatctgcggaagagtcttgggcaggcccccaacctctagagacgctggacacatag

SEQ ID NO: 338628 - DNA, 2010 bp, Artificial Sequence
  derived and/or modified sequence
atggctgagcacaggtccatggacggtagaatggaggctgcaacacgcggaggctcgcacctgcagatcgcctgggcttgcggaagtcccgaagcactcccgcccgagggcatggccgcccagacccactctgcacaacgctgcctccagactggtccgggctgtagtcctgacgcgccccagccagggccgcctagcgcaccaccaccacctccaaaggaaggacatcaggaaggccttgtggaactcccggcctcgtttcgagaactgttgacattcttctgcactaatgcgaccatccatggagccatccgcctggtgtgttctcgaggcaataggcttaaaacaacgtcatggggactgctgagcctgggcgctctagtcgccttgtgctggcaactgggactcttatttgagcggcattggcaccgcccggtgctgatggcggtttcggtgcacagcgagagaaagctgttgccgttggtaacactttgcgacggcaatccccgaaggccgagcccggtcctgcgccatcttgagctgctcgatgagtttgcccgcgaaaacattgactccctgtacaacgttaatctcagtaagggacgggcggcccttagcgcaacagttccgcgccacgagcctcccttccaccttgatagggagatccgtctacagcgactctctcactcaggcagtcgggtgcgcgttggattcagattgtgtaacagtactggtggcgattgcttttaccggggctatactagcggcgtagccgccgtgcaggactggtatcacttccactacgtggacatcctcgctttactccccgccgcctgggaggatagtcacggatcacaggacgggcacttcgtgctttcatgttcttacgatggcctggactgtcaagcacgccagtttagaactttccaccacccaacgtacggctcatgctataccgtggatggcgtttggaccgcccaaaggcctggaattacacacggtgtgggtctggtcttgagagttgaacaacagccccacctgccgttactcagtactctcgctgggatccgcgtaatggtgcatggccgtaaccacacccccttcttaggccatcatagtttttcagtgcggcctgggacagaggccactatatccatcagagaggatgaagtgcaccgactcggctcgccctatggtcactgcaccgccggaggtgagggagtagaggtggagctcctccacaatacctcatatactcgccaggcttgcctggtctcctgctttcaacagctgatggtggaaacatgttcctgcggatactacctacaccctttgcccgctggggcggagtactgttctagtgcacgacaccctgcctgggggcactgcttttaccgtctgtaccaagacctggagacacacaggctcccctgtacttcaaggtgcccgagaccctgcagagagagtgcatttaagctgagtacagggaccagtcgctggccatccgcgaagtcagccggctggaccctggccacgctcggtgaacagggcctcccgcatcagagtcacaggcagcgtagctctttagctaagatcaatattgtgtaccaggagctgaattaccgtagcgtcgaagaggcccccgtgtactccgttccgcaattgctgtcagccatgggaagcctgtgtagtctttggtttggggcctccgttctgtctttattggagttgctggagctccttctggacgccagtgcactaaccttggtccttggtggccggcgcctgcggcgggcttggttttcatggccgagggcttctcccgccagtggggcatctagtattaagcccgaggccagccagatgccgcccccagcaggtggaacgagcgacgaccccgagcctagtgggccccacttgcccagggtgatgctcccgggcgtactggccggggtatcagcggaggagagctgggccggaccccagcccctagaaacactggatacttag

SEQ ID NO: 338629 - DNA, 1917 bp, Artificial Sequence
  derived and/or modified sequence
atggcggaacaccggagtatggatggccgaatggaggcagctacgcgcggaggcagtcatctgcaggcagcggcacaaacacctccacgcccgggacctccttctgccccaccaccgccccccaaagaaggacaccaggaggggttggtagagctccctgctagttttcgggagctgctgaccttcttttgtacgaatgccactattcacggagccatccgcctagtatgttcccggggtaacaggctgaagacaacatcatggggactcctctccctgggtgccctggttgccctgtgctggcaactgggcctcctctttgaaagacattggcatcggccagttcttatggcggtttccgtgcacagcgagcggaaacttcttccccttgtgaccctgtgcgacgggaaccccagacggcccagcccggtactaagacatctggaacttctagacgaatttgcccgggagaacatagattctctttataatgtgaacctgagcaaaggaagggccgcactgtctgcaaccgtgcctcgccacgagcctccttttcacctggatcgggagatccgtctacagaggttgagccattccggttctcgggtgagagtcggcttccgcctgtgcaacagtaccggcggagactgcttctatcgcggctacacgagcggcgtggctgccgttcaggactggtaccactttcattatgtcgacatactcgcactgcttccggctgcttgggaggacagccacggtagccaggatggacactttgtgctgagttgtagctatgacggtctggactgtcaggccaggcagtttagaaccttccatcatcccacctacggctcctgctacactgtagacggagtgtggaccgcgcagcgccctggcatcactcacggggtaggtttggtgctccgcgttgaacagcagcctcacctgcccctgctgtctaccctggccggtatccgggttatggtacatggtaggaatcacactccctttttaggtcaccactcattctctgtccgcccaggcacggaggccactatctctattcgggaggacgaggttcaccgtctggggtcaccttacggacactgcactgctggcggggaaggtgtagaagttgaattactgcacaacactagctacactcgtcaggcctgtctagtttcctgcttccagcagctgatggttgagacgtgttcctgtgggtattatttgcatcccctcccggccggcgcagaatactgtagctccgcgcggcatccagcttggggacattgcttttaccgcctgtatcaggacctggagactcataggctcccttgcacctcgcggtgcccacgcccttgtcgggagagtgccttcaagctgtcaacagggaccagcagatggcctagcgccaagtcagccggctggaccttagcgacactgggagagcagggattgccgcatcagtcacatcgtcaacgctctagtctcgctaagatcaatattgtgtatcaggagctaaattatcgttcagttgaggaggctccagtgtactcggttccacaacttctgtctgccatgggtagtctgtgtagtctgtggttcggtgcctctgtcttgagtctcctggaattacttgaactgctcttagatgcctccgccttgacgctcgttctcgggggcagacgcctgcggagggcttggttcagctggccccgcgcatccccagcttcaggggccagctccatcaagccagaggcatcccagatgccaccacccgcaggagggacctcggacgaccccgagccctctggaccacatcttccaagagtgatgctcccgggggtgctagctggcgtgtccgcagaagagagctgggccgggcctcagccattagaaaccctcgatacctag

SEQ ID NO: 338630 - DNA, 1917 bp, Artificial Sequence
  derived and/or modified sequence
atggccgagcaccgctccatggatggccgcatggaggccgccacccggggcggcagccacctgcaggccgccgcccagaccccacccaggcctggccccccatctgcccctcctcctccacccaaggagggccaccaggagggcctggtggagctgcctgccagcttccgggagctgctgaccttcttctgcaccaatgccaccatccacggggccatccggctggtgtgcagccggggcaaccggctgaagaccacctcctggggcctgctgagcctgggcgccctggtggccctgtgctggcagctgggcctgctgtttgagcggcactggcacaggcctgtgctgatggctgtgtctgtgcacagcgagaggaagctgctgcccctggtgaccctgtgtgatggcaacccccggcggcccagccctgtgctgcggcacctggagctgctggatgaatttgccagagaaaatattgacagcctgtacaacgtgaacctgagcaagggccgggccgccctgagcgccaccgtgcccaggcatgagccccccttccacctggaccgggagatccggctgcagaggctgagccacagcggcagccgggtgcgggtgggcttccggctgtgcaacagcactggaggagactgcttctaccggggctacaccagcggcgtggccgctgtgcaggactggtaccacttccactacgtggacatcctggccctgctgcctgctgcctgggaggacagccacggcagccaggacggccactttgtgctgagctgcagctatgatggcctggactgccaggcccggcagttccgcaccttccaccaccccacctacggcagctgctacacagtggatggagtgtggacagcccagaggcctggcatcacccacggcgtgggcctggtgctgcgggtggagcagcagccccacctgcccctgctgagcaccctggccggcatccgggtgatggtgcacggcaggaaccacacccccttcctgggccaccacagcttctctgtgcggcctggaacagaggccaccatcagcatcagagaagatgaggtgcaccggctgggcagcccctacggccactgcacagctggaggagagggcgtggaggtggagctgctgcacaacaccagctacacccggcaggcctgcctggtgtcctgcttccagcagctgatggtggagacctgcagctgtggctactacctgcaccccctgcctgctggagctgagtactgcagcagcgcccggcacccagcctggggccactgcttctaccgcctgtaccaggacctggagacccaccggctgccctgcaccagccgctgcccccggccctgccgggagagcgccttcaagctgagcacaggcaccagccgctggcccagcgccaagtctgctggctggaccctggccaccctgggggagcagggcctgccccaccagagccaccggcagaggagcagcctggccaagatcaacatcgtgtaccaggagctgaactacagatctgtggaggaggcccctgtgtacagcgtgccccagctgctgagcgccatgggcagcctgtgcagcctgtggtttggagcctctgtgctgagcctgctggagctgctggagctgctgctggatgccagcgccctgaccctggtgctgggcggccgccgcctgcggcgggcctggttctcctggccccgggccagccctgccagcggggccagcagcatcaagccagaggccagccagatgcctcctcctgctgggggcaccagtgatgatcctgagcccagcggcccccacctgccccgggtgatgctgcccggggtgctggccggcgtgtctgctgaggagagctgggccggcccccagcccctggagaccctggacacctag

SEQ ID NO: 338631 - DNA, 2010 bp, Artificial Sequence
  derived and/or modified sequence
atggccgagcaccgctccatggatggccgcatggaggccgccacccggggcggcagccacctgcagatcgcctgggcctgtggcagccctgaggccctgcccccagagggcatggccgcccagacccacagcgcccagcgctgcctgcagacaggccctggctgcagcccagatgccccccagcccggcccccccagcgcccctcctcctccacccaaggagggccaccaggagggcctggtggagctgcctgccagcttccgggagctgctgaccttcttctgcaccaatgccaccatccatggagccatccggctggtgtgcagccggggcaaccggctgaagaccacctcctggggcctgctgagcctgggcgccctggtggccctgtgctggcagctgggcctgctgtttgagcggcactggcacaggcctgtgctgatggctgtgtctgtgcacagcgagaggaagctgctgcccctggtgaccctgtgtgatggcaacccccggcggcccagccctgtgctgcggcacctggagctgctggatgaatttgcccgggagaacatcgacagcctgtacaacgtgaacctgagcaagggccgggccgccctgagcgccaccgtgcccaggcatgagccccccttccacctggaccgggagatccggctgcagaggctgagccacagcggcagccgggtgcgggtgggcttccggctgtgcaacagcactggaggagactgcttctaccggggctacaccagcggcgtggccgctgtgcaggactggtaccacttccactacgtggacatcctggccctgctgcctgctgcctgggaggacagccacggcagccaggacggccactttgtgctgagctgcagctatgatggcctggactgccaggcccggcagttccgcaccttccaccaccccacctacggcagctgctacacagtggatggagtgtggacagcccagaggcctggcatcacccatggagtgggcctggtgctgcgggtggagcagcagccccacctgcccctgctgagcaccctggccggcatccgggtgatggtgcatggaagaaaccacacccccttcctgggccaccacagcttctctgtgcggcccggcacagaggccaccatcagcatccgggaggatgaggtgcaccggctgggcagcccctacggccactgcacagctggaggagaaggagtggaggtggagctgctgcacaacaccagctacacccggcaggcctgcctggtgtcctgcttccagcagctgatggtggagacctgcagctgtggctactacctgcaccccctgcctgctggagctgagtactgcagcagcgcccggcacccagcctggggccactgcttctaccgcctgtaccaggacctggagacccaccggctgccctgcaccagccgctgcccccggccctgccgggagagcgccttcaagctgagcacaggcaccagccgctggcccagcgccaagtctgctggctggaccctggccaccctgggggagcagggcctgccccaccagagccaccggcagaggagcagcctggccaagatcaacatcgtgtaccaggagctgaactacagatctgtggaggaggcccctgtgtacagcgtgccccagctgctgagcgccatgggcagcctgtgcagcctgtggtttggagcctctgtgctgagcctgctggagctgctggagctgctgctggatgccagcgccctgaccctggtgctgggcggccggcggctgcggcgggcctggttctcctggccccgggccagccctgccagcggggccagcagcatcaagccagaggccagccagatgcctcctcctgctgggggcaccagtgatgatcctgagcccagcggcccccacctgccccgggtgatgctgcccggggtgctggccggcgtgtctgctgaggagagctgggccggcccccagcccctggagaccctggacacctag

SEQ ID NO: 338632 - DNA, 1917 bp, Artificial Sequence
  derived and/or modified sequence
atggccgagcaccggagcatggacggccggatggaggccgccaccagaggcggctcccacttgcaggccgctgcccagactcctccacgtccgggcccaccatcagccccacctccaccccccaaagaagggcaccaggagggcctagttgagttgcccgcctcatttcgggaattactgacctttttttgcacaaacgctacaatacatggggccattcggctggtgtgcagcaggggcaacaggctgaaaacaaccagctggggcctgcttagccttggagccctggtcgctctgtgttggcaactgggcctcttgttcgagagacactggcaccgcccagtactcatggcggtgagcgttcactccgaaaggaagttgttgcccctggtcacgttgtgcgatgggaatccaagacggccctctccagtgttaaggcacctagagctcctagatgaattcgccagggagaatatagactctctttacaatgttaatctcagcaaggggcgggcggctctatcagccaccgttccgcgccatgagcctcctttccatctcgacagagagatccggttgcagcgacttagccactccgggtccagggttcgggtggggttcaggctatgcaatagtaccggaggagattgtttttatcgggggtatacctcaggcgtggctgctgtgcaggattggtatcattttcattatgtcgatattctcgctttgcttccggccgcgtgggaggactcccatgggtctcaggacggacacttcgtcctgtcatgttcctatgacgggctggattgtcaggcacgccaattcaggacattccaccaccctacatatggcagctgctataccgttgacggcgtatggaccgctcagaggcccggaatcacacatggcgtaggcctggtattgcgcgtcgaacagcaaccgcacctgcccctgctttccaccttagcaggcatccgggtcatggtgcacggtcgtaaccacacacccttcctgggacatcattccttctccgtgcggccaggcactgaagccaccatcagtattcgggaggacgaggtacatcggttggggtcaccttacgggcactgcacagcaggcggggagggggtggaagtggaactgctgcacaacacttcatacacacgccaggcctgtctcgttagctgtttccagcagttgatggtggaaacatgctcctgcggatactatctgcaccctctgccagcaggcgcagaatactgcagctccgcccggcaccccgcgtggggccattgcttctaccggctctaccaggacttggagacccacagactcccatgcacgtcaagatgcccaagaccttgcagggagtcagcattcaaactgtccacggggacatccagatggccatcagcgaagagcgccggttggactctggccacgttaggtgagcaggggctcccccatcagtcccatcgtcaaaggagctcccttgccaaaatcaatatcgtgtaccaggagctaaactaccgaagcgttgaagaagcaccggtgtacagtgtgccccagctgctgtccgcgatgggaagcctgtgcagcctgtggttcggcgcttccgtgcttagcctcctggaactgctcgaactcttactggatgccagcgcgttaaccctggtgctgggcggaagacggctgcgccgggcctggttttcttggccacgcgccagtcctgcctctggggcctcgagcattaagcccgaggctagccaaatgcctccgccagctggggggacatctgatgatcccgagccatcaggaccgcatctgccgagggtgatgctgcctggcgtccttgccggtgtaagcgccgaggagtcctgggccggcccccagccattggaaaccctggacacatag

SEQ ID NO: 338633 - DNA, 2010 bp, Artificial Sequence
  derived and/or modified sequence
atggccgagcaccggagcatggacggccggatggaggccgccaccagaggaggaagtcacttgcagatcgcatgggcttgcgggtcccctgaagccctccctccagaaggcatggccgcccagacgcacagcgctcagcgctgtctgcagaccgggcccggctgcagtcccgatgcaccccagccaggcccaccgagcgcacccccccccccccccaaggagggtcaccaggagggcttggtagagctcccagcaagcttcagagagctcctgaccttcttctgcacaaacgccaccattcatggagctatcaggttggtatgctcaagaggcaacagactaaagacaacatcctggggcctgctctctctgggtgccctggtggctctgtgctggcaactcggtctgctgttcgagaggcactggcatcgcccggtgcttatggcagtttccgtacactcagaacgaaaattgcttccgttggtgacattgtgcgatggaaatccgagacggccttcccctgtactgagacaccttgagcttcttgacgagtttgctagggagaatattgactccctgtataatgtgaacttgagcaaggggagggcagcactgtctgcaaccgtaccaagacatgagccgcccttccacctcgatagagaaatccgcctccagcggctcagtcatagcggaagtagggtcagagtggggttccgtttatgcaatagcactggcggggattgcttctaccgtggttatacatcaggggtagccgctgtgcaagactggtatcatttccactacgtagatattttggctctgctgccggccgcctgggaggattcccacggaagtcaggacgggcacttcgtgcttagttgctcctacgacggccttgactgccaggctcggcagttccgaacattccaccaccccacatacgggtcatgctacaccgttgacggcgtgtggacagcccaacgtccaggcattacacatggggtgggcttggtgttacgcgtggaacaacagccacatcttcctttactgagcactctggcaggtatccgtgtaatggtgcacgggaggaatcacacgccctttctaggccatcactcctttagtgtgcgcccgggaactgaagcaaccatttcaatccgcgaggacgaggttcatcgcctcggctctccttatggccattgcacagcgggaggcgagggggtggaagtggagctgctgcacaacaccagttacacgcggcaagcatgcctcgtgtcatgcttccagcagctgatggtggaaacatgcagctgcggttactatctacacccacttcccgctggcgcagagtactgcagcagcgccagacaccccgcctggggccactgtttctacagactgtaccaggatctcgaaacacacaggttgccgtgtacgagccgctgcccccgaccttgtagagaatccgctttcaagttatcaaccggcacatcccggtggccctccgctaagagtgcgggctggacgctggcaaccctgggggagcaaggactgccccaccagagccacagacagcgcagctctctggccaagatcaatatagtttaccaggaactcaattatagatcagtcgaagaggctcccgtgtattctgtgcctcagctcctgtcagctatgggctctttgtgttcactgtggtttggtgcatccgtgttgagtctgctcgaactgttagaactgttactggacgcttctgcacttacattagtcctgggtggaagaaggcttcgcagggcctggttcagctggcccagagctagtccagccagtggtgcatcttcaattaaacccgaggccagccaaatgcctcctcccgcaggcggtacaagtgacgatccggaacccagcggcccccacttacctcgtgtgatgttgcctggtgtgttagctggagtctccgccgaagaatcctgggctggcccacagccgttggagactcttgacacctag

SEQ ID NO: 338634 - DNA, 1917 bp, Artificial Sequence
  derived and/or modified sequence
atggccgagcaccggagcatggacggccggatggaggccgccacccgaggcggctcccatctgcaggcggctgcacagactccacctaggcctggtccaccttccgcccccccccctcctccaaaagagggccaccaggaaggtcttgtggaattgcccgccagctttcgggagctcttgacctttttttgcactaatgcgaccatacacggggccattaggctggtgtgtagtaggggcaatagattgaaaactacttcttggggcctgctgtcattgggtgctttggtcgccctgtgctggcagctgggccttcttttcgagcgccactggcatcggccggtgctgatggcagtgagcgtgcactcagaacggaaactgctcccactggtcaccctgtgtgatggcaatccccgacgaccatcccctgtgctgaggcatctcgaactcctggacgaattcgccagggaaaacattgactcgttatataacgttaacctatccaagggtcgtgccgccctatccgctacagtgcccagacacgagccgccgttccatttggatagggagatcagactccagaggcttagccatagcggttctagagtgagagtgggatttaggctatgcaacagcactgggggcgactgcttttataggggatataccagtggtgttgccgccgtgcaggactggtaccactttcattacgtggacatcttagccctgctgcccgctgcatgggaggattcccacggatctcaggatgggcacttcgtgctctcttgctcctacgatgggctggattgccaggcccggcaatttcggaccttccaccaccccacttacggctcttgttacacagtagacggagtttggactgcccaaaggccggggatcactcacggtgtggggttggtgctccgggtggagcagcaaccccacctgccactgttgagcactctagccggtattagggtcatggtacatggccggaaccatacccctttcctggggcaccatagcttcagcgttcggccggggacggaggccacgatttcgatccgtgaggatgaggtgcacagactgggaagtccctacggccactgcaccgctggcggcgagggtgtggaggtggagctgcttcataacacaagttacacaaggcaggcatgtttggtttcctgctttcaacagttgatggtggaaacctgtagttgtgggtactaccttcaccccctacccgccggagctgagtattgttccagcgcccggcaccccgcctggggtcactgcttctaccggctctaccaagacttggagacacataggcttccctgcacctcccggtgtccacgcccatgtcgagagtcagccttcaaactctctaccggaacatcccggtggccgagcgcaaagtctgccgggtggactctagcaaccttgggcgagcaggggttaccacaccaaagtcacaggcagagaagctccctagctaaaattaacattgtgtatcaggagttgaactatagaagtgtcgaggaggctcctgtatattcagtgcctcagctactctccgcgatgggcagcttatgtagcctctggttcggcgcgagcgtcctgagcctcttagagctcttggagcttttgctggacgcatccgcactgacattggttcttggaggccggaggctaaggcgagcttggttcagctggccacgcgcatcccctgcctcaggtgccagctcgataaagcccgaagctagtcagatgccccctcccgccgggggaacctctgacgaccctgagccttccgggccccacctccctcgggtgatgctgccaggtgtgctggcaggagtgtctgccgaggaaagctgggcaggccctcagcctctcgagaccctcgacacctag

SEQ ID NO: 338635 - DNA, 1917 bp, Artificial Sequence
  derived and/or modified sequence
atggccgagcaccgtagtatggacggaagaatggaagcagccactcggggaggatcacacctccaggccgctgcacagacacctcctcgcccaggtcctccctccgccccaccacctcctccgaaagaagggcaccaagagggactggtggagctcccagcttcttttagggagttactgacattcttctgcacaaacgcaactattcacggtgctatccgactcgtttgtagtagaggaaaccgtctgaagactacgagttggggcttgttgtcactcggcgcattggtggccctgtgctggcaattaggcctgttgtttgaacgacactggcacagacctgtattgatggccgtttccgttcactctgagagaaagctcctgcctctcgttacactgtgtgacggtaacccacgtcggccttctcctgtgctccgtcacctcgaattgctggatgagtttgctagagaaaatatcgacagcctgtataacgtgaacctgtcgaagggaagagcggcactgtccgctaccgttccaagacacgagcctccattccatctagaccgagaaatccgcctgcaacgtctgtctcactcaggtagccgggtcagggtgggcttccgtctctgcaatagtacaggcggtgattgtttctatcggggatacacgagtggtgtggccgctgtgcaggactggtatcactttcactatgtggacattctggcactgctgccagcagcttgggaagactctcatggcagccaagatgggcactttgtgctgtcctgttcctatgacggtttggactgccaggcgcgtcagtttagaacctttcaccatccaacttacggctcttgctacaccgttgatggcgtgtggacagcccagcgaccgggtattacgcacggcgttggcttggtgctcagggtggaacaacagccccacctgccattgctctcgaccttggcaggtattagagttatggtccatggcaggaaccacactccctttctgggccaccatagtttctctgtaagaccgggaacggaagcaactatctctattagggaagatgaagtacatcgattaggatctccatacgggcactgcacagctggaggcgagggggtagaggtggaactgcttcataacacctcttacacgagacaagcctgcctggtgtcatgcttccagcagctcatggttgagacttgtagttgtggatactacctgcacccacttcccgctggtgctgagtactgctcatcagctcgccaccctgcatggggccactgcttttaccgactttaccaagacttagagacacataggctgccctgtaccagcagatgcccccgtccttgccgggaatccgcttttaagctctctaccggaacaagccgctggccgtcagctaaatccgccggatggactctcgccaccctgggagagcaagggctcccccaccagtctcatagacaacgctccagtctcgccaaaatcaatattgtgtaccaggagctgaactatcgttcagtcgaggaagccccagtgtactccgtgccccagctgctgtcagcgatgggttcattgtgctctctgtggtttggagcctcggttttatctctgcttgagctgctggaactgctgttagacgccagcgctctgacattggtgttggggggtagaaggctgaggagggcctggttcagctggcctcgggcttcccccgcatccggggcatcatccatcaagccggaggcaagccagatgcctccacccgcagggggaacttcagatgatcctgagcccagcggaccccacctcccgagggtgatgcttccaggggtcctcgctggggtttctgcagaagagtcttgggctggccctcaacctctggaaaccctggacacgtag

SEQ ID NO: 338636 - DNA, 2010 bp, Artificial Sequence
  derived and/or modified sequence
atggccgagcaccgcagcatggatggcagaatggaagccgcaacccggggtgggagccacctacaaatcgcctgggcttgcggttcacctgaagccctgcctcccgaaggaatggctgcacagacacatagtgctcagcgctgcctacagactgggccaggctgtagtcctgatgccccacaacctgggcctcctagtgcaccaccacccccacccaaagagggccatcaggagggtctcgtggagttacccgcatcttttcgggagctgctgacctttttctgtactaacgctacaatccatggcgctattagactcgtttgttcgcgcggaaacagactgaagactacctcctgggggttgttgagcctaggagccttggtcgctttatgctggcagctgggactactgtttgaacgccactggcacagaccagtgcttatggctgtgtcggttcattccgagaggaaactgctgcctctggtgacgctctgtgatgggaatccgaggcgcccaagccctgtgctgagacatctcgagttgctggacgaattcgctcgcgagaacatcgacagcttgtataatgtaaatctgagcaaaggcagggctgcactgagcgcaaccgtccctcggcacgagccccctttccaccttgaccgcgagattcgcctgcagcggcttagccattctggcagtcgggttcgagtgggtttccgcctgtgtaattctaccggaggagattgcttctacagaggttacacttcaggtgtggcggctgtgcaagattggtaccacttccactacgtggacattctggcattactgcccgcagcctgggaggacagtcatggatcacaggatggccactttgtccttagttgttcatatgacggtctcgactgtcaggctcgccagtttcgaactttccaccatcccacctacggctcttgctataccgtcgatggcgtctggacagcacagagacccggtattactcacggtgtggggctcgtcctgcgcgtcgagcagcagccgcatctgccgttattaagcacactggccggaattcgcgtgatggtgcacgggagaaaccatactccattcctgggccaccattcattctccgtacggccaggtacagaagccactatcagcataagggaagatgaggtgcatcgcctcggcagcccttacggacactgcaccgctggcggtgagggtgtcgaagtcgagctcctccacaacacctcctatacccggcaggcatgtttagtttcctgtttccagcagctgatggtggaaacctgcagctgcggatactatcttcacccattgccagccggagcagaatactgctcttctgcacgccaccctgcatggggacactgtttctatcgactgtatcaggatttagagacacataggttaccttgtacaagcaggtgtcctcgaccatgcagggagtccgcctttaaattgtcaacaggaacaagccggtggcctagtgccaaatcagcaggatggacgctggccacactaggtgaacagggactgcctcaccaaagccaccgccaaaggagctcactcgccaagattaatatcgtctaccaagagctgaattaccggtctgtggaggaagctcccgtgtactctgtgccacaattactttccgcgatgggatccctctgcagtctctggttcggcgctagcgtattgtcacttctggagctgctggaactgctcctcgacgcgtcggctctcacgctcgtacttggcggtcgtcgcctgcggagagcctggttcagctggcctcgagccagccccgctagtggcgcttccagcataaaacctgaagcgtctcagatgcccccacctgctggtgggacctccgatgatcctgagccatccggccctcatctgcctcgggtaatgctccctggcgtcttggctggagtttcggccgaggagtcctgggccggtccacagcctctcgagactttggatacttag

SEQ ID NO: 338637 - DNA, 1917 bp, Artificial Sequence
  derived and/or modified sequence
atggcagagcatagaagcatggacgggagaatggaggccgctacacgcggtggctctcatttacaagcagctgcccagacccctccccgtccaggcccaccctcagcccctcctccgcctcctaaagaaggacatcaggagggattggttgagcttccagccagctttagggagctacttactttcttctgcacaaatgccacgatacacggcgcaatccggctggtgtgcagcagaggcaaccgcttaaaaacaaccagctgggggctgctcagtttgggggcactcgttgccttgtgttggcaactcggtttgctattcgagcggcattggcaccgacccgtgctgatggctgtgagtgtccactccgaaaggaaactacttcctttggtcacactgtgtgatggaaatcctcggaggccgagtcccgttttgaggcacctcgagctgcttgatgaattcgcccgagaaaatattgatagcctctataatgtcaatttaagcaaaggaagagcggcactcagcgccaccgtgccaaggcacgagcccccatttcacctggaccgggagattagactgcagaggctgtcccactctggatccagagtgagagtgggcttccggctctgtaactctaccggcggtgactgtttttatcgcggttacaccagcggtgtggccgcagtgcaagactggtatcacttccactacgttgacattctggccctcctgcccgctgcgtgggaggatagccacggaagccaggacgggcacttcgtgttgtcctgcagctatgacggacttgactgccaggcccgacagtttaggaccttccaccaccccacttatggatcctgctataccgtcgatggcgtgtggactgcacaacgaccagggatcacccacggggttgggctcgtcctccgcgtggagcagcagccccatttgccactccttagtactctagctggcatccgcgtgatggtccatggcagaaaccatactccatttctgggtcaccacagcttttccgtgagaccagggacggaagctaccatcagcatcagagaagatgaggtccacaggctaggctcaccttacggacactgtactgccggaggcgagggtgtggaggtagagctcctacataataccagttacacaagacaagcctgtctggttagctgtttccagcagcttatggtggagacatgcagctgtgggtactatctacatccactgccagccggtgccgaatactgctcctcagccaggcatccagcatggggacactgcttctatcgcctgtaccaggacctcgagacccatagactgccatgtactagccggtgcccacgcccatgcagggagagcgcttttaagctgtctaccggaacgagccgatggcctagcgccaagtccgccggttggacactcgcaactctgggcgagcagggactgccccatcaatctcacagacagcgctctagtctggccaaaatcaacattgtgtatcaggaactcaattataggagcgttgaggaggccccagtgtactcagtccctcagctactctcagccatggggtccttgtgctctctgtggtttggcgcaagcgttctaagcctcctggagctgctggaactgttgctggacgcgtccgctctgacgttggtgttggggggacgaagacttagaagggcttggttctcgtggcccagggcatctcctgcgagtggcgctagcagtatcaagcccgaggcctcccagatgcctccacccgcaggagggacaagtgacgaccctgagcccagcggcccacacctgcctcgcgtgatgctgccgggagtgctcgcaggagtgagcgcagaggagtcctgggccggaccacagccgctggagactctcgatacctag

SEQ ID NO: 338638 - DNA, 3475 bp, Artificial Sequence
  derived and/or modified sequence
tataaatgcttctcatcagactcaaggcctgaggtgatgctgatgctgtgcctgaattccagcagggaggaggcatgaggtgcgtccgactcccttcccatcacagctgagctagtttttcaggttaactttggaatgcccatggctaagaccaggggtccatccagacagttcagggcttataattttatttttggtttatgagggaacctagaaggcagcccacacgcaccttactcctcccagcaggggacaccggccagaccccaagctccacactcccaccctcagcacccacccaggccagcagccgggggcaccttggtgccaccttagtgcctgttctgcggaggctccactggacagtgcagttgatgcccggggccgagggggctctgcctgggaggctgttcacctgcctgggtgcaggaccccagagggaccccaggccacccctggcctgcccatgcccacgggaatcccgaccttgggctgcctgtctattgcaccagaaccgtcccagggctgactcagagtgaccctgagtgggggacgctcaccccaggggaggaaacggggctctgggataggaggtcctggctggggtcccacagatgccaggcgcctgccatctccagggcagtgctgtcacagaagacaacaccgctccctcgttacctgtggcccggccacctcagcggcccaaggaggtgagctcacagccatgctcggtcaatggggcctggccgtctttcctgggagagagcagaggcatgggcccaaagggagccagggatgcctgcccgtcccttctctcattcaggctcacctggtcatggtgcagtgaccacaggacccccacatgccgggagctgggttcgccccaccccaccccctgcaccgggccagcgaggggatggcccagaagagggggaggaccatgtggattcaccagtgctggacatgtgctctgtggctaccccctctgcctactctctggcccgatacaggggtgtgggacaggcctgggtgactccagcatggctttcctctccaggacgtcaccggtggcagctgcttccttccagagccggcaggaggccagaggctccatcctgcttcagagctgccagctgcccccgcaatggctgagcaccgaagcatggacgggagaatggaagcagccacacgggggggctctcacctccaggctgcagcccagacgccccccaggccggggccaccatcagcaccaccaccaccacccaaggaggggcaccaggaggggctggtggagctgcccgcctcgttccgggagctgctcaccttcttctgcaccaatgccaccatccacggcgccatccgcctggtctgctcccgcgggaaccgcctcaagacgacgtcctgggggctgctgtccctgggagccctggtcgcgctctgctggcagctggggctcctctttgagcgtcactggcaccgcccggtcctcatggccgtctctgtgcactcggagcgcaagctgctcccgctggtcaccctgtgtgacgggaacccacgtcggccgagtccggtcctccgccatctggagctgctggacgagtttgccagggagaacattgactccctgtacaacgtcaacctcagcaaaggcagagccgccctctccgccactgtcccccgccacgagccccccttccacctggaccgggagatccgtctgcagaggctgagccactcgggcagccgggtcagagtggggttcagactgtgcaacagcacgggcggcgactgcttttaccgaggctacacgtcaggcgtggcggctgtccaggactggtaccacttccactatgtggatatcctggccctgctgcccgcggcatgggaggacagccacgggagccaggacggccacttcgtcctctcctgcagttacgatggcctggactgccaggcccgacagttccggaccttccaccaccccacctacggcagctgctacacggtcgatggcgtctggacagctcagcgccccggcatcacccacggagtcggcctggtcctcagggttgagcagcagcctcacctccctctgctgtccacgctggccggcatcagggtcatggttcacggccgtaaccacacgcccttcctggggcaccacagcttcagcgtccggccagggacggaggccaccatcagcatccgagaggacgaggtgcaccggctcgggagcccctacggccactgcaccgccggcggggaaggcgtggaggtggagctgctacacaacacctcctacaccaggcaggcctgcctggtgtcctgcttccagcagctgatggtggagacctgctcctgtggctactacctccaccctctgccggcgggggctgagtactgcagctctgcccggcaccctgcctggggacactgcttctaccgcctctaccaggacctggagacccaccggctcccctgtacctcccgctgccccaggccctgcagggagtctgcattcaagctctccactgggacctccaggtggccttccgccaagtcagctggatggactctggccacgctaggtgaacaggggctgccgcatcagagccacagacagaggagcagcctggccaaaatcaacatcgtctaccaggagctcaactaccgctcagtggaggaggcgcccgtgtactcggtgccgcagctgctctcggccatgggcagcctctgcagcctgtggtttggggcctccgtcctctccctcctggagctcctggagctgctgctcgatgcttctgccctcaccctggtgctaggcggccgccggctccgcagggcgtggttctcctggcccagagccagccctgcctcaggggcgtccagcatcaagccagaggccagtcagatgcccccgcctgcaggcggcacgtcagatgacccggagcccagcgggcctcatctcccacgggtgatgcttccaggggttctggcgggagtctcagccgaagagagctgggctgggccccagccccttgagactctggacacctgaaccagacctgccagggctgtgcgatctcttggcctggtccttgcagctgtggcagcagcaggctccccagcggcccagggtgggccagaccagcagcccaggaagcagcacacgcggccgtggggaggcaggcaccgggcatgtcggcgcctctggtcaaaccacctacactgcctggggtgggtctcaaggaggcccggggcggaggggggttcccgcgtgcacacgagtgcggctggacgtgccgacacgcggtgatgtacccatgctccgtgtgtctgtgtctgcatgtccacacgtctgatgcacctgtgtacgtgtgtcaagcctagccacctcagctgcagggaggcagaaggcaaggcaggccccacggacacacttgggctgctctgaaataaagctgttgactcc

SEQ ID NO: 338639 - DNA, 1917 bp, Artificial Sequence
  derived and/or modified sequence
atggccgagcacagaagcatggacggcagaatggaggccgccaccagaggcggcagccacctgcaggccgccgcccagaccccccccagacccggcccccccagcgcccccccccccccccccaaggagggccaccaggagggcctggtggagctgcccgccagcttcagagagctgctgaccttcttctgcaccaacgccaccatccacggcgccatcagactggtgtgcagcagaggcaacagactgaagaccaccagctggggcctgctgagcctgggcgccctggtggccctgtgctggcagctgggcctgctgttcgagagacactggcacagacccgtgctgatggccgtgagcgtgcacagcgagagaaagctgctgcccctggtgaccctgtgcgacggcaaccccagaagacccagccccgtgctgagacacctggagctgctggacgagttcgccagagagaacatcgacagcctgtacaacgtgaacctgagcaagggcagagccgccctgagcgccaccgtgcccagacacgagccccccttccacctggacagagagatcagactgcagagactgagccacagcggcagcagagtgagagtgggcttcagactgtgcaacagcaccggcggcgactgcttctacagaggctacaccagcggcgtggccgccgtgcaggactggtaccacttccactacgtggacatcctggccctgctgcccgccgcctgggaggacagccacggcagccaggacggccacttcgtgctgagctgcagctacgacggcctggactgccaggccagacagttcagaaccttccaccaccccacctacggcagctgctacaccgtggacggcgtgtggaccgcccagagacccggcatcacccacggcgtgggcctggtgctgagagtggagcagcagccccacctgcccctgctgagcaccctggccggcatcagagtgatggtgcacggcagaaaccacacccccttcctgggccaccacagcttcagcgtgagacccggcaccgaggccaccatcagcatcagagaggacgaggtgcacagactgggcagcccctacggccactgcaccgccggcggcgagggcgtggaggtggagctgctgcacaacaccagctacaccagacaggcctgcctggtgagctgcttccagcagctgatggtggagacctgcagctgcggctactacctgcaccccctgcccgccggcgccgagtactgcagcagcgccagacaccccgcctggggccactgcttctacagactgtaccaggacctggagacccacagactgccctgcaccagcagatgccccagaccctgcagagagagcgccttcaagctgagcaccggcaccagcagatggcccagcgccaagagcgccggctggaccctggccaccctgggcgagcagggcctgccccaccagagccacagacagagaagcagcctggccaagatcaacatcgtgtaccaggagctgaactacagaagcgtggaggaggcccccgtgtacagcgtgccccagctgctgagcgccatgggcagcctgtgcagcctgtggttcggcgccagcgtgctgagcctgctggagctgctggagctgctgctggacgccagcgccctgaccctggtgctgggcggcagaagactgagaagagcctggttcagctggcccagagccagccccgccagcggcgccagcagcatcaagcccgaggccagccagatgcccccccccgccggcggcaccagcgacgaccccgagcccagcggcccccacctgcccagagtgatgctgcccggcgtgctggccggcgtgagcgccgaggagagctgggccggcccccagcccctggagaccctggacacctag

SEQ ID NO: 338640 - DNA, 2010 bp, Artificial Sequence
  derived and/or modified sequence
atggccgagcacagaagcatggacggcagaatggaggccgccaccagaggcggcagccacctgcagatcgcctgggcctgcggcagccccgaggccctgccccccgagggcatggccgcccagacccacagcgcccagagatgcctgcagaccggccccggctgcagccccgacgccccccagcccggcccccccagcgcccccccccccccccccaaggagggccaccaggagggcctggtggagctgcccgccagcttcagagagctgctgaccttcttctgcaccaacgccaccatccacggcgccatcagactggtgtgcagcagaggcaacagactgaagaccaccagctggggcctgctgagcctgggcgccctggtggccctgtgctggcagctgggcctgctgttcgagagacactggcacagacccgtgctgatggccgtgagcgtgcacagcgagagaaagctgctgcccctggtgaccctgtgcgacggcaaccccagaagacccagccccgtgctgagacacctggagctgctggacgagttcgccagagagaacatcgacagcctgtacaacgtgaacctgagcaagggcagagccgccctgagcgccaccgtgcccagacacgagccccccttccacctggacagagagatcagactgcagagactgagccacagcggcagcagagtgagagtgggcttcagactgtgcaacagcaccggcggcgactgcttctacagaggctacaccagcggcgtggccgccgtgcaggactggtaccacttccactacgtggacatcctggccctgctgcccgccgcctgggaggacagccacggcagccaggacggccacttcgtgctgagctgcagctacgacggcctggactgccaggccagacagttcagaaccttccaccaccccacctacggcagctgctacaccgtggacggcgtgtggaccgcccagagacccggcatcacccacggcgtgggcctggtgctgagagtggagcagcagccccacctgcccctgctgagcaccctggccggcatcagagtgatggtgcacggcagaaaccacacccccttcctgggccaccacagcttcagcgtgagacccggcaccgaggccaccatcagcatcagagaggacgaggtgcacagactgggcagcccctacggccactgcaccgccggcggcgagggcgtggaggtggagctgctgcacaacaccagctacaccagacaggcctgcctggtgagctgcttccagcagctgatggtggagacctgcagctgcggctactacctgcaccccctgcccgccggcgccgagtactgcagcagcgccagacaccccgcctggggccactgcttctacagactgtaccaggacctggagacccacagactgccctgcaccagcagatgccccagaccctgcagagagagcgccttcaagctgagcaccggcaccagcagatggcccagcgccaagagcgccggctggaccctggccaccctgggcgagcagggcctgccccaccagagccacagacagagaagcagcctggccaagatcaacatcgtgtaccaggagctgaactacagaagcgtggaggaggcccccgtgtacagcgtgccccagctgctgagcgccatgggcagcctgtgcagcctgtggttcggcgccagcgtgctgagcctgctggagctgctggagctgctgctggacgccagcgccctgaccctggtgctgggcggcagaagactgagaagagcctggttcagctggcccagagccagccccgccagcggcgccagcagcatcaagcccgaggccagccagatgcccccccccgccggcggcaccagcgacgaccccgagcccagcggcccccacctgcccagagtgatgctgcccggcgtgctggccggcgtgagcgccgaggagagctgggccggcccccagcccctggagaccctggacacctag

SEQ ID NO: 338641 - protein, 1332 aa, Artificial Sequence
  derived and/or modified sequence
MTGEVGSEVHLEINDPNVISQEEADSPSDSGQGSYETIGPLSEGDSDEEIFVSKKLKNRKVLQDSDSETEDTNASPEKTTYDSAEEENKENLYAGKNTKIKRIYKTVADSDESYMEKSLYQENLEAQVKPCLELSLQSGNSTDFTTDRKSSKKHIHDKEGTAGKAKVKSKRRLEKEERKMEKIRQLKKKETKNQEDDVEQPFNDSGCLLVDKDLFETGLEDENNSPLEDEESLESIRAAVKNKVKKHKKKEPSLESGVHSFEEGSELSKGTTRKERKAARLSKEALKQLHSETQRLIRESALNLPYHMPENKTIHDFFKRKPRPTCHGNAMALLKSSKYQSSHHKEIIDTANTTEMNSDHHSKGSEQTTGAENEVETNALPVVSKETQIITGSDESCRKDLVKNEELEIQEKQKQSDIRPSPGDSSVLQQESNFLGNNHSEECQVGGLVAFEPHALEGEGPQNPEETDEKVEEPEQQNKSSAVGPPEKVRRFTLDRLKQLGVDVSIKPRLGADEDSFVILEPETNRELEALKQRFWKHANPAAKPRAGQTVNVNVIVKDMGTDGKEELKADVVPVTLAPKKLDGASHTKPGEKLQVLKAKLQEAMKLRRFEERQKRQALFKLDNEDGFEEEEEEEEEMTDESEEDGEEKVEKEEKEEELEEEEEKEEEEEEEGNQETAEFLLSSEEIETKDEKEMDKENNDGSSEIGKAVGFLSVPKSLSSDSTLLLFKDSSSKMGYFPTEEKSETDENSGKQPSKLDEDDSCSLLTKESSHNSSFELIGSTIPSYQPCNRQTGRGTSFFPTAGGFRSPSPGLFRASLVSSASKSSGKLSEPSLPIEDSQDLYNASPEPKTLFLGAGDFQFCLEDDTQSQLLDADGFLNVRNHRNQYQALKPRLPLASMDENAMDANMDELLDLCTGKFTSQAEKHLPRKSDKKENMEELLNLCSGKFTSQDASTPASSELNKQEKESSMGDPMEEALALCSGSFPTDKEEEDEEEEFGDFRLVSNDNEFDSDEDEHSDSGNDLALEDHEDDDEEELLKRSEKLKRQMRLRKYLEDEAEVSGSDVGSEDEYDGEEIDEYEEDVIDEVLPSDEELQSQIKKIHMKTMLDDDKRQLRLYQERYLADGDLHSDGPGRMRKFRWKNIDDASQMDLFHRDSDDDQTEEQLDESEARWRKERIEREQWLRDMAQQGKITAEEEEEIGEDSQFMILAKKVTAKALQKNASRPMVIQESKSLLRNPFEAIRPGSAQQVKTGSLLNQPKAVLQKLAALSDHNPSAPRNSRNFVFHTLSPVKAEAAKESSKSQKIPEKDSDWLTWSGAPIPGFFRLSFDPHG

SEQ ID NO: 338642 - DNA, 3999 bp, Artificial Sequence
  derived and/or modified sequence
atgaccggagaggtgggctccgaggtccacctagaaatcaacgaccccaatgtgatcagccaagaggaggcggatagtccaagcgacagcggccagggaagttacgaaactatagggcccctcagcgaaggagattccgacgaggagatcttcgttagtaaaaaacttaaaaataggaaggtcctgcaggacagtgacagtgaaactgaggatactaatgcttcacccgagaagactacatacgactccgccgaagaggagaacaaggaaaacctttacgcagggaaaaacaccaaaataaagcggatttataagaccgtcgcagattccgacgagtcatatatggaaaagtcactctaccaagagaacctggaagctcaggtcaagccgtgtcttgagttgtcgctccagagcggaaattcaaccgactttaccacagatcgcaaaagctccaagaagcatatccatgacaaggaagggacggccgggaaggccaaagttaagtccaagcgacggctagagaaggaagagcggaaaatggagaagattcgacagcttaaaaagaaagagactaagaatcaggaggatgatgtagagcagccttttaatgatagcggatgtcttctggtggacaaggacttgtttgagactgggctcgaggacgaaaacaactctcccctggaggatgaagagtctctggagtcaatacgggctgccgttaagaataaggttaagaaacataagaagaaggaaccgtccctggagagcggggtgcacagcttcgaggaaggcagcgaactgagtaaggggaccacgcgcaaggaaagaaaggctgcccgcctgagcaaggaagctttaaagcaactacactccgaaactcagaggttaataagagagtccgccttgaacctgccttaccatatgccagagaataaaaccattcacgatttcttcaagagaaagcccagacctacctgtcatggaaacgctatggcacttctgaaatcctccaagtaccagagttcacaccataaggaaattatcgataccgctaacacaaccgaaatgaattccgaccatcactctaagggtagcgaacaaacaactggtgctgaaaatgaagttgaaaccaacgcattacccgtggtgtctaaggagactcagattattacggggagtgatgaatcatgccgtaaagatttagtgaaaaatgaagagctggagatccaggaaaagcagaagcagtcagatatccgaccttccccaggagacagcagtgtactgcagcaggaaagcaacttccttgggaacaatcatagcgaggaatgccaggtcgggggattggttgcattcgaaccccatgcactggaaggagaagggccgcagaatcctgaggagacggacgagaaagttgaagagccagagcagcagaataagagctcagcggtgggaccacccgaaaaggtgcgcaggtttaccctggaccggctcaagcagctcggggttgacgtttccattaagccccgccttggcgccgatgaggactccttcgtgattctcgaaccggagactaatagggagctagaagcactgaagcagcgattttggaagcacgcgaatcccgctgctaagcctagggctggacagactgtcaatgtgaacgttatcgtgaaggacatggggactgatggcaaggaggagctcaaagctgacgtggtcccagtaacactagcacccaagaaacttgatggggccagtcacacaaagcctggggaaaagcttcaggttctgaaggcaaagctgcaggaagcaatgaagcttagacgatttgaagaacggcaaaagcggcaggctcttttcaagctggacaacgaagatggatttgaagaagaggaggaggaagaggaagagatgacggacgaatcagaggaagacggtgaggagaaagtggaaaaggaggaaaaggaagaagagctggaggaggaagaggagaaagaagaggaggaagaagaagaaggaaatcaggaaactgctgagtttctcttatcctcggaagaaattgaaacgaaagatgaaaaggaaatggacaaagaaaacaacgatgggagtagcgagatcggtaaggctgtggggttcctgtcagttccaaagtccctctcatccgacagtaccctcctcctgttcaaggatagctcgtccaaaatgggatatttcccgaccgaggagaaaagcgaaaccgatgagaacagtggcaagcagccttccaaactagatgaggatgacagctgctctctcctgaccaaagagtcatcccacaactccagcttcgaattaattggctctaccattccttcctaccaaccgtgcaatcggcagaccggcaggggtacttccttttttcccacggccggaggttttcggagcccttcccctggcctatttagagcatcactggtgagcagcgcatctaagtctagcggaaagctttcagaaccgtcactcccgattgaggatagccaggatctttacaacgcgagtcccgagcccaagacactctttcttggggccggcgactttcagttttgccttgaagacgacactcagagccaattgctcgatgccgatggattcttgaatgtccggaatcatcggaaccaataccaggcattgaaacctaggctgccactagcttcaatggacgagaatgccatggacgccaacatggacgagttgcttgatctctgtactggaaagttcacatcgcaggctgagaaacaccttccaaggaagagcgacaagaaagagaatatggaggagctcttaaacctttgttcaggaaagttcacttcccaggatgcttcaacgcccgccagctccgagctgaacaagcaggaaaaggaaagctccatgggggaccctatggaggaggccctggccttgtgcagtggctccttcccaactgacaaggaagaggaggacgaggaggaggaattcggagattttagactcgtgtctaacgacaatgaattcgacagcgacgaggatgaacactcagattctggcaatgacttggcacttgaagaccatgaagacgatgacgaagaagagctgctgaaacgctccgaaaaactgaaacgacagatgcgcttaaggaaatatctggaagacgaagctgaagtttccggctccgacgtggggtcagaagacgagtacgacggggaagagattgacgagtatgaagaggatgtaattgatgaggtgctgccctccgatgaagagctccagtctcaaatcaagaagatacacatgaaaacaatgcttgacgatgataaaaggcagctgagactttatcaagagagatacctagcagacggtgatctgcatagtgacgggcctgggaggatgaggaagttccgctggaagaacattgacgatgccagccaaatggatctgtttcaccgggatagtgatgacgatcaaacagaggagcaacttgatgagtccgaggcccggtggcgaaaagagagaatcgaaagggagcagtggctgagggacatggcccagcaaggcaagattacagccgaagaagaggaagagattggagaggatagtcaatttatgatactggccaagaaggtgacagcaaaagccttgcaaaaaaatgcatcacgtcctatggtgatccaggagtccaagagtttgctgcggaaccccttcgaggctataaggcccggatccgcccagcaggtaaagaccggaagcctgttaaaccagccaaaggcggtccttcagaaattggccgctctctcagatcataaccctagcgcccctaggaatagccggaacttcgtgttccacactctgagcccagtcaaagccgaggccgcaaaggaaagttcaaagtcacagaagattcctgaaaaggatagcgactggcttacctggtccggcgcacccatccctggctttttcaggctgagttttgatccacatggatag

SEQ ID NO: 338643 - DNA, 3999 bp, Artificial Sequence
  derived and/or modified sequence
atgaccggggaggtgggcagcgaggtgcacctggagatcaatgaccccaacgtcatcagccaggaggaggccgacagccccagcgacagcggccagggcagctatgagaccatcggccccctgtctgagggggacagtgatgaggagatctttgtgtccaagaagctgaagaacaggaaggtgctgcaggacagcgacagcgagacagaggacaccaatgccagccctgagaagaccacctatgattctgctgaggaggagaacaaggagaacctgtatgctgggaagaacaccaagatcaagaggatctacaagacagtggccgacagtgatgagagctacatggagaagagcctgtaccaggagaacctggaggcccaggtgaagccctgcctggagctgagcctgcagagcggcaacagcacagacttcaccacagacaggaagagcagcaagaagcacatccatgacaaggagggcacagctgggaaggccaaggtgaagagcaagaggcggctggagaaggaggagaggaagatggagaagatccggcagctgaagaagaaggagaccaagaaccaggaggatgatgtggagcagcccttcaatgattctggctgcctgctggtggacaaggacctgtttgaaacaggcctggaggatgagaacaacagccccctggaggatgaggagagcctggagagcatccgggctgctgtgaagaacaaggtgaagaagcacaagaagaaggagcccagcctggagagcggcgtgcacagctttgaggagggcagcgagctgagcaagggcaccaccaggaaggagaggaaggccgcccggctgagcaaggaggccctgaagcagctgcacagcgagacccagaggctcatccgggagagcgccctgaacctgccctaccacatgcctgagaacaagaccatccatgacttcttcaagaggaagccccggcccacctgccacggcaatgccatggccctgctgaagagcagcaagtaccagagcagccaccacaaggagatcatcgacacagccaacaccacagagatgaacagcgaccaccacagcaaaggaagtgagcagaccactggagcagaaaatgaggtggagaccaatgccctgcctgtggtgtccaaggagacccagatcatcactggaagtgatgagagctgcaggaaggacctggtgaagaatgaggagctggagatccaggagaagcagaagcagagcgacatccggcccagccctggggacagctctgtgctgcagcaggagagcaacttcctgggcaacaaccacagcgaggagtgccaggtgggcggcctggtggcctttgagccccacgccctggagggggagggcccccagaaccctgaggagacagatgagaaggtggaggagcctgagcagcagaacaagagcagcgctgtgggccccccagagaaggtgcggcgcttcaccctggaccggctgaagcagctgggcgtggatgtgtccatcaagccccggctgggcgcagatgaggacagctttgtgatcctggagcctgagaccaaccgggagctggaggccctgaagcagcgcttctggaagcacgccaacccagctgccaagcccagggctggccagacagtgaatgtgaatgtcatcgtgaaggacatgggcacagatggcaaggaggagctgaaggcagatgtggtgcctgtgaccctggcccccaagaagctggatggagccagccacaccaagccaggagagaagctgcaggtgctgaaggccaagctgcaggaggccatgaagctgcggagatttgaggagcggcagaagaggcaggccctcttcaagctggacaatgaagatggctttgaggaggaggaggaggaggaggaggagatgacagatgagagcgaggaggatggagaggagaaggtggagaaggaggagaaggaggaggagctggaggaggaggaggagaaggaggaggaggaggaggaggagggcaaccaggagacagctgagttcctgctgagcagcgaggagattgagaccaaggatgagaaggagatggacaaggagaacaatgatggcagcagcgagatcggcaaggctgtgggcttcctgtctgtgcccaagagcctgagcagtgacagcaccctgctgctcttcaaggacagcagcagcaagatgggctacttccccacagaggagaagtcagaaacagatgagaacagcggcaagcagcccagcaagctggatgaagatgacagctgcagcctgctgaccaaggagagcagccacaacagcagctttgagctgattggcagcaccatccccagctaccagccctgcaaccggcagacaggccggggcaccagcttcttccccacagctgggggcttccgcagccccagccctggcctcttccgggccagcctggtgtcctctgccagcaagagcagcggcaagctgtctgagcccagcctgcccatcgaggacagccaggacctgtacaatgccagccctgagcccaagaccctcttcctgggcgctggggacttccagttctgcctggaggatgacacccagagccagctgctggatgctgatggcttcctgaatgtgaggaaccacaggaaccagtaccaggccctgaagccccggctgcccctggcctccatggatgaaaatgccatggatgccaacatggatgagctgctggacctgtgcaccgggaagttcaccagccaggccgagaagcacctgcccaggaagagtgacaagaaggagaacatggaggagctgctgaacctgtgcagcggcaagttcaccagccaggatgccagcaccccagccagcagcgagctgaacaagcaggagaaggagagctccatgggagaccccatggaggaggccctggccctgtgcagcggcagcttccccacagacaaggaggaggaggatgaggaggaggagtttggagacttccggctggtgtccaatgacaatgaatttgacagtgatgaagatgagcacagcgacagcggaaatgacctggccctggaggaccatgaagatgatgatgaggaggagctgctgaagaggtctgagaagctgaagaggcagatgaggctgaggaagtacctggaggatgaggccgaggtgtctggcagtgatgtgggctctgaagatgaatatgatggagaggagattgatgaatatgaagaagatgtgattgatgaggtgctgcccagtgatgaggagctgcagagccagatcaagaagatccacatgaagaccatgctggatgatgacaagaggcagctgcggctgtaccaggagcgctacctggctgatggagacctgcacagtgatggccctggccgcatgaggaagttccgctggaagaacattgatgatgccagccagatggacctcttccaccgggacagtgatgatgaccagacagaggagcagctggatgagagcgaggcccgctggaggaaggagagaattgagcgggagcagtggctgcgggacatggcccagcagggcaagatcacagctgaggaggaggaggagatcggggaggacagccagttcatgatcctggccaagaaggtgacagccaaggccctgcagaagaatgccagccggcccatggtgatccaggagagcaagagcctgctgaggaacccctttgaggccatccggcccggcagcgcccagcaggtgaagacaggcagcctgctgaaccagcccaaggctgtgctgcagaagctggccgccctgagtgaccacaaccccagcgcccccaggaacagcaggaactttgtgttccacaccctgagccctgtgaaggccgaggccgccaaggagagcagcaagagccagaagatccctgagaaggacagcgactggctgacctggagcggggcccccatccctggcttcttccggctgagctttgacccccatggatag

SEQ ID NO: 338644 - DNA, 3999 bp, Artificial Sequence
  derived and/or modified sequence
atgaccggcgaggtgggcagcgaggtgcacctggagatcaacgacccaaacgtaatttctcaagaagaggctgacagccctagtgattctggccagggtagctatgaaacgattgggccgctctcagagggcgatagcgacgaggaaatcttcgtcagtaagaagttgaagaacagaaaagttctgcaagactccgattccgagaccgaagacaccaacgcttcccctgaaaagacaacctacgactctgccgaggaggaaaacaaggagaacctgtatgccggtaagaataccaaaataaagagaatctacaaaacagtggccgacagtgacgaatcgtatatggagaaatccctttaccaagagaacctggaagcacaggtcaagccatgtctggaattatcgttgcaatcaggcaacagcacagactttactactgatcgcaaaagtagtaaaaaacatatccatgacaaggaggggactgctgggaaagctaaggtgaagtctaaaagacgtctcgaaaaggaggaacgcaaaatggaaaaaatacgccagctgaaaaaaaaggagacgaaaaatcaggaggacgacgtcgagcagccttttaatgattccgggtgtcttcttgtcgacaaggatctgttcgagaccggtctggaggatgagaacaatagtcccctagaggacgaggaatccctggagagcatacgagcagctgtgaagaataaggtcaagaagcacaagaagaaagagccttcacttgaaagcggagtgcattccttcgaagaagggagtgaactaagcaagggaactacgcggaaggagagaaaagccgcccggctcagcaaagaagctttgaagcaactccactctgaaacccagaggctgatcagggagtcagctttgaacttgccatatcacatgcccgagaataagactatacacgatttttttaagagaaagcccagaccaacctgccacggcaatgccatggccctacttaagagtagcaaatatcaaagcagccatcacaaggagattatagataccgcgaatacaaccgaaatgaacagcgatcaccactcaaagggttccgaacagaccactggggctgaaaatgaagtagaaactaatgcgttgccagtggtcagcaaagagactcaaataatcaccgggagcgacgaatcgtgcaggaaggatctggtcaaaaatgaagagctggagattcaggaaaaacagaaacagagcgacattcgaccttcacccggggattctagcgtactgcagcaggagtctaattttctcggcaataaccactcggaggagtgtcaagtcgggggattagtggcctttgaacctcatgcacttgaaggcgagggcccacagaaccccgaggagacggacgaaaaagtcgaggaacccgaacagcagaacaagagctccgcagtgggccctcctgaaaaggtcagaaggtttacattggatcggctgaagcagctgggcgtcgatgtgtctatcaagcctagactcggagcggatgaagattccttcgtgatcctcgaacctgaaacaaaccgcgagctggaagcactgaagcagagattttggaaacacgccaacccagcggcaaagcctcgtgccgggcagacagtcaatgtcaatgtgatcgtaaaagacatgggcactgatggtaaagaggagctcaaagccgacgtcgttcctgtgacacttgcgccgaaaaagctggatggagcttcccatactaaacccggcgagaagctacaggtgctgaaggctaagctgcaggaagccatgaagctccgaaggtttgaggagagacaaaaaaggcaagccctgtttaagttagataacgaggacgggtttgaggaagaagaggaagaagaagaagagatgactgatgaatcagaggaggacggcgaggagaaagtggagaaggaggaaaaggaggaggagctggaagaggaggaagaaaaggaggaggaagaggaagaggaaggcaaccaggagacggcagaattcctgcttagcagcgaggagattgagactaaagatgaaaaagagatggataaagagaataatgacggatcatctgagataggaaaagccgtaggctttctgagcgtgcctaagagcctctcatctgacagcactttgctgttgttcaaggactcatcgagcaagatgggctatttccctactgaggagaagtctgaaactgacgagaatagcggcaagcagccatctaaacttgacgaagacgattcttgctcactcctgaccaaagagagctcacacaatagcagttttgagcttatagggagtactattcccagctaccagccttgcaaccggcaaactgggaggggaactagctttttccccactgcaggaggatttcgaagcccatcccctggcctttttcgtgcttcccttgtttctagtgcctctaaatcatcaggaaaattaagcgaaccatctcttcctatcgaagacagtcaggacctgtacaacgcgtcaccagagcctaagactctcttcctgggagccggcgactttcagttctgcttagaagacgacacacaaagccaattgctggacgcagatgggttcctgaacgtgaggaaccatcgaaatcagtaccaggccctgaagccgcgccttcccctcgcctctatggacgagaatgccatggatgcgaacatggacgagttactcgacctgtgcactggcaaatttacgtcacaggccgaaaagcacctgcctcggaagagcgacaagaaagaaaatatggaggagttactaaatctgtgcagcggaaagttcaccagccaagacgcctcgacacccgctagcagcgaacttaacaagcaggagaaagagagttctatgggggatcccatggaagaagccctggccctctgttccgggtcattccctaccgataaggaggaggaagatgaggaggaggaattcggtgattttcggctggtaagtaatgacaacgaatttgattctgatgaggatgagcactccgattccgggaatgacctcgcactagaggatcacgaagatgatgatgaagaagagctcctaaagaggtcagagaagctgaaacgtcagatgcgcctgcgaaagtatctggaagacgaagccgaagtttcagggagcgatgttggtagtgaggacgagtatgacggtgaggaaatcgatgagtatgaagaagatgtcattgacgaggtgctaccgtctgacgaagagctacaaagtcagattaagaagattcatatgaaaactatgctggacgatgacaaacgccagctccggctctatcaggaacgctacttggccgacggggacctccattctgacggacctggcagaatgcgaaaattcagatggaagaacatcgatgacgccagccagatggatctttttcacagggattccgatgacgatcagaccgaagaacaacttgatgagtctgaggctagatggcgcaaggaacggatcgaacgggagcagtggctgcgcgacatggcccaacagggaaagattactgcagaggaggaggaagagattggagaggacagccagttcatgatactcgcgaagaaagtcactgcaaaggctctccagaagaatgcctcaaggccaatggtgatccaagagtcaaaatccctgctgcgcaaccccttcgaagccattcgccccgggtctgcacagcaagtgaagactggctcattgctgaatcaacccaaggccgtgttgcagaaactcgccgctctctcagatcacaaccctagtgcaccccgaaatagtagaaattttgtttttcatacgttatcgcctgttaaagccgaagcagccaaagaaagtagtaagtcacagaagattcccgagaaggacagtgactggctcacctggtccggcgctcctatccctgggttttttcgactgagtttcgatccccatggttag

SEQ ID NO: 338645 - DNA, 3999 bp, Artificial Sequence
  derived and/or modified sequence
atgactggagaggtgggctccgaagtgcacctagagataaacgatcccaatgtgatttctcaagaagaggccgactcgccgtctgactccggccagggctcctacgaaactatagggccactgtcagaaggcgacagcgatgaagagatctttgtcagtaaaaaactgaagaatcgcaaggtgctgcaagatagcgactctgagacagaagataccaacgcctcccccgaaaagactacctatgactctgctgaagaggagaacaaagagaacctctatgctggaaagaatacgaaaatcaagcggatctataagactgtagctgatagcgacgagtcctatatggaaaaaagcctttatcaggagaacctggaagcccaggtgaagccatgcctggagttatccctgcaatcgggaaacagcacagatttcactaccgataggaaatccagcaaaaagcacatacacgacaaggagggaacagccggtaaggcgaaagtgaaatcaaagcgacgtcttgaaaaagaggagcgcaagatggagaaaatccggcaactaaaaaaaaaagaaactaagaatcaagaggacgacgtcgagcagccgtttaatgattcaggctgcctgctggtcgataaagatctgtttgaaaccggtttagaggatgagaacaacagtcccctcgaggacgaggaatctctcgagagcattcgcgcagccgttaagaacaaggtaaaaaagcacaaaaagaaagaaccatcactggagagcggcgttcatagtttcgaagagggaagcgagctctccaaggggaccacacgaaaagaacgaaaagccgctcggctgagcaaagaagcactcaaacagctgcactcagagacccagcggctgatccgggagtcagccctgaatttgccataccacatgcccgaaaacaagactattcacgacttttttaagcgcaaacccaggcccacgtgccacggcaatgccatggccttgttgaaatcttccaagtatcaatcatcacatcataaagagataattgataccgctaatacaacagagatgaactcagaccatcacagcaaaggctccgagcagaccacaggagctgaaaacgaggtggagaccaacgcattgcccgtggtgagtaaggagacccagatcattactggcagcgacgaatcctgccgcaaagacctggtgaaaaacgaggagctagagatacaggagaagcagaaacagtccgacataaggccttcacccggagacagctccgtgctgcagcaggagtcaaattttctaggcaacaatcacagcgaagagtgccaggtgggcggtctcgtagcgtttgagccacacgcactcgagggtgaggggccacagaacccagaggagactgatgagaaagtggaggagcccgagcagcagaacaagagttctgccgtgggccctccggaaaaggtccgccgttttacgttggaccggctgaagcaattgggcgtggatgtctccatcaaaccgaggctgggcgcagacgaggattcatttgttatccttgaacccgagacgaacagggagctggaggccctgaaacagaggttttggaaacatgccaatccggctgctaagcccagggcgggtcagaccgtcaacgtgaatgttatcgtcaaagatatggggactgacggcaaagaggagctgaaggccgatgtggtgcccgtaacattggcccctaaaaagctggatggggcttcacatactaagccgggagaaaaactgcaggttttaaaggcaaaactgcaggaggcaatgaaactgcgaaggtttgaggagaggcagaagagacaggccctgttcaaattagataacgaggacggcttcgaagaggaggaggaagaggaagaggagatgaccgatgaatccgaagaagacggcgaagagaaagtagagaaagaagaaaaagaggaggagttagaagaggaagaggaaaaggaggaggaagaggaagaagaaggcaatcaggaaaccgctgagttcttactaagctctgaagaaattgagacgaaggacgagaaggagatggataaggaaaataacgacggatcatcagagattggcaaggcagtcgggttccttagcgttccaaagagtcttagctcggattcaaccctactgctgtttaaagatagcagctctaaaatgggctacttccccacagaggagaaatccgaaacagatgagaattcaggcaagcagccttctaaattggatgaagacgattcctgttcccttttgaccaaggaaagcagtcataacagttcgtttgagctgattggctctactattccatcttaccagccctgcaatcgtcagaccgggagaggcacatcattttttccaacagctggtgggttccgttcgccatccccagggttgtttcgcgctagcctcgtgtccagcgcctcaaagtccagtggtaagctatccgagccctctttacctattgaggatagtcaggacctgtataacgcatccccggagcccaagacattatttctgggggctggcgattttcagttttgtctggaagatgatacacagtctcagttgttagatgccgatggatttctgaatgtccggaatcacaggaaccaatatcaagccctgaagccccgacttcctttagcctcaatggatgaaaacgccatggatgccaacatggatgagctgctagatttatgcaccggcaagtttacttcccaggcagaaaaacacctccctcggaagtccgataaaaaggagaatatggaagaactgcttaacttatgttctggtaagtttactagccaggatgcttccacgccagctagctcagagttgaataaacaggagaaggaatcatctatgggagatcctatggaggaagcactggcactatgttccggctcatttccgactgataaggaggaggaggatgaggaagaggaatttggcgacttccggctggtttcgaacgacaacgagttcgacagtgatgaagatgagcactctgacagtggtaacgatctggctctggaagaccatgaggacgatgacgaggaggagctgcttaaacgctccgagaagctgaaacgccagatgaggctccggaagtacttggaagacgaggccgaggtgtccggaagcgatgtcggctccgaggatgagtatgacggcgaggaaattgatgaatacgaagaggatgtgatcgatgaggtcttgccctctgatgaggaacttcagagtcagattaagaagattcacatgaagactatgcttgacgatgataaacgtcagctgcgcctctatcaggaacgctacctagctgacggcgacctgcacagcgacgggccaggcagaatgcggaaatttcgatggaagaacattgatgacgccagccagatggatctcttccacagggattctgatgatgaccagactgaggaacagctagacgaatccgaagcaagatggcgcaaagaaaggatcgagcgcgaacagtggctacgagatatggctcaacagggtaagatcacagcagaggaggaagaagagatcggggaggactcacagtttatgatactggctaaaaaggtcaccgccaaggccctccagaagaacgcatcccggccaatggtgatccaggagtccaaatccctactgaggaaccccttcgaagccatcagacctggcagtgcccagcaggtgaagaccgggtcactgttgaaccaaccaaaggccgtgcttcagaagctcgccgctctcagcgatcataatccctcggccccacgcaactcccggaatttcgttttccacacacttagcccagtgaaggccgaagcggctaaggaatcctccaagagccagaagatccccgagaaagattctgattggctgacctggtccggagcccctattccgggattttttcgcctgtcatttgacccccatggatag

SEQ ID NO: 338646 - DNA, 4769 bp, Artificial Sequence
  derived and/or modified sequence
agcactgctgggctggagacggcgggagccgctgctctccggctgagggaatcagagacagctccgtccctagtggagcgcaggggaggcagaagtcatgacaggcgaggtgggttctgaggttcacctagaaatcaatgacccaaacgtcatttcacaagaggaagcagatagtccttcagatagtggacagggcagctatgaaacaattggacccttgagtgaaggagattcagatgaagagatatttgtaagtaagaagttgaaaaacaggaaggttctacaagacagtgattccgaaacagaggacacaaatgcctctccagagaaaactacctatgacagtgccgaggaggaaaataaagagaatttatatgctgggaaaaatacaaaaatcaaaaggatttacaaaactgtggcagacagtgatgaaagttacatggaaaagtctttgtatcaggaaaatcttgaagcgcaagtgaaaccttgcttagagctgagtcttcagtctggaaactctacagactttaccactgacagaaagagttccaaaaagcacatacatgataaagaaggaactgcaggaaaagcaaaagtaaaatcaaaaagaagacttgagaaagaggagagaaaaatggaaaaaattagacagctaaaaaagaaggaaacaaaaaaccaggaagatgatgtagaacagccatttaatgacagtggctgtcttcttgtggataaagacctttttgaaactgggttggaggatgaaaataactctccattggaagatgaagagtcattagaatcaataagagcagctgtaaaaaacaaagtaaaaaagcacaagaaaaaagaaccatctttggagagtggggtccattcatttgaggaaggaagtgagttatcaaaaggaaccacgaggaaggaaagaaaggcagccagattaagtaaagaagcattaaaacaactgcatagtgagactcagcgccttattcgagagtctgcactgaaccttccatatcatatgcctgagaataaaaccattcatgatttcttcaaacgtaaaccccggcccacttgccacggaaatgccatggcactattgaagtcatctaaatatcagtcaagccatcacaaagaaatcatagacactgcaaatactactgaaatgaacagtgatcaccatagtaaaggttctgagcagacaacaggtgcagaaaatgaagtggaaactaatgcactccctgtagtttcaaaggaaacccagatcattactggatcagatgagtcttgcaggaaggatttggtaaaaaatgaagagctagaaattcaggagaaacagaagcagagtgacattagaccttcacctggggacagctcagtgttgcaacaggaatccaacttcctcgggaacaatcacagtgaggaatgtcaggttggagggcttgtagcatttgaacctcatgccctggagggtgaaggcccccaaaatccagaagaaacagatgagaaagtggaagagcctgagcagcaaaataaatcatcagcagttgggccacctgaaaaagtgagacggtttactctggatagacttaagcaactgggagtagatgtttccattaaaccacggctaggtgctgatgaagattcctttgtgatacttgaacctgaaaccaacagagaactggaagccttgaagcagcgtttctggaagcatgctaatccagcagccaaacccagggctggtcagacagtgaatgtgaacgtcatagtgaaagacatgggcactgatggaaaggaagagctaaaagcagatgtggtacctgtgactttagcacctaagaagttggatggagcaagccacacaaaaccaggtgaaaagcttcaggtgttaaaagctaaactgcaagaagcaatgaaactccgaaggtttgaggagcgccagaagcgccaagcactgtttaaattagataatgaagatgggtttgaggaagaggaggaggaagaggaagaaatgacagatgagtctgaggaagatggagaagagaaggtagagaaagaagagaaagaggaagaactagaggaagaggaggagaaagaagaggaggaggaagaagaaggaaatcaggagactgcagaattccttcttagtagtgaagaaatagaaacaaaagatgaaaaagaaatggataaagaaaataatgatggcagtagtgaaattggcaaggcagttggcttcctctctgttcccaagtctctctcatcagattctactttacttctgtttaaggacagctcttccaagatgggttactttcctactgaagaaaaatcagaaacagatgaaaactcaggcaagcagcctagcaaactggatgaggatgattcatgttcattgctaacaaaggagagcagccacaatagcagctttgagctgattggctccacgattccatcctatcagccttgcaacagacaaacaggccgtgggaccagttttttccctacagcaggaggattcagatctccttcccctgggctatttcgagccagtttggtcagctcagcttctaagagttcagggaaactgtctgagccttcacttcccatagaggattcccaggatctgtataacgcctccccagagcctaagacacttttcctaggagcaggagacttccagttctgtttagaagatgacactcagagccaactgttggatgcagatgggttcttaaatgttagaaaccacaggaatcagtaccaagctttgaagcctcgattgccattggccagtatggatgagaatgccatggatgccaacatggatgagctgttggatttgtgtactggaaagttcacatctcaggctgaaaaacatctacccaggaagagtgacaagaaagagaacatggaggaacttctgaacctttgttcaggaaaattcacttctcaggatgcctccactccagcctcatcagagttaaataaacaggagaaggagagcagcatgggtgatccaatggaagaagcacttgctctttgctcaggctcttttcccacagacaaggaagaggaagacgaggaggaggaatttggagactttcggcttgtttcaaatgataatgagtttgatagtgatgaggatgaacacagtgactctggtaatgatctggcactggaagaccatgaagatgatgatgaagaagaactcctgaagcgatctgagaagttgaaaaggcaaatgaggttgaggaaatacctggaggatgaggcagaggtgtcaggaagtgatgtgggaagcgaagatgagtatgatggggaagaaattgatgaatatgaagaggacgtaattgatgaagtacttccttctgatgaggaactgcagagtcaaatcaagaaaatacacatgaaaactatgttggatgatgataagcgacagctacgtttataccaagagaggtaccttgctgatggggatctgcacagcgatggtcctgggcgaatgaggaagtttcgatggaaaaacatagatgatgcttcccagatggacttgttccacagagactctgatgatgatcagactgaagaacagcttgatgagtcagaagccaggtggaggaaggagcgaattgaacgagagcagtggcttcgggacatggcacagcaggggaaaattacagctgaagaagaagaagaaattggggaggacagtcagtttatgatactggccaagaaagttacagccaaagcactgcagaagaatgccagtcgccctatggttattcaggaatcaaagtctttgctcagaaatccttttgaagccatcagaccaggaagtgctcaacaggtgaagacaggctcactgctaaaccagcccaaagctgtgcttcagaaactggctgctctctctgaccataaccccagtgctcctcgaaattcaagaaactttgtctttcatacactttctcctgtcaaggctgaggcggcaaaggaatcgtctaagtctcagaagatcccagagaaggactctgactggctcacctggagtggagctcctatccctggattcttcaggctttcatttgacccacatggttaagctgggagagacagagtccaaagagaggcggagaagggctattctgggcagaacaaacaattgatgactttatggctctgtggtctgggcagaactgcataaccctagatcaccaaagctgagagcctttaggagtgaggatttgggccaggcatggtggctcacgcctgtaatcccagcactttgggaggccgaggtgggtggatcacaaggtcaggagatcaagaccaacctgaccaacatggtgaaaccccatctctactaaaaatacaaaaattagctgacgtgatgcatgcacctgtaatcccagctactcaggaggctgaggcaggagaatcgcttgaacccgggaggtggaggttgcggtgagccgagattgcgccactgcactccagcctaggcgacagagcgagactccatctcaaaaaaaaaaaaaaaaaaaaaaaaagtgaggatttgggtcaccccaggctgaaggccaggggaacctgaagtggataagggaagggagaagacttaggccacaggatctgatgtagaaatggggctgacgtctccacctgtattttcttagctggaggagtgtgcaaagtttgaattacttctgccttctccttcttatttccttttcccttttaaaatagtcatcataatcataaaaatttcttttcca

SEQ ID NO: 338647 - DNA, 3999 bp, Artificial Sequence
  derived and/or modified sequence
atgaccggcgaggtgggcagcgaggtgcacctggagatcaacgaccccaacgtgatcagccaggaggaggccgacagccccagcgacagcggccagggcagctacgagaccatcggccccctgagcgagggcgacagcgacgaggagatcttcgtgagcaagaagctgaagaacagaaaggtgctgcaggacagcgacagcgagaccgaggacaccaacgccagccccgagaagaccacctacgacagcgccgaggaggagaacaaggagaacctgtacgccggcaagaacaccaagatcaagagaatctacaagaccgtggccgacagcgacgagagctacatggagaagagcctgtaccaggagaacctggaggcccaggtgaagccctgcctggagctgagcctgcagagcggcaacagcaccgacttcaccaccgacagaaagagcagcaagaagcacatccacgacaaggagggcaccgccggcaaggccaaggtgaagagcaagagaagactggagaaggaggagagaaagatggagaagatcagacagctgaagaagaaggagaccaagaaccaggaggacgacgtggagcagcccttcaacgacagcggctgcctgctggtggacaaggacctgttcgagaccggcctggaggacgagaacaacagccccctggaggacgaggagagcctggagagcatcagagccgccgtgaagaacaaggtgaagaagcacaagaagaaggagcccagcctggagagcggcgtgcacagcttcgaggagggcagcgagctgagcaagggcaccaccagaaaggagagaaaggccgccagactgagcaaggaggccctgaagcagctgcacagcgagacccagagactgatcagagagagcgccctgaacctgccctaccacatgcccgagaacaagaccatccacgacttcttcaagagaaagcccagacccacctgccacggcaacgccatggccctgctgaagagcagcaagtaccagagcagccaccacaaggagatcatcgacaccgccaacaccaccgagatgaacagcgaccaccacagcaagggcagcgagcagaccaccggcgccgagaacgaggtggagaccaacgccctgcccgtggtgagcaaggagacccagatcatcaccggcagcgacgagagctgcagaaaggacctggtgaagaacgaggagctggagatccaggagaagcagaagcagagcgacatcagacccagccccggcgacagcagcgtgctgcagcaggagagcaacttcctgggcaacaaccacagcgaggagtgccaggtgggcggcctggtggccttcgagccccacgccctggagggcgagggcccccagaaccccgaggagaccgacgagaaggtggaggagcccgagcagcagaacaagagcagcgccgtgggcccccccgagaaggtgagaagattcaccctggacagactgaagcagctgggcgtggacgtgagcatcaagcccagactgggcgccgacgaggacagcttcgtgatcctggagcccgagaccaacagagagctggaggccctgaagcagagattctggaagcacgccaaccccgccgccaagcccagagccggccagaccgtgaacgtgaacgtgatcgtgaaggacatgggcaccgacggcaaggaggagctgaaggccgacgtggtgcccgtgaccctggcccccaagaagctggacggcgccagccacaccaagcccggcgagaagctgcaggtgctgaaggccaagctgcaggaggccatgaagctgagaagattcgaggagagacagaagagacaggccctgttcaagctggacaacgaggacggcttcgaggaggaggaggaggaggaggaggagatgaccgacgagagcgaggaggacggcgaggagaaggtggagaaggaggagaaggaggaggagctggaggaggaggaggagaaggaggaggaggaggaggaggagggcaaccaggagaccgccgagttcctgctgagcagcgaggagatcgagaccaaggacgagaaggagatggacaaggagaacaacgacggcagcagcgagatcggcaaggccgtgggcttcctgagcgtgcccaagagcctgagcagcgacagcaccctgctgctgttcaaggacagcagcagcaagatgggctacttccccaccgaggagaagagcgagaccgacgagaacagcggcaagcagcccagcaagctggacgaggacgacagctgcagcctgctgaccaaggagagcagccacaacagcagcttcgagctgatcggcagcaccatccccagctaccagccctgcaacagacagaccggcagaggcaccagcttcttccccaccgccggcggcttcagaagccccagccccggcctgttcagagccagcctggtgagcagcgccagcaagagcagcggcaagctgagcgagcccagcctgcccatcgaggacagccaggacctgtacaacgccagccccgagcccaagaccctgttcctgggcgccggcgacttccagttctgcctggaggacgacacccagagccagctgctggacgccgacggcttcctgaacgtgagaaaccacagaaaccagtaccaggccctgaagcccagactgcccctggccagcatggacgagaacgccatggacgccaacatggacgagctgctggacctgtgcaccggcaagttcaccagccaggccgagaagcacctgcccagaaagagcgacaagaaggagaacatggaggagctgctgaacctgtgcagcggcaagttcaccagccaggacgccagcacccccgccagcagcgagctgaacaagcaggagaaggagagcagcatgggcgaccccatggaggaggccctggccctgtgcagcggcagcttccccaccgacaaggaggaggaggacgaggaggaggagttcggcgacttcagactggtgagcaacgacaacgagttcgacagcgacgaggacgagcacagcgacagcggcaacgacctggccctggaggaccacgaggacgacgacgaggaggagctgctgaagagaagcgagaagctgaagagacagatgagactgagaaagtacctggaggacgaggccgaggtgagcggcagcgacgtgggcagcgaggacgagtacgacggcgaggagatcgacgagtacgaggaggacgtgatcgacgaggtgctgcccagcgacgaggagctgcagagccagatcaagaagatccacatgaagaccatgctggacgacgacaagagacagctgagactgtaccaggagagatacctggccgacggcgacctgcacagcgacggccccggcagaatgagaaagttcagatggaagaacatcgacgacgccagccagatggacctgttccacagagacagcgacgacgaccagaccgaggagcagctggacgagagcgaggccagatggagaaaggagagaatcgagagagagcagtggctgagagacatggcccagcagggcaagatcaccgccgaggaggaggaggagatcggcgaggacagccagttcatgatcctggccaagaaggtgaccgccaaggccctgcagaagaacgccagcagacccatggtgatccaggagagcaagagcctgctgagaaaccccttcgaggccatcagacccggcagcgcccagcaggtgaagaccggcagcctgctgaaccagcccaaggccgtgctgcagaagctggccgccctgagcgaccacaaccccagcgcccccagaaacagcagaaacttcgtgttccacaccctgagccccgtgaaggccgaggccgccaaggagagcagcaagagccagaagatccccgagaaggacagcgactggctgacctggagcggcgcccccatccccggcttcttcagactgagcttcgacccccacggctag

SEQ ID NO: 338648 - protein, 658 aa, Artificial Sequence
  derived and/or modified sequence
MTGEVGSEVHLEINDPNVISQEEADSPSDSGQGSYETIGPLSEGDSDEEIFVSKKLKNRKVLQDSDSETEDTNASPEKTTYDSAEEENKENLYAGKNTKIKRIYKTVADSDESYMEKSLYQENLEAQVKPCLELSLQSGNSTDFTTDRKSSKKHIHDKEGTAGKAKVKSKRRLEKEERKMEKIRQLKKKETKNQEDDVEQPFNDSGCLLVDKDLFETGLEDENNSPLEDEESLESIRAAVKNKVKKHKKKEPSLESGVHSFEEGSELSKGTTRKERKAARLSKEALKQLHSETQRLIRESALNLPYHMPENKTIHDFFKRKPRPTCHGNAMALLKSSKYQSSHHKEIIDTANTTEMNSDHHSKGSEQTTGAENEVETNALPVVSKETQIITGSDESCRKDLVKNEELEIQEKQKQSDIRPSPGDSSVLQQESNFLGNNHSEECQVGGLVAFEPHALEGEGPQNPEETDEKVEEPEQQNKSSAVGPPEKVRRFTLDRLKQLGVDVSIKPRLGADEDSFVILEPETNRELEALKQRFWKHANPAAKPRAGQTVNVNVIVKDMGTDGKEELKADVVPVTLAPKKLDGASHTKPGEKLQVLKAKLQEAMKLRRFEERQKRQALFKLDNEDGFEEEEEEEEEMTDESEEDGEEKKKKKKKKKN

SEQ ID NO: 338649 - DNA, 1977 bp, Artificial Sequence
  derived and/or modified sequence
atgacaggcgaggtgggatccgaggttcacctagagatcaacgatccaaacgtgataagccaggaggaggccgacagtcccagcgactctggccagggaagctacgaaacaattgggcccctgagtgaaggagacagtgacgaggagatctttgtgagtaaaaagctcaagaatcggaaggtcctccaggatagcgactccgaaactgaggacaccaacgcttcccccgagaaaactacctatgacagcgctgaagaagagaataaagagaacctatacgcaggcaagaacacaaagataaagcggatttacaaaaccgtagcggacagtgatgaaagttatatggaaaagagtctttatcaggaaaatttggaggcccaggttaaaccttgtcttgagcttagccttcagagtggcaactccaccgactttacgacagacaggaaatcttctaagaagcacattcacgataaggaagggaccgctgggaaggcgaaagtcaaatcaaagaggagactggaaaaagaggaaagaaaaatggaaaaaatccggcagctcaagaaaaaagagacgaagaaccaggaggacgacgtggagcaacccttcaacgactcgggttgtcttctggtggataaggatctatttgaaaccgggctcgaggatgagaacaattccccactggaggatgaggagtccctggaatccattcgagcggccgtgaagaacaaggtgaaaaagcacaaaaaaaaggaaccctctctagaatccggagtgcactctttcgaagaagggagtgagctatccaaaggaacaaccagaaaggagagaaaagcagcccgcctctctaaagaagccctcaaacagttgcacagcgagacacagcgtctgatccgcgagagtgctctcaatctgccgtaccacatgccagaaaataaaacaattcatgatttctttaaacggaaacctagacccacctgccacggtaatgcgatggcactgctgaagtccagtaagtaccagtctagccatcataaggaaatcatcgacacggctaacaccaccgagatgaatagcgatcaccattctaaaggctcggaacagaccacgggagccgagaacgaagtcgaaacaaatgcccttcctgttgtctccaaggagacacaaattattacaggaagtgatgagagttgccggaaggatctggtcaagaacgaagaactggaaattcaggaaaagcagaagcagtccgatatcaggccttcccctggggattcaagcgtgcttcagcaagagtcaaatttcctgggtaacaaccattcagaagaatgtcaagtgggtggcctggtcgcctttgaaccccatgccctggagggggagggaccccagaatccagaagaaaccgacgaaaaagtcgaagaaccagagcagcagaacaagagttctgccgtgggccctccagaaaaggtacgtaggtttacgttggataggctaaagcaattgggggttgatgtttctatcaaacctcgcctcggcgccgacgaggattcttttgtcatactagagcctgagacaaaccgtgaattagaggctctgaagcaacggttttggaagcatgcaaatcctgccgccaagcctcgggccggtcaaacagtgaatgtcaatgtgatagtgaaagacatgggaaccgatggcaaagaagagctaaaggcagatgtagtcccagtcacactcgctccgaagaagctcgatggcgcgtcccacacaaagcctggggagaagttacaggtactcaaggccaaattacaggaagccatgaagcttagacgtttcgaggaacgtcaaaagcgacaggccctgttcaagctggacaatgaggacgggttcgaagaggaagaggaagaagaggaagaaatgaccgacgagtccgaagaagacggagaggagaagaaaaagaagaagaaaaagaagaaaaattag

SEQ ID NO: 338650 - DNA, 1977 bp, Artificial Sequence
  derived and/or modified sequence
atgaccggggaggtgggcagcgaggtgcacctggagatcaatgaccccaacgtcatcagccaggaggaggccgacagccccagcgacagcggccagggcagctatgagaccatcggccccctgtctgagggggacagtgatgaggagatctttgtgtccaagaagctgaagaacaggaaggtgctgcaggacagcgacagcgagacagaggacaccaatgccagccctgagaagaccacctatgattctgctgaggaggagaacaaggagaacctgtatgctgggaagaacaccaagatcaagaggatctacaagacagtggccgacagtgatgagagctacatggagaagagcctgtaccaggagaacctggaggcccaggtgaagccctgcctggagctgagcctgcagagcggcaacagcacagacttcaccacagacaggaagagcagcaagaagcacatccatgacaaggagggcacagctgggaaggccaaggtgaagagcaagaggcggctggagaaggaggagaggaagatggagaagatccggcagctgaagaagaaggagaccaagaaccaggaggatgatgtggagcagcccttcaatgattctggctgcctgctggtggacaaggacctgtttgaaacaggcctggaggatgagaacaacagccccctggaggatgaggagagcctggagagcatccgggctgctgtgaagaacaaggtgaagaagcacaagaagaaggagcccagcctggagagcggcgtgcacagctttgaggagggcagcgagctgagcaagggcaccaccaggaaggagaggaaggccgcccggctgagcaaggaggccctgaagcagctgcacagcgagacccagaggctcatccgggagagcgccctgaacctgccctaccacatgcctgagaacaagaccatccatgacttcttcaagaggaagccccggcccacctgccacggcaatgccatggccctgctgaagagcagcaagtaccagagcagccaccacaaggagatcatcgacacagccaacaccacagagatgaacagcgaccaccacagcaaaggaagtgagcagaccactggagcagaaaatgaggtggagaccaatgccctgcctgtggtgtccaaggagacccagatcatcactggaagtgatgagagctgcaggaaggacctggtgaagaatgaggagctggagatccaggagaagcagaagcagagcgacatccggcccagccctggggacagctctgtgctgcagcaggagagcaacttcctgggcaacaaccacagcgaggagtgccaggtgggcggcctggtggcctttgagccccacgccctggagggggagggcccccagaaccctgaggagacagatgagaaggtggaggagcctgagcagcagaacaagagcagcgctgtgggccccccagagaaggtgcggcgcttcaccctggaccggctgaagcagctgggcgtggatgtgtccatcaagccccggctgggcgcagatgaggacagctttgtgatcctggagcctgagaccaaccgggagctggaggccctgaagcagcgcttctggaagcacgccaacccagctgccaagcccagggctggccagacagtgaatgtgaatgtcatcgtgaaggacatgggcacagatggcaaggaggagctgaaggcagatgtggtgcctgtgaccctggcccccaagaagctggatggagccagccacaccaagccaggagagaagctgcaggtgctgaaggccaagctgcaggaggccatgaagctgcggagatttgaggagcggcagaagaggcaggccctcttcaagctggacaatgaagatggctttgaggaggaggaggaggaggaggaggagatgacagatgagagcgaggaggatggagaggagaagaagaagaagaagaagaagaagaagaactag

SEQ ID NO: 338651 - DNA, 1977 bp, Artificial Sequence
  derived and/or modified sequence
atgaccggcgaggtgggcagcgaggtgcacctggagatcaacgaccctaatgtcatctcccaagaggaagcggatagcccttccgacagcgggcagggaagttatgaaacaattggccctctgtctgagggggatagcgacgaggagatcttcgtcagtaagaaactaaagaacagaaaggtgttgcaagatagcgattcagagacagaggacacaaacgcctctcctgagaagaccacatacgacagtgctgaagaggaaaataaagaaaacctgtacgctggaaagaataccaaaatcaaacggatttataaaacggtggccgactcagatgagtcatatatggagaagagcctttatcaggaaaatctcgaggcccaggtgaaaccatgccttgagttgagcctacagtccgggaattccaccgacttcaccaccgacagaaaaagctccaaaaagcacattcacgataaggaaggaaccgcaggcaaggctaaggtaaagtcaaagcgcagattagaaaaggaggagagaaaaatggaaaaaatcagacagcttaaaaagaaggaaactaagaaccaggaggacgatgttgaacagccctttaacgactcaggttgtctactcgtcgataaagacttatttgagactgggctggaggacgaaaataattcccctttggaggatgaagagtcattggaatccattagagcagccgtgaaaaacaaggttaagaagcacaagaaaaaggaaccatcccttgagagcggcgttcatagcttcgaggagggcagtgagctgtcaaagggcaccacaagaaaggaaagaaaggccgcacgactgagcaaagaggcccttaagcagctacatagtgaaacccagaggctcatcagggaaagcgccctgaatctgccttaccatatgcctgaaaataagaccatccatgacttctttaagcgcaaaccccggcccacctgtcacggtaatgcaatggccctacttaaatcatcgaagtaccagagttcacatcacaaagagatcatcgacaccgcaaataccacggaaatgaactccgatcaccactctaaaggctccgaacagactacaggagccgaaaatgaggtggagacaaatgctctgccagtggtgtcaaaggagacacagattataaccggtagcgatgagtcatgcaggaaggaccttgtgaagaacgaagaactcgaaatccaagaaaagcagaagcagtccgacattagaccctcacccggcgattccagcgtgctgcagcaggagagcaatttcttaggcaataaccattccgaggaatgtcaagtcggcgggttggtcgcatttgaaccccacgcactcgagggagagggcccacagaacccagaagaaaccgatgagaaggtcgaagagccagaacagcagaacaaatcatcagccgtgggacctccggagaaggtcagaagatttaccttagacagactgaagcagctcggggtggatgtttctatcaaaccgcgtctgggagctgacgaggactcgtttgtcatactggaacctgaaacaaaccgcgagctcgaagctctgaagcagcgattctggaagcatgccaatcccgcagcgaagcctcgcgcagggcagactgtgaatgttaatgtgattgtaaaagacatgggcaccgacggaaaagaggagctcaaggccgatgtggtgcccgtaacgctggccccaaagaagctcgatggcgcatcccacaccaagccaggcgaaaaactgcaggtgctgaaagccaagctgcaggaggccatgaaactgcgcagatttgaagagagacagaagagacaggctctattcaagctggacaacgaggatgggttcgaagaggaggaagaggaagaggaagaaatgactgatgaatccgaagaagatggcgaagagaaaaaaaagaaaaaaaaaaaaaaaaaaaattag

SEQ ID NO: 338652 - DNA, 1977 bp, Artificial Sequence
  derived and/or modified sequence
atgaccggggaggttggttctgaggtgcacctggagattaacgaccccaatgtgatttcacaagaggaagctgacagtccttcggatagcggccaggggtcgtatgagaccatcggaccactttctgagggggattccgacgaggagatctttgtttcaaaaaagctcaagaataggaaggtgctgcaggattcggactcagagacagaggacactaatgcgtcaccagaaaagaccacgtacgactccgctgaagaggaaaacaaggagaatctatatgccggtaagaacacaaagattaagcgtatttacaagactgtggcagacagtgacgagtcttatatggaaaaatccttgtaccaggagaatcttgaagcacaggtaaagccctgcttggagctgagtttgcaatcagggaattccactgatttcaccactgaccgaaagagtagtaagaagcatatacacgataaggagggtacagctggaaaggctaaggtgaagtccaagcgccgactcgagaaggaggagaggaaaatggagaagatcagacaattaaaaaagaaggagaccaagaaccaagaggacgatgtcgagcagccatttaacgacagcgggtgcctcctggtggataaagatttattcgaaactggactggaagatgaaaataacagtcctctggaggacgaagaatccctggagtctattagggccgctgtcaagaacaaggttaagaagcataaaaagaaagagcctagcttagaaagcggggttcactccttcgaagagggaagcgaattatcaaaaggaaccacccgcaaagagaggaaggcagccagactgagcaaagaggcgttgaagcagctgcacagcgagacacagcgcctgattagggagtccgcgctcaatctgccctatcacatgcctgagaacaaaactattcacgacttctttaagcgaaagcctcgcccaacttgtcacggaaatgccatggcccttctcaaatcaagtaaatatcagtctagccatcataaggagattatcgatacagctaacactaccgaaatgaactcagaccatcattcgaaaggttcggagcagactactggagccgaaaacgaggtagagacaaatgccctgcccgttgtctcaaaagagactcagatcattaccggctccgacgagagttgtaggaaagatttggtcaagaacgaggaattagaaatccaggaaaagcagaaacaatcggatattcgtccgtcacccggagacagctcagtgctgcagcaagagtccaactttctaggtaacaatcacagtgaggaatgccaagtgggtgggcttgttgccttcgagccccatgccctggagggggaaggaccgcagaacccagaggagactgatgagaaagtcgaagagccggagcagcagaataaatctagtgctgtaggccctccggaaaaagtgcgcagattcaccctagaccgcctcaagcagctgggtgtggacgtgtcaattaagccaaggttgggcgctgatgaggactcttttgtgattttggaacccgagaccaatcgcgagctcgaagctttgaagcagcgtttctggaaacatgccaatcccgctgcgaagccgagggcaggccaaaccgttaacgtgaacgtgattgtcaaggatatgggtacggatggcaaggaagaactgaaggctgacgtagtgcctgtgaccctggcgcctaagaagctagatggggcatcccacacaaaacctggcgagaagctgcaggtgttgaaagcgaaactacaggaggccatgaagctacggagatttgaggaaaggcagaagcgccaggcgctatttaagctggacaacgaagatggattcgaggaagaagaggaagaagaagaggaaatgaccgatgagagcgaggaggatggtgaggagaagaaaaagaagaaaaagaagaagaagaactag

SEQ ID NO: 338653 - DNA, 2054 bp, Artificial Sequence
  derived and/or modified sequence
gacggcgggagccgctgctctccggctgagggaatcagagacagctccgtccctagtggagcgcaggggaggcagaagtcatgacaggcgaggtgggttctgaggttcacctagaaatcaatgacccaaacgtcatttcacaagaggaagcagatagtccttcagatagtggacagggcagctatgaaacaattggacccttgagtgaaggagattcagatgaagagatatttgtaagtaagaagttgaaaaacaggaaggttctacaagacagtgattccgaaacagaggacacaaatgcctctccagagaaaactacctatgacagtgccgaggaggaaaataaagagaatttatatgctgggaaaaatacaaaaatcaaaaggatttacaaaactgtggcagacagtgatgaaagttacatggaaaagtctttgtatcaggaaaatcttgaagcgcaagtgaaaccttgcttagagctgagtcttcagtctggaaactctacagactttaccactgacagaaagagttccaaaaagcacatacatgataaagaaggaactgcaggaaaagcaaaagtaaaatcaaaaagaagacttgagaaagaggagagaaaaatggaaaaaattagacagctaaaaaagaaggaaacaaaaaaccaggaagatgatgtagaacagccatttaatgacagtggctgtcttcttgtggataaagacctttttgaaactgggttggaggatgaaaataactctccattggaagatgaagagtcattagaatcaataagagcagctgtaaaaaacaaagtaaaaaagcacaagaaaaaagaaccatctttggagagtggggtccattcatttgaggaaggaagtgagttatcaaaaggaaccacgaggaaggaaagaaaggcagccagattaagtaaagaagcattaaaacaactgcatagtgagactcagcgccttattcgagagtctgcactgaaccttccatatcatatgcctgagaataaaaccattcatgatttcttcaaacgtaaaccccggcccacttgccacggaaatgccatggcactattgaagtcatctaaatatcagtcaagccatcacaaagaaatcatagacactgcaaatactactgaaatgaacagtgatcaccatagtaaaggttctgagcagacaacaggtgcagaaaatgaagtggaaactaatgcactccctgtagtttcaaaggaaacccagatcattactggatcagatgagtcttgcaggaaggatttggtaaaaaatgaagagctagaaattcaggagaaacagaagcagagtgacattagaccttcacctggggacagctcagtgttgcaacaggaatccaacttcctcgggaacaatcacagtgaggaatgtcaggttggagggcttgtagcatttgaacctcatgccctggagggtgaaggcccccaaaatccagaagaaacagatgagaaagtggaagagcctgagcagcaaaataaatcatcagcagttgggccacctgaaaaagtgagacggtttactctggatagacttaagcaactgggagtagatgtttccattaaaccacggctaggtgctgatgaagattcctttgtgatacttgaacctgaaaccaacagagaactggaagccttgaagcagcgtttctggaagcatgctaatccagcagccaaacccagggctggtcagacagtgaatgtgaacgtcatagtgaaagacatgggcactgatggaaaggaagagctaaaagcagatgtggtacctgtgactttagcacctaagaagttggatggagcaagccacacaaaaccaggtgaaaagcttcaggtgttaaaagctaaactgcaagaagcaatgaaactccgaaggtttgaggagcgccagaagcgccaagcactgtttaaattagataatgaagatgggtttgaggaagaggaggaggaagaggaagaaatgacagatgagtctgaggaagatggagaagagaagaaaaaaaaaaaaaaaaaaaaaaagaac

SEQ ID NO: 338654 - DNA, 1977 bp, Artificial Sequence
  derived and/or modified sequence
atgaccggcgaggtgggcagcgaggtgcacctggagatcaacgaccccaacgtgatcagccaggaggaggccgacagccccagcgacagcggccagggcagctacgagaccatcggccccctgagcgagggcgacagcgacgaggagatcttcgtgagcaagaagctgaagaacagaaaggtgctgcaggacagcgacagcgagaccgaggacaccaacgccagccccgagaagaccacctacgacagcgccgaggaggagaacaaggagaacctgtacgccggcaagaacaccaagatcaagagaatctacaagaccgtggccgacagcgacgagagctacatggagaagagcctgtaccaggagaacctggaggcccaggtgaagccctgcctggagctgagcctgcagagcggcaacagcaccgacttcaccaccgacagaaagagcagcaagaagcacatccacgacaaggagggcaccgccggcaaggccaaggtgaagagcaagagaagactggagaaggaggagagaaagatggagaagatcagacagctgaagaagaaggagaccaagaaccaggaggacgacgtggagcagcccttcaacgacagcggctgcctgctggtggacaaggacctgttcgagaccggcctggaggacgagaacaacagccccctggaggacgaggagagcctggagagcatcagagccgccgtgaagaacaaggtgaagaagcacaagaagaaggagcccagcctggagagcggcgtgcacagcttcgaggagggcagcgagctgagcaagggcaccaccagaaaggagagaaaggccgccagactgagcaaggaggccctgaagcagctgcacagcgagacccagagactgatcagagagagcgccctgaacctgccctaccacatgcccgagaacaagaccatccacgacttcttcaagagaaagcccagacccacctgccacggcaacgccatggccctgctgaagagcagcaagtaccagagcagccaccacaaggagatcatcgacaccgccaacaccaccgagatgaacagcgaccaccacagcaagggcagcgagcagaccaccggcgccgagaacgaggtggagaccaacgccctgcccgtggtgagcaaggagacccagatcatcaccggcagcgacgagagctgcagaaaggacctggtgaagaacgaggagctggagatccaggagaagcagaagcagagcgacatcagacccagccccggcgacagcagcgtgctgcagcaggagagcaacttcctgggcaacaaccacagcgaggagtgccaggtgggcggcctggtggccttcgagccccacgccctggagggcgagggcccccagaaccccgaggagaccgacgagaaggtggaggagcccgagcagcagaacaagagcagcgccgtgggcccccccgagaaggtgagaagattcaccctggacagactgaagcagctgggcgtggacgtgagcatcaagcccagactgggcgccgacgaggacagcttcgtgatcctggagcccgagaccaacagagagctggaggccctgaagcagagattctggaagcacgccaaccccgccgccaagcccagagccggccagaccgtgaacgtgaacgtgatcgtgaaggacatgggcaccgacggcaaggaggagctgaaggccgacgtggtgcccgtgaccctggcccccaagaagctggacggcgccagccacaccaagcccggcgagaagctgcaggtgctgaaggccaagctgcaggaggccatgaagctgagaagattcgaggagagacagaagagacaggccctgttcaagctggacaacgaggacggcttcgaggaggaggaggaggaggaggaggagatgaccgacgagagcgaggaggacggcgaggagaagaagaagaagaagaagaagaagaagaactag

SEQ ID NO: 338655 - DNA, 1485 bp, Artificial Sequence
  derived and/or modified sequence
atgcctcgggtttatatcggtcgcttgtcttaccaagctcgggaaagagatgtcgagcggttcttcaaaggctatggtaagatcctcgaggtcgatttgaaaaatggctacggtttcgtggagtttgacgatttacgggacgccgatgatgcagtgtacgagctcaacggcaaggacttgtgcggcgaaagggtcatcgtcgaacacgccagggggccccgacgggatggctcctacggctccggtcgcagtgggtacggctatcgacggagtggaagggataagtacggccctcctacccggactgaatatagactgatagtggaaaatctgagcagcagatgttcatggcaagatctcaaagattatatgcggcaggctggggaagtcacgtatgcagacgcacacaaagggcggaagaacgaaggagtcatcgaatttgtgtcatactccgacatgaaacgggccttggaaaaactggacggcactgaagtgaacggcaggaagatccgactggtcgaagataagccagggagccgcagaaggcgatcatattctcgcagtcgctctcactcgcgctcgcgctcccgtagtcgtcacagtaggaagagcagatctcggtcaggctcttcaaagtcttcacatagtaaatcccggtctagaagccgttccgggtctcggagcaggagcaaatcgaggtcgcgtagtcagtcccgttccaggtctaagaaggagaaatctaggtcaccaagcaaggagaaatctcggtcccggagccactcagccggcaagtcccggagcaagtcaaaggatcaggcagaagagaaaatccagaacaatgataatgtgggaaaacccaagtcacggtcaccgagtagacataagagcaagagtaagtcacggagccggtcccaggagaggagagtggaggaggaaaaaaggggaagcgtgtctcggggacggtcacaggagaaatcactgcggcagtctagatctcgatcaagatctaagggaggcagccggagtcgatcaagaagtaggagtaagtctaaggataaacggaaagggaggaagaggagcagggaagaatcccgcagccgctcaagaagcaggtctaaatccgaaaggagcaggaagcgcggcagcaagcgcgactcaaaagccggcagcagcaaaaaaaaaaaaaaggaagataccgatcgctcacagtctcgaagtccttctcgttccgtgagcaaggagcgcgagcatgctaagtctgaatcctcgcaacgggaagggcgcggagagagtgagaacgctggaaccaaccaggagactaggtctaggtcccgctcaaactctaagagcaagcccaacctgccaagtgaatctcgcagtaggtctaagtccgcgagtaagaccagaagcagaagtaagagtagatcccgaagcgccagccgatcaccaagcagatccaggagtagaagccacagtaggtcctag

SEQ ID NO: 338656 - DNA, 1221 bp, Artificial Sequence
  derived and/or modified sequence
atgcccagagtctacatcgggaggctgagttatcaagcacgggagagggatgttgagagatttttcaagggttacggtaaaatactggaggtcgacctgaaaaacggatacgggttcgtcgagttcgacgacttgagggatgccgatgacgcagtatacgagctgaacggcaaggatctttgcggtgagagagtgattgtcgaacacgcgagaggaccgcggcgcgacgggtcttacggaagcgggcgctctgggtatggataccgacggtctgggcgtgacaagtacggaccgccaaccaggaccgaatatcggctgatcgttgagaatctgagcagccggtgctcatggcaggatctgaaggattatatgcggcaagcaggggaggtgacatatgcggatgcccataagggtaggaagaatgaaggtgtgatcgaatttgtatcctacagtgacatgaagcgggccttggaaaagttggatggcactgaggtgaatggcagaaagatcaggctcgtcgaggataaaccaggctccaggagacgtcggtcctactcacggagtaggtcacacagccggtcccgctcccgctctcgtcattcacgcaaatcgaggtcccgtagcggctcatctaagtcatcccattccaaaagtcgcagtaggtccagaagtggcagtagatcaaggagtaaaagcagaagcagatcacagtcaaggtcacgcagcaagaaggaaaaatcacgttccccctctaaggaaaaatcccggagtcgatcccactccgccgggaagtcacggtctaaatccaaagatcaggccgaagagaaaatacagaataacgacaacgttgggaagccaaaatccagatccccatcaaggcataagtctaagagtaaatctaggagcaggtcgcaggagagaagggtggaggaggagaagcgtggttccgtgtctcggggtaggtctcaagagaaatccctccggcagtccaggtcccgctcacgcagcaagggcggctcgagaagtcgaagtcggtcacgtagcaaaagcaaggacaagcgcaagggacgaaaaaggtcccgcgaggaaagcaggtcccgaagcagaagcagaagtaaaagcgagcgctccaggaaacggggcagtctggcatttcgccctggcctgtcctaccgcgagctgtcaaatctggatgggtccaaggccggcatgaccacctag

SEQ ID NO: 338657 - DNA, 477 bp, Artificial Sequence
  derived and/or modified sequence
atgcctagggtgtacatcggaaggctgtcatatcaggccagggagcgagacgtagagagattcttcaagggttacgggaaaatcctggaagtggaccttaagaacggatatggattcgtcgaattcgacgacctccgggatgcggatgatgctgtctacgagctaaacggaaaggacctgtgtggggagagagtgatcgtggaacacgcccgggggcccagacgagatggttcatacggaagcggccgcagtggctatggctatcgacgcagtgggagggacaagtacggtcctccgactaggactgagtataggttgatcgtggagaatctttccagcagatgcagctggcaagatcttaaggttgggctgccactgcccgagcaggagcccgaaccggaacccgaatcggagccagaacaagaacgagagaaacaggagccccagcagggtaaagagcctcaaccccagccctag

SEQ ID NO: 338658 - DNA, 1485 bp, Artificial Sequence
  derived and/or modified sequence
atgccccgggtgtacatcggccgcctgagctaccaggcccgggagagagatgtggagcgcttcttcaagggctacggcaagatcctggaggtggacctgaagaatggctacggctttgtggagtttgatgacctgagagatgctgatgatgctgtgtatgagctgaatggcaaggacctgtgtggggagagggtcatcgtggagcacgcccggggccccaggagagatggcagctatggcagcggccgcagcggctacggctacagaagaagtggccgggacaagtatggcccccccaccaggacagagtaccgcctgattgtggagaacctgagcagccgctgctcctggcaggacctgaaggactacatgaggcaggccggggaggtgacctatgcagatgcccacaagggcaggaagaatgaaggagtgattgaatttgtgtcctacagcgacatgaagagggccctggagaagctggatggaacagaggtgaatggaaggaagatccggctggtggaggacaagccaggcagcagaagaagaagaagctacagccgcagccgcagccacagccgcagccgcagccgcagccgccacagcaggaagagccgcagccgcagcggcagcagcaagagcagccacagcaagagccgcagccgcagccgcagcggcagccgcagccgcagcaagagccgcagccgcagccagagccgcagccgcagcaagaaggagaagagccgcagccccagcaaggagaagagccgcagccgcagccacagcgctgggaagagccgcagcaagagcaaggaccaggccgaggagaagatccagaacaatgacaacgtgggcaagcccaagagccgcagccccagccgccacaagagcaagagcaagagccgcagccgcagccaggagaggagagtggaggaggagaagaggggctctgtgtcccggggccgcagccaggagaagagcctgcggcagagccgcagccgcagccgcagcaaaggaggcagccgcagccgcagccgcagccgcagcaagagcaaggacaagaggaaaggaaggaagaggagccgggaggagagccgcagccgcagccgcagccgcagcaagtctgagaggagcaggaagaggggcagcaagagggacagcaaggccggcagcagcaagaagaagaagaaggaggacacagacaggagccagagccgcagccccagccgctctgtgtccaaggagcgggagcacgccaagtctgagagcagccagcgggagggccgcggggagagtgaaaatgccggcaccaaccaggagaccaggagccgcagccgcagcaacagcaagagcaagcccaacctgcccagcgagagccgcagccgcagcaagagcgccagcaagaccaggagccgcagcaagagccgcagccgcagcgccagccgcagccccagccgcagccgcagccgcagccacagccgctcctag

SEQ ID NO: 338659 - DNA, 1221 bp, Artificial Sequence
  derived and/or modified sequence
atgccccgggtgtacatcggccgcctgagctaccaggcccgggagagagatgtggagcgcttcttcaagggctacggcaagatcctggaggtggacctgaagaatggctacggctttgtggagtttgatgacctgagagatgctgatgatgctgtgtatgagctgaatggcaaggacctgtgtggggagagggtcatcgtggagcacgcccggggccccaggagagatggcagctatggcagcggccgcagcggctacggctacagaagaagtggccgggacaagtatggcccccccaccaggacagagtaccgcctgattgtggagaacctgagcagccgctgctcctggcaggacctgaaggactacatgaggcaggccggggaggtgacctatgcagatgcccacaagggcaggaagaatgaaggagtgattgaatttgtgtcctacagcgacatgaagagggccctggagaagctggatggaacagaggtgaatggaaggaagatccggctggtggaggacaagccaggcagcagaagaagaagaagctacagccgcagccgcagccacagccgcagccgcagccgcagccgccacagcaggaagagccgcagccgcagcggcagcagcaagagcagccacagcaagagccgcagccgcagccgcagcggcagccgcagccgcagcaagagccgcagccgcagccagagccgcagccgcagcaagaaggagaagagccgcagccccagcaaggagaagagccgcagccgcagccacagcgctgggaagagccgcagcaagagcaaggaccaggccgaggagaagatccagaacaatgacaacgtgggcaagcccaagagccgcagccccagccgccacaagagcaagagcaagagccgcagccgcagccaggagaggagagtggaggaggagaagaggggctctgtgtcccggggccgcagccaggagaagagcctgcggcagagccgcagccgcagccgcagcaaaggaggcagccgcagccgcagccgcagccgcagcaagagcaaggacaagaggaaaggaaggaagaggagccgggaggagagccgcagccgcagccgcagccgcagcaagtctgagaggagcaggaagaggggcagcctggccttccggcccggcctgagctaccgggagctgagcaacctggatggcagcaaggccggcatgaccacctag

SEQ ID NO: 338660 - DNA, 477 bp, Artificial Sequence
  derived and/or modified sequence
atgccccgggtgtacatcggccgcctgagctaccaggcccgggagagagatgtggagcgcttcttcaagggctacggcaagatcctggaggtggacctgaagaatggctacggctttgtggagtttgatgacctgagagatgctgatgatgctgtgtatgagctgaatggcaaggacctgtgtggggagagggtcatcgtggagcacgcccggggccccaggagagatggcagctatggcagcggccgcagcggctacggctacagaagaagtggccgggacaagtatggcccccccaccaggacagagtaccgcctgattgtggagaacctgagcagccgctgctcctggcaggacctgaaggtgggcctgcccctgcctgagcaggagcctgagcctgagcctgagagcgagcctgagcaggagcgggagaagcaggagccccagcagggcaaggagccccagccccagccctag

SEQ ID NO: 338661 - DNA, 1485 bp, Artificial Sequence
  derived and/or modified sequence
atgccccgggtgtacatcggccggctgagctaccaggcccgggagcgggatgttgagcggttcttcaagggttacggcaaaatcctcgaagtggatctgaagaatggatatggattcgtggagtttgatgatctccgagatgcagatgatgcggtgtacgaactgaacggcaaggatctctgcggcgagcgcgtgattgtcgaacatgcacgtgggcccaggcgggatggatcttatggatcagggagatcgggctacggctatagaaggagcggtcgtgacaagtacggaccaccgactcggacagaatatagactgattgtcgagaacctgtccagtcgctgttcgtggcaggatctaaaagactatatgaggcaggctggcgaggttacatacgctgatgcacataaaggccggaaaaatgagggagtgatagaattcgtgagttactccgacatgaaaagagcactggaaaagctagatggcactgaggtcaatggaaggaagatccgactagtagaggataaaccgggctctaggcgtaggcgatcatacagtaggagccggtctcactctcgcagtagaagcagaagcaggcacagccgtaaaagccgttcgcgctcaggctccagcaaatccagccacagtaagtccaggtctcgttcacgaagcgggtctaggagcaggtcaaagtcaaggtcacggtctcaaagtaggagtagaagcaagaaagaaaagagtaggtctccatcaaaagagaagtcaaggagtcggagccactcagcggggaagagccgctccaaaagcaaggaccaggccgaagagaaaattcaaaataacgacaacgtgggaaaaccgaaaagtaggtctcccagccgccacaaatctaagtctaagtctcggtcccggtcccaggagagacgcgtggaggaagagaagcgggggtcagttagccggggcagatctcaggagaagtccttgaggcagagcaggagtaggtccagaagcaaaggtggctctcggagcaggtcccgttcccgcagcaagtccaaggacaaaaggaagggaaggaaaagatcccgcgaagaatccaggtcccgatctcgctcccgctccaagagcgagaggtctaggaagagggggagtaagcgcgattctaaagccgggagcagcaagaagaagaaaaaggaagacaccgaccgatcccaaagcagaagtccatctaggagcgtgagtaaggagagagagcatgcaaagtccgagtctagtcagcgcgaggggaggggcgaatctgagaacgcagggacaaaccaggagactagatcacgctcgcgtagtaacagcaagtcgaagcctaacttgccttccgagtccagaagccggagtaaatcagcgtctaaaacacggagtcgctccaagtcccgaagccgctcagcctctagaagccctagtcggagtcgctcacggagccactcaagatcctag

SEQ ID NO: 338662 - DNA, 1221 bp, Artificial Sequence
  derived and/or modified sequence
atgccccgggtgtacatcggccggctgagctaccaggcccgggagcgtgacgtagaaagattttttaaaggctacggcaaaatcttagaagtggatctgaaaaacggatacggcttcgtggagttcgacgacctaagggacgcagacgacgctgtctacgaactgaatggcaaggatttgtgtggggaaagggtgatcgtagagcatgctcgtggccctcgcagggatggcagctacggctctggacgctccgggtatgggtaccgcagatcagggcgggataagtatggaccacccacccggaccgaatatcgccttatagtagaaaatttatcctctcgctgctcttggcaggacctgaaggactacatgcgacaagcaggtgaggtgacttacgccgacgcccataaggggagaaagaatgaaggtgtgattgagttcgtttcatattcagatatgaaaagagccctggagaagctggatgggaccgaggttaacggacgtaaaataaggttggtcgaagacaagccaggatccagaagaaggcgcagttattcccgttcaagatctcatagtcgaagccgatcccggtcccgccattctcgtaagtccaggtctcggtcaggctcttccaagtccagccactcaaaatcacgcagtaggtccagatctggctctcgtagtcgcagcaaatctcggagcagaagccagtcacggtccagatccaaaaaagagaaaagcagatcgccaagcaaggaaaaaagtcgtagcagatcacactctgcggggaaatcccgatctaaatccaaggatcaggccgaggagaagatccagaacaatgacaacgtcggaaaacctaagtcacgctcgccttctcgacataaaagcaaaagtaaatcaaggagccggagccaggagagaagagtagaagaggagaaacgtggttccgttagtcgggggcgctctcaggagaagtctcttcggcagtccagaagccggagcaggagtaagggcggatcaagatcaaggagccgatcccgctcaaaatcgaaggacaagcgaaaagggcgcaagaggtccagagaggaaagccgatctcgctccaggtcacgaagtaagtccgaaaggtcacgtaagcgtgggagtctggcttttcggcccggtctgagttatcgcgagctctctaaccttgatggctctaaggccggcatgactacctag

SEQ ID NO: 338663 - DNA, 477 bp, Artificial Sequence
  derived and/or modified sequence
atgccccgggtgtacatcggccggctgagctaccaggcccgggagagagatgtggaacggttctttaagggctatggaaagatcctcgaagtcgacttgaaaaatggatacggcttcgtggagttcgacgacctcagagacgcagacgacgctgtctatgaacttaacggaaaagacttatgtggggagcgggtcatcgtggagcatgcaagagggcctaggagggacggctcctacggttctgggcgctcaggatacggatacagacgctctggtagagacaaatacggcccccccacaaggaccgagtaccgccttatcgtggagaacctctcatcccgatgttcttggcaagatctgaaggtgggactgcctctgccggagcaggagcctgagccggaaccagagagcgagcctgaacaggaaagagaaaaacaagagcctcagcagggtaaagaacctcagccccagccctag

SEQ ID NO: 338664 - DNA, 1485 bp, Artificial Sequence
  derived and/or modified sequence
atgccacgcgtatatatcggtagactgtcgtaccaggcacgggaacgtgatgttgagcgattctttaagggatatgggaagattttagaagttgatctcaagaacggctacggatttgtcgagttcgatgacctcagagacgccgatgatgccgtctatgaactgaacggcaaggatctatgcggcgagcgtgtgattgttgaacacgccagagggcctaggagagatggctcatacgggtcgggccgatctggctatggttacaggagaagcggacgggacaaatatggccctcccacccggaccgagtacaggctcatcgtcgagaatctgagcagtaggtgttcctggcaagacctcaaggattacatgcggcaagcaggcgaggtgacttacgccgatgcccacaagggaagaaagaatgagggcgtaatcgagttcgtgagttacagtgacatgaaaagagctctggaaaaacttgatggtaccgaggtgaatggcaggaagatcagactcgtcgaggacaagcctgggtcacgcagaagacggagctattctcgttcccgttcgcacagcaggtctcgaagccggtccagacatagtagaaagtcccgttctcgtagcggtagctctaaatcttctcacagtaagtcgcgttccagatctcggagcggctcaagatcccgatcaaaatcgaggagtcgctcacagtcgaggtctagatctaagaaagaaaagagtcgcagtccatcaaaggaaaagagccgaagtaggagtcactctgcgggaaaaagcaggtcaaagtctaaggatcaggcagaggagaaaatacagaataacgacaacgtaggaaaaccaaagtccagatcaccttcacggcacaagtccaagagcaagtcccggagtcggtcacaggaacgcagagtagaggaggagaaaaggggttccgtaagcagagggaggtcccaggagaaatccctgaggcagtcacgctcgcgctccagaagcaagggcggatcccggagtcgcagtcgctcaaggtccaagagcaaggacaagcgcaagggccgtaagcgatctagagaggagtcacgctctcgttcccgttctcgcagcaagagtgagcggtcccgaaagagggggagcaagagggattccaaagccggatcctctaaaaaaaaaaaaaaagaagataccgatagaagtcagagcaggtccccttcacgctccgttagtaaggagcgggaacacgccaaatcagagagttctcaacgcgaaggacggggagagagcgagaatgcgggtactaaccaagaaacaaggtcaaggagccgtagcaattcaaagtctaaacccaatctaccatccgagtcccgatccaggtccaaaagtgcaagcaagactcgcagccgaagcaagtcccggagccgaagtgcgtcccgctcccccagtagatctcggtctcggagtcacagcagatcctag

SEQ ID NO: 338665 - DNA, 1221 bp, Artificial Sequence
  derived and/or modified sequence
atgccacgcgtgtatattggaaggctttcctatcaagctagggagcgcgatgttgagaggttttttaaaggatacggcaaaattcttgaagtcgacttaaagaacggctacggcttcgtagaatttgatgacctgcgcgacgcggatgacgcagtgtacgaattaaatggcaaagacttatgcggagagagggtgatagttgaacatgccaggggccctcggagggacggctcttacggcagcgggaggagtgggtacggatacagacggagtggccgagataaatacggcccacccacccggacagagtacagactgatcgtagaaaatctgtcctctaggtgcagctggcaggacctgaaggactacatgcggcaggccggtgaggtgacctacgcagacgcccataagggcagaaagaacgagggagtcatcgaatttgtcagttattctgacatgaagcgagcactggaaaaactggatggcactgaggtcaatggcaggaaaattagactcgttgaggataaacctggcagccgtcgtaggagatcttattcccggagtagaagccatagcagaagccgcagccgctcaaggcacagccgcaagagcagaagtcgtagcggttcctcaaaaagctcacattcaaaatctcggtctaggtctcggtctggcagcagatcaagatcaaaatctaggtctaggagccagagccggtcacgaagtaaaaaggagaaaagccggtcaccgagcaaggaaaagagccgctctagatcccactctgccggtaaatctcgcagcaagagcaaagaccaagcagaggaaaaaattcagaataacgacaacgtcggaaagcccaagtcacggagccctagtagacacaaaagcaagtcgaaaagccgaagcagaagccaggaacggagggtggaagaggaaaaaaggggtagcgtatcccgtggcagatcccaggaaaagtccctgcggcagagcaggagcagatctaggagtaagggcggaagtagatctcgatcccgctctcgttcaaagagcaaagataaaaggaaagggaggaaacgttctcgagaagaatctcggtcgcggtcaagatctcgcagcaagtcagagcgctcgagaaagagaggttccctcgcttttaggcccggtctgagctacagggaattatctaatctagatgggtccaaagcagggatgaccacatag

SEQ ID NO: 338666 - DNA, 477 bp, Artificial Sequence
  derived and/or modified sequence
atgcccagagtctatattggcaggctgagctatcaagcaagagagcgcgatgtggagagattctttaagggctatgggaagatccttgaggtggacttgaaaaacggctacggcttcgttgaatttgacgacctgcgggacgcagatgacgctgtatatgaactgaatggtaaggatctgtgcggagagcgcgtgatcgtggagcacgcgaggggaccacgcagggatggatcatatggcagcgggagatcaggctacgggtataggcgctctggacgggataaatacgggcctccaactcggacggagtacaggctgattgtggagaatctaagcagccgctgtagctggcaggacctcaaggtaggactacccctccctgaacaggaaccggagcccgagcctgaaagcgagcctgaacaggaaagagagaagcaagagccacagcagggcaaagagccccagccacagccttag

SEQ ID NO: 338667 - DNA, 2387 bp, Artificial Sequence
  derived and/or modified sequence
gccgagcgggaagcgaacgcgcgctctctccggttaccttccgcctcggggaagggcgggggaagtggaagcgcgcgctcgcgagctgcgtgctcgcgtacgtcgccggggttcggctgcgtccgtcccgccgcccgcccgttgccgccgccgccgctgccgccgtgctctcgctttgcccgccgccgcctaaggggggctggggccggggccagccatcactgccgttgccgggatgccgcgggtgtacatcggccgcctgagctaccaggcccgggagcgcgatgtggagcgcttctttaagggctacgggaagatcctggaggtggatctgaagaacggatatggttttgtggagtttgatgatctgcgtgatgcagatgatgctgtttatgaactgaatggcaaagacctttgtggtgagcgagtaattgttgagcatgcccgcggcccacggcgagatggcagttacggttctggacgcagtggatatggttatagaagaagtggccgagataaatatggccctcctactcgcacagagtacagacttattgtggagaatttgtcaagtcggtgcagctggcaagacctaaaggattatatgcgtcaggcaggagaagtgacttatgcagatgctcacaagggacgcaaaaatgaaggggtgattgaatttgtatcttattctgatatgaaaagagctttggaaaagttggatggaactgaagtcaatgggagaaaaatcagattagttgaagacaagccaggttccagacgacgccggtcctactccagaagccggagtcattcaaggtctcgctctcgaagcagacattcccgtaagagcagaagccgaagtggcagcagcaaaagcagtcattctaagagtagatctcggtccaggtcgggctcccgctcccggagcaagagccggagccggagccagagtcggagccggagcaagaaagagaaaagcaggagccccagcaaggaaaagagccgcagccgcagccatagcgctggcaagagccgcagcaagagcaaagaccaagctgaagagaagatccaaaacaatgacaatgtcgggaaacccaagagccggagtcctagcaggcataaaagtaagagcaaaagtcggagcaggagtcaggagaggagagtggaggaggagaagcgagggagtgtgagcaggggcaggagccaggagaagagcctccgccagagtcggagccggagcaggagcaaagggggcagcaggagccggagcaggagccgcagcaagagcaaggacaagaggaagggcaggaagagaagcagagaggagagccgcagtcgcagtcgcagccgcagcaagagtgagaggagcagaaagcgaggcagcaagcgagacagcaaggcgggcagcagcaagaagaagaagaaggaagacactgaccgctcccagtccagatctccatcccgctccgtgtcaaaggagcgggaacatgccaagtctgaatccagccagagggaaggtcgaggagagagtgagaatgctggcaccaatcaggagacccggtccaggtcgagatccaattccaaatcgaaaccaaaccttccatcagaatcacgctccagatcaaagtcagcttcaaaaacccgatctcggtccaagtctagatccaggtctgcttccagatcgccctcccgatctagatctaggtcccactcaaggtcctaactggctatggccacagctggaactacccgagaagtcttttgtacatgtttggtagccgtagcacaagtgattggagtagaacatgtcactgctgtacatttttaactcccctaatggtgtgtctataattgttaaatctaagtgcttcctctcagtaaagcctcctggcaccaggccttcctgctcgactgaaaaaaattttctctttgaaaatccccttttactcatggcccacagtagaatatccaaaacgccttggctttcaggcctggcctttcctacagggagctcagtaacctggacggctctaaggctggaatgaccacataggtaggtatggtgagttcaaccatttttgctcttgaattgatgcccttcgatgtatgccatttagtgaaagtgctaagtcttaagtttcctaccactttggtttcatatttttggacttaacaaagttgtgaatagcacagtcgaggaaaattgatacctgcagtaacccataggaaataaactgtagagttccatattctggtattgtgattatattgttttatattaaaaaagaaaagaaaagaattttttttaattttatttttccccgtcttgcaaagtatagtgacccctgtttccattaaatttgaataaagactatttttgcttgacaaaa

SEQ ID NO: 338668 - DNA, 1701 bp, Artificial Sequence
  derived and/or modified sequence
tgcgtgctcgcgtacgtcgccggggttcggctgcgtccgtcccgccgcccgcccgttgccgccgccgccgctgccgccgtgctctcgctttgcccgccgccgcctaaggggggctggggccggggccagccatcactgccgttgccgggatgccgcgggtgtacatcggccgcctgagctaccaggcccgggagcgcgatgtggagcgcttctttaagggctacgggaagatcctggaggtggatctgaagaacggatatggttttgtggagtttgatgatctgcgtgatgcagatgatgctgtttatgaactgaatggcaaagacctttgtggtgagcgagtaattgttgagcatgcccgcggcccacggcgagatggcagttacggttctggacgcagtggatatggttatagaagaagtggccgagataaatatggccctcctactcgcacagagtacagacttattgtggagaatttgtcaagtcggtgcagctggcaagacctaaaggattatatgcgtcaggcaggagaagtgacttatgcagatgctcacaagggacgcaaaaatgaaggggtgattgaatttgtatcttattctgatatgaaaagagctttggaaaagttggatggaactgaagtcaatgggagaaaaatcagattagttgaagacaagccaggttccagacgacgccggtcctactccagaagccggagtcattcaaggtctcgctctcgaagcagacattcccgtaagagcagaagccgaagtggcagcagcaaaagcagtcattctaagagtagatctcggtccaggtcgggctcccgctcccggagcaagagccggagccggagccagagtcggagccggagcaagaaagagaaaagcaggagccccagcaaggaaaagagccgcagccgcagccatagcgctggcaagagccgcagcaagagcaaagaccaagctgaagagaagatccaaaacaatgacaatgtcgggaaacccaagagccggagtcctagcaggcataaaagtaagagcaaaagtcggagcaggagtcaggagaggagagtggaggaggagaagcgagggagtgtgagcaggggcaggagccaggagaagagcctccgccagagtcggagccggagcaggagcaaagggggcagcaggagccggagcaggagccgcagcaagagcaaggacaagaggaagggcaggaagagaagcagagaggagagccgcagtcgcagtcgcagccgcagcaagagtgagaggagcagaaagcgaggcagcttggctttcaggcctggcctttcctacagggagctcagtaacctggacggctctaaggctggaatgaccacataggtaggtatggtgagttcaaccatttttgctcttgaattgatgcccttcgatgtatgccatttagtgaaagtgctaagtcttaagtttcctaccactttggtttcatatttttggacttaacaaagttgtgaatagcacagtcgaggaaaattgatacctgcagtaacccataggaaataaactgtagagttccatattctggtattgtgattatattgttttatattaaaaaagaaaagaaaagaattttttttaattttatttttccccgtcttgcaaagtatagtgacccctgtttccattaaatttgaataaagactatttttgcttg

SEQ ID NO: 338669 - DNA, 1591 bp, Artificial Sequence
  derived and/or modified sequence
gtgctcgcgtacgtcgccggggttcggctgcgtccgtcccgccgcccgcccgttgccgccgccgccgctgccgccgtgctctcgctttgcccgccgccgcctaaggggggctggggccggggccagccatcactgccgttgccgggatgccgcgggtgtacatcggccgcctgagctaccaggcccgggagcgcgatgtggagcgcttctttaagggctacgggaagatcctggaggtggatctgaagaacggatatggttttgtggagtttgatgatctgcgtgatgcagatgatgctgtttatgaactgaatggcaaagacctttgtggtgagcgagtaattgttgagcatgcccgcggcccacggcgagatggcagttacggttctggacgcagtggatatggttatagaagaagtggccgagataaatatggccctcctactcgcacagagtacagacttattgtggagaatttgtcaagtcggtgcagctggcaagacctaaaggtcgggctcccgctcccggagcaagagccggagccggagccagagtcggagccggagcaagaaagagaaaagcaggagccccagcaaggaaaagagccgcagccgcagccatagcgctggcaagagccgcagcaagagcaaagaccaagctgaagagaagatccaaaacaatgacaatgtcgggaaacccaagagccggagtcctagcaggcataaaagtaagagcaaaagtcggagcaggagtcaggagaggagagtggaggaggagaagcgagggagtgtgagcaggggcaggagccaggagaagagcctccgccagagtcggagccggagcaggagcaaagggggcagcaggagccggagcaggagccgcagcaagagcaaggacaagaggaagggcaggaagagaagcagagaggagagccgcagtcgcagtcgcagccgcagcaagagtgagaggagcagaaagcgaggcagcaagcgagacagcaaggcgggcagcagcaagaagaagaagaaggaagacactgaccgctcccagtccagatctccatcccgctccgtgtcaaaggagcgggaacatgccaagtctgaatccagccagagggaaggtcgaggagagagtgagaatgctggcaccaatcaggagacccggtccaggtcgagatccaattccaaatcgaaaccaaaccttccatcagaatcacgctccagatcaaagtcagcttcaaaaacccgatctcggtccaagtctagatccaggtctgcttccagatcgccctcccgatctagatctaggtcccactcaaggtcctaactggctatggccacagctggaactacccgagaagtcttttgtacatgtttggtagccgtagcacaagtgattggagtagaacatgtcactgctgtacatttttaactcccctaatggtgtgtctataattgttaaatctaagtgcttcctctcagtaaagcctcctggcaccaggccttcctgctcgactgaaaaaaattttctctttgaaaatccccttttactcatggcccacagtagaatatccaaaacgccttggctttca

SEQ ID NO: 338670 - DNA, 766 bp, Artificial Sequence
  derived and/or modified sequence
ttacacacaaagaaaaagaaaaaggaaaagaaaaagtaagagaaaaagaaaaacctgaaaagaaagcaactcacaaggaaaaaattgagaaaaaagaaaaaccagaaacaaagacactggcgaaagaacagaagaaagctaagactgcagaaaagagtgaagaaaagactaaaaaggaagtgaaaggtggaaaacaggagaaagtgaagcaaacagctgcaaaagtaaaagaagtacagaaaacaccatcaaaacccaaagaaaaggaggacaaagagaaagcagctgtgtcaaagcatgaacagaaagggttcccaggtcctgggatcagaaactccagctattactgccagtacatcaaagggcaaatcaatgcatggaatgacctgaggactagcctccttcccattccctacctctcctgtgggaaaatgtgctccaatttcaacaactaaaatacatctaaatttttggaactttatgagttttggcctgcccttatttaggtattaatgaaaaagattatatttttatatcttcttcaataactatatttattttttaaagacctaacagaatttcataataaaatggattcctctaaaaatgctgttactactctaaaaagaacgagatttacaaaaatccttagaggtgtatctgtttagtaacaagctttgttatttcatatgtttgatatgcataatttggagcaattaagaatgtaacatgttgcttaaattcaataaactctcttggtcctaaa

SEQ ID NO: 338671 - DNA, 1485 bp, Artificial Sequence
  derived and/or modified sequence
atgcccagagtgtacatcggcagactgagctaccaggccagagagagagacgtggagagattcttcaagggctacggcaagatcctggaggtggacctgaagaacggctacggcttcgtggagttcgacgacctgagagacgccgacgacgccgtgtacgagctgaacggcaaggacctgtgcggcgagagagtgatcgtggagcacgccagaggccccagaagagacggcagctacggcagcggcagaagcggctacggctacagaagaagcggcagagacaagtacggcccccccaccagaaccgagtacagactgatcgtggagaacctgagcagcagatgcagctggcaggacctgaaggactacatgagacaggccggcgaggtgacctacgccgacgcccacaagggcagaaagaacgagggcgtgatcgagttcgtgagctacagcgacatgaagagagccctggagaagctggacggcaccgaggtgaacggcagaaagatcagactggtggaggacaagcccggcagcagaagaagaagaagctacagcagaagcagaagccacagcagaagcagaagcagaagcagacacagcagaaagagcagaagcagaagcggcagcagcaagagcagccacagcaagagcagaagcagaagcagaagcggcagcagaagcagaagcaagagcagaagcagaagccagagcagaagcagaagcaagaaggagaagagcagaagccccagcaaggagaagagcagaagcagaagccacagcgccggcaagagcagaagcaagagcaaggaccaggccgaggagaagatccagaacaacgacaacgtgggcaagcccaagagcagaagccccagcagacacaagagcaagagcaagagcagaagcagaagccaggagagaagagtggaggaggagaagagaggcagcgtgagcagaggcagaagccaggagaagagcctgagacagagcagaagcagaagcagaagcaagggcggcagcagaagcagaagcagaagcagaagcaagagcaaggacaagagaaagggcagaaagagaagcagagaggagagcagaagcagaagcagaagcagaagcaagagcgagagaagcagaaagagaggcagcaagagagacagcaaggccggcagcagcaagaagaagaagaaggaggacaccgacagaagccagagcagaagccccagcagaagcgtgagcaaggagagagagcacgccaagagcgagagcagccagagagagggcagaggcgagagcgagaacgccggcaccaaccaggagaccagaagcagaagcagaagcaacagcaagagcaagcccaacctgcccagcgagagcagaagcagaagcaagagcgccagcaagaccagaagcagaagcaagagcagaagcagaagcgccagcagaagccccagcagaagcagaagcagaagccacagcagaagctag

SEQ ID NO: 338672 - DNA, 1221 bp, Artificial Sequence
  derived and/or modified sequence
atgcccagagtgtacatcggcagactgagctaccaggccagagagagagacgtggagagattcttcaagggctacggcaagatcctggaggtggacctgaagaacggctacggcttcgtggagttcgacgacctgagagacgccgacgacgccgtgtacgagctgaacggcaaggacctgtgcggcgagagagtgatcgtggagcacgccagaggccccagaagagacggcagctacggcagcggcagaagcggctacggctacagaagaagcggcagagacaagtacggcccccccaccagaaccgagtacagactgatcgtggagaacctgagcagcagatgcagctggcaggacctgaaggactacatgagacaggccggcgaggtgacctacgccgacgcccacaagggcagaaagaacgagggcgtgatcgagttcgtgagctacagcgacatgaagagagccctggagaagctggacggcaccgaggtgaacggcagaaagatcagactggtggaggacaagcccggcagcagaagaagaagaagctacagcagaagcagaagccacagcagaagcagaagcagaagcagacacagcagaaagagcagaagcagaagcggcagcagcaagagcagccacagcaagagcagaagcagaagcagaagcggcagcagaagcagaagcaagagcagaagcagaagccagagcagaagcagaagcaagaaggagaagagcagaagccccagcaaggagaagagcagaagcagaagccacagcgccggcaagagcagaagcaagagcaaggaccaggccgaggagaagatccagaacaacgacaacgtgggcaagcccaagagcagaagccccagcagacacaagagcaagagcaagagcagaagcagaagccaggagagaagagtggaggaggagaagagaggcagcgtgagcagaggcagaagccaggagaagagcctgagacagagcagaagcagaagcagaagcaagggcggcagcagaagcagaagcagaagcagaagcaagagcaaggacaagagaaagggcagaaagagaagcagagaggagagcagaagcagaagcagaagcagaagcaagagcgagagaagcagaaagagaggcagcctggccttcagacccggcctgagctacagagagctgagcaacctggacggcagcaaggccggcatgaccacctag

SEQ ID NO: 338673 - DNA, 477 bp, Artificial Sequence
  derived and/or modified sequence
atgcccagagtgtacatcggcagactgagctaccaggccagagagagagacgtggagagattcttcaagggctacggcaagatcctggaggtggacctgaagaacggctacggcttcgtggagttcgacgacctgagagacgccgacgacgccgtgtacgagctgaacggcaaggacctgtgcggcgagagagtgatcgtggagcacgccagaggccccagaagagacggcagctacggcagcggcagaagcggctacggctacagaagaagcggcagagacaagtacggcccccccaccagaaccgagtacagactgatcgtggagaacctgagcagcagatgcagctggcaggacctgaaggtgggcctgcccctgcccgagcaggagcccgagcccgagcccgagagcgagcccgagcaggagagagagaagcaggagccccagcagggcaaggagccccagccccagccctag

SEQ ID NO: 338674 - protein, 120 aa, Artificial Sequence
  derived and/or modified sequence
  misc_feature (1)..(1): Xaa can be any naturally occurring amino acid
XHETFPKHTFLMNGLIQGVKGLLSFLSAPLIGALSDVWGRKSFLLLTVFFTCAPIPLMKISPWWYFAVISVSGVFAVTFSVVFAYVADITQEHERSMAYGLVCMFILYLLYLLRNALFLR

SEQ ID NO: 338675 - DNA, 363 bp, Artificial Sequence
  derived and/or modified sequence
tgacacgagaccttccccaagcacaccttcctgatgaacggcctgatccagggcgtgaagggcctgctgagcttcctgagcgcccccctgatcggcgccctgagcgacgtgtggggcagaaagagcttcctgctgctgaccgtgttcttcacctgcgcccccatccccctgatgaagatcagcccctggtggtacttcgccgtgatcagcgtgagcggcgtgttcgccgtgaccttcagcgtggtgttcgcctacgtggccgacatcacccaggagcacgagagaagcatggcctacggcctggtgtgcatgttcatcctgtacctgctgtacctgctgagaaacgccctgttcctgagatag

SEQ ID NO: 338676 - DNA, 363 bp, Artificial Sequence
  derived and/or modified sequence
taacatgaaacctttcccaagcatactttcctgatgaacggtctcatacagggagtgaaaggcctgctgtcctttctctcagctcccttaattggggctctaagcgatgtatggggccgtaaaagtttcctgctactgacggtgttttttacatgtgcccccatccccctcatgaaaatcagtccttggtggtatttcgcagtgatctcagtgagcggggtgttcgccgtgactttttcagtagttttcgcttatgtggccgacattacacaggaacacgagagaagcatggcttatggactcgtctgcatgttcatcctgtacctgttgtacttgttacgtaatgctctttttctacggtag

SEQ ID NO: 338677 - DNA, 467 bp, Artificial Sequence
  derived and/or modified sequence
acatgaaacctttcctaaacatacatttctgatgaacggcttaattcaaggagtaaagggtttgttgtcattccttagtgccccgcttattggtgctctttctgatgtttggggccgaaaatccttcttgctgctaacggtgtttttcacatgtgccccaattcctttaatgaagatcagcccatggtggtactttgctgttatctctgtttctggggtttttgcagtgactttttctgtggtatttgcatacgtagcagatataacccaagagcatgaaagaagtatggcttatggactggtatgtatgtttattctataccttttgtatctgctgagaaatgccttgtttttaagataaatattattataaggagtgcaaacctttgcattacaagatttttgcgtaaaatatattttgtaataaaatcattcattagactacatttaaaatttttttgcggtat

SEQ ID NO: 338678 - DNA, 363 bp, Artificial Sequence
  derived and/or modified sequence
tgacatgagaccttccccaagcacaccttcctgatgaatggcctcatccagggcgtgaagggcctgctgtccttcctgagcgcccccctgattggagccctgagtgatgtgtggggcaggaagagcttcctgctgctgactgtgttcttcacctgtgcccccatccccctgatgaagatcagcccctggtggtactttgctgtgatctctgtgtctggagtgtttgctgtgaccttctctgtggtgtttgcctacgtggccgacatcacccaggagcacgagaggtccatggcctacggcctggtgtgcatgttcatcctgtacctgctgtacctgctgagaaatgccctcttcctgaggtag

SEQ ID NO: 338679 - DNA, 363 bp, Artificial Sequence
  derived and/or modified sequence
tgacacgagaccttccccaagcacaccttcctgatgaacggcctgattcagggcgttaaaggactcttgagcttcctaagcgcccccctaatcggggcacttagcgacgtgtgggggaggaagtcttttctgctcttgacagtgtttttcacatgtgcacccatcccgctcatgaagatctccccttggtggtacttcgctgttatctccgtgtctggggtgtttgcagtcacgttctccgtagtgttcgcctatgttgctgatatcactcaagagcatgaacgcagtatggcctacgggctggtttgtatgtttatactctatctgctgtacctgctgcgcaacgccctgtttctaagatag

SEQ ID NO: 338680 - DNA, 363 bp, Artificial Sequence
  derived and/or modified sequence
taacacgaaacctttcccaaacacaccttcctgatgaatggtttaattcagggagtcaaagggcttctgagcttcctatccgcaccacttattggggcactttcggacgtctggggcagaaagagttttctgctgctgaccgttttttttacgtgtgcaccgattccattgatgaagattagtccgtggtggtatttcgcagttatcagtgtgtcaggcgtgtttgctgtgacgttcagcgtggtgttcgcttacgtggcagacataacccaggaacatgagcggtctatggcttacgggctcgtatgcatgttcatcctgtacttgctgtatttacttaggaacgccctgtttttacggtag

SEQ ID NO: 338681 - protein, 977 aa, Artificial Sequence
  derived and/or modified sequence
MRTAGRDPVPRRSPRWRRAVPLCETSAGRRVTQLRGDDLRRPATMKGKERSPVKAKRSRGGEDSTSRGERSKKLGGSGGSNGSSSGKTDSGGGSRRSLHLDKSSSRGGSREYDTGGGSSSSRLHSYSSPSTKNSSGGGESRSSSRGGGGESRSSGAASSAPGGGDGAEYKTLKISELGSQLSDEAVEDGLFHEFKRFGDVSVKISHLSGSGSGDERVAFVNFRRPEDARAAKHARGRLVLYDRPLKIEAVYVSRRRSRSPLDKDTYPPSASVVGASVGGHRHPPGGGGGQRSLSPGGAALGYRDYRLQQLALGRLPPPPPPPLPRDLERERDYPFYERVRPAYSLEPRVGAGAGAAPFREVDEISPEDDQRANRTLFLGNLDITVTESDLRRAFDRFGVITEVDIKRPSRGQTSTYGFLKFENLDMSHRAKLAMSGKIIIRNPIKIGYGKATPTTRLWVGGLGPWVPLAALAREFDRFGTIRTIDYRKGDSWAYIQYESLDAAHAAWTHMRGFPLGGPDRRLRVDFADTEHRYQQQYLQPLPLTHYELVTDAFGHRAPDPLRGARDRTPPLLYRDRDRDLYPDSDWVPPPPPVRERSTRTAATSVPAYEPLDSLDRRRDGWSLDRDRGDRDLPSSRDQPRKRRLPEESGGRHLDRSPESDRPRKRHCAPSPDRSPELSSSRDRYNSDNDRSSRLLLERPSPIRDRRGSLEKSQGDKRDRKNSASAERDRKHRTTAPTEGKSPLKKEDRSDGSAPSTSTASSKLKSPSQKQDGGTAPVASASPKLCLAWQGMLLLKNSNFPSNMHLLQGDLQVASSLLVEGSTGGKVAQLKITQRLRLDQPKLDEVTRRIKVAGPNGYAILLAVPGSSDSRSSSSSAASDTATSTQRPLRNLVSYLKQKQAAGVISLPVGGNKDKENTGVLHAFPPCEFSQQFLDSPAKALAKSEEDYLVMIIVRGFGFQIGVRYENKKRENLALTLL

SEQ ID NO: 338682 - DNA, 4244 bp, Artificial Sequence
  derived and/or modified sequence
gcgcgcggggggcggggctccccccggctgttcactcagctaccacagcgacgtaaaatggtgtccgctaggcgtcccaggacggcttcctgagggactggagggccccgacagccggaaagcctgccccgccccttggccggcacaggtacgacggcggggagctcagaagtttcgaactccaagggccgaagcacagccaaacaccccacggaacttaacaaatgtttgtggggagaacgccgaaaacgcggggaggcggggctggcgcacagtcaccctctcgcgacatctaagtgacgtcgcacagcaagcacgtgttctagtctttcaccttcagtcagcctcctccgttatacaggcctacccctttaagcgagtgatggacagttatttcagcctatcaacttccttgccgacatccaatcagatttaaacttcttttagccgccggaggagttggaaaaagggggtcgaaagagggagcttaccgtctctcgcgatatcgctgtgagcctgcctctctggaaaaaacgccgaaactgatggcccgacctcccaaatagtggtttaaaggacgggtttataagccaatgaaagggataaggaggtgggttgctgctgtcactgagcaagaagtaccgttacagggcagactttttgtccaatcaacacctcaacactttgggtcacgtgaccgcagagtgcgaggggcggagctacagtctggcgcgaggaaccgttaagatagacaacaaatgtaaccaatgaggtactccgactagggggttgggaacccaataacagtggttgggcgggcgccttcctggagcgcggggagatgtaaagatagacaaataattttcccaatgagactgtagaagagagagcaattggccaatgaggactgcggggcgggaccctgtgccgcggcggagtccaagatggcggcgtgcggttccgctgtgtgaaacgagcgcggggcggcgggttactcagctccgcggagacgacctccgacgacccgcaacaatgaagggaaaagagcgctcgccagtgaaggccaaacgctcccgtggtggtgaggactcgacttcccgcggtgagcggagcaagaagttagggggctctggtggcagcaatgggagcagcagcggaaagaccgatagcggcggtgggtcgcggcggagtctccacctggacaagtccagcagtcgaggtggcagccgcgagtatgataccggtgggggcagctccagtagccgcttgcatagttatagctccccgagcaccaaaaattcttcgggcgggggcgaatcgcgcagcagctcccggggtggaggcggggagtcacgttcctctggggccgcctcctcagctcccggcggcggggacggcgcggaatacaagactctgaagataagcgagttggggtcccagcttagtgacgaagcggtggaggacggcctgtttcatgagttcaaacgcttcggtgatgtaagtgtgaaaatcagtcatctgtcgggttctggcagcggggatgagcgggtagcctttgtgaacttccggcggccagaggacgcgcgggcggccaagcatgccagaggccgcctggtgctctatgaccggcctctgaagatagaagctgtgtatgtgagccggcgccgcagccgctcccctttagacaaagatacttatcctccatcagccagtgtggtcggggcctctgtaggtggtcaccggcacccccctggaggtggtggaggccagagatcactttcccctggtggcgctgctttgggatacagagactaccggctgcagcagttggctcttggccgcctgccccctccacctccgccaccattgcctcgagacctggagagagaaagagactacccgttctatgagagagtgcgccctgcatacagtcttgagccaagggtgggagctggagcaggtgctgctcctttcagagaagtggatgagatttcacccgaggatgatcagcgagctaaccggacgctcttcttgggcaacctagacatcactgtaacggagagtgatttaagaagggcgtttgatcgctttggagtcatcacagaagtagatatcaagaggccttctcgcggccagactagtacttacggctttctcaaatttgagaacttagatatgtctcaccgggccaaattagcaatgtctggcaaaattataattcggaatcctatcaaaattggttatggtaaagctacacccaccacccgcctctgggtgggaggcctgggaccttgggttcctcttgctgccctggcacgagaatttgatcgatttggcaccatacgcaccatagactaccgaaaaggtgatagttgggcatatatccagtatgaaagcctggatgcagcgcatgctgcctggacccatatgcggggcttcccacttggtggcccagatcgacgccttagagtagactttgccgacaccgaacatcgttaccagcagcagtatctgcagcctctgcccttgactcattatgagctggtgacagatgcttttggacatcgggcaccagaccctttgaggggtgctcgggataggacaccacccttactatacagagatcgtgatagggacctttatcctgactctgattgggtgccacccccacccccagtccgagaacgcagcactcggactgcagctacttctgtgcctgcttacgagccactggatagcctagatcgcaggcgggatggttggtccttggaccgggacagaggtgatcgagatctgcccagcagcagagaccagcctaggaagcgaaggctgcctgaggagagtggaggacgtcatctggataggtctcctgagagtgaccgcccacgaaaacgtcactgcgctccttctcctgaccgcagtccagaattgagcagtagccgggatcgttacaacagcgacaatgatcgatcttcccgtcttctcttggaaaggccctctccaatcagagacagacgaggtagtttggagaagagccagggtgacaagcgagaccgtaaaaactctgcatcagctgaacgagataggaagcaccggacaactgctcccactgagggaaaaagccctctgaaaaaagaagaccgctctgatgggagtgcacctagcaccagcactgcttcctccaagctgaagtccccgtcccagaaacaggatggggggacagcccctgtggcatcagcctctcccaaactctgtttggcctggcagggcatgcttctactgaagaacagcaactttccttccaacatgcatctgttgcagggtgacctccaagtggctagtagtcttcttgtggagggttcaactggaggcaaagtggcccagctcaagatcactcagcgtctccgtttggaccagcccaagttggatgaagtaactcgacgcatcaaagtagcagggcccaatggttatgccattcttttggctgtgcctggaagttctgacagccggtcctcctcttcctcagctgcatcagacactgccacttctactcagaggccacttaggaaccttgtgtcctatttaaagcaaaagcaggcagccggggtgatcagcctccctgtggggggcaacaaagacaaggaaaacaccggggtccttcatgccttcccaccttgtgagttctcccagcagttcctggattcccctgccaaggcactggccaaatctgaagaagattacctggtcatgatcattgtccgtgggtttggttttcagataggagttaggtatgagaacaagaagagagaaaacttggcgctgaccctgttatagtggttatagtggtgtccctaaagggaggaaatgatttcagcaaaactggttgaacagcggatgaagatatggaattcaaagctctaatggacctttttgaagagaagttgtggcttatgtggagtttacatgggcctctgatggaagaaagctaatctgtttagtatttgtgcattttactaaaatggcagcttaaagttgtgtatctgctattgtgatgccaatgccggtgttttaagtggaaaaaaaatgacctctttgatttgtgctgtgtacacaagatttctggaaaagtaaagaaaaaccctttttatggctcacacagcttaagagtagctgtctctcaaacgtgcgctcacagttgagctgcttttgttttattctaaataaattgtttcttttgaggaaaa

SEQ ID NO: 338683 - DNA, 2934 bp, Artificial Sequence
  derived and/or modified sequence
atgcggactgcaggaagggatcctgtcccacggaggtcaccaaggtggcgccgcgccgtgcccctctgcgaaacctcagcgggtcggcgcgtaacccaactgaggggagacgatctccgtcgccctgcaaccatgaagggcaaggaacgcagccctgttaaggcaaaacgaagtcgaggtggcgaggattccacctctcggggcgagcgctccaaaaaactcggtggcagtggaggaagtaatggctcaagcagtggcaagacagattccggcggcgggtcacgaaggtccctacatctggataagtcctccagtagaggcggctcacgcgagtacgataccgggggcggaagcagtagcagccgcctccatagctacagctccccgtctaccaaaaacagttccgggggaggggagtctaggtcaagcagtagagggggcggcggcgagagtcgtagctccggagctgctagctccgcgccagggggcggtgacggcgcagagtacaagactctaaaaatctcagagctagggtcacaactgtcggacgaggccgttgaagatggcctcttccacgaattcaagagattcggcgacgtgtccgttaaaatttcacacttgagtggatcaggatctggggacgaacgagttgctttcgtcaattttcggagacccgaagacgccagagcggccaagcatgcccgcggaaggctggtgctgtatgaccgccctctgaagatcgaggcggtatatgtttcgcgcaggaggagccggtctcctctggataaagatacatacccccccagtgccagcgtggtgggtgcctccgtggggggacaccgccaccctccgggcggtggtggcggccaaagaagccttagccctgggggagcagctctgggttaccgagactatcgcttgcagcagcttgccctcgggcgcctgcccccccctccaccaccccctctgcctcgcgatcttgaaagagaacgagattacccgttttatgagcgagtacggcccgcctacagtctcgagcctcgcgtgggcgctggcgctggggcagcaccttttcgtgaggtcgacgagatttctccggaggatgatcaacgggccaaccgcactctgttcctcggcaacctggacattactgtgacagagtccgatctgaggcgcgccttcgataggttcggcgtgattaccgaagtcgacattaaacgcccctctcgcggccaaacatccacctacgggttccttaagttcgaaaacctggacatgtcccaccgcgccaaattggcaatgagcggcaagatcattataaggaatccgataaagatcggctatggcaaggccacgcctaccacccggctgtgggtgggaggtctgggtccctgggtgcctctggccgcactcgctagggagttcgacagattcggaactattcgtaccatcgactatagaaaaggtgactcctgggcttacattcagtacgaatccctagatgcagctcacgcggcatggactcacatgcgcggctttccccttggcggaccagaccgccggctgagggtcgattttgcagatacggagcacaggtaccaacagcagtatcttcagcctctcccccttactcattatgagctcgtgaccgatgcatttggacaccgtgcccccgacccccttcgcggagcccgtgatcggaccccacctcttctgtatcgggatcgagatcgagatctataccctgactctgattgggtacctccaccccctccagtccgagaacgcagcacacggactgcagccacaagtgtaccagcttacgaacctctggactctctggatcgacggagagatggatggtcactggatcgggaccgaggagaccgagacctcccgagcagtagggaccagccgcggaaaagacgtctacctgaggaatccggggggcggcatcttgaccgatctccggaatctgataggccaaggaaaagacactgtgctcccagcccggatcggtctccagaactgtcaagctctagagatagatacaacagtgataatgatagaagctcgcgccttctgttagagcgcccttcccccattcgtgacagacgtgggagtctcgagaaatctcagggggacaaaagggacagaaaaaatagcgcctcggctgaaagggatcgaaaacaccggacgactgctcccacagagggtaagtctcccttgaagaaggaggaccgttccgacggaagtgcaccgtccaccagtactgcctcatcgaaactcaaatccccctcacagaaacaggatggaggtacagcccctgtcgcgtcagcctcaccgaaactgtgcttagcctggcagggcatgctgttgttgaagaacagcaatttcccttcaaatatgcacttgctgcaaggtgatttacaggtcgcatcatcactgttggtcgaaggaagcacaggcggaaaggtggcccagctgaaaataacacagagactgcgtctggatcagccaaaattagacgaagtcactcgccgcattaaagttgccgggcccaacggatacgcaatcctgctcgcggttcccgggtcgagcgacagccgaagcagcagtagtagcgcagctagtgatactgccacctctactcagcgccctttaaggaacctggtatcctatctgaagcaaaagcaggccgccggcgtgatctctctccctgtgggtgggaacaaagacaaggagaacaccggggtgctgcacgcattcccgccctgcgagttctcccagcagtttctcgacagcccggccaaagccttggccaaaagcgaggaggactacctagtcatgataatcgtcagaggtttcgggttccagatcggcgtccgctatgaaaacaagaagagagagaacctcgctctaacgctcttatag

SEQ ID NO: 338684 - DNA, 2934 bp, Artificial Sequence
  derived and/or modified sequence
atgaggacagctggccgggaccctgtgcccaggaggagcccccgctggaggagagctgtgcccctgtgtgagaccagcgctggaagaagagtgacccagctgcggggagatgacctgcggcggcctgccaccatgaagggcaaggagaggagccctgtgaaggccaagaggagccggggcggggaggacagcaccagcagaggagagaggagcaagaagctgggcggcagcggcggcagcaatggcagcagcagcggcaagacagacagcggcggcggcagcagaagaagcctgcacctggacaagagcagcagcagaggaggcagccgggagtatgacaccggcggcggcagcagcagcagccggctgcacagctacagcagccccagcaccaagaacagcagcggcggcggggagagccgcagcagcagccggggcggcggcggggagagccgcagcagcggggccgccagcagcgcccctggaggaggagatggagctgagtacaagaccctgaagatcagcgagctgggcagccagctgagtgatgaagctgtggaggatggcctcttccacgagttcaagagatttggagatgtgtctgtgaagatcagccacctgagcggcagcggcagcggagatgagcgggtggcctttgtgaacttcagaagaccagaagatgcccgggccgccaagcacgcccggggccgcctggtgctgtatgaccggcccctgaagattgaagctgtgtatgtgtccagaagaagaagccgcagccccctggacaaggacacctacccaccttctgcctctgtggtgggcgcctctgtgggcggccaccgccaccccccaggcggcggcggcggccagaggagcctgagccctggaggagctgccctgggctacagagactaccgcctgcagcagctggccctgggccgcctgcccccacctcctcctccacccctgccccgggacctggagcgggagcgggactaccccttctatgaaagagtgcggcctgcctacagcctggagccccgggtgggcgctggggccggggccgcccccttccgggaggtggatgagatcagcccagaagatgaccagagggccaacagaaccctcttcctgggcaacctggacatcaccgtgacagaaagtgacctgcggcgggcctttgacagatttggagtcatcacagaggtggacatcaagaggcccagccggggccagaccagcacctacggcttcctgaagtttgagaacctggacatgagccaccgggccaagctggccatgtctgggaagatcatcatccggaaccccatcaagattggctacggcaaggccacccccaccacccggctgtgggtgggcggcctgggcccctgggtgcccctggccgccctggcccgggagtttgaccgcttcggcaccatccgcaccatcgactacaggaagggggacagctgggcctacatccagtatgagagcctggatgctgcccatgctgcctggacccacatgaggggcttccccctgggcggccctgaccggcggctgcgggtggactttgctgacacagagcaccgctaccagcagcagtacctgcagcccctgcccctgacccactatgagctggtgacagatgccttcggccaccgggccccagaccccctgcggggggcccgggacaggaccccacccctgctgtacagagaccgggaccgggacctgtacccagacagcgactgggtgcccccacctcctcctgtgcgggagaggagcaccaggacagctgccacctctgtgcctgcctatgagcccctggacagcctggacagaagaagagatggctggagcctggaccgggacagaggagaccgggacctgcccagcagccgggaccagcccaggaagaggcggctgcctgaggagagcggcggccgccacctggacaggagccctgagagtgaccggcccaggaagaggcactgtgcccccagcccagacaggagccctgagctgagcagcagccgggaccgctacaacagcgacaatgacaggagcagccggctgctgctggagcggcccagccccatccgggacagaagaggcagcctggagaagagccagggcgacaagagggacaggaagaacagcgccagcgctgagcgggacaggaagcacaggaccacagcccccacagagggcaagagccccctgaagaaggaggacagaagtgatggcagcgcccccagcaccagcacagccagcagcaagctgaagagccccagccagaagcaggacggcggcacagcccctgtggccagcgccagccccaagctgtgcctggcctggcagggcatgctgctgctgaagaacagcaacttccccagcaacatgcacctgctgcagggcgacctgcaggtggccagcagcctgctggtggagggcagcactggaggcaaggtggcccagctgaagatcacccagaggctgcggctggaccagcccaagctggatgaggtgacccggcgcatcaaggtggccggccccaacggctacgccatcctgctggccgtgcccggcagcagtgacagccgcagcagcagcagcagcgctgccagtgacacagccaccagcacccagaggcccctgaggaacctggtgtcctacctgaagcagaagcaggccgccggggtcatcagcctgcctgtgggcggcaacaaggacaaggaaaatactggagtgctgcacgccttccccccctgtgagttcagccagcagttcctggacagccctgccaaggccctggccaagtctgaggaggactacctggtgatgatcatcgtgcggggcttcggcttccagatcggcgtgcgctatgagaacaagaagcgggagaacctggccctgaccctgctgtag

SEQ ID NO: 338685 - DNA, 2934 bp, Artificial Sequence
  derived and/or modified sequence
atgcggaccgccggccgggaccccgtgccccggcggagcccccggtggaggcgggctgttccactttgtgaaactagtgcaggaaggcgggtaacgcagctgcgaggagatgacttgcggagacctgctacgatgaagggtaaggaaaggagtccagtcaaggcaaagcgttcaagagggggcgaggactcaaccagccggggggaacgatctaagaagctcggggggtccggaggctccaatggaagcagctcaggcaagaccgacagtggtggtggctcccgtaggagcctccacctggacaaaagctcctctcgcgggggaagcagggaatacgataccggtggagggagcagctccagtaggctacatagctatagcagtccaagtactaagaatagctccggagggggggagtccaggtccagtagcaggggcggcgggggggaatcacgttcgtcaggcgctgcgagtagtgcaccagggggtggggacggcgcagaatacaaaacactgaagatttcagagctcggatcgcagctcagcgacgaggctgtcgaagatgggctttttcacgaattcaaacgttttggggacgtttcagtgaaaataagccacttgagcggaagtggaagcggggatgagcgagtggccttcgtcaattttcgacgacccgaggatgcccgtgccgcaaagcacgcccgggggaggctcgttctgtacgatcgccccctgaaaatcgaggccgtttatgtatcgagaaggaggtccaggtcccccctggataaggatacatacccccctagcgcttccgtagtaggggcctcggtgggtggtcatcgccatcccccgggtggagggggtggtcagaggtctctttcccctggcggggccgcactgggataccgagattacagactacagcagctggctttggggaggctccccccccctccccccccgcctctgcctagggaccttgaaagagaaagggactacccgttctatgagagggtgcgcccagcatattccttagaaccaagagtcggcgccggagcaggtgcagcacctttccgggaggtggacgaaatatctcctgaagatgatcagcgagctaataggacccttttcctgggaaacctcgatattacagttacagaaagcgatctaaggcgagcattcgaccgcttcggagtcatcacagaagttgatatcaaaaggccctcacgcgggcaaaccagcacttatggcttcctcaagttcgagaacctggacatgagtcatagggcgaagttggccatgagcggaaagatcatcattaggaaccctattaagattgggtacggtaaagctacaccgacaactcggctgtgggtgggcggtcttgggccttgggtacccctggcagcgctcgccagggaattcgatcgctttgggacaattcggaccatcgattataggaaaggagattcctgggcttatatacagtacgagtccctggatgccgcccatgccgcctggactcatatgaggggcttcccactaggcggtccagacagacggcttcgggttgatttcgcggacacagaacatcgctatcaacagcaatacctgcagccactccctttgacacactacgaattggtaacagatgcgtttggtcaccgtgcgcctgaccccctaaggggggcacgggaccgcaccccccccttactgtaccgagacagagatcgcgacctgtatcctgacagcgattgggtgcctccccccccccccgtcagggagagatcgacgcgcaccgccgctacatccgttccagcgtacgaaccactggattcactggaccgaaggcgggacgggtggtcactcgaccgggatagaggtgatcgggacctccctagcagcagagaccagcctagaaagaggagactgccggaagagagtggagggaggcacctggacagatcccctgagagtgacagaccacgaaagaggcactgcgccccgagccccgaccggtctccagagctgtccagcagtcgtgaccgatacaacagcgacaacgaccggtccagtcgactgctgctcgagaggccgtcaccgattcgcgatcgcagaggctcgctggaaaagtcacagggagacaagagggatcgcaagaatagcgcatcagcagaacgagaccggaaacatcggacgacagcccccacagaaggaaagtctccgttgaagaaggaagaccgatccgacggcagcgctcccagcacttccacggctagctcaaagctcaaatccccctcccaaaaacaagacggaggtaccgcaccagtggcctccgccagccccaaactctgcttggcatggcagggcatgcttctgctgaagaacagcaacttcccctccaatatgcacctacttcaaggcgacttacaagtcgcgtcgtcccttctggttgaaggatcgactggtggaaaggtcgctcaacttaaaataactcagcgactgcgcttggatcaacccaaactggacgaggtcacgagaaggatcaaggtggcagggcctaacggatacgccattcttctggctgtgcccgggagctctgacagccggtcctcttcttccagcgccgcctccgacaccgccaccagcactcagagacccctgcgaaacctggtctcctatcttaaacagaaacaggccgccggcgttatctccctccctgtcggtgggaataaagacaaagagaataccggcgttctgcacgcatttcccccatgtgagttttcgcagcagttcttagattctcctgctaaggctctcgcaaaatcggaagaggattaccttgtgatgattattgtaaggggctttggattccagatcggcgtccgatatgaaaataaaaaaagggaaaaccttgccctgacactgctgtag

SEQ ID NO: 338686 - DNA, 2934 bp, Artificial Sequence
  derived and/or modified sequence
atgcggactgcaggccgagaccctgttcctagacgttctccaagatggcgacgtgctgtgccactgtgcgagacttctgccggtcgcagagtgacccagttgcggggagatgacctgcgcagaccggctacaatgaagggcaaagaaaggtcacccgtgaaagccaagcgcagcagagggggtgaagacagtaccagccggggtgagcggtcaaaaaaacttgggggatctgggggatcaaacgggtcctctagcggaaagacagactctggaggagggtcacgaagatcactccacctcgacaagtcatcatcaaggggtgggagccgcgagtacgacacggggggaggctcatcgagtagcaggttgcattcctactccagcccaagcacaaaaaactcatctgggggaggagagagccggtcctcctcccgagggggaggtggggaatctcggtccagcggagcggctagtagtgctcctggcggaggggacggcgcagagtataagaccttaaagatatccgaactcggatcacagctgtcagacgaagccgtcgaggacgggttgtttcacgagttcaagagattcggagatgtgtccgtgaaaatttcccacctgagtggatccggctccggcgatgagagggtggcatttgtcaacttcagacggcctgaagacgccagggccgcaaaacacgccaggggacgcttagtactctatgacaggccgctgaagattgaagcggtgtatgtcagtcggaggcgatctagaagtccactggacaaggatacttacccaccttctgccagcgtagtcggagctagcgtggggggacaccggcatcctccaggcggaggagggggacagagatccctttctcctggcggagcggctctcggctaccgggattatcgcctgcagcagcttgccctcggacggctgccaccaccacctcccccaccactgcccagggatctggagagggagcgagactatcccttttacgagcgggttcgccctgcatactcacttgagcctcgagtgggtgcaggcgctggagccgctcccttccgtgaagttgacgaaataagtccagaggacgatcagcgcgcaaatcggacactcttcttgggtaacctggacataaccgttacggagtcagacctgcggagagccttcgacaggtttggggtcatcactgaagtggacatcaagaggccgtcacgcggacagacctccacttatggctttctgaaatttgaaaaccttgatatgtctcaccgtgccaaactagcgatgagtggcaaaataattattagaaatcctataaaaattggttacgggaaagctacccccacgacgcgcctgtgggtcgggggattgggtccttgggtccccctggctgccctcgcaagggagttcgatagatttggcaccattcggacaatcgactacaggaaaggcgattcatgggcgtatattcaatatgagagtttggatgcggcacatgcggcatggacacacatgagaggattccctttgggcggaccagacagaagacttcgcgtcgacttcgcggacactgagcaccgataccagcagcagtacctccaaccactccctctcacacactacgaactggtgaccgatgcttttggtcaccgggctcccgacccacttcggggagctcgcgatcggacccctcccctgctctatcgtgatcgcgacagagatttatacccggactctgactgggtgccgcctcccccacccgttagagagcgtagcaccaggacagccgctacgtccgtccctgcatacgagccgcttgactctctggatagaaggcgtgatggctggtccctggacagggatcgcggagacagggaccttcccagctcccgcgatcaacctcggaagagaagattaccagaggagtcggggggtaggcacctggacaggtcccccgaatctgaccgcccacgcaaacgccactgcgcgccttctcccgacaggtcccctgaactgtccagttctagagacaggtacaatagtgataacgataggtcaagcaggttgctgctggaaagaccgagcccaattcgagacaggagaggttccctcgagaaatctcaaggggacaagcgagaccgaaaaaatagcgcgagcgctgagcgcgatcggaaacaccgtactaccgcaccgactgaagggaagagcccactgaagaaggaggaccgaagcgacggttccgcgcctagcacttcgaccgcctcatcaaagctgaaaagcccaagccagaaacaggatgggggaacggcccctgtagcctcagcgagccccaagctgtgcctcgcatggcaggggatgttgctgctgaagaatagcaattttccgtccaacatgcacctactgcagggcgatctccaggttgcttcctccctgctggtggagggaagcactgggggaaaggtggcccagctgaagatcactcagcgattgcgacttgaccagcctaagctagatgaagtcacaagacggatcaaagttgcaggccctaatggctatgcaattttattagcggtacccggtagtagtgactctcggagctcctcctcaagtgcggcatccgacacagccacatcgactcagaggccccttcgaaatttagtaagttacctgaaacaaaagcaggcagcaggagtcatcagtctgcctgtgggtggcaataaggacaaagaaaataccggggtgttacatgccttccctccttgtgagttcagccagcaattccttgattcccccgctaaggcgctcgcaaagtccgaggaagactacctagtgatgatcatcgtgcggggattcggattccaaattggggtaaggtacgagaataaaaaacgtgaaaacttggctctgacacttctctag

SEQ ID NO: 338687 - DNA, 2934 bp, Artificial Sequence
  derived and/or modified sequence
atgagaaccgccggcagagaccccgtgcccagaagaagccccagatggagaagagccgtgcccctgtgcgagaccagcgccggcagaagagtgacccagctgagaggcgacgacctgagaagacccgccaccatgaagggcaaggagagaagccccgtgaaggccaagagaagcagaggcggcgaggacagcaccagcagaggcgagagaagcaagaagctgggcggcagcggcggcagcaacggcagcagcagcggcaagaccgacagcggcggcggcagcagaagaagcctgcacctggacaagagcagcagcagaggcggcagcagagagtacgacaccggcggcggcagcagcagcagcagactgcacagctacagcagccccagcaccaagaacagcagcggcggcggcgagagcagaagcagcagcagaggcggcggcggcgagagcagaagcagcggcgccgccagcagcgcccccggcggcggcgacggcgccgagtacaagaccctgaagatcagcgagctgggcagccagctgagcgacgaggccgtggaggacggcctgttccacgagttcaagagattcggcgacgtgagcgtgaagatcagccacctgagcggcagcggcagcggcgacgagagagtggccttcgtgaacttcagaagacccgaggacgccagagccgccaagcacgccagaggcagactggtgctgtacgacagacccctgaagatcgaggccgtgtacgtgagcagaagaagaagcagaagccccctggacaaggacacctacccccccagcgccagcgtggtgggcgccagcgtgggcggccacagacacccccccggcggcggcggcggccagagaagcctgagccccggcggcgccgccctgggctacagagactacagactgcagcagctggccctgggcagactgcccccccccccccccccccccctgcccagagacctggagagagagagagactaccccttctacgagagagtgagacccgcctacagcctggagcccagagtgggcgccggcgccggcgccgcccccttcagagaggtggacgagatcagccccgaggacgaccagagagccaacagaaccctgttcctgggcaacctggacatcaccgtgaccgagagcgacctgagaagagccttcgacagattcggcgtgatcaccgaggtggacatcaagagacccagcagaggccagaccagcacctacggcttcctgaagttcgagaacctggacatgagccacagagccaagctggccatgagcggcaagatcatcatcagaaaccccatcaagatcggctacggcaaggccacccccaccaccagactgtgggtgggcggcctgggcccctgggtgcccctggccgccctggccagagagttcgacagattcggcaccatcagaaccatcgactacagaaagggcgacagctgggcctacatccagtacgagagcctggacgccgcccacgccgcctggacccacatgagaggcttccccctgggcggccccgacagaagactgagagtggacttcgccgacaccgagcacagataccagcagcagtacctgcagcccctgcccctgacccactacgagctggtgaccgacgccttcggccacagagcccccgaccccctgagaggcgccagagacagaaccccccccctgctgtacagagacagagacagagacctgtaccccgacagcgactgggtgcccccccccccccccgtgagagagagaagcaccagaaccgccgccaccagcgtgcccgcctacgagcccctggacagcctggacagaagaagagacggctggagcctggacagagacagaggcgacagagacctgcccagcagcagagaccagcccagaaagagaagactgcccgaggagagcggcggcagacacctggacagaagccccgagagcgacagacccagaaagagacactgcgcccccagccccgacagaagccccgagctgagcagcagcagagacagatacaacagcgacaacgacagaagcagcagactgctgctggagagacccagccccatcagagacagaagaggcagcctggagaagagccagggcgacaagagagacagaaagaacagcgccagcgccgagagagacagaaagcacagaaccaccgcccccaccgagggcaagagccccctgaagaaggaggacagaagcgacggcagcgcccccagcaccagcaccgccagcagcaagctgaagagccccagccagaagcaggacggcggcaccgcccccgtggccagcgccagccccaagctgtgcctggcctggcagggcatgctgctgctgaagaacagcaacttccccagcaacatgcacctgctgcagggcgacctgcaggtggccagcagcctgctggtggagggcagcaccggcggcaaggtggcccagctgaagatcacccagagactgagactggaccagcccaagctggacgaggtgaccagaagaatcaaggtggccggccccaacggctacgccatcctgctggccgtgcccggcagcagcgacagcagaagcagcagcagcagcgccgccagcgacaccgccaccagcacccagagacccctgagaaacctggtgagctacctgaagcagaagcaggccgccggcgtgatcagcctgcccgtgggcggcaacaaggacaaggagaacaccggcgtgctgcacgccttccccccctgcgagttcagccagcagttcctggacagccccgccaaggccctggccaagagcgaggaggactacctggtgatgatcatcgtgagaggcttcggcttccagatcggcgtgagatacgagaacaagaagagagagaacctggccctgaccctgctgtag

SEQ ID NO: 338688 - protein, 1288 aa, Artificial Sequence
  derived and/or modified sequence
MEPIYPFARPQMNTRFPSSRMVPFHFPPSKCALWNPTPTGDFIYLHLSYYRNPKLVVTEKTIRLAYRHAKQNKKNSSCFLLGSLTADEDEEGVTLTVDRFDPGREVPECLEITPTASLPGDFLIPCKVHTQELCSREMIVHSVDDFSSALKALQCHICSKDSLDCGKLLSLRVHITSRESLDSVEFDLHWAAVTLANNFKCTPVKPIPIIPTALARNLSSNLNISQVQGTYKYGYLTMDETRKLLLLLESDPKVYSLPLVGIWLSGITHIYSPQVWACCLRYIFNSSVQERVFSESGNFIIVLYSMTHKEPEFYECFPCDGKIPDFRFQLLTSKETLHLFKNVEPPDKNPIRCELSAESQNAETEFFSKASKNFSIKRSSQKLSSGKMPIHDHDSGVEDEDFSPRPIPSPHPVSQKISKIQPSVPELSLVLDGNFIESNPLPTPLEMVNNENPPLINHLEHLKPLQPQLYDEKHSPEVEAGEPSLRGIPNQLNQDKPALLRHCKVRQPPAYKKGNPHTRNSIKPSSHNGPSHDIFEKLQTVSAGNVQNEEYPIRPSTLNSRQSSLAPQSQPHDFVFSPHNSGRPMELQIPTPPLPSYCSTNVCRCCQHHSHIQYSPLNSWQGANTVGSIQDVQSEALQKHSLFHPSGCPALYCNAFCSSSSPIALRPQGDMGSCSPHSNIEPSPVARPPSHMDLCNPQPCTVCMHTPKTESDNGMMGLSPDAYRFLTEQDRQLRLLQAQIQRLLEAQSLMPCSPKTTAVEDTVQAGRQMELVSVEAQSSPGLHMRKGVSIAVSTGASLFWNAAGEDQEPDSQMKQDDTKISSEDMNFSVDINNEVTSLPGSASSLKAVDIPSFEESNIAVEEEFNQPLSVSNSSSLVVRKEPDVPVFFPSGQLAESVSMCLQTGPTGGASNNSETSEEPKIEHVMQPLLHQPSDNQKIYQDLLGQVNHLLNSSSKETEQPSTKAVIISHECTRTQNVYHTKKKTHHSRLVDKDCVLNATLKQLRSLGVKIDSPTKVKKNAHNVDHASVLACISPEAVISGLNCMSFANVGMSGLSPNGVDLSMEANAIALKYLNENQLSQLSVTRSNQNNCDPFSLLHINTDRSTVGLSLISPNNMSFATKKYMKRYGLLQSSDNSEDEEEPPDNADSKSEYLLNQNLRSIPEQLGGQKEPSKNDHEIINCSNCESVGTNADTPVLRNITNEVLQTKAKQQLTEKPAFLVKNLKPSPAVNLRTGKAEFTQHPEKENEGDITIFPESLQPSETLKQMNSMNSVGTFLDVKRLRQLPKLF

SEQ ID NO: 338689 - DNA, 60 bp, Artificial Sequence
  derived and/or modified sequence
tggatcttcatcttcaagtgcagcgtgatgtatgtgcacttcttctttgccttcttctag

SEQ ID NO: 338690 - DNA, 3867 bp, Artificial Sequence
  derived and/or modified sequence
atggagccgatataccctttcgctcggccacaaatgaacacacgatttccctcaagcagaatggtgcctttccatttccctccttccaaatgcgcactttggaacccaacgcctacaggagacttcatatacctgcatctgtcgtattaccgcaatcccaagctggtggtgacagaaaagacaatccgtttggcctatcgccacgctaagcaaaacaagaaaaacagcagttgtttcctcttgggctcactcacggctgacgaagatgaggagggcgtgaccctcacggtcgataggttcgatccgggacgcgaagtgcccgaatgcctggaaattacacctactgcaagtcttcccggcgatttcctcattccctgtaaggtccacacccaggagctgtgctcgcgcgagatgatcgtacattcagtggacgatttctcctccgcattaaaggcactccagtgccatatttgctcgaaggattcgctggattgtgggaagttattgtccctgagagtgcacattacctctcgcgagtcactggattccgtagagttcgacctgcactgggccgccgtgacccttgcaaacaacttcaagtgtacacccgtgaaaccaataccaattattcctacggctctcgctaggaacctgtcgagtaacctaaatatcagtcaggtccaaggtacctacaaatacggatacctgaccatggacgaaacaaggaaattactcctcttgctggaaagtgatccaaaggtctacagcctccctcttgtgggtatctggctctccggcatcacccacatttactctccgcaggtatgggcttgttgcctccggtacattttcaatagtagcgtgcaggagagggtcttctctgagtccggcaacttcatcattgttctgtactccatgactcacaaggagcctgagttctatgagtgttttccttgtgatgggaagattcccgatttccggttccagctcctaaccagcaaagagacactccatctgttcaaaaacgtggagccgccagacaagaaccctatcagatgcgagctaagtgccgaaagccagaacgccgagacggaattcttttctaaggcctccaagaacttttccatcaagcggtcatcccaaaaactgtcttctggcaagatgccaattcacgaccacgatagcggagtggaagacgaggatttcagtcccaggccaatcccaagtccacacccggtcagtcagaaaatctccaaaattcagccctcagtccctgagctgtccctggtgctggacggtaactttatcgagtccaacccactgcctacacccctagagatggttaacaacgagaacccacccctgatcaatcatttggaacacttgaaacccctacaacctcagttgtacgacgaaaaacacagtccggaggtagaggccggagaaccatcattacgaggaatccctaatcaacttaaccaggacaaacccgccttgctgagacactgcaaggtaaggcagcctccagcatataagaaaggtaatccacacactcgcaactcaatcaagccctccagccacaacggccccagccacgacatattcgaaaagcttcagacagtgtccgcaggtaatgtccagaatgaggagtacccaattagaccttccactctgaacagccgccagtcgtctttagccccacaaagccagccccacgatttcgttttctctccacacaattcaggacgccctatggaacttcagataccgaccccgcccctgccgtcctactgttccacgaatgtatgtcgatgctgccagcaccattcacatattcagtattcaccactcaacagttggcagggggccaatactgtcggatcaatccaggacgtccagtcagaggctctgcagaaacactcgcttttccacccttcaggttgtcctgctctttattgtaatgccttttgtagctctagctctccgatagctctccgcccacaaggggacatgggaagctgtagcccgcattctaacatagagcccagccccgttgcaaggccgccttcccacatggacctctgtaatccgcagccctgtactgtctgtatgcacacacccaagacggagagcgataatgggatgatgggtttaagtccagatgcttaccggtttctgacggagcaggatagacagctccgtttactccaagcacagatacaacggctgctagaggctcaaagcctgatgccatgtagccccaagactacggccgtggaggacactgttcaagccggccggcagatggaactcgtgagcgtcgaagcccagagctccccggggctccacatgcgaaagggcgtgtctatcgccgtctcgaccggtgctagcctgttctggaacgcagccggagaagaccaagaaccggatagccaaatgaagcaggacgacacaaaaatttcaagcgaggacatgaacttttctgtcgacatcaataacgaggtcacctccctgccgggatccgcgtcgtcacttaaagccgtggacattccctcttttgaagagtccaatattgcggttgaggaggaattcaaccagcccctgtctgtgtccaacagctcttcgctcgtcgtcaggaaggaacccgatgttcctgtattcttcccttctggacaattggcagaaagcgtttccatgtgccttcagaccgggcctacagggggggcctctaataattccgaaacatctgaagagcccaagatagaacatgtcatgcagcctttactgcatcagcccagcgataatcagaagatatatcaagacctgctggggcaagttaatcatctgctcaactcctcctccaaagagaccgaacagccctcgacgaaggccgtgatcatcagccatgaatgcacacgaacacagaacgtatatcacacgaaaaagaagacacaccactccagattggttgataaggattgcgtgctcaacgccaccttgaaacaacttaggagccttggcgttaaaatcgatagtccaaccaaggtgaagaaaaacgctcacaatgtggatcacgctagcgtgctcgcttgcatttctccggaggctgtgatcagcgggctgaactgcatgagctttgcgaatgttggcatgtccggcctgagcccgaacggggtggacttaagcatggaggccaacgctatcgctctcaaatacttgaatgaaaatcagttgtctcaattgtctgtcacacgttcaaatcagaataattgcgatccattctctttattgcatattaacactgataggtcaaccgtcggactttcgttgatcagccctaataatatgtccttcgccacaaagaaatacatgaagcgctacggcctgttacaatcaagcgacaattccgaagacgaggaggagcctcctgataatgctgacagtaagagtgagtacctgctgaatcagaacctgcgatctatccccgaacagctcggggggcagaaggaaccttccaaaaacgaccacgaaattattaactgtagcaactgtgaaagtgtggggacaaatgcagataccccagtattgagaaacattactaatgaagtgcttcagacgaaggccaagcaacagttgacagagaaaccagcattcctggtgaagaatttgaagccctcgccagctgtgaatcttcgaaccggtaaagctgaattcactcagcatccagagaaagagaatgaaggagacattacgatctttcctgaatctctgcagccgtctgagacactaaagcagatgaactctatgaatagcgttggcacctttctggatgtgaaacgcctgaggcaactgcccaagctcttctag

SEQ ID NO: 338691 - DNA, 3867 bp, Artificial Sequence
  derived and/or modified sequence
atggagcccatctacccctttgcccggccccagatgaacacccgcttccccagcagcaggatggtgcccttccacttcccccccagcaaatgtgccctgtggaaccccacccccactggagacttcatctacctgcacctgagctactacagaaaccccaagctggtggtgacagagaagaccatccggctggcctacagacatgccaagcagaacaagaagaacagcagctgcttcctgctgggcagcctgacagcagatgaagatgaggagggcgtgaccctgactgtggacagatttgaccccggccgggaggtgcctgagtgcctggagatcacccccacagccagcctgcccggggacttcctgatcccctgcaaggtgcacacccaggagctgtgcagccgggagatgattgtgcacagcgtggatgacttcagcagcgccctgaaggccctgcagtgccacatctgcagcaaggacagcctggactgtgggaagctgctgagcctgcgggtgcacatcaccagccgggagagcctggacagcgtggagtttgacctgcactgggccgctgtgaccctggccaacaacttcaagtgcacccctgtgaagcccatccccatcatccccacagccctggccaggaacctgagcagcaacctgaacatcagccaggtgcagggcacctacaagtatggctacctgaccatggatgagaccaggaagctgctgctgctgctggagagtgaccccaaggtgtacagcctgcccctggtgggcatctggctgagcggcatcacccacatctacagcccccaggtgtgggcctgctgcctgcgctacatcttcaacagctctgtgcaggagagggtcttcagcgagagcggcaacttcatcatcgtgctgtacagcatgacccacaaggagcctgagttctatgagtgcttcccctgtgatggcaagatcccagacttccgcttccagctgctgaccagcaaggagaccctgcacctgttcaagaatgtggagcccccagacaagaaccccatccgctgtgagctgtctgctgagagccagaatgctgagacagagttcttcagcaaggccagcaagaacttcagcatcaagaggagcagccagaagctgagcagcggcaagatgcccatccatgaccatgattctggagtggaggatgaggacttcagcccccggcccatccccagcccccaccctgtgtcccagaagatcagcaagatccagcccagcgtgcctgagctgagcctggtgctggatggcaacttcatcgagagcaaccccctgcccacccccctggagatggtgaacaatgaaaatcctcctctcatcaaccacctggagcacctgaagcccctgcagccccagctgtatgatgagaagcacagccctgaggtggaggccggggagcccagcctgcggggcatccccaaccagctgaaccaggacaagccagccctgctgcggcactgcaaggtgcggcagcccccagcctacaagaagggcaacccccacaccagaaattccatcaagcccagcagccacaacggccccagccatgacatctttgagaagctgcagacagtgtctgctggaaatgtgcagaatgaggagtaccccatccggcccagcaccctgaacagccggcagagcagcctggccccccagagccagccccatgactttgtgttcagcccccacaacagcggccggcccatggagctgcagatccccaccccacccctgcccagctactgcagcaccaacgtgtgccgctgctgccagcaccacagccacatccagtacagccccctgaacagctggcagggcgccaacacagtgggcagcatccaggatgtgcagagcgaggccctgcagaagcacagcctcttccaccccagcggctgcccagccctgtactgcaatgccttctgcagcagcagcagccccatcgccctgcggccccagggcgacatgggcagctgcagcccccacagcaacatcgagcccagccctgtggcccggccccccagccacatggacctgtgcaacccccagccctgcaccgtgtgcatgcacacccccaagacagaaagtgacaatggcatgatgggcctgagcccagatgcctaccgcttcctgacagagcaggaccggcagctgcggctgctgcaggcccagatccagaggctgctggaggcccagagcctgatgccctgcagccccaagaccacagctgtggaggacacagtgcaggccggccggcagatggagctggtgtctgtggaggcccagagcagccctggcctgcacatgaggaagggcgtgtccattgctgtgtccactggagccagcctcttctggaatgctgctggggaggaccaggagccagacagccagatgaagcaggatgacaccaagatcagcagcgaggacatgaacttctctgtggacatcaacaatgaggtgaccagcctgcccggcagcgccagcagcctgaaggctgtggacatccccagctttgaggagagcaacattgctgtggaggaggagttcaaccagcccctgtctgtgagcaacagcagcagcctggtggtgaggaaggagccagatgtgcctgtgttcttccccagcggccagctggccgagagcgtgtccatgtgcctgcagacaggccccaccggcggggccagcaacaacagcgagaccagcgaggagcccaagattgaacatgtgatgcagcccctgctgcaccagcccagcgacaaccagaagatctaccaggacctgctgggccaggtgaaccacctgctgaacagcagcagcaaggagacagagcagcccagcaccaaggccgtcatcatcagccatgagtgcaccaggacccagaatgtgtaccacaccaagaagaagacccaccacagccggctggtggacaaggactgtgtgctgaatgccaccctgaagcagctgcggagcctgggcgtgaagattgacagccccaccaaggtgaagaagaatgcccacaacgtggaccacgcctctgtgctggcctgcatcagccctgaggccgtcatcagcggcctgaactgcatgagctttgccaacgtgggcatgagcggcctgagccccaatggagtggacctgtccatggaggccaatgccatcgccctgaagtacctgaatgaaaaccagctgagccagctgtctgtgaccaggagcaaccagaacaactgtgaccccttcagcctgctgcacatcaacacagacaggagcacagtgggcctgagcctcatcagccccaacaacatgagctttgccaccaagaagtacatgaagagatatggcctgctgcagagcagtgacaacagtgaagatgaggaggagcccccagacaatgctgacagcaagtctgagtacctgctgaaccagaacctgcggagcatccctgagcagctgggcggccagaaggagcccagcaagaatgaccacgagatcatcaactgcagcaactgtgagagcgtgggcaccaatgctgacacccctgtgctgaggaacatcaccaatgaggtgctgcagaccaaggccaagcagcagctgacagagaagccagccttcctggtgaagaacctgaagcccagccctgctgtgaacctgaggacaggcaaggccgagttcacccagcaccctgagaaggaaaatgaaggagacatcaccatcttccctgagagcctgcagcccagcgagaccctgaagcagatgaacagcatgaacagcgtgggcaccttcctggatgtgaagaggctgcggcagctgcccaagctgttctag

SEQ ID NO: 338692 - DNA, 3867 bp, Artificial Sequence
  derived and/or modified sequence
atggagcccatctaccccttcgcccggccccagatgaacacccggtttccatcatctaggatggttccttttcattttcctcccagcaagtgcgctctgtggaatccaaccccgaccggggatttcatatatctgcatcttagctactaccggaaccccaaactggtggtcactgaaaagacaatcaggctcgcgtacaggcatgcaaagcaaaacaagaaaaacagtagctgctttcttctgggatccctcactgccgacgaagacgaggagggggtgaccctgacagtcgacagattcgatccgggacgcgaggtccccgagtgtctagagatcactccaacagcttccctgccaggagattttctgatcccttgtaaggtccatacgcaggagttatgttctcgggaaatgatcgtacattccgtcgacgattttagcagcgccctgaaagccttgcagtgccatatctgtagcaaagacagcctggactgcggtaagcttctgtctttaagagtgcacatcacctcccgagagtctttggactccgtggagttcgatcttcactgggccgccgtgacactggccaataacttcaagtgcacccccgtaaagcctatcccaatcatccctaccgctctggcccgtaacctgagctcaaatcttaacatttcacaggtccagggcacatacaaatatggctacctgaccatggacgaaacccgaaagctgctgctgcttctggagtccgacccaaaggtgtactccctgcccctggtgggaatctggctgagcggcattactcacatttactctccccaggtgtgggcctgttgtctccgctatatttttaattcaagcgttcaggaacgtgtctttagcgagagcggcaactttatcatcgtcttgtactctatgacacacaaggaacctgagttttacgaatgctttccatgcgacggcaagatccctgactttcggttccaactgctgactagcaaagaaactctgcacctgtttaaaaacgtggaaccgcccgataaaaatcccatcagatgcgagctgagcgcagagagccaaaatgcagaaaccgagttcttcagcaaagcttccaaaaatttctcaattaagaggagtagccagaagctgtcctccggaaagatgccaattcacgaccatgactcaggggtggaagatgaggacttctctcccaggcccatcccaagccctcaccctgtctcacagaaaatctccaagatccagccaagtgtgcccgaattgtcacttgtcctggatgggaactttattgaaagtaaccccctcccaacccctctggagatggtgaacaacgagaatccaccactgatcaatcacctggagcatttgaagccgttgcagcctcagctctacgatgaaaaacactctcctgaggttgaagcaggggagccttctctaaggggtatccccaaccaattaaaccaggacaagcctgcgctgctacgacattgcaaggtgcgccagccaccagcctacaaaaagggaaatcctcatactagaaattccatcaagccatcaagccacaatggcccaagccacgatatttttgagaaacttcagacagtgtcagccggaaacgtccagaatgaggaatatcccattaggccctcaacactcaactctagacaaagttcacttgctccacagtcacagccacacgacttcgtcttcagtccccacaatagcggccggccaatggaactccaaattcctaccccccccttaccctcttactgctccactaacgtgtgtcgatgctgccagcatcacagtcacattcagtattcacctctgaattcttggcaaggggctaatactgtgggatccatccaggacgtccagagtgaagccctgcaaaagcactcacttttccacccgtccggatgccccgccctttactgtaatgctttctgcagctccagtagcccgatcgccttgcgcccacagggtgacatgggatcttgctcccctcattctaatatagagccttccccggtggcacggccaccatcacatatggatctttgcaatccccagccgtgcacagtttgcatgcacactccaaagaccgaaagcgacaatggcatgatgggtctttcacctgatgcgtatagattcctgactgaacaggaccgacagttacgcctgctccaggcacagattcagcgtctgctcgaggcccagagcctgatgccttgctccccaaaaaccaccgctgttgaagatactgtgcaggcaggccgacagatggaacttgtgagcgtggaggcacagtccagccctgggctccacatgcgcaaaggcgtttcaatagcagtgtcaactggggcttccctgttttggaacgctgccggtgaagatcaagagcccgacagtcaaatgaaacaggatgacaccaagatttcttcagaggacatgaatttctcagttgacatcaataatgaggtaacaagccttcctgggtcagcctcctctctcaaggcagtagacatcccatcctttgaagagtctaatattgcagtggaggaggagttcaaccagccactgtctgtttcaaattctagtagcctggtcgtgaggaaagagccagatgtgccggtgttttttccgtcaggccagcttgctgagagtgtcagcatgtgcctgcaaacagggcccactgggggagccagtaacaacagcgagactagcgaggaacccaaaatcgagcatgttatgcagcccttattgcaccagccctctgataatcagaaaatctatcaagatttactagggcaggtgaaccatctgttaaattcttcttctaaagagaccgaacagcctagcacaaaggccgtcattatttcacatgaatgtacaaggacacagaacgtgtatcatacgaaaaaaaagacacaccactctcggcttgtggataaggactgtgtccttaatgccacactcaaacagctgaggagtctgggagttaagatagatagcccaacaaaggttaaaaagaatgcacacaatgtggatcatgcttccgtgcttgcttgcatctcaccggaggcggtgatcagtggactgaattgcatgagcttcgctaacgtgggcatgtcagggctaagtcccaacggtgttgatctgtctatggaggcaaacgcaattgcactgaaataccttaatgagaaccagctgagtcagctaagtgtgacaaggtccaatcagaataattgtgacccattctcactgctacatatcaacaccgacagatcaactgttggcctctccctgatctcccctaacaatatgtcatttgccacgaaaaaatacatgaaacgctacggcctcttgcagtccagcgataattccgaagacgaagaagaaccaccagacaacgcagattccaaaagcgaatatctgttgaatcagaaccttcgctctatccctgaacagttggggggccagaaggagccgagcaaaaatgaccacgaaattataaactgctctaattgtgagtcagttggtactaatgccgatacccctgtcctccgtaatattaccaatgaggtgttacagaccaaagcaaagcagcagctcaccgagaagccagcctttctggtcaagaacttaaaacctagccctgccgtgaatctgcgaactggcaaggctgaattcacccaacacccagaaaaggaaaatgaaggggatattaccattttcccagagagcctacaaccctctgagacacttaaacagatgaacagcatgaactctgtgggaacttttttggacgtgaagaggctgcggcagcttccaaagttgttctag

SEQ ID NO: 338693 - DNA, 3867 bp, Artificial Sequence
  derived and/or modified sequence
atggagcccatatacccctttgccaggccacagatgaatacacggttcccgtcgtcccgtatggtcccgtttcatttccccccttccaagtgcgcgctatggaaccccactccaactggggactttatctacctccacctgagttactatagaaatcctaaactggtggttacagagaaaaccatcaggctcgcctaccggcacgcaaagcagaataagaaaaattcaagctgttttctgctgggcagtttaacggccgatgaggatgaagagggtgtgacccttaccgtggacagatttgatcccggaagagaggtccccgagtgcctagagatcaccccaaccgccagcttacccggtgatttcttgatcccatgcaaggtccacactcaagagctatgttccagagagatgatcgtgcactcagtagacgacttcagttcggccctaaaggctcttcaatgtcacatatgcagcaaagatagcctggactgtggtaagctgctgagccttagagtgcacataacctcacgcgaaagcctcgattctgtggagtttgacctgcactgggcggcagtgaccttggctaataactttaaatgtactcctgtgaaacctatcccaataatccccaccgccttagccagaaatctgtcttccaatctgaacatttcacaggtgcagggaacgtataaatatggatatcttaccatggacgaaacccgtaaactgctcctcctgcttgagagcgatcctaaagtgtattcgctgcctctggtgggcatttggctgtcaggaattacgcatatttactctccgcaggtctgggcctgctgtttgaggtacattttcaactccagcgttcaggagcgagtattcagcgaatccggcaattttattattgtgctgtatagtatgacacataaggaaccagaattctacgagtgtttcccctgcgacggcaaaatcccagactttcggttccagctgctgacatccaaggaaaccctgcatcttttcaagaatgtggagccgccagacaaaaatcccattcggtgcgaactttctgcagagagccagaatgccgaaaccgagtttttctcaaaagccagcaaaaacttcagtataaagaggtcaagtcagaagctttcatccggcaagatgcctattcacgaccatgattctggcgtcgaggatgaggattttagccccagacccatcccaagcccccaccccgtttctcagaagatcagcaagattcagcctagtgtgcctgagctttccctggtcctagatggcaacttcatagaatccaaccccttgcccaccccactggagatggtgaataacgaaaacccaccacttatcaatcacttggaacacctgaagcctctccagccccagctttacgacgaaaagcattctcccgaggtcgaagcaggagaacctagtctaagaggaatccccaaccagttgaaccaagataaaccagcccttttgcggcactgtaaggtgcggcagcccccagcctataaaaagggcaacccacatacccgtaacagtatcaaaccttcctctcacaacggcccatctcatgatatcttcgaaaaactgcagaccgtatctgctggtaacgtgcagaatgaggagtaccctatacggccatcaactttgaactcgcggcaatcctccctcgcccctcagagtcagccccacgatttcgtatttagtccccataatagtgggaggcccatggaattgcagatccctaccccaccattgcctagctattgcagtaccaatgtctgccgctgctgccagcaccacagtcacatacagtacagcccattaaattcatggcaaggcgcaaataccgtcggctctatacaggatgtgcagtccgaggccctccagaagcactcgctttttcaccccagtggatgtcccgcattatactgcaacgccttctgcagctcgtctagccctatcgcattgcgcccacagggggacatgggaagttgctctccccacagcaacatcgagccaagtcccgtcgcaagaccgccatcccacatggacctttgtaaccctcagccgtgcacggtctgcatgcacacgccaaaaacagagtcagacaatggtatgatgggactcagccccgatgcctaccggtttctcactgaacaggatcggcaactgcggctgctccaggcacagatccagagattactcgaggcccagtcattgatgccttgctccccaaagacaacagctgtagaagatactgtgcaggccggacgccagatggaactcgtgagtgttgaggcccagagttctcccggactgcacatgcgtaaaggcgtctccatcgctgtcagtaccggcgctagtctattctggaacgcggctggagaggaccaagagccggatagccaaatgaagcaggatgatacgaaaatttcctccgaggacatgaactttagtgtggatatcaataatgaagtgaccagcctccccggatctgcctccagtctgaaagccgtcgatattccctcattcgaagagagcaatatcgccgtggaggaggagttcaaccagcccctatccgtgagcaattcatcgtcactagttgtgcggaaagagccagacgtgcccgtcttcttcccttccggccaactcgccgaatccgttagcatgtgtttgcagactgggccaacaggaggagcaagcaacaacagcgagacatcagaagagcccaagatagaacacgtgatgcaaccattgttgcaccagcctagcgacaatcaaaaaatttatcaggacctgctgggacaggtaaaccatctgctgaactccagttcaaaggagactgagcagccaagtacaaaggcagtcatcatcagtcatgaatgtacgaggacccaaaacgtgtaccatacgaagaaaaagacccaccattcccggctcgttgataaagactgtgtccttaacgccacccttaaacagctgcgttccttgggcgtgaagatagatagcccaacaaaggtgaagaaaaatgcccacaatgtagatcatgctagtgtcctggcctgtatttctccagaagctgtcatcagcggcctcaattgtatgtctttcgctaacgtgggaatgtcaggtctgagtcccaacggcgtcgacctttcaatggaagccaacgctattgccctgaagtacttaaacgaaaaccagctgtcacaactatctgtaacgcgtagcaatcaaaataactgtgatcctttctctctgcttcacataaacaccgaccgttctacagtgggcctatccctcataagccctaataacatgtcgttcgccacgaaaaaatacatgaaacgttatggcctcctgcagtcctctgacaattcggaagatgaggaggaacccccagataatgcagattccaaatcggagtacctgctgaatcagaacctgcgaagtattccagagcagctggggggacagaaagagccatctaagaacgaccacgaaataatcaactgctctaactgtgagagcgtgggcactaatgcggatactcccgtgctgcgcaatattactaatgaagtcctgcaaaccaaagccaagcagcagctcacagaaaagcccgcttttctggttaagaacctcaaaccaagtcctgcagtaaaccttaggaccggaaaagctgagtttacacagcacccagagaaagaaaatgagggggatattaccatattccctgagtccctgcaaccgagcgagacactgaagcaaatgaactccatgaacagtgtgggcacttttctggacgtgaagagacttcggcagctccccaaacttttttag

SEQ ID NO: 338694 - DNA, 5009 bp, Artificial Sequence
  derived and/or modified sequence
gcgaccccaacgtcccagaggcggggccggagtcggcggtggcgctccttggagccggctcccgctcctaccctgcaaacagacctcagctccgcggaagttgcggatactgaggatttggaattaaagaaatcattcaccagacatcatggagcctatatatccttttgcacggccccagatgaataccaggtttccttcaagcaggatggtacctttccactttcctccatcaaaatgtgcactttggaacccaacgccaactggagatttcatctacttacatctcagttactacagaaatccaaagcttgtggtgactgagaagaccatccgacttgcttatcgtcatgctaagcagaataaaaaaaattcgtcatgctttttacttggttctctgacagcagacgaagatgaagaaggtgtaacattgacagtagatcgctttgatcctggtcgagaagtacctgaatgcctagaaataacccctactgcttctcttcctggggactttttgattccatgcaaagttcatactcaagaactttgttcaagagaaatgatagttcacagtgtagatgacttcagttcagctttaaaggctctacagtgccatatatgtagcaaagattccttggactgtggtaagctgctttccctaagagttcatatcacttccagggagagtttggacagtgtggaatttgacttgcattgggcagcagtaactctagcaaataactttaaatgcacacctgtgaagcccatccccattattccaacagctctggcaagaaacttgagcagtaatctgaatatttctcaagttcaagggacttataaatatggatatcttaccatggatgaaacacgcaaattgttacttttgttggaatctgatcccaaggtttattctctaccattggtgggaatttggctgtctggaattacacatatctatagtcctcaggtatgggcttgctgtttgcgatacatattcaattcttctgttcaagaaagggttttttcagaatctggaaatttcatcatagttctctattctatgacacataaggaacctgagttttatgaatgcttcccttgtgatggcaagatacctgactttcggtttcagttgctaaccagtaaggaaacattacatcttttcaaaaatgttgaacctcctgacaaaaatccaatccgttgtgaactgagcgctgaaagccaaaatgcagaaacagagtttttcagtaaggcttccaagaatttttcaattaagaggtcttcccaaaagttatcttctgggaagatgccaatacatgatcacgactctggtgttgaagatgaagatttttctccaagaccaattcctagtcctcatccagtgagtcagaagatttctaagatccaaccatcagttcctgaactttcacttgtgttggatggcaatttcatagaatcaaaccctctgcctactccattggaaatggtgaataatgaaaatcctcctttgattaaccacttggaacacttgaagccattgcaaccccagctttatgatgagaaacacagtccagaagttgaagctggagagccttccttgagaggaataccaaatcagttaaaccaggataaaccagctcttttgagacactgcaaagtaagacagccacctgcctataagaaagggaacccccataccaggaacagtattaaaccatcttctcataatgggccatctcatgatatatttgaaaagctccaaacagtttctgctggaaatgtacaaaacgaagagtatcctataagaccctccacacttaattctaggcagtcttctcttgccccgcagtcccaaccacacgattttgttttttcaccccataattcaggaagaccaatggaacttcagatacctactcccccactgccatcttactgttccacaaacgtttgcaggtgttgtcagcatcatagtcatattcaatatagtccgctaaattcttggcaaggagcaaacacagttggatccattcaagatgtccagtctgaagcccttcaaaagcattcattatttcacccaagtggatgtccagccctgtactgtaatgcattctgttcttcaagtagtcctatagccttgagacctcagggagatatgggcagttgttctccccacagcaatattgaaccatcgcctgtggcaagaccgccttcacatatggacttatgtaacccacagccttgcacagtgtgcatgcacacacccaagactgagtcagataatggaatgatgggactatctccagatgcatatcggttcctcacagaacaagacagacagctaagactacttcaggcacagattcagcgtttgttggaagcacagtctctgatgccctgttcccctaagacaactgctgttgaagacacagtgcaagctggaagacaaatggagttggtttctgtggaagcacagtcttcccctggcttgcacatgagaaaaggtgtaagcattgctgtgagcacaggtgctagcttgttttggaatgcagcaggtgaggatcaagagcctgactctcaaatgaagcaagatgataccaaaatttccagtgaggacatgaatttttctgtcgatattaataatgaagtcacaagtcttccaggtagtgcatcttcattaaaagcagttgatattcccagttttgaagagagcaacattgctgtggaagaagaatttaaccagccactttctgtatccaacagctcttctctagttgtgagaaaagaacctgatgtacctgtgttctttccaagtggccagctggcagaaagtgtaagcatgtgtttacagactggaccaacagggggtgccagtaacaattctgaaacatcagaggaaccaaaaattgagcatgtaatgcaacccttgcttcatcaaccatcagataaccagaaaatttaccaggatttattgggtcaagtaaaccacctattaaatagttcctccaaggaaactgagcagccgtctaccaaagcagtaattatcagtcatgaatgcaccagaacccaaaacgtttaccatacaaagaaaaaaacacatcattcaagactggtggacaaagattgtgtccttaatgcaactcttaagcaactaagaagccttggagtaaaaattgattctcccactaaagtgaagaaaaatgcacataacgtggatcacgccagtgtgttggcatgcatcagcccagaagcagtgatctctggattaaactgcatgtcatttgctaatgttggcatgagcggcttaagccccaatggtgtggatttgagcatggaggcaaatgctatagctctgaaatatttaaatgaaaatcagctgtcacaactgtctgtcactcgatcgaaccaaaataattgtgacccattcagccttctccatattaatacagacagaagcacagtggggcttagtttaatttcaccaaacaacatgtcatttgcaaccaaaaaatatatgaagagatatggactcctacaaagcagtgacaatagtgaagatgaagaggaacctcccgacaatgcagatagcaagagtgaatatttattgaatcagaaccttaggtccatacctgaacagcttggtggtcagaaagagccttctaagaatgaccatgaaataattaattgttctaactgtgaatctgtggggaccaacgcagatacgccagtattgagaaatattacaaatgaagttttgcagacaaaagcaaaacagcagttgactgaaaagccagctttcttagtaaagaaccttaaaccaagtcctgcagtgaaccttcgaaccgggaaagcagagttcactcaacatcctgagaaagaaaatgaaggggacattacaatttttcctgaaagtttgcaaccttctgaaacgctaaagcagatgaatagcatgaattcagtaggcaccttcttagatgtaaaacgtctcagacagttaccaaaattattttaaccttttaactccctgcccttttaatacagggacagggtgtctcctgaagatacttagggaaaacaggagcctaccacaaggctcctgatcattctggagtcactgtttcttggtagcagccaattgggaagagtgacttctgtgagatggctggctggtgataggactaagttctcattgttcaaatagagctgttcaacatcactgaaacctttaagaaaagccctgagatcagttattcctacaagtttaagtagtagacagatactatccagctctaagtctcaactgctcttttatactgtacttttttttttgagacggagttttgctcttgtagcccaggctggagtgcaatggcaggatctcagatcactgcaacctctgcctcctgggttcaagcgattttcctgcttcatcttcccaggtagctgggattacaggcatgtgccacaacgcctggctaattttgtatttttagtagagactggtttctccatgttggtcaggctggtctcaaactcccgacctcaggtgatccgcccgcctcggcctcctaaagtgctgggattacaggcgtgagccactgcgcccagctatactgtatattttaagaagttccagcatgttgcatctctgcatttatcctatatcattaaaagaacataagttatcatggtgttgggtaaattagcgaaatcaacccttcctaagtttaagggaaaagttatttttaaaaacaacttaataaaaacttacactcttttatacaagagtgtatttccccttaattaggatgcatgttgattaaactcgagatacagctttttgcagtatggtgggttggttttggtgtaacatcttcaacatgtcacactggctatcaaagaataagaaaattattgagtatgagtgtgttttataaactttctgagtttttcagatgtcttaatattttttaatagaacttaataaaatgtctagattgactatt

SEQ ID NO: 338695 - DNA, 3867 bp, Artificial Sequence
  derived and/or modified sequence
atggagcccatctaccccttcgccagaccccagatgaacaccagattccccagcagcagaatggtgcccttccacttcccccccagcaagtgcgccctgtggaaccccacccccaccggcgacttcatctacctgcacctgagctactacagaaaccccaagctggtggtgaccgagaagaccatcagactggcctacagacacgccaagcagaacaagaagaacagcagctgcttcctgctgggcagcctgaccgccgacgaggacgaggagggcgtgaccctgaccgtggacagattcgaccccggcagagaggtgcccgagtgcctggagatcacccccaccgccagcctgcccggcgacttcctgatcccctgcaaggtgcacacccaggagctgtgcagcagagagatgatcgtgcacagcgtggacgacttcagcagcgccctgaaggccctgcagtgccacatctgcagcaaggacagcctggactgcggcaagctgctgagcctgagagtgcacatcaccagcagagagagcctggacagcgtggagttcgacctgcactgggccgccgtgaccctggccaacaacttcaagtgcacccccgtgaagcccatccccatcatccccaccgccctggccagaaacctgagcagcaacctgaacatcagccaggtgcagggcacctacaagtacggctacctgaccatggacgagaccagaaagctgctgctgctgctggagagcgaccccaaggtgtacagcctgcccctggtgggcatctggctgagcggcatcacccacatctacagcccccaggtgtgggcctgctgcctgagatacatcttcaacagcagcgtgcaggagagagtgttcagcgagagcggcaacttcatcatcgtgctgtacagcatgacccacaaggagcccgagttctacgagtgcttcccctgcgacggcaagatccccgacttcagattccagctgctgaccagcaaggagaccctgcacctgttcaagaacgtggagccccccgacaagaaccccatcagatgcgagctgagcgccgagagccagaacgccgagaccgagttcttcagcaaggccagcaagaacttcagcatcaagagaagcagccagaagctgagcagcggcaagatgcccatccacgaccacgacagcggcgtggaggacgaggacttcagccccagacccatccccagcccccaccccgtgagccagaagatcagcaagatccagcccagcgtgcccgagctgagcctggtgctggacggcaacttcatcgagagcaaccccctgcccacccccctggagatggtgaacaacgagaacccccccctgatcaaccacctggagcacctgaagcccctgcagccccagctgtacgacgagaagcacagccccgaggtggaggccggcgagcccagcctgagaggcatccccaaccagctgaaccaggacaagcccgccctgctgagacactgcaaggtgagacagccccccgcctacaagaagggcaacccccacaccagaaacagcatcaagcccagcagccacaacggccccagccacgacatcttcgagaagctgcagaccgtgagcgccggcaacgtgcagaacgaggagtaccccatcagacccagcaccctgaacagcagacagagcagcctggccccccagagccagccccacgacttcgtgttcagcccccacaacagcggcagacccatggagctgcagatccccaccccccccctgcccagctactgcagcaccaacgtgtgcagatgctgccagcaccacagccacatccagtacagccccctgaacagctggcagggcgccaacaccgtgggcagcatccaggacgtgcagagcgaggccctgcagaagcacagcctgttccaccccagcggctgccccgccctgtactgcaacgccttctgcagcagcagcagccccatcgccctgagaccccagggcgacatgggcagctgcagcccccacagcaacatcgagcccagccccgtggccagaccccccagccacatggacctgtgcaacccccagccctgcaccgtgtgcatgcacacccccaagaccgagagcgacaacggcatgatgggcctgagccccgacgcctacagattcctgaccgagcaggacagacagctgagactgctgcaggcccagatccagagactgctggaggcccagagcctgatgccctgcagccccaagaccaccgccgtggaggacaccgtgcaggccggcagacagatggagctggtgagcgtggaggcccagagcagccccggcctgcacatgagaaagggcgtgagcatcgccgtgagcaccggcgccagcctgttctggaacgccgccggcgaggaccaggagcccgacagccagatgaagcaggacgacaccaagatcagcagcgaggacatgaacttcagcgtggacatcaacaacgaggtgaccagcctgcccggcagcgccagcagcctgaaggccgtggacatccccagcttcgaggagagcaacatcgccgtggaggaggagttcaaccagcccctgagcgtgagcaacagcagcagcctggtggtgagaaaggagcccgacgtgcccgtgttcttccccagcggccagctggccgagagcgtgagcatgtgcctgcagaccggccccaccggcggcgccagcaacaacagcgagaccagcgaggagcccaagatcgagcacgtgatgcagcccctgctgcaccagcccagcgacaaccagaagatctaccaggacctgctgggccaggtgaaccacctgctgaacagcagcagcaaggagaccgagcagcccagcaccaaggccgtgatcatcagccacgagtgcaccagaacccagaacgtgtaccacaccaagaagaagacccaccacagcagactggtggacaaggactgcgtgctgaacgccaccctgaagcagctgagaagcctgggcgtgaagatcgacagccccaccaaggtgaagaagaacgcccacaacgtggaccacgccagcgtgctggcctgcatcagccccgaggccgtgatcagcggcctgaactgcatgagcttcgccaacgtgggcatgagcggcctgagccccaacggcgtggacctgagcatggaggccaacgccatcgccctgaagtacctgaacgagaaccagctgagccagctgagcgtgaccagaagcaaccagaacaactgcgaccccttcagcctgctgcacatcaacaccgacagaagcaccgtgggcctgagcctgatcagccccaacaacatgagcttcgccaccaagaagtacatgaagagatacggcctgctgcagagcagcgacaacagcgaggacgaggaggagccccccgacaacgccgacagcaagagcgagtacctgctgaaccagaacctgagaagcatccccgagcagctgggcggccagaaggagcccagcaagaacgaccacgagatcatcaactgcagcaactgcgagagcgtgggcaccaacgccgacacccccgtgctgagaaacatcaccaacgaggtgctgcagaccaaggccaagcagcagctgaccgagaagcccgccttcctggtgaagaacctgaagcccagccccgccgtgaacctgagaaccggcaaggccgagttcacccagcaccccgagaaggagaacgagggcgacatcaccatcttccccgagagcctgcagcccagcgagaccctgaagcagatgaacagcatgaacagcgtgggcaccttcctggacgtgaagagactgagacagctgcccaagctgttctag

SEQ ID NO: 338696 - protein, 1287 aa, Artificial Sequence
  derived and/or modified sequence
MEPIYPFARPQMNTRFPSSRMVPFHFPPSKCALWNPTPTGDFIYLHLSYYRNPKLVVTEKTIRLAYRHAKQNKKNSSCFLLGSLTADEDEEGVTLTVDRFDPGREVPECLEITPTASLPGDFLIPCKVHTQELCSREMIVHSVDDFSSALKALQCHICSKDSLDCGKLLSLRVHITSRESLDSVEFDLHWAAVTLANNFKCTPVKPIPIIPTALARNLSSNLNISQVQGTYKYGYLTMDETRKLLLLLESDPKVYSLPLVGIWLSGITHIYSPQVWACCLRYIFNSSVQERVFSESGNFIIVLYSMTHKEPEFYECFPCDGKIPDFRFQLLTSKETLHLFKNVEPPDKNPIRCELSAESQNAETEFFSKASKNFSIKRSSQKLSSGKMPIHDHDSGVEDEDFSPRPIPSPHPVSQKISKIQPSVPELSLVLDGNFIESNPLPTPLEMVNNENPPLINHLEHLKPLQPQLYDEKHSPEVEAGEPSLRGIPNQLNQDKPALLRHCKVRQPPAYKKGNPHTRNSIKPSSHNGPSHDIFEKLQTVSAGNVQNEEYPIRPSTLNSRQSSLAPQSQPHDFVFSPHNSGRPMELQIPTPPLPSYCSTNVCRCCQHHSHIQYSPLNSWQGANTVGSIQDVQSEALQKHSLFHPSGCPALYCNAFCSSSSPIALRPQGDMGSCSPHSNIEPSPVARPPSHMDLCNPQPCTVCMHTPKTESDNGMMGLSPDAYRFLTEQDRQLRLLQAQIQRLLEAQSLMPCSPKTTAVEDTVQAGRQMELVSVEAQSSPGLHMRKGVSIAVSTGASLFWNAAGEDQEPDSQMKQDDTKISSEDMNFSVDINNEVTSLPGSASSLKAVDIPSFEESNIAVEEEFNQPLSVSNSSLVVRKEPDVPVFFPSGQLAESVSMCLQTGPTGGASNNSETSEEPKIEHVMQPLLHQPSDNQKIYQDLLGQVNHLLNSSSKETEQPSTKAVIISHECTRTQNVYHTKKKTHHSRLVDKDCVLNATLKQLRSLGVKIDSPTKVKKNAHNVDHASVLACISPEAVISGLNCMSFANVGMSGLSPNGVDLSMEANAIALKYLNENQLSQLSVTRSNQNNCDPFSLLHINTDRSTVGLSLISPNNMSFATKKYMKRYGLLQSSDNSEDEEEPPDNADSKSEYLLNQNLRSIPEQLGGQKEPSKNDHEIINCSNCESVGTNADTPVLRNITNEVLQTKAKQQLTEKPAFLVKNLKPSPAVNLRTGKAEFTQHPEKENEGDITIFPESLQPSETLKQMNSMNSVGTFLDVKRLRQLPKLF

SEQ ID NO: 338697 - DNA, 3864 bp, Artificial Sequence
  derived and/or modified sequence
atggaacctatctatcccttcgcccggccccagatgaatacgcgttttccttcctctagaatggttcccttccatttcccacccagtaagtgtgccctgtggaatcccactccgaccggagattttatttacctacatctcagttattacaggaacccaaagcttgtggtaacagagaagaccatccggttggcgtaccgtcacgcaaaacagaataagaagaattccagttgcttcctgcttggatctctcactgcagatgaagatgaagagggcgtgaccctaacagtggatcgcttcgacccaggccgagaggtccctgagtgtctcgagattactcctactgcttccctcccaggagactttctcatcccatgcaaggttcacacccaggaactgtgctctagggaaatgatcgttcactcagtagatgacttctcgtcagcccttaaggccttacagtgtcatatctgttccaaggactccctggactgtggaaaactgttgtccttaagggtacacatcactagccgggaatcacttgattccgtcgagttcgatctccactgggcggctgtcacacttgcgaataatttcaaatgtaccccagtgaagccaattccaatcataccgactgctctggcaagaaacttgagcagtaatctgaacataagccaggtacagggcacttataaatatggatacttgaccatggacgaaactcgaaaacttctcctactcctggaatctgatcctaaggtatactccctgcctctggtgggtatatggttaagcggaatcacccacatttactcgccacaagtttgggcctgttgcctgagatacatcttcaacagcagtgttcaggaaagagtttttagtgagtcaggcaatttcattatagtgttatacagtatgacgcacaaagaaccggagttttacgagtgttttccatgtgatggtaagattcccgactttagattccaactcctcacatcaaaagagaccctacaccttttcaagaacgttgagcccccagataagaaccctatccggtgtgagttaagcgcagagtcacagaatgcagagaccgagttcttctctaaagcctcaaagaacttcagtatcaaacgcagtagtcagaagctaagttcaggcaaaatgcctattcacgaccacgactcaggcgtagaggatgaggatttttcacctcggcctatcccatctccccatccggtatctcaaaagatctccaaaattcagccatcagtgccggagctcagtctggtcttggacggcaactttatcgaatccaaccccctccctacgcccctggagatggtcaataacgaaaacccacccctcatcaatcatctcgaacatctcaagccgctgcagcctcaactatatgatgaaaagcactcacccgaggtagaagcaggcgagccatcgctgcgtggcattccaaaccagctaaaccaggataagcctgcacttctacgacattgcaaagtgcgccagccccctgcttataagaaggggaaccctcacactcgtaatagtattaagccaagctctcataatggaccgagtcacgacatcttcgaaaagctacaaacagtgagcgctggtaatgtccagaatgaagagtaccccatccgcccatctactttgaattctagacagtctagcctggccccacagtcccagccccatgactttgtgttttctccacataattcagggaggcctatggaactgcagattcccaccccccctttgccatcttattgctctaccaacgtttgccggtgttgccagcaccactcccacatccaatattcacccctaaactcatggcagggcgcaaataccgtgggctcaattcaggacgtccaatcagaggccttacagaaacattctctttttcacccctccgggtgtcccgctctttattgcaacgccttttgctcaagctcttcccccattgccctccgtccacagggagatatgggctcgtgctccccccacagcaatattgaaccttcccctgtggccaggccgccgagtcacatggacctctgtaatccgcagccttgcacggtgtgcatgcacacacccaaaacggagtctgataatggtatgatggggttgtccccagacgcctacaggtttttaactgaacaggaccgtcagctgcggttacttcaggcccagattcagagactcttagaagcacagagcctgatgccttgcagccctaagacaactgctgttgaagatactgttcaagccggaagacaaatggaactggtatcagtcgaggctcagagttcaccaggtctccacatgcgcaaaggggtgagcatagcagtgagcaccggggccagcctgttctggaacgctgctggagaggatcaggaaccagattcacaaatgaagcaggacgacactaagatttcaagcgaggatatgaatttcagcgtggacataaataacgaagttacatctctgcccggctcagcctcatccttgaaggcggtggatatccctagtttcgaagagtctaacattgctgtggaagaggagtttaatcagcccctgtcagtgtcaaactcgtcgctggttgtgagaaaagaacctgatgtgccagtcttcttcccctcaggtcagctggcagagagtgtctccatgtgcttgcagaccggtcccactggcggagcctctaataattccgaaacgtcagaggagcctaagatcgaacatgtaatgcagccactgttgcaccagccttccgacaatcaaaagatctatcaggatctcttggggcaggtcaaccatctactaaactcaagctcgaaggagacagagcagccgagtactaaggctgtcatcatcagtcatgaatgcaccagaactcagaatgtgtaccatacgaagaaaaagacacaccactcccgcctcgtcgataaggactgtgttttgaatgccacgctcaaacagcttagaagtctgggagtcaaaatagactctcccacgaaagtgaagaagaacgcccacaatgtcgatcatgctagcgtactggcatgcatctcccctgaggcagttatttctgggttaaactgcatgagcttcgcaaatgtgggaatgagcggcctgagcccaaacggggttgatctctctatggaggcgaatgccattgcgctaaagtacttgaacgagaaccagctttcccagctcagcgtgacgcggagtaaccagaataattgtgatccattctctctattacacattaacaccgaccgctcaacagtgggattaagtctcatttcccccaacaatatgagcttcgccactaagaagtacatgaaacgatacggtttactgcagtcctctgacaacagtgaggacgaggaggaacctccagataacgccgacagcaagagcgagtacctgctcaaccagaacctacggtcgataccagaacagttgggaggccagaaggagccctccaagaacgaccatgagattataaattgttcaaactgtgaaagcgtcggaacaaatgcagatacgccggtgctgaggaacatcactaacgaagttttgcagaccaaagctaaacagcagctaacggagaaaccggcgttcctagtgaaaaatctgaaacccagtccagccgtgaatctgagaaccggcaaagccgaatttactcagcatcccgagaaagagaacgagggcgatataacgatctttcccgaatctctgcagccgagcgaaacgctgaagcaaatgaattccatgaattctgtgggcaccttcctggatgtcaagagacttcggcaactccccaaactattttag

SEQ ID NO: 338698 - DNA, 3864 bp, Artificial Sequence
  derived and/or modified sequence
atggagcctatctatccgttcgcccggcctcagatgaatacacgctttccctcctcaagaatggtgccttttcacttcccaccttcaaagtgcgcactgtggaacccaactcccacaggcgattttatctatttacacctttcttactacagaaatccaaagttggtggtaactgaaaagacaatcaggctggcgtatcggcatgccaagcagaataaaaagaactctagctgctttttgttgggtagtttaaccgcggatgaagatgaggaaggagtcacactaactgttgatcgctttgaccctggacgtgaggtgcctgaatgcctcgagattacccctacggcgtctcttcccggcgatttcctgatcccatgtaaggtgcatactcaagaattgtgcagtagagaaatgatcgtgcacagtgttgatgacttctctagtgcccttaaagcgctgcagtgccacatatgttccaaggatagtttagactgtggaaagttgctctctctgcgtgtgcacataacctctcgtgaaagtcttgatagcgtcgagttcgacctgcactgggccgcagtgaccctggctaacaattttaagtgcacccccgtaaagcctattccaattattcccacagcacttgcgcgtaatctgtctagtaacttaaacataagccaggtacagggcacctacaaatatggctatttgacaatggacgaaaccaggaagctgcttttactgcttgaatccgatcctaaggtttacagtctgcctcttgtcggcatttggctgagcgggattacgcatatttatagtcctcaagtgtgggcctgctgtctgaggtatattttcaattcctcggtgcaggagcgggtgttttccgagtccggcaactttattattgtgctgtattccatgacccacaaggagccagaattttatgagtgcttcccttgcgacggtaaaataccagatttcaggttccaactgctgacatctaaagagacgctgcacctgttcaagaatgttgaacctcctgataagaacccaatccgctgcgagctgtctgccgagagccagaacgccgaaacagagtttttctctaaagcaagcaagaacttttcaataaaacgaagctctcaaaagctgtccagcggcaagatgccaatacacgatcatgatagtggggttgaagatgaagactttagtccacggccaattccttcacctcaccctgtttcccaaaagatcagcaaaattcagccctccgtccccgaattgagcctggtgcttgatggcaacttcatagagtcaaaccccctgcctacacctcttgaaatggtgaacaacgagaacccccccctaataaatcatctggaacacctcaaaccgcttcaacctcaactgtatgatgagaagcacagtccagaggtcgaagctggagaacctagccttcgggggatccccaaccagcttaatcaagacaagccagcactgctcagacattgcaaggtacgccaaccccccgcctataagaagggaaatccccacactcgaaatagtatcaagccctcttctcataacggacccagccacgatatcttcgaaaaactgcagacagtctccgccggcaacgtgcagaatgaggaatatcctatccgtccctcaactctgaatagtcgccagtctagtctggcaccacaaagccagccccacgactttgtcttctcgcctcataattctggcaggcctatggaacttcagatccctactcctccactcccctcctattgctccacaaatgtgtgtcggtgctgccaacatcattcccatatacagtactccccactgaattcctggcagggcgcaaacactgtggggagcatccaggacgttcagagtgaagctttgcagaagcacagcctcttccatcccagtgggtgtccagccttgtattgcaatgctttctgctcatctagcagccccatagctttacgaccccagggagatatggggtcctgctccccccacagcaacatagaacccagtcccgtggcgcgcccgccaagccacatggacttgtgcaacccccagccgtgcactgtttgtatgcacacaccaaagaccgagagcgataatggaatgatgggactttctccggacgcctatcgcttcctgaccgagcaagataggcagctgcggcttctgcaggcacagatccagcggctcctggaagcacagtccctaatgccttgtagcccaaagacgacagccgtggaggatacagtgcaggcggggcgccaaatggaactcgtcagtgtggaggcacagagtagccctgggcttcacatgcgcaagggcgtgtctatcgctgtttccacaggtgctagtctgttctggaacgcagccggggaggaccaggaacccgactcgcagatgaagcaggatgacaccaaaatctcttccgaggatatgaacttcagcgtcgatattaacaacgaagttacatccctgcccggctctgccagcagcctgaaggccgttgatatcccaagcttcgaagagtctaacatcgccgtggaagaggaattcaaccagcccctgagcgtttccaactcctctctggtcgttagaaaagagccagacgtccctgtctttttcccctctggacagctggccgagagtgtcagcatgtgtctccagaccggccccactggcggggcatcaaacaattctgaaaccagtgaggagcctaagatcgaacacgtgatgcagcccctactgcatcagccatccgacaaccaaaaaatctaccaggatcttttggggcaggtcaatcatttacttaactcatcttctaaggagaccgagcagcccagcacaaaagctgtaatcatctctcatgagtgtactagaacccagaacgtctaccataccaagaaaaagacgcaccactccaggctcgtggacaaagattgtgtacttaacgctaccttgaagcagctgcggtccctgggcgtgaagatcgactcccctaccaaagtgaaaaagaatgctcacaacgtggaccacgcaagcgtcctggcatgcatcagtcccgaggccgtgattagcgggctgaattgtatgagttttgctaacgtggggatgagtggcttgagtcctaatggagtggatcttagcatggaggccaacgcgattgcgcttaagtacctcaacgaaaatcagctatcacagctttccgtcacccgttctaatcagaataactgcgaccccttcagtctcctgcatattaataccgaccgtagtaccgtcgggctgagcctgatctctcccaacaacatgtcctttgcgaccaaaaagtacatgaagcgctatggcttgctgcagtctagcgataattctgaagacgaagaggagcctcctgataatgccgacagcaagtcggaatacctgctcaatcagaatttgcggtctattccagaacagcttggcgggcagaaagaaccttccaagaatgaccacgagattataaactgtagtaactgtgagtccgtggggaccaatgcagatactcctgtattgagaaatatcactaatgaggtgttacagactaaggccaagcagcagctcacggaaaaacctgccttcctagtaaagaatctgaagccctctccagcggttaatctgagaacgggcaaagctgagttcacccagcatcctgagaaagaaaatgagggagacattactatctttccggagagtctacagccctctgagacgctcaaacaaatgaactccatgaacagcgtggggacgttcctcgacgtgaagcgactgcgtcaactgcctaagctcttttag

SEQ ID NO: 338699 - DNA, 3864 bp, Artificial Sequence
  derived and/or modified sequence
atggaacccatatatccgtttgcccgccctcagatgaacactagatttccctctagccgcatggttccattccacttccctccaagcaaatgtgcattgtggaaccctaccccaactggcgactttatttacttgcatctcagctattacaggaacccgaaactggtggtgactgagaagactatcagactggcttatcgccacgccaaacagaacaagaaaaatagcagctgctttttgttgggatcactgactgccgacgaggatgaggagggggtgactctcacagtagataggttcgatccggggagagaagtgcctgagtgtctcgaaattactccgacagcaagcctgccaggtgatttcttgataccatgtaaggtccacacccaggaactctgcagcagggagatgattgtccatagcgtggacgatttctctagcgcgctcaaagccctccagtgccatatatgctctaaggatagcctggactgcggcaagcttctgtcgttgagagtgcatataacatccagagaaagtctggattctgtcgagtttgatttgcactgggctgctgtaacgctcgccaataactttaagtgtactcctgttaagccaatccctattatccccaccgcactggctcggaacctcagctccaacctgaacatttcacaggtacaaggtacatacaagtacggctacctgaccatggatgagacgagaaagttactgctgctgttggagtccgacccaaaggtgtacagcctgccactcgttggaatttggctgtctggcattacgcacatttactcacctcaggtctgggcctgctgcctgcgctatatcttcaactcctccgtccaagaaagagtgttctctgaatcaggcaacttcatcatcgtgctgtacagtatgactcacaaagaacctgagttttacgagtgtttcccatgcgatggtaagatccccgatttcaggtttcagttgctgacatcaaaagagaccctacatctgtttaaaaatgttgagcccccagataagaacccaatacggtgtgaactgagtgctgagtcccagaacgctgaaaccgaattctttagtaaagcaagtaagaatttttccataaagaggtctagccaaaaattgagttcaggcaagatgcccattcacgatcatgattcgggagtggaagatgaggatttctcaccgcgccctatcccctctcctcaccccgtgagtcagaagatatccaaaatccagccaagtgtgcctgagttaagcttggtgctcgacggaaacttcattgaatccaatcccctcccgacaccgctcgaaatggtcaacaacgaaaaccctcccctgatcaaccatctggaacacctcaagccactgcagccacaattgtatgacgagaaacactcacccgaggtcgaagccggagagccttccttacgcgggatccccaaccaactgaaccaggacaagcctgcgctcttgcggcactgtaaagtgaggcagcctcccgcgtacaaaaaaggtaacccacacactagaaattcaatcaaaccctcctcgcataacgggcctagccatgacatcttcgagaagctgcagactgtgtccgccgggaacgttcagaacgaagagtatccaattagaccgagcaccctgaacagtcgacaaagttccctggcgccgcagtcacagcctcatgattttgttttctccccccacaattccgggagacctatggaactccagattcccacaccccccctgcccagctattgctctacaaatgtctgccggtgttgccaacaccactcacacatccagtattcccctctaaactcttggcagggcgccaacacagtgggtagcattcaggacgtccagagcgaggctttacagaaacactctctgtttcacccaagtggctgccccgccctgtattgcaatgctttctgttcctccagcagcccgattgctctccgcccacagggcgatatgggtagttgttctccacatagtaatatcgagccatctcctgttgcaaggcctccgtctcatatggacctctgtaatccccaaccctgcaccgtttgcatgcacacacccaagacagagagcgacaacggaatgatggggctgagtccagacgcttatcgcttcctcactgagcaggaccgacagctgcggctgctgcaggcacaaatacaaagactgctggaggctcaatctctaatgccatgttcgcctaagaccacagccgttgaggacaccgtgcaggctggacgtcagatggagctggtgtcagtcgaggcccagtctagcccggggctgcacatgcgaaaaggggtctcaattgccgtgtctacgggggcttccctgttttggaacgctgccggggaagaccaagagccagatagccaaatgaagcaggacgatactaagatttcatcggaggatatgaatttctctgtggatatcaacaatgaggtgaccagccttcctggctcagcaagttcccttaaagccgtggacatccccagcttcgaggaatccaacattgccgtagaagaggaatttaaccagccattgagcgtcagcaacagttctttggtggtgaggaaagagccggacgtccccgtgttcttcccttccggccaattggctgagtccgtctccatgtgtctgcagaccggcccgactggaggcgcctcaaataactctgaaacgagtgaagagcctaagatcgaacatgtaatgcagcccctgcttcaccagccatcagataatcagaagatctaccaggatctcttgggccaagtgaaccatttgctgaacagttcctccaaggaaaccgagcagccgagcaccaaagccgtaataatttcgcacgagtgtactcggacccaaaatgtgtaccacactaaaaaaaaaactcaccattctcgtctcgttgacaaggactgcgtcctgaacgccactttaaaacaactacgcagccttggagtgaaaatcgattcaccaacaaaggttaagaaaaacgctcacaacgttgatcacgcatctgttctcgcatgcatcagtcccgaagctgttatcagcggcttaaattgtatgagcttcgccaatgtcggaatgtctggactgagtccaaatggcgtagacctgagcatggaggcgaacgccatcgcactgaagtacctcaatgaaaaccagctcagtcaactctccgttaccaggagtaaccagaataattgcgacccgttttcactgctgcatatcaatacagatcgctccaccgtcggccttagcttgataagccctaacaatatgagctttgcgactaaaaaatatatgaaacgatatgggctgctgcagtcaagtgataactcagaagacgaagaggagccaccagataatgctgacagtaaatctgagtatctgctgaatcagaatctcagatccatccctgagcagcttgggggccagaaggagccctccaaaaacgaccatgagataattaactgttctaattgtgagtctgtcggaactaatgctgatacaccggtccttagaaacattacaaatgaagtcttgcagaccaaagccaaacagcagctgacagaaaaacctgcttttctggtaaagaacctgaagccgtctccggcggtcaatctgcggacaggcaaagctgagtttacacaacatcccgaaaaggagaacgagggggacatcacaatcttcccggagtctctgcagccatcagaaacactgaaacaaatgaactcaatgaattctgtgggtactttccttgacgtgaaacgattgcgccagcttcctaaactgttctag

SEQ ID NO: 338700 - DNA, 3864 bp, Artificial Sequence
  derived and/or modified sequence
atggagcccatctacccctttgcccggccccagatgaacacccgcttccccagcagcaggatggtgcccttccacttcccccccagcaaatgtgccctgtggaaccccacccccactggagacttcatctacctgcacctgagctactacagaaaccccaagctggtggtgacagagaagaccatccggctggcctacagacatgccaagcagaacaagaagaacagcagctgcttcctgctgggcagcctgacagcagatgaagatgaggagggcgtgaccctgactgtggacagatttgaccccggccgggaggtgcctgagtgcctggagatcacccccacagccagcctgcccggggacttcctgatcccctgcaaggtgcacacccaggagctgtgcagccgggagatgattgtgcacagcgtggatgacttcagcagcgccctgaaggccctgcagtgccacatctgcagcaaggacagcctggactgtgggaagctgctgagcctgcgggtgcacatcaccagccgggagagcctggacagcgtggagtttgacctgcactgggccgctgtgaccctggccaacaacttcaagtgcacccctgtgaagcccatccccatcatccccacagccctggccaggaacctgagcagcaacctgaacatcagccaggtgcagggcacctacaagtatggctacctgaccatggatgagaccaggaagctgctgctgctgctggagagtgaccccaaggtgtacagcctgcccctggtgggcatctggctgagcggcatcacccacatctacagcccccaggtgtgggcctgctgcctgcgctacatcttcaacagctctgtgcaggagagggtcttcagcgagagcggcaacttcatcatcgtgctgtacagcatgacccacaaggagcctgagttctatgagtgcttcccctgtgatggcaagatcccagacttccgcttccagctgctgaccagcaaggagaccctgcacctgttcaagaatgtggagcccccagacaagaaccccatccgctgtgagctgtctgctgagagccagaatgctgagacagagttcttcagcaaggccagcaagaacttcagcatcaagaggagcagccagaagctgagcagcggcaagatgcccatccatgaccatgattctggagtggaggatgaggacttcagcccccggcccatccccagcccccaccctgtgtcccagaagatcagcaagatccagcccagcgtgcctgagctgagcctggtgctggatggcaacttcatcgagagcaaccccctgcccacccccctggagatggtgaacaatgaaaatcctcctctcatcaaccacctggagcacctgaagcccctgcagccccagctgtatgatgagaagcacagccctgaggtggaggccggggagcccagcctgcggggcatccccaaccagctgaaccaggacaagccagccctgctgcggcactgcaaggtgcggcagcccccagcctacaagaagggcaacccccacaccagaaattccatcaagcccagcagccacaacggccccagccatgacatctttgagaagctgcagacagtgtctgctggaaatgtgcagaatgaggagtaccccatccggcccagcaccctgaacagccggcagagcagcctggccccccagagccagccccatgactttgtgttcagcccccacaacagcggccggcccatggagctgcagatccccaccccacccctgcccagctactgcagcaccaacgtgtgccgctgctgccagcaccacagccacatccagtacagccccctgaacagctggcagggcgccaacacagtgggcagcatccaggatgtgcagagcgaggccctgcagaagcacagcctcttccaccccagcggctgcccagccctgtactgcaatgccttctgcagcagcagcagccccatcgccctgcggccccagggcgacatgggcagctgcagcccccacagcaacatcgagcccagccctgtggcccggccccccagccacatggacctgtgcaacccccagccctgcaccgtgtgcatgcacacccccaagacagaaagtgacaatggcatgatgggcctgagcccagatgcctaccgcttcctgacagagcaggaccggcagctgcggctgctgcaggcccagatccagaggctgctggaggcccagagcctgatgccctgcagccccaagaccacagctgtggaggacacagtgcaggccggccggcagatggagctggtgtctgtggaggcccagagcagccctggcctgcacatgaggaagggcgtgtccattgctgtgtccactggagccagcctcttctggaatgctgctggggaggaccaggagccagacagccagatgaagcaggatgacaccaagatcagcagcgaggacatgaacttctctgtggacatcaacaatgaggtgaccagcctgcccggcagcgccagcagcctgaaggctgtggacatccccagctttgaggagagcaacattgctgtggaggaggagttcaaccagcccctgtctgtgagcaacagcagcctggtggtgaggaaggagccagatgtgcctgtgttcttccccagcggccagctggccgagagcgtgtccatgtgcctgcagacaggccccactggaggagccagcaacaacagcgagaccagcgaggagcccaagattgagcacgtgatgcagcccctgctgcaccagcccagcgacaaccagaagatctaccaggacctgctgggccaggtgaaccacctgctgaacagcagcagcaaggagacagagcagcccagcaccaaggctgtgatcatcagccatgaatgtaccaggacccagaatgtgtaccacaccaagaagaagacccaccacagccggctggtggacaaggactgtgtgctgaatgccaccctgaagcagctgcggagcctgggcgtgaagattgacagccccaccaaggtgaagaagaatgcccacaacgtggaccacgcctctgtgctggcctgcatcagccctgaggccgtcatcagcggcctgaactgcatgagctttgccaacgtgggcatgagcggcctgagccccaacggggtggacctgtccatggaggccaatgccatcgccctgaagtacctgaatgaaaaccagctgagccagctgtctgtgaccaggagcaaccagaacaactgtgaccccttcagcctgctgcacatcaacacagacaggagcacagtgggcctgagcctcatcagccccaacaacatgagctttgccaccaagaagtacatgaagagatatggcctgctgcagagcagtgacaacagtgaagatgaggaggagcccccagacaatgctgacagcaagtctgagtacctgctgaaccagaacctgcggagcatccctgagcagctgggcggccagaaggagcccagcaagaatgaccacgagatcatcaactgcagcaactgtgagagcgtgggcaccaatgctgacacccctgtgctgaggaacatcaccaatgaggtgctgcagaccaaggccaagcagcagctgacagagaagccagccttcctggtgaagaacctgaagcccagccctgctgtgaacctgaggacaggcaaggccgagttcacccagcaccctgagaaggaaaatgaaggagacatcaccatcttccctgagagcctgcagcccagcgagaccctgaagcagatgaacagcatgaacagcgtgggcaccttcctggatgtgaagaggctgcggcagctgcccaagctgttctag

SEQ ID NO: 338701 - DNA, 3864 bp, Artificial Sequence
  derived and/or modified sequence
atggagcccatctaccccttcgcccggccccagatgaacacccggtttccaagttcaaggatggtgccttttcatttccctccatcaaaatgtgcactgtggaaccccactcctactggtgactttatatacttgcacctatcttattaccgaaatccaaagctggttgtaaccgaaaagacgatacggttggcatatagacatgcaaaacagaataagaaaaattcgagttgctttctcctggggagcttaacggctgacgaagatgaggaaggagtaactctgaccgtggacaggttcgacccaggcagggaggtgcctgaatgcctcgagattactcccacggcgtccctgcccggtgatttcctgattccttgcaaggtccacactcaggagttgtgctcaagagagatgatagtgcatagtgtggacgatttttcctcagctttgaaagctctccaatgtcatatctgcagtaaagactcactcgattgcgggaagctcctgtcacttagggtacacatcaccagtcgagaatccctggacagcgtggagtttgatctgcactgggcagccgtgactctggcaaataatttcaagtgtactccagtgaaacccatcccgataatccccaccgcccttgccagaaacctgtccagcaatttgaacatttcccaggtgcagggcacctataagtatggatacttaaccatggatgaaacgcgtaagcttctgctccttctggagtcggacccaaaagtctatagtctacccctggtgggcatctggctttcagggatcacgcatatctatagtccgcaggtgtgggcatgctgtctgcgctatatctttaattcctccgtccaggaacgcgtgttttctgagagcggtaactttatcatcgttttgtattccatgacacacaaggagcctgaattttacgagtgcttcccctgcgatggtaaaatccctgactttaggttccagctgctcacatcgaaagagacactacacctgttcaaaaatgtcgagccacccgacaaaaaccccatccggtgtgagctctccgcagagagccagaacgcggaaacggagttctttagtaaggccagcaaaaatttctccatcaaaagatccagccagaaactgagctctggcaaaatgccaattcatgaccatgacagcggcgttgaggacgaagacttctccccgaggccgattccatctccacatcctgtttcgcagaagatttcgaagatccaaccaagcgtgccggagctgtctctggttcttgacggaaacttcattgagagtaacccacttcctacaccactggagatggtcaacaatgaaaatcccccactaattaatcacctggagcatctcaagccactccagccccagctgtacgacgaaaagcactcccccgaagtggaggctggtgagcctagcttgcgcgggatcccaaatcagcttaaccaggacaagcctgcactcctgcgccactgcaaggttcggcaaccacccgcttataaaaaggggaatccacatacccggaactctatcaagcctagtagccataatgggccctcgcacgatatctttgagaagctgcaaaccgtttcggcaggaaatgtgcagaatgaggagtaccctattcgtccttcaacactgaatagccggcagagcagtctggccccgcaaagtcaaccccacgacttcgtcttcagccctcacaacagcgggcgaccaatggaactgcagattcccactccccccctgcccagttactgcagcaccaatgtttgtcgatgttgccaacaccattcccatatccagtattcgcctttaaatagttggcagggtgcaaacactgtcggcagcatccaagatgtgcagagtgaggctttgcagaaacatagcttatttcatccctcaggctgccccgccctatactgcaacgctttttgttcctcttcaagccctattgccttgcggccccagggcgacatgggcagttgtagcccacactccaacatagaaccttcccccgtcgcaaggccccctagtcacatggatctttgtaacccacaaccctgcaccgtgtgtatgcatactccaaaaaccgaatcagacaatggcatgatgggactgtctcctgatgcatataggttcttgacagagcaggatcggcagctgcggctgctgcaggctcaaattcagcgccttttggaggcccagagccttatgccttgctccccgaagactaccgccgtggaggacactgtacaggcaggcagacagatggagctcgtgagtgtggaagctcagagctctcccggcctccacatgcggaagggagttagtatagcagtgagtacaggcgctagcttattttggaacgccgccggggaagaccaggagccagactcacagatgaagcaggacgatacaaagatctctagtgaggacatgaacttctctgtggatatcaataacgaggttacctcactccctggctcagccagcagcctgaaagcggtggatatccctagtttcgaggagtctaacatagccgtggaagaggaattcaaccagcccctgagcgtaagcaactcctcccttgtagttaggaaagagcccgacgtgccagtcttcttcccctccggccagttagccgagagcgtaagtatgtgcttgcagacagggcctactggcggcgcctctaacaactctgaaacttctgaagagcccaagatcgagcatgttatgcagccattgctgcaccagccctcggataatcagaagatctatcaggaccttctggggcaggtgaaccacctgctgaacagttcaagtaaggaaacagagcaaccctccacaaaagcagtcataatcagccacgagtgcacccgaacacagaacgtttaccacaccaaaaaaaagacccaccacagccgcctggtcgacaaggattgtgtgttaaatgctacgctaaagcaattgaggtccctgggtgtgaaaattgattcccccactaaagtgaaaaagaatgcgcataacgtcgatcacgcgtccgtgctcgcttgtatttctccggaggccgtgatctctgggcttaactgtatgtcttttgccaacgtgggcatgagcgggctttctcccaatggtgtggacctgtccatggaggctaacgccattgccctaaagtatctgaacgagaaccagctctcccaattgagtgtgacccgttcaaatcagaataattgtgacccattttctctgctgcatattaatacagaccgctctaccgtgggcctcagtctgatttctccaaacaatatgagtttcgccaccaaaaagtacatgaagcgctacggattgttgcaatcctcagataattctgaggatgaggaggaacctccagataatgccgatagcaagagtgaatacctgcttaatcagaacttgagaagcatccccgagcaacttgggggccagaaggaaccaagtaaaaacgatcatgagatcattaattgctccaactgcgaatccgtaggcactaatgctgacaccccagtgcttcggaatattacaaatgaagtgcttcaaacaaaggctaagcaacaattgacagaaaagccggcgtttcttgtgaagaacctcaagccaagccccgctgttaatctgagaacggggaaggccgaattcacgcagcatcccgagaaagagaacgaaggagacataaccatcttccccgagtccctgcagcctagcgagacgcttaagcagatgaacagcatgaacagcgtgggtacatttctagacgtaaaacgactgagacagctgcctaagttgttttag

SEQ ID NO: 338702 - DNA, 3864 bp, Artificial Sequence
  derived and/or modified sequence
atggagcccatctaccccttcgcccggccccagatgaacacccggttcccaagctctaggatggtgccatttcattttccgccatccaagtgcgcactgtggaacccaacgcccaccggcgacttcatttatttacacctctcatactacaggaaccccaaactcgtggtcacggaaaaaactattcgcctggcctacaggcacgctaaacagaataagaagaacagcagctgtttcctgttggggtccctcactgccgacgaagatgaagagggcgtgacacttacagtagaccggttcgatcccggaagggaagtccccgagtgtctggagatcactccgacagcctccctgcctggcgatttcttgattccatgcaaagtacacacgcaggagttatgctctcgggaaatgatcgtgcatagcgtcgacgatttctcgtcggcccttaaagcactgcaatgccatatatgctcgaaggatagcttagattgtggtaagctcctatctcttcgcgtgcacattacatctagagagtctctcgattcagtggagttcgatctgcattgggccgctgtaaccctggctaataacttcaagtgtacgccagtgaagcctattcccatcatccccacggccctggcaaggaatctctcctctaacctaaacattagccaggtgcagggcacttacaagtatggttatctaactatggacgaaacaaggaagctgctgctgctgctggagagcgacccgaaagtctattcactccctctggtaggcatttggttgagcggaatcacccacatctacagcccacaggtgtgggcttgctgtctccgctacatcttcaactcttctgtccaagagagggtcttcagtgaatcgggcaacttcataattgtactgtattcaatgacccacaaggagccagaattctacgagtgttttccctgcgacggcaaaatccctgacttcaggtttcagctcctgacatccaaagaaacattgcatctgttcaagaatgtggaacccccggacaagaaccccattcgctgcgagttgagtgcagagtctcagaacgctgaaaccgaatttttttccaaagccagcaagaactttagcatcaagcgatcgagccaaaagctgagctcgggcaagatgcctattcatgaccacgatagcggggtggaagatgaagattttagtcctcgtccgatcccatctccacaccccgtgtcccagaagataagcaaaatccagccatcagtacctgaattgagtcttgtccttgatggcaatttcattgagagtaatccactgccaacaccattggagatggtgaataacgagaatcccccattaataaaccacctggagcatttgaaacccctgcaaccacagctgtatgacgagaaacattcaccagaggtggaagcaggagaacctagcctcagagggatccccaatcaactgaatcaagacaagccggctcttctgagacactgtaaagtgcgccagccacccgcgtacaagaagggaaacccccacactagaaatagcatcaagcctagcagtcataatggacccagccacgacatttttgagaagttgcagaccgtgtccgctggcaacgtgcagaacgaggagtaccctatccgccccagcaccctgaattctcgccagtcctcacttgctccgcagtcgcagccccacgattttgtgttttcccctcataattctggccgaccgatggagctccagattcccaccccccccctgccgagctactgctctactaatgtctgccgctgctgtcagcatcacagccacatccagtactcaccactgaattcatggcagggtgctaacactgtcggaagcatacaggatgtgcagtccgaagccttacagaagcactcattgttccatccatctggatgtccagccctttattgtaacgccttttgctccagcagctctcctatcgcattgcgcccgcaaggagatatgggcagttgctcaccccactctaatatcgaacctagtcctgtggcgagacctccaagccacatggacctctgtaatccccaaccgtgtaccgtttgcatgcacacccctaagaccgagagcgacaatgggatgatgggcttgtcacccgacgcatatcgatttctgactgaacaagatcgccaactccggctcctacaggcccagattcagagattgctcgaagcacaaagccttatgccctgttcccctaaaactacagccgtggaggacaccgtgcaggctgggaggcaaatggaattagtgagcgtcgaggcacagtcatcaccgggcttacacatgagaaagggggtgtctattgctgttagcacaggtgccagcctgttttggaatgcggccggggaggatcaagaacccgactcccaaatgaaacaggacgatactaagatttcttcagaggatatgaacttcagcgtagatataaacaatgaggtgactagtctgcctgggagcgcaagttcgctgaaagctgttgatatcccaagctttgaggagagcaacatcgccgttgaggaagagtttaaccagccactgtcagtgtctaacagtagtctggtggtgcgcaaagagccggatgtaccggtgttttttccatcaggacagctggccgagtccgtctcgatgtgcctccagacaggtcccacagggggtgctagtaacaactctgagacatccgaggagccaaagattgaacatgtgatgcaaccgcttctgcatcaaccttccgacaatcagaagatctaccaggacctgctgggccaggtgaaccatctgctgaattccagctctaaagaaaccgagcagccttcgacaaaagctgtcattattagccacgaatgcactaggacacagaatgtctaccacactaaaaaaaagacccatcattcccggttggtggacaaggactgtgtattgaacgctactctaaagcaacttcggagtctcggagtcaagatcgattcacccaccaaagtgaagaaaaatgcccacaacgtggaccatgcgagcgtgctcgcatgtatctcaccggaagcagtgatttcaggacttaattgtatgagctttgccaacgtcggtatgtccggcctgagccccaacggtgtcgatctgagcatggaagcgaatgccatcgcacttaagtacctgaatgagaaccaactgtcacaactcagcgtcacccggtccaaccagaataattgtgaccccttctctttactgcatattaatacggaccggagtaccgtagggctcagtcttatctcccccaataatatgagttttgctactaagaagtatatgaaaagatacgggttactgcaatcgtccgataactcagaggacgaagaggagccgccagataatgcagattctaaaagcgagtatctgttgaaccagaacctgcggtctatcccggaacaactgggcggccagaaggagccaagtaagaatgatcacgaaattatcaactgtagcaattgcgagtcggttgggaccaacgctgatacgcctgtgctcagaaacatcacaaacgaggtgctgcagaccaaggccaaacagcagcttaccgaaaaacctgcatttctggttaagaacctcaagccttcaccagcggtaaacctcaggacagggaaggctgaattcacacagcaccctgaaaaggaaaacgaaggtgacattacaattttcccagaatcactgcaaccgtcggaaactttgaaacagatgaatagcatgaactcagtcggaacttttttggatgtgaagagacttcgccagcttccgaagttgttttag

SEQ ID NO: 338703 - DNA, 3864 bp, Artificial Sequence
  derived and/or modified sequence
atggagcccatctaccccttcgcccggccccagatgaacacccggttcccttcttctcgcatggtcccttttcactttcccccgtccaagtgtgcactctggaaccctacccccaccggagacttcatttatctgcacctgagctactacagaaatcctaaacttgtggttaccgagaagaccatccgcctggcatataggcacgcaaaacagaacaaaaaaaactcctcctgcttccttttggggtctctgacggctgacgaggatgaagagggggttactttaacagtggatagattcgatccaggccgcgaggttcctgaatgtcttgagatcacacccaccgcatcgctgcctggtgacttcttaataccctgtaaggttcacacccaagagctatgcagccgggaaatgatcgtccacagcgtagacgatttcagttccgcactgaaggctctgcagtgtcacatttgctcaaaagacagcctcgattgcgggaaactcctgagcctgcgagtccacataactagcagggaaagcctggactccgtcgagttcgacctccactgggcagcggtcacattagctaataacttcaagtgtacccctgtcaagccaatccctatcatcccaacagcgctggctagaaacctatcatcgaatctgaacatatctcaggtgcagggtacttacaaatacgggtacctgacaatggatgaaacaagaaagctgctgcttctacttgagtccgaccccaaggtttactcattgcctttagtcgggatatggctgtccggtatcactcacatctacagtcctcaggtttgggcctgttgcctgcgctacatcttcaatagcagtgtgcaggagagggttttttcggaatcagggaatttcattattgtcttatactctatgacccataaagaacccgagttttacgagtgcttcccctgcgatggtaaaataccagacttcagatttcagcttcttacctcaaaagaaaccttacatctgttcaaaaacgtcgagccacctgataagaaccctataaggtgcgagctgtcggcagaaagccagaatgccgaaacagagttcttcagcaaagcaagcaaaaacttcagcatcaagcgttcctcccagaaactatcttcaggcaagatgcccatccacgatcacgattcaggagtcgaggatgaagacttctccccgaggcccatcccctcaccacatccggtgtcacagaagatctccaaaattcaaccctctgtcccagagctaagcttggttctggatggaaattttattgaatcaaatccactgcccaccccgttggagatggttaataacgagaatccccccctcatcaaccacctcgagcatctgaagcctctgcagccacaactgtacgatgagaaacattcaccagaggtggaagccggagaacctagtcttagaggtatccctaatcaactgaaccaagacaaaccagctttgttgaggcactgcaaggtacggcagcctcctgcctacaagaaaggcaatccccacacccgaaactccattaagccctctagtcataatggacccagtcatgacatttttgagaaactgcagaccgtctccgctggcaacgtccagaatgaggaatatcctattaggcccagtactctgaactcaaggcaaagctctctggcccctcagagccagcctcacgacttcgtgttctccccacacaattccgggagacccatggagctccagattccaaccccacctctgccaagttattgttctactaatgtctgtagatgctgtcagcatcattcacacatccaatatagtcccctcaactcatggcagggcgccaacactgtggggtccatacaggacgtccagtccgaggctttacagaaacacagcctctttcatcccagcggatgccctgctttgtactgtaatgctttttgtagctcgtctagccctattgcgcttcgcccgcagggggatatgggctcttgttcaccccactctaacatcgagcccagtcctgtcgcgcgtcctccctcccacatggatttgtgtaatccacagccttgtacagtgtgtatgcacacacccaaaacagaatctgataacggcatgatgggcctatctcccgatgcctaccgatttctgaccgaacaggaccgccaactgagactcctgcaagctcagattcaacggttgcttgaggcacagtctttgatgccttgttctccgaagaccacagccgttgaagacacagtgcaggcaggccggcagatggagctagtgagtgtcgaagcccaaagctcgcctggcctgcatatgagaaagggagtgtccatcgccgtctcaaccggagcgtcccttttttggaatgctgcaggagaggatcaggagcctgactctcagatgaaacaggacgatacaaagattagttcagaggatatgaattttagcgtagatatcaacaatgaagtgaccagcctgccaggtagcgcatcatccctcaaagccgtggatataccatccttcgaagagtcgaatatagcggtggaagaggagttcaaccagccactcagcgtctccaatagctctctcgtggtgcggaaagaaccagacgtgcctgtgttcttcccgtcaggccagctggcagaatccgtgtccatgtgtttacaaactgggcccacaggtggggccagcaacaactcagagacaagcgaggagcccaaaatagagcatgtgatgcagccactcctgcaccagccctctgataaccagaaaatctatcaggaccttctggggcaggtcaaccacttattaaacagcagctcaaaggagaccgagcagccctcaacaaaggcagtgattatcagccacgagtgcactcgtacccaaaatgtatatcataccaagaagaagacccatcactcaagactagtggataaggattgcgtattgaatgctacactcaagcagctgcggtctctcggcgtaaagattgatagcccgacaaaagtcaagaagaatgcccataacgtagaccacgcctctgtgctggcctgtatctctcccgaggccgttatctccgggctgaattgcatgtctttcgctaatgttggcatgtcagggcttagcccaaacggtgtcgacctctccatggaggcgaatgccatagcattgaaatacctcaatgaaaatcaactcagtcagttgagtgtgacgaggtcgaatcagaataactgcgaccctttttctctgcttcatataaataccgaccggtcaacagtgggactgtcccttattagtccgaacaacatgtcttttgcgaccaagaaatatatgaaacggtacggactgctgcagagcagcgacaatagtgaagacgaggaggaaccacctgataacgcagacagtaaatccgagtatttgctgaatcagaatttgcggtcaatccctgaacaactgggcgggcagaaagagcctagtaaaaatgatcacgaaataattaactgcagcaactgcgagagcgtgggaactaatgccgacactccggtgcttaggaatattacaaacgaggtgctgcagactaaggcaaagcaacagctgactgagaagccagccttcttggtcaaaaatctgaaaccctcacctgcggttaatctgagaaccggtaaggcagagtttactcagcatccagaaaaggaaaatgagggagacataactatattccccgaatccctgcagccttcggaaactctgaagcagatgaactccatgaattccgtgggaacatttctggacgtcaaaagactgcgtcagttacctaagttattctag

SEQ ID NO: 338704 - DNA, 3864 bp, Artificial Sequence
  derived and/or modified sequence
atggaacccatctatcccttcgctcgccctcaaatgaataccagattcccttcatccagaatggtgccttttcactttcccccttccaagtgtgccctgtggaatccaacacccacaggggatttcatatacctgcacttgtcttattacaggaaccccaaacttgttgtaacggagaagaccatcaggctggcctatcgacacgccaaacagaataaaaagaatagcagttgcttccttcttggttctctgactgccgatgaagacgaggagggggttacactcacggttgacaggtttgatcccggtagggaggttcccgagtgcctagagataacgcctaccgccagcctgccaggagatttcctgataccatgtaaagtccacactcaggaactgtgttcccgggaaatgatcgtgcactcggttgacgacttttcgagcgcactgaaggctttgcagtgtcacatctgtagcaaggacagccttgactgtggaaagcttctgtcccttagggtgcacatcacctcccgcgagtcgctggattctgtggaatttgatctgcactgggccgctgtcacgctcgcgaataacttcaagtgtacccccgtgaaaccaatcccaattattcccactgccttagcccgaaacttgtctagcaatctgaatatttcacaggtacagggtacttacaaatacggctaccttactatggatgagacccggaaattattactattactggaaagtgatccaaaggtctattctttgccccttgttggaatctggctcagtgggatcacccatatttacagcccccaggtttgggcgtgctgcctgaggtatatcttcaattcctctgtgcaagaacgggtctttagtgaaagtggtaacttcatcattgttctttattccatgacccataaagagcccgagttctacgaatgcttcccatgtgatggtaagatccctgacttcagatttcagcttttgacctctaaggagacgctgcatctttttaagaacgtggagccccctgataaaaatcccatcagatgtgagctgtccgctgagtcccagaacgccgagaccgagtttttcagcaaagcgagtaaaaatttctctatcaagcggagcagccagaaactgagttctggaaagatgcccattcatgaccacgattccggtgtggaggacgaggacttcagcccacgaccaatcccctcgcctcacccggtgagtcagaagatttccaaaattcaaccaagtgtgcccgagttgtctctcgtgcttgacggaaactttatcgaaagcaacccattgccaacacctctggagatggtgaataacgagaacccaccactcattaaccatctcgagcacctgaaacccctacagccgcaattatatgacgaaaaacactccccggaagtcgaggccggtgagccaagtttgcgcggaatccccaaccagttgaatcaagacaagccagccctgctccgccattgtaaggtgagacagccccctgcctacaaaaaggggaacccacacacaagaaattctattaagccatcctcgcataacggccctagtcatgatatctttgagaagctccagactgtgagcgctggaaacgtccagaacgaagaataccccataagaccaagtacactaaacagtaggcagtccagtctcgccccacagtcccagcctcacgacttcgtcttttcgcctcacaatagcggacgtccaatggagctacagattcctacccctcccctgcccagctactgcagcaccaacgtgtgcagatgttgtcagcatcactcccacatacagtattcccccctgaactcttggcagggagccaacaccgtgggatccatccaggatgtgcagagcgaagccctccagaaacatagtctgttccacccaagcggctgtccggcactatactgcaacgcattttgtagctcctcctcacctatcgctctgcgaccccagggagacatgggctcatgctcaccacatagcaacatcgagcctagcccagtggccagaccgccaagtcacatggacctctgtaatccccagccttgtactgtgtgtatgcacacacccaaaaccgagtcggataatgggatgatgggcctttccccagacgcctatcgcttccttacggagcaggaccggcaactccgccttctgcaagctcaaatccagcgacttctcgaagcacaaagcctgatgccctgctcccccaaaactaccgccgtggaagatacggtgcaagctggacggcaaatggagctggtgagcgtagaggcgcagagtagccctggcctgcatatgcgcaaaggcgtcagcatagccgtctcaactggcgcatctctgttctggaacgcagctggagaggatcaagagcctgattcacaaatgaagcaagatgatacaaagatctccagcgaagatatgaacttctctgtggacattaataacgaggtgacatctctgccaggatcagcctccagtttaaaagccgtggatataccatctttcgaagagagcaacatagccgtcgaagaggagttcaatcagcccctgagtgtgagcaattcctctctagttgtccgcaaagagcccgacgtcccagttttcttcccgagcgggcagctagccgaatccgtctcaatgtgtcttcaaacagggcctactggaggagcatctaataatagcgagacgtcagaggaacctaagattgagcatgttatgcagcctttgttgcaccagcctagtgacaatcagaagatataccaagacctgctcggacaggtgaatcatctactcaattcaagtagcaaagaaaccgagcagcccagcacaaaggcagtgattataagccatgaatgcacccgcacccagaatgtgtaccataccaaaaaaaagacccaccattccagattggtggataaagattgtgtgctcaatgcaaccctgaagcagctgaggagcctgggcgtgaaaattgactctcccacaaaggtcaagaagaacgcacataacgtggaccatgccagcgtgctggcatgcatttcgcccgaagccgtgatttctggcctaaattgtatgtcgtttgcgaacgtgggtatgtccggtctgtctccgaacggggttgacctcagcatggaggctaacgctattgccttaaagtacctgaacgagaaccagctctcccagttgtctgtgacgcgaagcaatcaaaacaactgcgatccttttagccttttgcatattaacactgaccgaagcaccgtaggactaagcttaatctcacctaacaatatgagtttcgcaacaaaaaagtatatgaaacgttatggtctactccagtcttccgacaattctgaagacgaggaagagcctccagacaacgccgatagtaagtcagagtaccttctcaatcaaaacttaagaagcatccccgagcaactggggggacaaaaggaacccagcaagaacgatcatgagattatcaactgctcaaactgtgaatccgtgggaacaaatgcagatactccagtgctacggaatataaccaatgaagtgcttcaaactaaagctaaacaacaacttaccgagaagcctgccttcctggttaagaatctgaagccctcccctgctgtgaacttgaggactgggaaggccgagtttacacagcaccccgagaaagaaaatgagggtgatatcacaatcttccccgaatctttgcaaccatccgagaccctgaagcagatgaacagcatgaactctgttggtacattccttgatgtgaagcggctcaggcagctgcccaagctcttttag

SEQ ID NO: 338705 - DNA, 3864 bp, Artificial Sequence
  derived and/or modified sequence
atggagcccatctaccctttcgccagacctcagatgaatacccggttcccaagctccaggatggtcccgtttcatttcccaccctcaaagtgtgctctttggaaccccacaccgactggcgattttatctatcttcacctctcctactaccggaaccccaaacttgtagttacagagaaaacaatcaggctcgcctatagacatgccaagcaaaacaagaagaattcctcttgcttcctacttgggtccctgaccgctgacgaagatgaggaaggcgtaactctgactgtggatcgctttgatcccggacgggaggtcccagagtgcctggagatcacacctactgcgtccctgcccggtgacttcctgatcccctgtaaggtacacacacaagagctgtgttcgcgagaaatgatagtccattctgttgacgacttctccagcgcgttaaaagcactacagtgtcatatctgttcaaaggactctctagattgtggcaaacttttgagccttagggttcacatcaccagtcgagaatccctggactcagtggaattcgacctccactgggctgcagtgaccctggcaaataacttcaaatgcacccctgtgaaacccatcccaataatcccaactgcactcgcccgaaatttgagctctaatcttaacatttcccaagtacaaggtacatacaaatatggatatttgaccatggacgagaccagaaagttgctgctgctccttgaatccgatccgaaagtctattctctccctttggtcggaatctggttatcgggaattacacacatttacagcccccaagtgtgggcatgctgtctgcggtatatcttcaattcgagcgtccaggaacgagtcttcagtgaaagcgggaactttatcatcgtgttgtactccatgacccataaggaaccggaattctacgagtgcttcccgtgtgatggtaaaatcccagatttccgcttccagctactgaccagcaaagagacactccatctgttcaaaaacgtggagccccctgacaaaaaccctattaggtgcgagctgtcagccgaaagtcaaaacgctgaaaccgaatttttcagcaaagcatctaaaaatttttcaattaagaggtcatcacagaaactgtcctctggcaagatgcctatccacgaccacgatagtggcgtggaggacgaggatttctcccccagaccaattccctcaccgcaccctgttagccagaagatttccaagatccagccctccgtacctgagttaagcctcgtgctcgatgggaatttcatcgaatccaatcccctgcctacccctttggagatggtgaataacgagaaccccccactcataaaccacctggagcacttgaagcctctgcagccccaattatatgatgaaaagcattctcctgaggttgaggcaggcgagcctagcctgaggggtatccctaatcagcttaatcaggacaagcccgcattgttgcgacattgcaaggtcagacagcctcccgcatacaagaaggggaatccccacacccgcaacagtattaaaccgtccagccataacggtccatcccacgatatttttgagaaattgcagacagtctctgccggtaatgtgcaaaacgaggagtaccctatccggccttctactctgaactctcggcaaagcagtctcgctccacagagtcagccccatgatttcgtttttagcccacacaacagcggcaggccaatggagctccagatccccacacccccacttccatcgtactgttctacaaatgtgtgtcgctgctgccagcatcactctcacatccagtattcccctttaaacagctggcagggtgccaacacagtggggtccattcaggatgttcagtccgaagccttgcagaagcattctctgttccatccatccgggtgccctgctctttactgcaatgctttctgttcaagcagctcgcccattgctctccgccctcagggtgacatgggaagctgctctccccactctaacatcgaaccttctccagtggccagaccgccttcccatatggacttgtgtaaccctcagccttgtacagtttgcatgcacacaccgaaaacagagtctgataatgggatgatgggtctgtccccagatgcttacagattcctgaccgagcaggaccggcaacttcggctactccaggcccagatccaaaggctcttggaggcacagtcccttatgccctgttctccaaagacgactgctgtggaagatacagtgcaggccggtcgccagatggaactggtgagcgtggaggctcagtcctcaccaggactgcacatgagaaaaggggtgtccattgccgtgagcacgggggctagtctcttttggaacgcagccggtgaggaccaggagccagactcccagatgaaacaggacgacactaaaatcagttctgaagacatgaacttttctgttgatatcaacaatgaagtgacgtctctacccggatccgcatcttcactaaaagccgtggacattccttctttcgaagagtctaacattgccgtggaggaggagttcaaccaaccgctcagtgtctcaaacagttctctagtggtgcggaaggaaccagacgttcccgtgttcttccccagcgggcagctggccgaatctgtcagcatgtgtcttcaaaccggcccaactggaggggcttcaaataactccgaaacctcagaggagccgaaaatcgagcacgtgatgcagcctctgctccaccagccctccgataaccagaagatctaccaagaccttctcgggcaggtgaatcacctgctcaacagcagctcaaaggagacagagcaacctagcactaaagcagtgattatctcccatgagtgtacccggacacaaaacgtgtaccatacgaaaaagaagacacatcactcaagactcgttgacaaagactgtgtcctaaacgctactcttaagcagctcagatccctgggtgtgaagattgattctcctacaaaggtgaagaagaatgctcacaatgtggaccacgcttccgtgctggcgtgtatctcacccgaggccgttatctccggcctgaattgcatgagctttgctaacgtggggatgagcggcctaagccctaacggagtggatctgtctatggaagctaatgccattgctctgaaatatcttaatgaaaatcagctctcacagctgtcggtgacccgctccaatcagaacaactgtgaccccttttctctgctgcatatcaatactgacaggtccacagttgggctgtccctgatcagcccaaataacatgagcttcgcgacgaagaaatacatgaagcgttatggactgttgcagagttctgacaatagcgaggatgaggaggaacccccagacaacgcagacagcaagagcgagtacctcctgaaccaaaatctcagaagtattcccgaacaattgggcggacaaaaggagccaagtaagaatgatcatgaaataatcaattgttctaattgtgagtcagtgggaactaacgcagacactcccgtgctgagaaatatcacaaacgaagtgcttcagactaaagccaagcagcagctgaccgagaaacctgcctttttagtcaaaaatctgaagccatcacctgctgtaaatctgagaactggtaaggctgaattcacacagcacccagagaaggaaaacgagggagatatcacaatttttccggagtctttgcagccaagcgaaaccctgaagcagatgaacagcatgaattcagtgggcacctttcttgatgtgaaacgtttgagacagctgccaaaattgttctag

SEQ ID NO: 338706 - DNA, 3864 bp, Artificial Sequence
  derived and/or modified sequence
atggagcccatttatccctttgccaggccacagatgaatacccgattccctagctcaaggatggtgcctttccatttcccacccagcaagtgtgccctctggaaccccactccgactggggacttcatatatctccacctgtcctattatcgaaaccctaaactggtagtcactgagaaaacgatcagactggcttatcgccacgccaagcagaataagaaaaacagcagctgcttcctgctggggtcactcactgccgatgaggacgaggagggcgtgacactgaccgtagataggttcgaccctgggagggaagttcccgagtgcctggaaattactcccaccgcatccctgcctggggactttctgattccatgcaaggtacacacacaagagctgtgtagcagggaaatgatcgtgcattccgtggatgattttagttccgcactcaaagcattgcagtgtcatatatgtagcaaagatagcttggactgtggcaaacttcttagtcttagagtacatattacatctcgcgagtctctggactcagttgaattcgacttacattgggcagccgtgactctggcgaacaatttcaagtgtaccccggtgaagcccatccctattatcccaaccgcactggcacgcaatctgtcctcgaacctgaatatctctcaggtgcaagggacatataaatatggctacctgaccatggatgagacccgtaagctgcttctgctgctggagtcggatcctaaggtgtatagcctgccccttgtgggcatatggctcagcggtattacccacatctattccccccaggtctgggcttgttgccttcggtacattttcaactcttcagtgcaggaaagggtcttctccgagagcggcaattttataatcgtgctttacagcatgacgcataaggagcctgaattctatgaatgtttcccttgcgatgggaagatacctgacttcaggttccagttgttgacaagtaaggagactttgcacctttttaaaaacgttgagccacccgataaaaatccaattcgttgcgaactgagcgccgagtctcagaatgctgaaacagaattttttagtaaagcttcaaaaaacttctccatcaaaagatcatctcaaaagctcagttctggtaagatgccaatccatgatcacgactctggggtggaagatgaggatttcagcccacgcccaattccgagccctcaccccgtgtctcagaaaatctccaaaattcagcccagtgttccagagcttagcttagtgttggatggtaacttcatagaatctaatcctttgccgacccccctagaaatggttaacaatgaaaatcctcccctcatcaatcatctggagcatctcaaacctctgcagccgcagctgtatgatgaaaagcattcacctgaggtggaggccggtgagccaagcctgcgtggtattcccaaccagctgaatcaggataagcccgcattgcttcggcattgcaaggtgaggcagccgccagcatacaagaaggggaatccccatactcgcaattctatcaagccatcatcccataatggaccttcacacgacatctttgagaagttgcagaccgtatctgcaggaaacgttcagaacgaggagtaccctatacggcctagcaccttaaattcacgtcaaagcagtctggcaccacagagccagccgcacgactttgtgttcagtccacacaactccggcagacctatggagcttcagattcctaccccgccactcccttcctattgtagtacaaacgtgtgcagatgttgccagcatcactcccacatacagtattcgcctttgaacagctggcagggggctaatacagtggggagcatacaggacgtacaatccgaagctttgcagaagcattcgctgtttcacccgtcggggtgtccggctctgtattgtaatgcattctgttcctcatcttcaccaatcgcacttagacctcagggtgacatgggcagctgctcaccacactccaacatcgagccctcacccgttgcacgacccccatcacacatggacctatgcaacccccagccctgcacagtgtgcatgcataccccaaaaacagaaagtgataacggaatgatgggcctgagtccagacgcttaccgtttcctaacggagcaagaccgccagctgaggctcctgcaggcacagatccagcgtctgcttgaagcccaatccctgatgccttgtagtcctaaaaccacggcagttgaggatactgtccaggccggacggcaaatggagctggtgagtgtcgaggcccaatctagccccggactccacatgcgcaagggcgtgagtatcgcagtgagcacaggagccagtctgttctggaacgcggcaggagaagaccaggagccagacagtcagatgaaacaggacgacacaaagatatcctcggaagatatgaacttctccgtagatatcaacaatgaggtgaccagcctgccagggagtgcatcatccctgaaagctgtggacatcccatccttcgaggagagtaatatcgctgtcgaggaagaattcaatcagcccctgtctgtgtctaactctagccttgtggtacggaaagaaccggacgtaccggtgtttttcccttctggccagctggccgaaagcgtctcaatgtgtctgcaaaccggccctactgggggagctagcaacaactccgaaacttcggaggaacctaagattgaacacgtgatgcagcccctcctccatcagccgtcagacaaccagaaaatttaccaggacctgctggggcaggtgaaccatttactcaactcttcatcaaaagagactgagcaaccttccactaaggccgtaatcatttctcatgaatgcactcgcacccaaaatgtgtaccatacaaagaagaaaacacaccattccagactggtcgacaaggattgcgtgcttaacgccacattgaaacagcttcgtagtctcggcgttaaaatagactctcctaccaaggttaagaaaaatgctcataatgtggaccatgcaagcgtgctagcatgtattagtcctgaggctgtcatctcagggttaaattgtatgtcctttgcaaacgtggggatgagcggcctctcacccaacggtgtggacctgtcaatggaggcaaatgccattgcgcttaaatatctgaacgagaaccagctgtcgcagttgagtgtgacacgaagcaaccagaacaactgcgaccctttcagcctgctgcacatcaacacagataggtctactgtcggactgtcgctgatttccccaaataatatgtcatttgcaacgaagaaatatatgaagcgctatggcctcctgcagtcatcagataattcagaggacgaggaggaaccacccgataatgctgacagcaagtctgagtatttgctcaatcagaacctgcgttcaatccctgaacagctgggaggccagaaagagccgagcaaaaatgaccacgagattatcaattgctccaactgtgagagcgtaggcacaaatgcagacaccccagtgctgcgcaacatcactaatgaggttctacagactaaggcgaaacaacagctgaccgaaaagcctgccttcctagttaagaatctcaagccgagtcctgcagtaaatctcaggaccggaaaggccgagtttacccagcaccccgaaaaggaaaatgaaggcgacatcactatctttcctgaatcgctccagccgtctgagacgctcaagcagatgaactctatgaacagtgtgggcacattcctggatgttaagcgacttagacagctgcccaagcttttctag

SEQ ID NO: 338707 - DNA, 4609 bp, Artificial Sequence
  derived and/or modified sequence
gtcgggctggtctggaaatcctgacttcaggtgatccacccgcctcggcctcccaaaatgctgggattacaagcgtgagccaccgcccctgacatgagccattgacttttaaagcaggagaataatttgatcagatttatatggaaacactcttctagcagcattatggggacttttccataagtctggatactgaggatttggaattaaagaaatcattcaccagacatcatggagcctatatatccttttgcacggccccagatgaataccaggtttccttcaagcaggatggtacctttccactttcctccatcaaaatgtgcactttggaacccaacgccaactggagatttcatctacttacatctcagttactacagaaatccaaagcttgtggtgactgagaagaccatccgacttgcttatcgtcatgctaagcagaataaaaaaaattcgtcatgctttttacttggttctctgacagcagacgaagatgaagaaggtgtaacattgacagtagatcgctttgatcctggtcgagaagtacctgaatgcctagaaataacccctactgcttctcttcctggggactttttgattccatgcaaagttcatactcaagaactttgttcaagagaaatgatagttcacagtgtagatgacttcagttcagctttaaaggctctacagtgccatatatgtagcaaagattccttggactgtggtaagctgctttccctaagagttcatatcacttccagggagagtttggacagtgtggaatttgacttgcattgggcagcagtaactctagcaaataactttaaatgcacacctgtgaagcccatccccattattccaacagctctggcaagaaacttgagcagtaatctgaatatttctcaagttcaagggacttataaatatggatatcttaccatggatgaaacacgcaaattgttacttttgttggaatctgatcccaaggtttattctctaccattggtgggaatttggctgtctggaattacacatatctatagtcctcaggtatgggcttgctgtttgcgatacatattcaattcttctgttcaagaaagggttttttcagaatctggaaatttcatcatagttctctattctatgacacataaggaacctgagttttatgaatgcttcccttgtgatggcaagatacctgactttcggtttcagttgctaaccagtaaggaaacattacatcttttcaaaaatgttgaacctcctgacaaaaatccaatccgttgtgaactgagcgctgaaagccaaaatgcagaaacagagtttttcagtaaggcttccaagaatttttcaattaagaggtcttcccaaaagttatcttctgggaagatgccaatacatgatcacgactctggtgttgaagatgaagatttttctccaagaccaattcctagtcctcatccagtgagtcagaagatttctaagatccaaccatcagttcctgaactttcacttgtgttggatggcaatttcatagaatcaaaccctctgcctactccattggaaatggtgaataatgaaaatcctcctttgattaaccacttggaacacttgaagccattgcaaccccagctttatgatgagaaacacagtccagaagttgaagctggagagccttccttgagaggaataccaaatcagttaaaccaggataaaccagctcttttgagacactgcaaagtaagacagccacctgcctataagaaagggaacccccataccaggaacagtattaaaccatcttctcataatgggccatctcatgatatatttgaaaagctccaaacagtttctgctggaaatgtacaaaacgaagagtatcctataagaccctccacacttaattctaggcagtcttctcttgccccgcagtcccaaccacacgattttgttttttcaccccataattcaggaagaccaatggaacttcagatacctactcccccactgccatcttactgttccacaaacgtttgcaggtgttgtcagcatcatagtcatattcaatatagtccgctaaattcttggcaaggagcaaacacagttggatccattcaagatgtccagtctgaagcccttcaaaagcattcattatttcacccaagtggatgtccagccctgtactgtaatgcattctgttcttcaagtagtcctatagccttgagacctcagggagatatgggcagttgttctccccacagcaatattgaaccatcgcctgtggcaagaccgccttcacatatggacttatgtaacccacagccttgcacagtgtgcatgcacacacccaagactgagtcagataatggaatgatgggactatctccagatgcatatcggttcctcacagaacaagacagacagctaagactacttcaggcacagattcagcgtttgttggaagcacagtctctgatgccctgttcccctaagacaactgctgttgaagacacagtgcaagctggaagacaaatggagttggtttctgtggaagcacagtcttcccctggcttgcacatgagaaaaggtgtaagcattgctgtgagcacaggtgctagcttgttttggaatgcagcaggtgaggatcaagagcctgactctcaaatgaagcaagatgataccaaaatttccagtgaggacatgaatttttctgtcgatattaataatgaagtcacaagtcttccaggtagtgcatcttcattaaaagcagttgatattcccagttttgaagagagcaacattgctgtggaagaagaatttaaccagccactttctgtatccaactcttctctagttgtgagaaaagaacctgatgtacctgtgttctttccaagtggccagctggcagaaagtgtaagcatgtgtttacagactggaccaacagggggtgccagtaacaattctgaaacatcagaggaaccaaaaattgagcatgtaatgcaacccttgcttcatcaaccatcagataaccagaaaatttaccaggatttattgggtcaagtaaaccacctattaaatagttcctccaaggaaactgagcagccgtctaccaaagcagtaattatcagtcatgaatgcaccagaacccaaaacgtttaccatacaaagaaaaaaacacatcattcaagactggtggacaaagattgtgtccttaatgcaactcttaagcaactaagaagccttggagtaaaaattgattctcccactaaagtgaagaaaaatgcacataacgtggatcacgccagtgtgttggcatgcatcagcccagaagcagtgatctctggattaaactgcatgtcatttgctaatgttggcatgagcggcttaagccccaatggtgtggatttgagcatggaggcaaatgctatagctctgaaatatttaaatgaaaatcagctgtcacaactgtctgtcactcgatcgaaccaaaataattgtgacccattcagccttctccatattaatacagacagaagcacagtggggcttagtttaatttcaccaaacaacatgtcatttgcaaccaaaaaatatatgaagagatatggactcctacaaagcagtgacaatagtgaagatgaagaggaacctcccgacaatgcagatagcaagagtgaatatttattgaatcagaaccttaggtccatacctgaacagcttggtggtcagaaagagccttctaagaatgaccatgaaataattaattgttctaactgtgaatctgtggggaccaacgcagatacgccagtattgagaaatattacaaatgaagttttgcagacaaaagcaaaacagcagttgactgaaaagccagctttcttagtaaagaaccttaaaccaagtcctgcagtgaaccttcgaaccgggaaagcagagttcactcaacatcctgagaaagaaaatgaaggggacattacaatttttcctgaaagtttgcaaccttctgaaacgctaaagcagatgaatagcatgaattcagtaggcaccttcttagatgtaaaacgtctcagacagttaccaaaattattttaaccttttaactccctgcccttttaatacagggacagggtgtctcctgaagatacttagggaaaacaggagcctaccacaaggctcctgatcattctggagtcactgtttcttggtagcagccaattgggaagagtgacttctgtgagatggctggctggtgataggactaagttctcattgttcaaatagagctgttcaacatcactgaaacctttaagaaaagccctgagatcagttattcctacaagtttaagtagtagacagatactatccagctctaagtctcaactgctcttttatactgtacttttttttttgagacggagttttgctcttgtagcccaggctggagtgcaatggcaggatctcagatcactgcaacctctgcctcctgggttcaagcgattttcctgcttcatcttcccaggtagctgggattacaggcatgtgccacaacgcctggctaattttgtatttttagtagagactggtttctccatgttggtcaggctgg

SEQ ID NO: 338708 - DNA, 5016 bp, Artificial Sequence
  derived and/or modified sequence
agttcccgcgaccccaacgtcccagaggcggggccggagtcggcggtggcgctccttggagccggctcccgctcctaccctgcaaacagacctcagctccgcggaagttgcggatactgaggatttggaattaaagaaatcattcaccagacatcatggagcctatatatccttttgcacggccccagatgaataccaggtttccttcaagcaggatggtacctttccactttcctccatcaaaatgtgcactttggaacccaacgccaactggagatttcatctacttacatctcagttactacagaaatccaaagcttgtggtgactgagaagaccatccgacttgcttatcgtcatgctaagcagaataaaaaaaattcgtcatgctttttacttggttctctgacagcagacgaagatgaagaaggtgtaacattgacagtagatcgctttgatcctggtcgagaagtacctgaatgcctagaaataacccctactgcttctcttcctggggactttttgattccatgcaaagttcatactcaagaactttgttcaagagaaatgatagttcacagtgtagatgacttcagttcagctttaaaggctctacagtgccatatatgtagcaaagattccttggactgtggtaagctgctttccctaagagttcatatcacttccagggagagtttggacagtgtggaatttgacttgcattgggcagcagtaactctagcaaataactttaaatgcacacctgtgaagcccatccccattattccaacagctctggcaagaaacttgagcagtaatctgaatatttctcaagttcaagggacttataaatatggatatcttaccatggatgaaacacgcaaattgttacttttgttggaatctgatcccaaggtttattctctaccattggtgggaatttggctgtctggaattacacatatctatagtcctcaggtatgggcttgctgtttgcgatacatattcaattcttctgttcaagaaagggttttttcagaatctggaaatttcatcatagttctctattctatgacacataaggaacctgagttttatgaatgcttcccttgtgatggcaagatacctgactttcggtttcagttgctaaccagtaaggaaacattacatcttttcaaaaatgttgaacctcctgacaaaaatccaatccgttgtgaactgagcgctgaaagccaaaatgcagaaacagagtttttcagtaaggcttccaagaatttttcaattaagaggtcttcccaaaagttatcttctgggaagatgccaatacatgatcacgactctggtgttgaagatgaagatttttctccaagaccaattcctagtcctcatccagtgagtcagaagatttctaagatccaaccatcagttcctgaactttcacttgtgttggatggcaatttcatagaatcaaaccctctgcctactccattggaaatggtgaataatgaaaatcctcctttgattaaccacttggaacacttgaagccattgcaaccccagctttatgatgagaaacacagtccagaagttgaagctggagagccttccttgagaggaataccaaatcagttaaaccaggataaaccagctcttttgagacactgcaaagtaagacagccacctgcctataagaaagggaacccccataccaggaacagtattaaaccatcttctcataatgggccatctcatgatatatttgaaaagctccaaacagtttctgctggaaatgtacaaaacgaagagtatcctataagaccctccacacttaattctaggcagtcttctcttgccccgcagtcccaaccacacgattttgttttttcaccccataattcaggaagaccaatggaacttcagatacctactcccccactgccatcttactgttccacaaacgtttgcaggtgttgtcagcatcatagtcatattcaatatagtccgctaaattcttggcaaggagcaaacacagttggatccattcaagatgtccagtctgaagcccttcaaaagcattcattatttcacccaagtggatgtccagccctgtactgtaatgcattctgttcttcaagtagtcctatagccttgagacctcagggagatatgggcagttgttctccccacagcaatattgaaccatcgcctgtggcaagaccgccttcacatatggacttatgtaacccacagccttgcacagtgtgcatgcacacacccaagactgagtcagataatggaatgatgggactatctccagatgcatatcggttcctcacagaacaagacagacagctaagactacttcaggcacagattcagcgtttgttggaagcacagtctctgatgccctgttcccctaagacaactgctgttgaagacacagtgcaagctggaagacaaatggagttggtttctgtggaagcacagtcttcccctggcttgcacatgagaaaaggtgtaagcattgctgtgagcacaggtgctagcttgttttggaatgcagcaggtgaggatcaagagcctgactctcaaatgaagcaagatgataccaaaatttccagtgaggacatgaatttttctgtcgatattaataatgaagtcacaagtcttccaggtagtgcatcttcattaaaagcagttgatattcccagttttgaagagagcaacattgctgtggaagaagaatttaaccagccactttctgtatccaactcttctctagttgtgagaaaagaacctgatgtacctgtgttctttccaagtggccagctggcagaaagtgtaagcatgtgtttacagactggaccaacagggggtgccagtaacaattctgaaacatcagaggaaccaaaaattgagcatgtaatgcaacccttgcttcatcaaccatcagataaccagaaaatttaccaggatttattgggtcaagtaaaccacctattaaatagttcctccaaggaaactgagcagccgtctaccaaagcagtaattatcagtcatgaatgcaccagaacccaaaacgtttaccatacaaagaaaaaaacacatcattcaagactggtggacaaagattgtgtccttaatgcaactcttaagcaactaagaagccttggagtaaaaattgattctcccactaaagtgaagaaaaatgcacataacgtggatcacgccagtgtgttggcatgcatcagcccagaagcagtgatctctggattaaactgcatgtcatttgctaatgttggcatgagcggcttaagccccaatggtgtggatttgagcatggaggcaaatgctatagctctgaaatatttaaatgaaaatcagctgtcacaactgtctgtcactcgatcgaaccaaaataattgtgacccattcagccttctccatattaatacagacagaagcacagtggggcttagtttaatttcaccaaacaacatgtcatttgcaaccaaaaaatatatgaagagatatggactcctacaaagcagtgacaatagtgaagatgaagaggaacctcccgacaatgcagatagcaagagtgaatatttattgaatcagaaccttaggtccatacctgaacagcttggtggtcagaaagagccttctaagaatgaccatgaaataattaattgttctaactgtgaatctgtggggaccaacgcagatacgccagtattgagaaatattacaaatgaagttttgcagacaaaagcaaaacagcagttgactgaaaagccagctttcttagtaaagaaccttaaaccaagtcctgcagtgaaccttcgaaccgggaaagcagagttcactcaacatcctgagaaagaaaatgaaggggacattacaatttttcctgaaagtttgcaaccttctgaaacgctaaagcagatgaatagcatgaattcagtaggcaccttcttagatgtaaaacgtctcagacagttaccaaaattattttaaccttttaactccctgcccttttaatacagggacagggtgtctcctgaagatacttagggaaaacaggagcctaccacaaggctcctgatcattctggagtcactgtttcttggtagcagccaattgggaagagtgacttctgtgagatggctggctggtgataggactaagttctcattgttcaaatagagctgttcaacatcactgaaacctttaagaaaagccctgagatcagttattcctacaagtttaagtagtagacagatactatccagctctaagtctcaactgctcttttatactgtacttttttttttgagacggagttttgctcttgtagcccaggctggagtgcaatggcaggatctcagatcactgcaacctctgcctcctgggttcaagcgattttcctgcttcatcttcccaggtagctgggattacaggcatgtgccacaacgcctggctaattttgtatttttagtagagactggtttctccatgttggtcaggctggtctcaaactcccgacctcaggtgatccgcccgcctcggcctcctaaagtgctgggattacaggcgtgagccactgcgcccagctatactgtatattttaagaagttccagcatgttgcatctctgcatttatcctatatcattaaaagaacataagttatcatggtgttgggtaaattagcgaaatcaacccttcctaagtttaagggaaaagttatttttaaaaacaacttaataaaaacttacactcttttatacaagagtgtatttccccttaattaggatgcatgttgattaaactcgagatacagctttttgcagtatggtgggttggttttggtgtaacatcttcaacatgtcacactggctatcaaagaataagaaaattattgagtatgagtgtgttttataaactttctgagtttttcagatgtcttaatattttttaatagaacttaataaaatgtctagattgactattttc

SEQ ID NO: 338709 - DNA, 5225 bp, Artificial Sequence
  derived and/or modified sequence
agttcccgcgaccccaacgtcccagaggcggggccggagtcggcggtggcgctccttggagccggctcccgctcctaccctgcaaacagacctcagctccgcggaagttgcgagacggggtttcaccatgttggtcgggctggtctggaaatcctgacttcaggtgatccacccgcctcggcctcccaaaatgctgggattacaagcgtgagccaccgcccctgacatgagccattgacttttaaagcaggagaataatttgatcagatttatatggaaacactcttctagcagcattatggggacttttccataagtctggatactgaggatttggaattaaagaaatcattcaccagacatcatggagcctatatatccttttgcacggccccagatgaataccaggtttccttcaagcaggatggtacctttccactttcctccatcaaaatgtgcactttggaacccaacgccaactggagatttcatctacttacatctcagttactacagaaatccaaagcttgtggtgactgagaagaccatccgacttgcttatcgtcatgctaagcagaataaaaaaaattcgtcatgctttttacttggttctctgacagcagacgaagatgaagaaggtgtaacattgacagtagatcgctttgatcctggtcgagaagtacctgaatgcctagaaataacccctactgcttctcttcctggggactttttgattccatgcaaagttcatactcaagaactttgttcaagagaaatgatagttcacagtgtagatgacttcagttcagctttaaaggctctacagtgccatatatgtagcaaagattccttggactgtggtaagctgctttccctaagagttcatatcacttccagggagagtttggacagtgtggaatttgacttgcattgggcagcagtaactctagcaaataactttaaatgcacacctgtgaagcccatccccattattccaacagctctggcaagaaacttgagcagtaatctgaatatttctcaagttcaagggacttataaatatggatatcttaccatggatgaaacacgcaaattgttacttttgttggaatctgatcccaaggtttattctctaccattggtgggaatttggctgtctggaattacacatatctatagtcctcaggtatgggcttgctgtttgcgatacatattcaattcttctgttcaagaaagggttttttcagaatctggaaatttcatcatagttctctattctatgacacataaggaacctgagttttatgaatgcttcccttgtgatggcaagatacctgactttcggtttcagttgctaaccagtaaggaaacattacatcttttcaaaaatgttgaacctcctgacaaaaatccaatccgttgtgaactgagcgctgaaagccaaaatgcagaaacagagtttttcagtaaggcttccaagaatttttcaattaagaggtcttcccaaaagttatcttctgggaagatgccaatacatgatcacgactctggtgttgaagatgaagatttttctccaagaccaattcctagtcctcatccagtgagtcagaagatttctaagatccaaccatcagttcctgaactttcacttgtgttggatggcaatttcatagaatcaaaccctctgcctactccattggaaatggtgaataatgaaaatcctcctttgattaaccacttggaacacttgaagccattgcaaccccagctttatgatgagaaacacagtccagaagttgaagctggagagccttccttgagaggaataccaaatcagttaaaccaggataaaccagctcttttgagacactgcaaagtaagacagccacctgcctataagaaagggaacccccataccaggaacagtattaaaccatcttctcataatgggccatctcatgatatatttgaaaagctccaaacagtttctgctggaaatgtacaaaacgaagagtatcctataagaccctccacacttaattctaggcagtcttctcttgccccgcagtcccaaccacacgattttgttttttcaccccataattcaggaagaccaatggaacttcagatacctactcccccactgccatcttactgttccacaaacgtttgcaggtgttgtcagcatcatagtcatattcaatatagtccgctaaattcttggcaaggagcaaacacagttggatccattcaagatgtccagtctgaagcccttcaaaagcattcattatttcacccaagtggatgtccagccctgtactgtaatgcattctgttcttcaagtagtcctatagccttgagacctcagggagatatgggcagttgttctccccacagcaatattgaaccatcgcctgtggcaagaccgccttcacatatggacttatgtaacccacagccttgcacagtgtgcatgcacacacccaagactgagtcagataatggaatgatgggactatctccagatgcatatcggttcctcacagaacaagacagacagctaagactacttcaggcacagattcagcgtttgttggaagcacagtctctgatgccctgttcccctaagacaactgctgttgaagacacagtgcaagctggaagacaaatggagttggtttctgtggaagcacagtcttcccctggcttgcacatgagaaaaggtgtaagcattgctgtgagcacaggtgctagcttgttttggaatgcagcaggtgaggatcaagagcctgactctcaaatgaagcaagatgataccaaaatttccagtgaggacatgaatttttctgtcgatattaataatgaagtcacaagtcttccaggtagtgcatcttcattaaaagcagttgatattcccagttttgaagagagcaacattgctgtggaagaagaatttaaccagccactttctgtatccaactcttctctagttgtgagaaaagaacctgatgtacctgtgttctttccaagtggccagctggcagaaagtgtaagcatgtgtttacagactggaccaacagggggtgccagtaacaattctgaaacatcagaggaaccaaaaattgagcatgtaatgcaacccttgcttcatcaaccatcagataaccagaaaatttaccaggatttattgggtcaagtaaaccacctattaaatagttcctccaaggaaactgagcagccgtctaccaaagcagtaattatcagtcatgaatgcaccagaacccaaaacgtttaccatacaaagaaaaaaacacatcattcaagactggtggacaaagattgtgtccttaatgcaactcttaagcaactaagaagccttggagtaaaaattgattctcccactaaagtgaagaaaaatgcacataacgtggatcacgccagtgtgttggcatgcatcagcccagaagcagtgatctctggattaaactgcatgtcatttgctaatgttggcatgagcggcttaagccccaatggtgtggatttgagcatggaggcaaatgctatagctctgaaatatttaaatgaaaatcagctgtcacaactgtctgtcactcgatcgaaccaaaataattgtgacccattcagccttctccatattaatacagacagaagcacagtggggcttagtttaatttcaccaaacaacatgtcatttgcaaccaaaaaatatatgaagagatatggactcctacaaagcagtgacaatagtgaagatgaagaggaacctcccgacaatgcagatagcaagagtgaatatttattgaatcagaaccttaggtccatacctgaacagcttggtggtcagaaagagccttctaagaatgaccatgaaataattaattgttctaactgtgaatctgtggggaccaacgcagatacgccagtattgagaaatattacaaatgaagttttgcagacaaaagcaaaacagcagttgactgaaaagccagctttcttagtaaagaaccttaaaccaagtcctgcagtgaaccttcgaaccgggaaagcagagttcactcaacatcctgagaaagaaaatgaaggggacattacaatttttcctgaaagtttgcaaccttctgaaacgctaaagcagatgaatagcatgaattcagtaggcaccttcttagatgtaaaacgtctcagacagttaccaaaattattttaaccttttaactccctgcccttttaatacagggacagggtgtctcctgaagatacttagggaaaacaggagcctaccacaaggctcctgatcattctggagtcactgtttcttggtagcagccaattgggaagagtgacttctgtgagatggctggctggtgataggactaagttctcattgttcaaatagagctgttcaacatcactgaaacctttaagaaaagccctgagatcagttattcctacaagtttaagtagtagacagatactatccagctctaagtctcaactgctcttttatactgtacttttttttttgagacggagttttgctcttgtagcccaggctggagtgcaatggcaggatctcagatcactgcaacctctgcctcctgggttcaagcgattttcctgcttcatcttcccaggtagctgggattacaggcatgtgccacaacgcctggctaattttgtatttttagtagagactggtttctccatgttggtcaggctggtctcaaactcccgacctcaggtgatccgcccgcctcggcctcctaaagtgctgggattacaggcgtgagccactgcgcccagctatactgtatattttaagaagttccagcatgttgcatctctgcatttatcctatatcattaaaagaacataagttatcatggtgttgggtaaattagcgaaatcaacccttcctaagtttaagggaaaagttatttttaaaaacaacttaataaaaacttacactcttttatacaagagtgtatttccccttaattaggatgcatgttgattaaactcgagatacagctttttgcagtatggtgggttggttttggtgtaacatcttcaacatgtcacactggctatcaaagaataagaaaattattgagtatgagtgtgttttataaactttctgagtttttcagatgtcttaatattttttaatagaacttaataaaatgtctagattgactattttc

SEQ ID NO: 338710 - DNA, 3864 bp, Artificial Sequence
  derived and/or modified sequence
atggagcccatctaccccttcgccagaccccagatgaacaccagattccccagcagcagaatggtgcccttccacttcccccccagcaagtgcgccctgtggaaccccacccccaccggcgacttcatctacctgcacctgagctactacagaaaccccaagctggtggtgaccgagaagaccatcagactggcctacagacacgccaagcagaacaagaagaacagcagctgcttcctgctgggcagcctgaccgccgacgaggacgaggagggcgtgaccctgaccgtggacagattcgaccccggcagagaggtgcccgagtgcctggagatcacccccaccgccagcctgcccggcgacttcctgatcccctgcaaggtgcacacccaggagctgtgcagcagagagatgatcgtgcacagcgtggacgacttcagcagcgccctgaaggccctgcagtgccacatctgcagcaaggacagcctggactgcggcaagctgctgagcctgagagtgcacatcaccagcagagagagcctggacagcgtggagttcgacctgcactgggccgccgtgaccctggccaacaacttcaagtgcacccccgtgaagcccatccccatcatccccaccgccctggccagaaacctgagcagcaacctgaacatcagccaggtgcagggcacctacaagtacggctacctgaccatggacgagaccagaaagctgctgctgctgctggagagcgaccccaaggtgtacagcctgcccctggtgggcatctggctgagcggcatcacccacatctacagcccccaggtgtgggcctgctgcctgagatacatcttcaacagcagcgtgcaggagagagtgttcagcgagagcggcaacttcatcatcgtgctgtacagcatgacccacaaggagcccgagttctacgagtgcttcccctgcgacggcaagatccccgacttcagattccagctgctgaccagcaaggagaccctgcacctgttcaagaacgtggagccccccgacaagaaccccatcagatgcgagctgagcgccgagagccagaacgccgagaccgagttcttcagcaaggccagcaagaacttcagcatcaagagaagcagccagaagctgagcagcggcaagatgcccatccacgaccacgacagcggcgtggaggacgaggacttcagccccagacccatccccagcccccaccccgtgagccagaagatcagcaagatccagcccagcgtgcccgagctgagcctggtgctggacggcaacttcatcgagagcaaccccctgcccacccccctggagatggtgaacaacgagaacccccccctgatcaaccacctggagcacctgaagcccctgcagccccagctgtacgacgagaagcacagccccgaggtggaggccggcgagcccagcctgagaggcatccccaaccagctgaaccaggacaagcccgccctgctgagacactgcaaggtgagacagccccccgcctacaagaagggcaacccccacaccagaaacagcatcaagcccagcagccacaacggccccagccacgacatcttcgagaagctgcagaccgtgagcgccggcaacgtgcagaacgaggagtaccccatcagacccagcaccctgaacagcagacagagcagcctggccccccagagccagccccacgacttcgtgttcagcccccacaacagcggcagacccatggagctgcagatccccaccccccccctgcccagctactgcagcaccaacgtgtgcagatgctgccagcaccacagccacatccagtacagccccctgaacagctggcagggcgccaacaccgtgggcagcatccaggacgtgcagagcgaggccctgcagaagcacagcctgttccaccccagcggctgccccgccctgtactgcaacgccttctgcagcagcagcagccccatcgccctgagaccccagggcgacatgggcagctgcagcccccacagcaacatcgagcccagccccgtggccagaccccccagccacatggacctgtgcaacccccagccctgcaccgtgtgcatgcacacccccaagaccgagagcgacaacggcatgatgggcctgagccccgacgcctacagattcctgaccgagcaggacagacagctgagactgctgcaggcccagatccagagactgctggaggcccagagcctgatgccctgcagccccaagaccaccgccgtggaggacaccgtgcaggccggcagacagatggagctggtgagcgtggaggcccagagcagccccggcctgcacatgagaaagggcgtgagcatcgccgtgagcaccggcgccagcctgttctggaacgccgccggcgaggaccaggagcccgacagccagatgaagcaggacgacaccaagatcagcagcgaggacatgaacttcagcgtggacatcaacaacgaggtgaccagcctgcccggcagcgccagcagcctgaaggccgtggacatccccagcttcgaggagagcaacatcgccgtggaggaggagttcaaccagcccctgagcgtgagcaacagcagcctggtggtgagaaaggagcccgacgtgcccgtgttcttccccagcggccagctggccgagagcgtgagcatgtgcctgcagaccggccccaccggcggcgccagcaacaacagcgagaccagcgaggagcccaagatcgagcacgtgatgcagcccctgctgcaccagcccagcgacaaccagaagatctaccaggacctgctgggccaggtgaaccacctgctgaacagcagcagcaaggagaccgagcagcccagcaccaaggccgtgatcatcagccacgagtgcaccagaacccagaacgtgtaccacaccaagaagaagacccaccacagcagactggtggacaaggactgcgtgctgaacgccaccctgaagcagctgagaagcctgggcgtgaagatcgacagccccaccaaggtgaagaagaacgcccacaacgtggaccacgccagcgtgctggcctgcatcagccccgaggccgtgatcagcggcctgaactgcatgagcttcgccaacgtgggcatgagcggcctgagccccaacggcgtggacctgagcatggaggccaacgccatcgccctgaagtacctgaacgagaaccagctgagccagctgagcgtgaccagaagcaaccagaacaactgcgaccccttcagcctgctgcacatcaacaccgacagaagcaccgtgggcctgagcctgatcagccccaacaacatgagcttcgccaccaagaagtacatgaagagatacggcctgctgcagagcagcgacaacagcgaggacgaggaggagccccccgacaacgccgacagcaagagcgagtacctgctgaaccagaacctgagaagcatccccgagcagctgggcggccagaaggagcccagcaagaacgaccacgagatcatcaactgcagcaactgcgagagcgtgggcaccaacgccgacacccccgtgctgagaaacatcaccaacgaggtgctgcagaccaaggccaagcagcagctgaccgagaagcccgccttcctggtgaagaacctgaagcccagccccgccgtgaacctgagaaccggcaaggccgagttcacccagcaccccgagaaggagaacgagggcgacatcaccatcttccccgagagcctgcagcccagcgagaccctgaagcagatgaacagcatgaacagcgtgggcaccttcctggacgtgaagagactgagacagctgcccaagctgttctag

SEQ ID NO: 338711 - protein, 210 aa, Artificial Sequence
  derived and/or modified sequence
QLYDEKHSPEVEAGEPSLRGIPNQLNQDKPALLRHCKPCTVCMHTPKTESDNGMMGLSPDAYRFLTEQDRQLRLLQAQIQRLLEAQSLMPCSPKTTAVEDTVQAGRQMELVSVEAQSSPGLHMRKGVSIAVSTGASLFWNAAGEDQEPDSQMKQDDTKISSEDMNFSVDINNEVTSLPGSASSLKAVDIPSFEESNIAVEEEFNQPLSVS

SEQ ID NO: 338712 - DNA, 2881 bp, Artificial Sequence
  derived and/or modified sequence
cagctttatgatgagaaacacagtccagaagttgaagctggagagccttccttgagaggaataccaaatcagttaaaccaggataaaccagctcttttgagacactgcaaaccttgcacagtgtgcatgcacacacccaagactgagtcagataatggaatgatgggactatctccagatgcatatcggttcctcacagaacaagacagacagctaagactacttcaggcacagattcagcgtttgttggaagcacagtctctgatgccctgttcccctaagacaactgctgttgaagacacagtgcaagctggaagacaaatggagttggtttctgtggaagcacagtcttcccctggcttgcacatgagaaaaggtgtaagcattgctgtgagcacaggtgctagcttgttttggaatgcagcaggtgaggatcaagagcctgactctcaaatgaagcaagatgataccaaaatttccagtgaggacatgaatttttctgtcgatattaataatgaagtcacaagtcttccaggtagtgcatcttcattaaaagcagttgatattcccagttttgaagagagcaacattgctgtggaagaagaatttaaccagccactttctgtatccaacagctcttctctagttgtgagaaaagaacctgatgtacctgtgttctttccaagtggccagctggcagaaagtgtaagcatgtgtttacagactggaccaacagggggtgccagtaacaattctgaaacatcagaggaaccaaaaattgagcatgtaatgcaacccttgcttcatcaaccatcagataaccagaaaatttaccaggatttattgggtcaagtaaaccacctattaaatagttcctccaaggaaactgagcagccgtctaccaaagcagtaattatcagtcatgaatgcaccagaacccaaaacgtttaccatacaaagaaaaaaacacatcattcaagactggtggacaaagattgtgtccttaatgcaactcttaagcaactaagaagccttggagtaaaaattgattctcccactaaagtgaagaaaaatgcacataacgtggatcacgccagtgtgttggcatgcatcagcccagaagcagtgatctctggattaaactgcatgtcatttgctaatgttggcatgagcggcttaagccccaatggtgtggatttgagcatggaggcaaatgctatagctctgaaatatttaaatgaaaatcagctgtcacaactgtctgtcactcgatcgaaccaaaataattgtgacccattcagccttctccatattaatacagacagaagcacagtggggcttagtttaatttcaccaaacaacatgtcatttgcaaccaaaaaatatatgaagagatatggactcctacaaagcagtgacaatagtgaagatgaagaggaacctcccgacaatgcagatagcaagagtgaatatttattgaatcagaaccttaggtccatacctgaacagcttggtggtcagaaagagccttctaagaatgaccatgaaataattaattgttctaactgtgaatctgtggggaccaacgcagatacgccagtattgagaaatattacaaatgaagttttgcagacaaaagcaaaacagcagttgactgaaaagccagctttcttagtaaagaaccttaaaccaagtcctgcagtgaaccttcgaaccgggaaagcagagttcactcaacatcctgagaaagaaaatgaaggggacattacaatttttcctgaaagtttgcaaccttctgaaacgctaaagcagatgaatagcatgaattcagtaggcaccttcttagatgtaaaacgtctcagacagttaccaaaattattttaaccttttaactccctgcccttttaatacagggacagggtgtctcctgaagatacttagggaaaacaggagcctaccacaaggctcctgatcattctggagtcactgtttcttggtagcagccaattgggaagagtgacttctgtgagatggctggctggtgataggactaagttctcattgttcaaatagagctgttcaacatcactgaaacctttaagaaaagccctgagatcagttattcctacaagtttaagtagtagacagatactatccagctctaagtctcaactgctcttttatactgtacttttttttttgagacggagttttgctcttgtagcccaggctggagtgcaatggcaggatctcagatcactgcaacctctgcctcctgggttcaagcgattttcctgcttcatcttcccaggtagctgggattacaggcatgtgccacaacgcctggctaattttgtatttttagtagagactggtttctccatgttggtcaggctggtctcaaactcccgacctcaggtgatccgcccgcctcggcctcctaaagtgctgggattacaggcgtgagccactgcgcccagctatactgtatattttaagaagttccagcatgttgcatctctgcatttatcctatatcattaaaagaacataagttatcatggtgttgggtaaattagcgaaatcaacccttcctaagtttaagggaaaagttatttttaaaaacaacttaataaaaacttacactcttttatacaagagtgtatttccccttaattaggatgcatgttgattaaactcgagatacagctttttgcagtatggtgggttggttttggtgtaacatcttcaacatgtcacactggctatcaaagaataagaaaattattgagtatgagtgtgttttataaactttctgagtttttcagatgtcttaatattttttaatagaacttaataaaatgtctagattgactattttc

SEQ ID NO: 338713 - DNA, 633 bp, Artificial Sequence
  derived and/or modified sequence
caactgtacgatgagaagcatagccctgaggtggaagccggtgagccgtcactgcgtgggatccctaatcagctaaatcaggacaaacccgcattgctgcgtcactgcaagccttgcacagtttgcatgcataccccaaagaccgaatccgacaacggaatgatgggtttgagtccagacgcctaccgctttctgacggaacaggacagacagttgaggcttctgcaggcacaaatacagaggctcttggaggcccagtccctgatgccatgtagtccgaagacaacggctgttgaagacactgttcaggcggggcgccagatggaacttgtaagcgtcgaagcacagtcatcacctggactccacatgcgaaagggtgtcagcatagctgtgagtaccggcgcttctctgttctggaatgccgctggggaagatcaggagccagacagccagatgaagcaggacgataccaagatctcatccgaagacatgaatttctccgtagacattaataatgaggtcacttccctgcccggctccgcctcgtcattaaaagcagttgatatccccagctttgaggaatctaacattgctgtggaggaggagttcaaccaacccctgtccgtctcatag

SEQ ID NO: 338714 - DNA, 633 bp, Artificial Sequence
  derived and/or modified sequence
cagctgtatgatgagaagcacagccctgaggtggaggccggggagcccagcctgcggggcatccccaaccagctgaaccaggacaagccagccctgctgcggcactgcaagccctgcaccgtgtgcatgcacacccccaagacagaaagtgacaatggcatgatgggcctgagcccagatgcctaccgcttcctgacagagcaggaccggcagctgcggctgctgcaggcccagatccagaggctgctggaggcccagagcctgatgccctgcagccccaagaccacagctgtggaggacacagtgcaggccggccggcagatggagctggtgtctgtggaggcccagagcagccctggcctgcacatgaggaaaggagtgtccattgctgtgtccactggagccagcctcttctggaatgctgctggggaggaccaggagccagacagccagatgaagcaggatgacaccaagatcagcagcgaggacatgaacttctctgtggacatcaacaatgaggtgaccagcctgcccggcagcgccagcagcctgaaggctgtggacatccccagctttgaggagagcaacattgctgtggaggaggagttcaaccagcccctgtctgtgtcctag

SEQ ID NO: 338715 - DNA, 633 bp, Artificial Sequence
  derived and/or modified sequence
cagctgtacgacgagaagcacagccccgaggtggaggccggcgagccttccttgcgcgggatacccaatcagctgaatcaggataaacctgcgctgctgaggcattgcaagccttgcaccgtgtgtatgcatacaccgaaaaccgagtctgataatggcatgatgggcctctcgccggacgcttaccggttcttgaccgagcaggataggcaattacgattgctacaggctcaaatccagcggctgctggaggcacaaagtctgatgccatgttcacctaagactaccgcagtcgaagataccgtccaggctggaagacaaatggaactggtcagcgtggaggcccagagcagcccaggcctccacatgcgcaagggggtgagcatcgcagtcagcaccggtgcgtccttgttctggaatgcagccggagaggatcaggagcctgattctcaaatgaagcaggacgacacaaagatctcttcagaagacatgaatttcagcgtcgacatcaacaacgaggtgacttctttgcctggcagcgcaagcagcttaaaggccgtggatatcccatcattcgaagagtcaaacattgcagttgaagaagaatttaatcaaccactctctgtgtcttag

SEQ ID NO: 338716 - DNA, 633 bp, Artificial Sequence
  derived and/or modified sequence
cagttgtacgacgagaagcattcccctgaagtggaggcgggagaaccctcgctgcgcggtatcccaaaccagttgaatcaggacaagcctgctctgctgcgtcactgtaagccctgtaccgtctgcatgcatacccctaagaccgagtccgataatgggatgatggggttgagcccagacgcatatcggttcctgactgagcaagatagacagctgagactactgcaggcacagatacagagactccttgaggcccagagtcttatgccttgctcccccaagaccaccgccgttgaagacacggtgcaggcaggtcggcagatggagctcgtgtccgtggaagcccagagcagcccgggactgcacatgcgcaagggagtgagcatagcagtgagtactggagccagtttattttggaacgccgctggggaagaccaagaaccagattcacagatgaaacaggatgacactaagatctcctccgaagacatgaatttctccgtggatattaataacgaagtcacctcgctcccgggtagcgcctcgtctctgaaagccgtcgacatcccgagctttgaagaatctaatatcgcagttgaggaggagttcaatcaaccccttagtgtatcctag

SEQ ID NO: 338717 - DNA, 633 bp, Artificial Sequence
  derived and/or modified sequence
cagctgtacgacgagaagcacagccccgaggtggaggccggcgagcccagcctgagaggcatccccaaccagctgaaccaggacaagcccgccctgctgagacactgcaagccctgcaccgtgtgcatgcacacccccaagaccgagagcgacaacggcatgatgggcctgagccccgacgcctacagattcctgaccgagcaggacagacagctgagactgctgcaggcccagatccagagactgctggaggcccagagcctgatgccctgcagccccaagaccaccgccgtggaggacaccgtgcaggccggcagacagatggagctggtgagcgtggaggcccagagcagccccggcctgcacatgagaaagggcgtgagcatcgccgtgagcaccggcgccagcctgttctggaacgccgccggcgaggaccaggagcccgacagccagatgaagcaggacgacaccaagatcagcagcgaggacatgaacttcagcgtggacatcaacaacgaggtgaccagcctgcccggcagcgccagcagcctgaaggccgtggacatccccagcttcgaggagagcaacatcgccgtggaggaggagttcaaccagcccctgagcgtgagctag

SEQ ID NO: 338718 - DNA, 1161 bp, Artificial Sequence
  derived and/or modified sequence
atgggatgttctcgcgttgcgacatcctttgagcttattattataagcaggctgttggttggcatctgtgctggcgtgagctctaatgtggtgcctatgtatctgggcgagctggcccctaagaatctgaggggcgccttgggcgttgtgccccagctgttcatcactgtgggaattctagttgcacagatatttggactgcgcaatctgttggcaaacgtggacgggtggcccattctgctaggcctgacaggcgtccccgcagccctgcagttgctcttgctgccattttttccggagagcccgaggtatctcctaattcagaaaaaggacgaagctgctgctaaaaaggccctgcaaaccctgagaggatgggactcagtggatagggaggtagcggagattagacaagaggacgaagcagagaaagcagctgggttcatctccgttcttaaactctttaggatgcgttctttgcgctggcaattactgagtatcattgtgctgatgggaggccaacaacttagcggagtgaatgcaatctattactacgctgatcaaatttatttgtctgccggcgtgcccgaagagcacgtgcaatacgtcaccgctggtaccggcgccgtcaacgtagtcatgactttttgcgctgtattcgtcgtggaattgttgggccggcggctccttctgctcctcggcttttccatctgtctcattgcttgctgtgttctgactgccgcattggccttacaggatacagtgagctggatgccatacatcagcatagtgtgcgtcattagctacgtgatcggccatgcactcggaccctcccctatccctgccctactaatcacagaaatttttcttcagtcttcaagacccagcgcctttatggtgggcggctctgtgcactggctatccaacttcacagtaggactgatctttccctttattcaggagggcctgggtccttacagtttcatcgtgtttgccgttatttgcctgcttacaacgatttacatcttcttaatcgtccccgagaccaaagctaagacatttatcgaaataaatcaaattttcacaaaaatgaacaaagtaagtgaagtctaccccgagaaagaggagttgaaggaactgccccccgtgacatccgagcagtag

SEQ ID NO: 338719 - DNA, 1329 bp, Artificial Sequence
  derived and/or modified sequence
atgctggagttgcattcactgaccgcttcctccatcatgcgggtcttgatcatgagagcgcccctccgagaagcgccaccagaaaaatttgcattgctcctgagcggcagtcccgggaaaggtgctcttttatttaataacatcttcagcatagtccccgccattctgatgggctgttccagggttgccacgagcttcgagctgataatcatatccaggcttctggtgggcatttgcgccggggttagcagcaatgtggttcccatgtacctcggcgaactggcccctaagaatcttcggggagctctcggggtggtaccacagctctttattaccgtggggatactcgtggcacagatattcgggctgcgcaatctgcttgccaacgtggatgggtggcccattcttctgggcttgaccggcgtgcccgccgccttacaacttctgctcctacctttctttccagagagcccaagatatttgctgattcagaaaaaggatgaagctgccgccaagaaagcactgcagacgctgcggggctgggacagcgtggaccgggaagtggccgagatccgccaggaggacgaggcagagaaggctgccggattcatctcagtgctgaagttatttagaatgcggtccctgcgttggcagctgctctcaatcatcgtattgatgggcgggcaacagctatccggcgtgaacgcaatctactactatgcagatcagatctatctgagtgccggcgtccctgaagagcacgtacagtatgtgacagctggcactggcgccgtgaatgtcgttatgactttctgtgcagtctttgtggtagagctgttggggcgccggctactgctgctgctgggattttccatctgtctcattgcctgctgcgtattgacagcagccctagccctccaggataccgtgtcatggatgccctacataagcatagtgtgtgtgatctcctatgtgatcggacatgctctaggaccaagcccaattccagccctgctcatcaccgagattttcctgcaatctagccgccctagtgcttttatggtaggcggctcagtgcactggctctcaaattttaccgtgggcctgatcttcccattcatccaggaagggctcggcccctactccttcatcgtgtttgcggttatttgcctgcttaccacgatttacatatttctgatcgtcccagagaccaaggccaagaccttcatcgagataaatcagatatttaccaagatgaacaaggtttccgaagtctaccccgagaaagaagagcttaaggaactgccaccggtgaccagtgaacagtag

SEQ ID NO: 338720 - DNA, 1161 bp, Artificial Sequence
  derived and/or modified sequence
atgggctgcagccgggtggccaccagctttgagctgatcatcatcagccggctgctggtgggcatctgtgccggcgtgagcagcaatgtggtgcccatgtacctgggggagctggcccccaagaacctgcggggggccctgggcgtggtgccccagctgttcatcaccgtgggcatcctggtggcccagatcttcggcctgaggaacctgctggccaacgtggatggctggcccatcctgctgggcctgactggagtgcctgctgccctgcagctgctgctgctgcccttcttccctgagagcccccgctacctgctgatccagaagaaggatgaagctgctgccaagaaggccctgcagaccctgcggggctgggacagcgtggaccgggaggtggccgagatccggcaggaggatgaagctgagaaggctgctggcttcatctctgtgctgaagctgttcaggatgaggagcctgcgctggcagctgctgagcatcatcgtgctgatgggcggccagcagctgagcggcgtgaatgccatctactactatgctgaccagatctacctgtctgctggggtgcctgaggagcacgtgcagtatgtgacagctggcaccggggctgtgaatgtggtgatgaccttctgtgctgtgtttgtggtggagctgctgggccggcggctgctgctgctgctgggcttcagcatctgcctgattgcctgctgcgtgctgacagctgccctggccctgcaggacacagtgtcctggatgccctacatcagcatcgtgtgtgtgatctcctatgtgattggccacgccctgggccccagccccatcccagccctgctgatcacagagatcttcctgcagagcagccggcccagcgccttcatggtgggcggctctgtgcactggctgagcaacttcaccgtgggcctcatcttccccttcatccaggagggcctgggcccctacagcttcatcgtgtttgctgtgatctgcctgctgaccaccatctacatcttcctgattgtgcctgagaccaaggccaagaccttcatcgagatcaaccagatcttcaccaagatgaacaaggtgtctgaggtgtacccagagaaggaggagctgaaggagctgccccctgtgaccagcgagcagtag

SEQ ID NO: 338721 - DNA, 1329 bp, Artificial Sequence
  derived and/or modified sequence
atgctggagctgcacagcctgacagccagcagcatcatgagggtgctgatcatgagggcccccctgcgggaggcccctcctgagaagtttgccctgctgctgagcggcagccctgggaagggggccctgctcttcaacaacatcttcagcatcgtgcctgccatcctgatgggctgcagccgggtggccaccagctttgagctgatcatcatcagccggctgctggtgggcatctgtgccggcgtgagcagcaatgtggtgcccatgtacctgggggagctggcccccaagaacctgcggggggccctgggcgtggtgccccagctgttcatcaccgtgggcatcctggtggcccagatcttcggcctgaggaacctgctggccaacgtggatggctggcccatcctgctgggcctgactggagtgcctgctgccctgcagctgctgctgctgcccttcttccctgagagcccccgctacctgctgatccagaagaaggatgaagctgctgccaagaaggccctgcagaccctgcggggctgggacagcgtggaccgggaggtggccgagatccggcaggaggatgaagctgagaaggctgctggcttcatctctgtgctgaagctgttcaggatgaggagcctgcgctggcagctgctgagcatcatcgtgctgatgggcggccagcagctgagcggcgtgaatgccatctactactatgctgaccagatctacctgtctgctggggtgcctgaggagcacgtgcagtatgtgacagctggcaccggggctgtgaatgtggtgatgaccttctgtgctgtgtttgtggtggagctgctgggccggcggctgctgctgctgctgggcttcagcatctgcctgattgcctgctgcgtgctgacagctgccctggccctgcaggacacagtgtcctggatgccctacatcagcatcgtgtgtgtgatctcctatgtgattggccacgccctgggccccagccccatcccagccctgctgatcacagagatcttcctgcagagcagccggcccagcgccttcatggtgggcggctctgtgcactggctgagcaacttcaccgtgggcctcatcttccccttcatccaggagggcctgggcccctacagcttcatcgtgtttgctgtgatctgcctgctgaccaccatctacatcttcctgattgtgcctgagaccaaggccaagaccttcatcgagatcaaccagatcttcaccaagatgaacaaggtgtctgaggtgtacccagagaaggaggagctgaaggagctgccccctgtgaccagcgagcagtag

SEQ ID NO: 338722 - DNA, 1161 bp, Artificial Sequence
  derived and/or modified sequence
atgggctgcagccgggtggccaccagcttcgagctgatcatcatctctcgattgctcgtgggaatttgtgccggagtaagcagtaacgtggtgcctatgtatctcggtgagctggcgcccaaaaacctgcggggggccttaggggtggtaccacagctatttattacagtaggcattctggtggcccaaatctttgggcttaggaacctcctggccaatgtggacggctggcctattctgctggggctgactggcgtgccggccgctctgcagttattgcttctgcctttttttcctgaaagtcctcgctacctgcttatccaaaagaaggatgaagctgccgccaaaaaggcattgcagactctaaggggatgggactctgttgacagggaggtcgctgagatccgtcaggaggacgaagccgaaaaggccgccggcttcattagtgtgctcaagctgttccggatgaggtcattgaggtggcagcttctgtcaataattgtgctcatgggagggcaacaactcagtggagtgaatgccatctattactacgcagaccagatttacctgtcagctggtgtgcccgaagaacatgtgcaatatgtcacagccggtaccggcgctgtgaatgtcgtgatgacattttgcgccgtgttcgtggtcgagctgttgggccggcggctgctccttcttctggggtttagcatctgcttgatcgcctgttgcgtgctgacagcagctctggcactgcaggacacagtgtcctggatgccgtatattagcatagtgtgcgtcatctcttacgtcattgggcacgccttggggcctagtcctataccagccctgctgatcacggaaatcttcttacaatccagccgccctagcgcctttatggttggtgggagcgtgcactggctgtctaactttacagtaggcctcatctttcctttcatccaggagggcctgggaccctacagcttcatcgtcttcgctgtcatttgccttcttaccacgatctacatctttctcattgtcccagaaaccaaggccaagacttttatcgaaattaatcagatttttacgaagatgaataaggtgtctgaagtataccccgaaaaggaagaattaaaagagctaccccctgttacttccgagcagtag

SEQ ID NO: 338723 - DNA, 1329 bp, Artificial Sequence
  derived and/or modified sequence
atgctggagctgcacagcctgaccgccagcagcatcatgcgggtgttaattatgcgggccccactgcgcgaggctccacccgaaaagtttgcactgctgctgagtggatcccccgggaaaggagccctactgtttaacaacatattttctattgtccccgcaatcctgatgggatgctcccgcgtggcaacctcatttgagctgattataatttcccgcctgctggtgggcatttgcgccggagtttcttcgaacgtggttcccatgtatctaggagagctcgcccccaagaacttacgtggcgcccttggcgtcgtgcctcaactctttatcaccgtcggtattctggtagcccagatcttcggcctgagaaacttgctggccaatgtagatggatggcctatactcctaggcctcaccggtgtacccgccgcactgcaattactgttgttaccttttttccccgagagtccaaggtacttacttattcagaaaaaggacgaggcggccgcaaaaaaggcgctacagactctgcgcggctgggattctgttgaccgcgaagtcgcagagattcgccaggaggatgaagccgagaaggccgcgggctttattagcgtgctgaagctctttcgcatgcgctcactcagatggcagctgttaagcatcatcgtgctcatgggcggccagcagttgagcggtgttaatgctatatattactacgccgatcaaatctatctgagtgctggcgtacccgaggaacatgtgcagtatgtgactgctggcaccggggctgtcaatgtggtaatgacattttgtgctgttttcgtggttgaactgctaggtagaagattgctgctgttactcggcttctccatttgtttgatcgcctgctgtgtgctgaccgctgccctggcattacaggacacagtgtcctggatgccgtacatctcgatcgtgtgtgtaatctcttatgtcatcggccacgcactgggcccgtctcccatcccagctctgcttattactgaaatttttcttcagagctctcgtccttccgcttttatggtggggggatccgttcactggctatccaactttaccgtcggcttaatttttccctttatacaggagggcttgggaccttatagcttcattgtgtttgccgttatatgcctgttgactacaatctacattttcctgatcgtgccggagactaaggctaaaacttttatcgagatcaaccagattttcaccaaaatgaacaaggttagtgaagtctaccccgagaaggaggaactcaaggagctgccacctgtcaccagtgagcagtag

SEQ ID NO: 338724 - DNA, 1161 bp, Artificial Sequence
  derived and/or modified sequence
atgggatgtagcagggtggccacgtcattcgaactaatcataatatctcggcttctggtggggatctgtgccggagtgagctctaatgtggtgcctatgtatctgggggagctggccccaaagaatctcaggggcgctctgggcgtggtcccacagctgtttatcacagtgggtatcctggtagctcagattttcggtctgcggaatctgctagctaacgtcgatggttggcctatcctcctggggcttacaggcgttccagcagccctgcagctgctgctacttccgtttttccccgagtcaccacggtacctcttgattcaaaaaaaagatgaggcggctgccaagaaagctctacaaacccttaggggctgggattccgtggatagagaggtggcagaaattaggcaggaggatgaggcagaaaaggctgcaggcttcatttctgtgcttaaactgttccgcatgcgcagccttcgttggcagttgctgtccattatcgtgctgatggggggacaacagctgtctggcgtgaacgccatttactattacgcggatcagatttatctatcagcaggtgtccctgaagagcacgtccagtacgtgacagccggaacaggggctgttaacgttgtgatgacgttctgtgcggtatttgtagtggagctcctcggaaggcggctgttgctcttattagggttctccatttgcttaatagcctgctgcgtcctgacagctgctctcgctttacaggatactgtgtcatggatgccttacattagcattgtgtgcgtcatctcctacgtgattggccacgcactcgggccatctcctattcctgcccttctcattactgagatcttcttgcaaagcagcagaccatccgcattcatggtcggcggaagtgtacactggctctccaattttacagtaggcctaatcttcccctttattcaggagggcttaggtccttacagcttcatcgtctttgctgtcatttgtttgctcacaactatctacatatttctaatagttcccgagacaaaagcaaaaactttcatcgaaatcaaccaaatctttaccaaaatgaacaaagtgtctgaagtgtaccccgaaaaagaggagctgaaggaactccccccagtaacctcagaacagtag

SEQ ID NO: 338725 - DNA, 1329 bp, Artificial Sequence
  derived and/or modified sequence
atgctggaactgcacagtcttactgccagtagtatcatgcgcgtactgatcatgcgcgcacctctgagagaggctccaccagagaaattcgccctgctgctgtcagggtcccccggaaaaggcgcactgctattcaataatatattctcgattgtaccagctatcctcatgggatgtagccgggttgcaacgagcttcgaattaattattatatctcgcttgttggtgggcatttgtgcaggtgtgtcctccaatgtcgttccaatgtatctgggcgagctggcacctaagaatctcagaggtgcattaggagtagtcccgcagctgtttattaccgtgggcattcttgtcgcacagattttcggcctccgaaacctactggcgaacgtggatggatggccaatcttactcggacttaccggtgtgcccgctgctttgcagcttttgctgttgccttttttcccagagtcaccacggtacctgctaatccaaaaaaaggatgaggccgcagctaagaaagccttgcagactcttcgcggttgggacagcgtcgatcgcgaggtagcagagatccggcaagaggacgaggcagaaaaagctgcgggatttatttcagttctgaagctgtttcggatgaggtctctccggtggcagctgctctctatcatagtgcttatgggcggtcagcaactgtctggagttaacgccatctattattacgctgaccagatttacttgagcgcaggagtgccagaagagcacgtgcaatacgtcaccgcaggcactggtgccgtaaatgtcgtgatgacattttgcgctgtcttcgtggtcgaattgctgggacggcgtttgctcctcctcctgggattctctatctgcttaattgcttgttgtgtccttacagctgcgttagctttacaggacactgtgagctggatgccgtacatttccatcgtttgcgtgattagctacgtcatcggtcatgctctaggcccatctcccatacctgccctgcttatcactgagatcttcctgcagagcagtaggcccagcgccttcatggttggcggtagtgtgcactggctctcgaacttcaccgtgggcttgatcttccccttcatacaagaaggtctgggaccctattcctttattgtctttgctgtgatatgcctgttgactaccatttacattttcctcattgttcccgagactaaggcgaaaacttttatcgagattaatcaaatcttcacaaagatgaacaaagtgagcgaggtgtatcctgaaaaagaggagctcaaagaactgccccctgttactagtgagcaatag

SEQ ID NO: 338726 - DNA, 1443 bp, Artificial Sequence
  derived and/or modified sequence
agagcaagcatggagcaacaggatcagagcatgaaggaagggaaaaggggccttgctgttcaacaacatattttctatcgtgcctgcgatcttaatgggatgcagcagagtcgccacatcatttgagcttatcattatttccagacttttggtgggaatatgtgcaggtgtatcttccaacgtggtccccatgtacttaggggagctggcccctaaaaacctgcggggggctctcggggtggtgccccagctcttcatcactgttggcatccttgtggcccagatctttggtcttcggaatctccttgcaaacgtagatggctggccgatcctgctggggctgaccggggtccccgcggcgctgcagctccttctgctgcccttcttccccgagagccccaggtacctgctgattcagaagaaagacgaagcggccgccaagaaagccctacagacgctgcgcggctgggactctgtggacagggaggtggccgagatccggcaggaggatgaggcagagaaggccgcgggcttcatctccgtgctgaagctgttccggatgcgctcgctgcgctggcagctgctgtccatcatcgtcctcatgggcggccagcagctgtcgggcgtcaacgctatctactactacgcggaccagatctacctgagcgccggcgtgccggaggagcacgtgcagtacgtgacggccggcaccggggccgtgaacgtggtcatgaccttctgcgccgtgttcgtggtggagctcctgggtcggaggctgctgctgctgctgggcttctccatctgcctcatagcctgctgcgtgctcactgcagctctggcactgcaggacacagtgtcctggatgccatacatcagcatcgtctgtgtcatctcctacgtcataggacatgccctcgggcccagtcccatacccgcgctgctcatcactgagatcttcctgcagtcctctcggccatctgccttcatggtggggggcagtgtgcactggctctccaacttcaccgtgggcttgatcttcccgttcatccaggagggcctcggcccgtacagcttcattgtcttcgccgtgatctgcctcctcaccaccatctacatcttcttgattgtcccggagaccaaggccaagacgttcatagagatcaaccagattttcaccaagatgaataaggtgtctgaagtgtacccggaaaaggaggaactgaaagagcttccacctgtcacttcggaacagtgactctggagaggaagccagtggagctggtctgccaggggcttcccactttggcttatttttctgacttctagctgtctgtgaatatccagaaataaaacaactctgatgtggaatgcagtcctcatctccagcctccccaccccagtgggaactgtgcaaagggctgccttgctgttcttgaagctggg

SEQ ID NO: 338727 - DNA, 1846 bp, Artificial Sequence
  derived and/or modified sequence
agtataagcggctctcacgtgtggcaagtttctcagtgtttaggaatgctggagctccactcgctgacagcttcgtccatcatgagggtcctcatcatgagggctccattgcgagaggcccctccagagaagtttgctttgcttctgtcaggatctccaggaaaaggggccttgctgttcaacaacatattttctatcgtgcctgcgatcttaatgggatgcagcagagtcgccacatcatttgagcttatcattatttccagacttttggtgggaatatgtgcaggtgtatcttccaacgtggtccccatgtacttaggggagctggcccctaaaaacctgcggggggctctcggggtggtgccccagctcttcatcactgttggcatccttgtggcccagatctttggtcttcggaatctccttgcaaacgtagatggctggccgatcctgctggggctgaccggggtccccgcggcgctgcagctccttctgctgcccttcttccccgagagccccaggtacctgctgattcagaagaaagacgaagcggccgccaagaaagccctacagacgctgcgcggctgggactctgtggacagggaggtggccgagatccggcaggaggatgaggcagagaaggccgcgggcttcatctccgtgctgaagctgttccggatgcgctcgctgcgctggcagctgctgtccatcatcgtcctcatgggcggccagcagctgtcgggcgtcaacgctatctactactacgcggaccagatctacctgagcgccggcgtgccggaggagcacgtgcagtacgtgacggccggcaccggggccgtgaacgtggtcatgaccttctgcgccgtgttcgtggtggagctcctgggtcggaggctgctgctgctgctgggcttctccatctgcctcatagcctgctgcgtgctcactgcagctctggcactgcaggacacagtgtcctggatgccatacatcagcatcgtctgtgtcatctcctacgtcataggacatgccctcgggcccagtcccatacccgcgctgctcatcactgagatcttcctgcagtcctctcggccatctgccttcatggtggggggcagtgtgcactggctctccaacttcaccgtgggcttgatcttcccgttcatccaggagggcctcggcccgtacagcttcattgtcttcgccgtgatctgcctcctcaccaccatctacatcttcttgattgtcccggagaccaaggccaagacgttcatagagatcaaccagattttcaccaagatgaataaggtgtctgaagtgtacccggaaaaggaggaactgaaagagcttccacctgtcacttcggaacagtgactctggagaggaagccagtggagctggtctgccaggggcttcccactttggcttatttttctgacttctagctgtctgtgaatatccagaaataaaacaactctgatgtggaatgcagtcctcatctccagcctccccaccccagtgggaactgtgcaaagggctgccttgctgttcttgaagctgggctgtctctctccatgttggcctgtcaccagacccgagtcaattaaacagctggtcctccactttgctggttcagccttcgtgtggctcctggtaacgtggctccaccttgatgggtcaacctttgtgtggctcctggtaacataacaacaacagttactatagtggtgagatggaaggaatcaaattttgccagagaaactaacttggtggccccgacaggtcttccggggccatgggcatttgtttagagccaaattcatcctcttaccagatccttttccag

SEQ ID NO: 338728 - DNA, 1161 bp, Artificial Sequence
  derived and/or modified sequence
atgggctgcagcagagtggccaccagcttcgagctgatcatcatcagcagactgctggtgggcatctgcgccggcgtgagcagcaacgtggtgcccatgtacctgggcgagctggcccccaagaacctgagaggcgccctgggcgtggtgccccagctgttcatcaccgtgggcatcctggtggcccagatcttcggcctgagaaacctgctggccaacgtggacggctggcccatcctgctgggcctgaccggcgtgcccgccgccctgcagctgctgctgctgcccttcttccccgagagccccagatacctgctgatccagaagaaggacgaggccgccgccaagaaggccctgcagaccctgagaggctgggacagcgtggacagagaggtggccgagatcagacaggaggacgaggccgagaaggccgccggcttcatcagcgtgctgaagctgttcagaatgagaagcctgagatggcagctgctgagcatcatcgtgctgatgggcggccagcagctgagcggcgtgaacgccatctactactacgccgaccagatctacctgagcgccggcgtgcccgaggagcacgtgcagtacgtgaccgccggcaccggcgccgtgaacgtggtgatgaccttctgcgccgtgttcgtggtggagctgctgggcagaagactgctgctgctgctgggcttcagcatctgcctgatcgcctgctgcgtgctgaccgccgccctggccctgcaggacaccgtgagctggatgccctacatcagcatcgtgtgcgtgatcagctacgtgatcggccacgccctgggccccagccccatccccgccctgctgatcaccgagatcttcctgcagagcagcagacccagcgccttcatggtgggcggcagcgtgcactggctgagcaacttcaccgtgggcctgatcttccccttcatccaggagggcctgggcccctacagcttcatcgtgttcgccgtgatctgcctgctgaccaccatctacatcttcctgatcgtgcccgagaccaaggccaagaccttcatcgagatcaaccagatcttcaccaagatgaacaaggtgagcgaggtgtaccccgagaaggaggagctgaaggagctgccccccgtgaccagcgagcagtag

SEQ ID NO: 338729 - DNA, 1329 bp, Artificial Sequence
  derived and/or modified sequence
atgctggagctgcacagcctgaccgccagcagcatcatgagagtgctgatcatgagagcccccctgagagaggccccccccgagaagttcgccctgctgctgagcggcagccccggcaagggcgccctgctgttcaacaacatcttcagcatcgtgcccgccatcctgatgggctgcagcagagtggccaccagcttcgagctgatcatcatcagcagactgctggtgggcatctgcgccggcgtgagcagcaacgtggtgcccatgtacctgggcgagctggcccccaagaacctgagaggcgccctgggcgtggtgccccagctgttcatcaccgtgggcatcctggtggcccagatcttcggcctgagaaacctgctggccaacgtggacggctggcccatcctgctgggcctgaccggcgtgcccgccgccctgcagctgctgctgctgcccttcttccccgagagccccagatacctgctgatccagaagaaggacgaggccgccgccaagaaggccctgcagaccctgagaggctgggacagcgtggacagagaggtggccgagatcagacaggaggacgaggccgagaaggccgccggcttcatcagcgtgctgaagctgttcagaatgagaagcctgagatggcagctgctgagcatcatcgtgctgatgggcggccagcagctgagcggcgtgaacgccatctactactacgccgaccagatctacctgagcgccggcgtgcccgaggagcacgtgcagtacgtgaccgccggcaccggcgccgtgaacgtggtgatgaccttctgcgccgtgttcgtggtggagctgctgggcagaagactgctgctgctgctgggcttcagcatctgcctgatcgcctgctgcgtgctgaccgccgccctggccctgcaggacaccgtgagctggatgccctacatcagcatcgtgtgcgtgatcagctacgtgatcggccacgccctgggccccagccccatccccgccctgctgatcaccgagatcttcctgcagagcagcagacccagcgccttcatggtgggcggcagcgtgcactggctgagcaacttcaccgtgggcctgatcttccccttcatccaggagggcctgggcccctacagcttcatcgtgttcgccgtgatctgcctgctgaccaccatctacatcttcctgatcgtgcccgagaccaaggccaagaccttcatcgagatcaaccagatcttcaccaagatgaacaaggtgagcgaggtgtaccccgagaaggaggagctgaaggagctgccccccgtgaccagcgagcagtag

SEQ ID NO: 338730 - DNA, 1725 bp, Artificial Sequence
  derived and/or modified sequence
atgttcccctacttcatcatgctgatcttctgcggcatccccctgttcttcatggagctgagcttcggccagttcgccagccagggctgcctgggcgtgtggagaatcagccccatgttcaagggcgtgggctacggcatgatggtggtgagcacctacatcggcatctactacaacgtggtgatctgcatcgccttctactacttcttcagcagcatgacccacgtgctgccctgggcctactgcaacaacccctggaacacccacgactgcgccggcgtgctggacgccagcaacctgaccaacggcagcagacccgccgccctgcccagcaacctgagccacctgctgaaccacagcctgcagagaaccagccccagcgaggagtactggagactgtacgtgctgaagctgagcgacgacatcggcaacttcggcgaggtgagactgcccctgctgggctgcctgggcgtgagctggctggtggtgttcctgtgcctgatcagaggcgtgaagagcagcggcaaggtggtgtacttcaccgccaccttcccctacgtggtgctgaccatcctgttcgtgagaggcgtgaccctggagggcgccttcgacggcatcatgtactacctgaccccccagtgggacaagatcctggaggccaaggtgtggggcgacgccgccagccagatcttctacagcctgggctgcgcctggggcggcctgatcaccatggccagctacaacaagttccacaacaactgctacagagacagcgtgatcatcagcatcaccaactgcgccaccagcgtgtacgccggcttcgtgatcttcagcatcctgggcttcatggccaaccacctgggcgtggacgtgagcagagtggccgaccacggccccggcctggccttcgtggcctaccccgaggccctgaccctgctgcccatcagccccctgtggagcctgctgttcttcttcatgctgatcctgctgggcctgggcacccagttctgcctgctggagaccctggtgaccgccatcgtggacgaggtgggcaacgagtggatcctgcagaagaagacctacgtgaccctgggcgtggccgtggccggcttcctgctgggcatccccctgaccagccaggccggcatctactggctgctgctgatggacaactacgccgccagcttcagcctggtggtgatcagctgcatcatgtgcgtggccatcatgtacatctacggccacagaaactacttccaggacatccagatgatgctgggcttccccccccccctgttcttccagatctgctggagattcgtgagccccgccatcatcttcctgcaggcccaggtgcacagaagactgccccagaaccccctgcacttcgccagcctgcccgagagaaacgtgctgctgcaccagctgccccagagaggcggcgtgcccgagcacgacccccccaccccccccagccccgccagaacctacggcccccaggtgagagtgagagaggtgcccagagccagaagacagagaagccccaaccccgcccccctgtgggccccccccagccccaagccccacccctgcagcgccgccggccccctgggctgggactgccccttcagaaactgccagagcctggccctgagcagcgccagactgctggccgacagcgacgccggcggccccgagaccagacagtgggagcccggcccctag

SEQ ID NO: 338731 - DNA, 1161 bp, Artificial Sequence
  derived and/or modified sequence
atgttcccctacttcatcatgctgatcttctgcggcatccccctgttcttcatggagctgagcttcggccagttcgccagccagggctgcctgggcgtgtggagaatcagccccatgttcaagggcgtgggctacggcatgatggtggtgagcacctacatcggcatctactacaacgtggtgatctgcatcgccttctactacttcttcagcagcatgacccacgtgctgccctgggcctactgcaacaacccctggaacacccacgactgcgccggcgtgctggacgccagcaacctgaccaacggcagcagacccgccgccctgcccagcaacctgagccacctgctgaaccacagcctgcagagaaccagccccagcgaggagtactggagactgtacgtgctgaagctgagcgacgacatcggcaacttcggcgaggtgagactgcccctgctgggctgcctgggcgtgagctggctggtggtgttcctgtgcctgatcagaggcgtgaagagcagcggcaaggtggtgtacttcaccgccaccttcccctacgtggtgctgaccatcctgttcgtgagaggcgtgaccctggagggcgccttcgacggcatcatgtactacctgaccccccagtgggacaagatcctggaggccaaggtgtggggcgacgccgccagccagatcttctacagcctgggctgcgcctggggcggcctgatcaccatggccagctacaacaagttccacaacaactgctacagagacagcgtgatcatcagcatcaccaactgcgccaccagcgtgtacgccggcttcgtgatcttcagcatcctgggcttcatggccaaccacctgggcgtggacgtgagcagagtggccgaccacggccccggcctggccttcgtggcctaccccgaggccctgaccctgctgcccatcagccccctgtggagcctgctgttcttcttcatgctgatcctgctgggcctgggcacccagttctgcctgctggagaccctggtgaccgccatcgtggacgaggtgggcaacgagtggatcctgcagaagaagacctacgtgaccctgggcgtggccgtggccggcttcctgctgggcatccccctgaccagccaggccagcatcggctgctgctag

SEQ ID NO: 338732 - DNA, 1725 bp, Artificial Sequence
  derived and/or modified sequence
atgttcccatattttatcatgttgatcttctgcggcatccccctattctttatggagttatctttcggtcagtttgctagccagggatgcttaggggtgtggaggatttctccaatgttcaaaggcgttgggtatggtatgatggtggtgtctacatacatcggcatctattacaatgttgtcatctgtatcgccttttattattttttttcttccatgacgcacgtgctgccatgggcttattgcaacaatccatggaacacacatgactgcgcaggagtgctcgatgctagcaatttaactaatgggtcccgtcctgccgctctgcccagcaatctctctcatctcttgaaccatagtctgcaacggacgagtccgtccgaggaatactggaggttgtatgtccttaagctaagcgacgatatcgggaacttcggagaggtgcgattgccactcctcggttgtctgggagtttcttggctggtcgtgtttctgtgcctgattagaggagtgaaatcctccggaaaagtcgtgtactttactgctacctttccctatgtggtgctgaccatcctgtttgttcggggagttacgttagagggggcatttgatggtataatgtattaccttacaccccagtgggataaaattctggaggcaaaggtgtggggcgacgccgcatcccagattttctattcgttggggtgtgcttggggcgggctcatcaccatggcgtcgtataataagttccacaacaattgctatcgcgatagtgttatcatttctataacaaactgtgccactagcgtgtatgctggatttgtgatattcagcatcttgggtttcatggccaaccacctgggggtagatgtctcgcgcgtggcagaccacgggcctgggctggcattcgtggcataccccgaagccctgactctgttgcctatctcacctctttggagtctattattcttcttcatgctgatcttattaggactgggaacccagttctgcttgctcgaaacccttgtcaccgctatcgtggatgaagtgggaaacgaatggattctgcagaagaaaacatatgtgaccttgggtgtggcagttgccgggtttctactaggcatccccctcacttcccaggcaggtatctattggttgctcctcatggacaattatgccgcttcttttagcctggtcgtcattagttgtatcatgtgcgtggctatcatgtatatttatggccatcgcaactactttcaggacattcagatgatgctgggatttccacctccgctgtttttccagatttgttggcggttcgtctctccagcgattatctttcttcaggcacaggtccacaggaggcttcctcagaacccgctgcacttcgcttccttacctgaacgcaacgtccttctacatcagctgccacagcgcggaggagtgcccgagcatgaccctccgactccaccgagcccggccaggacctatggaccacaggttcgcgtcagggaggtgccccgggctcgccgacagagatcccccaatccagcccctctttgggctcctcccagccctaagcctcatccctgctctgcagcggggcctttaggttgggactgcccattcagaaactgccagtcactagccctgtcatctgcccggttgctggctgactccgatgctggcgggcctgaaacaagacagtgggaacctggcccttag

SEQ ID NO: 338733 - DNA, 1161 bp, Artificial Sequence
  derived and/or modified sequence
atgttcccctactttatcatgctgatcttctgtgggatccccctgttctttatggaactgtctttcgggcaattcgcaagccagggatgtctgggggtgtggagaatttctcccatgtttaagggagtggggtacggtatgatggtggtgagtacctatattgggatctactataatgttgtgatctgcatagcgttttattattttttctcatccatgacccacgtgttaccctgggcctactgcaataatccatggaatacgcacgattgcgcaggtgtcctggacgcgagcaatctgactaatggaagtagaccagcagcattgccgagtaacttgtcacatctgcttaaccactcgctgcaaaggacctctcctagtgaagagtattggaggctgtacgtgttgaagctgtccgacgatattgggaacttcggggaagtgcggctgcctctgttggggtgcctgggggtcagctggctggtggtcttcctgtgcttgataagaggagtaaagagttctggtaaggtagtgtacttcaccgccacatttccatatgttgtgttaaccattctcttcgtcaggggggtgactctggagggcgccttcgacggcattatgtattatctgaccccccagtgggacaagatcctcgaagcaaaagtttggggagacgccgcaagccagatattctatagcctcggctgcgcgtgggggggcctgatcacgatggccagttataataaattccataataactgttaccgagacagtgtgattatttcaattaccaattgtgccaccagcgtgtacgcggggttcgtgatattcagcatcctgggatttatggccaaccatctgggagtggacgtctcgcgagttgcagatcacggcccgggtctggcctttgtcgcctatcctgaagccttgactctcctccccataagccccctctggtcactgctgttcttcttcatgcttatcctcctgggcctggggacccaattctgcctgctggaaaccctcgtgacagctatagtcgatgaagtcggcaacgagtggatactacagaagaaaacgtacgtcaccctcggggtcgccgtagccgggttcctgttgggtatccccttgacgtcacaagcttcgatcgggtgctgttag

SEQ ID NO: 338734 - DNA, 1725 bp, Artificial Sequence
  derived and/or modified sequence
atgttcccctacttcatcatgctgatcttctgtggcatccccctcttcttcatggagctgagctttggccagtttgccagccagggctgcctgggcgtgtggaggatcagccccatgtttaaaggagtgggctacggcatgatggtggtgtccacctacatcggcatctactacaacgtggtgatctgcatcgccttctactacttcttcagctccatgacccacgtgctgccctgggcctactgcaacaacccctggaacacccatgactgtgccggcgtgctggatgccagcaacctgaccaacggcagcaggcctgctgccctgcccagcaacctgagccacctgctgaaccacagcctgcagaggaccagccccagcgaggagtactggaggctgtatgtgctgaagctgagtgatgacatcggcaactttggagaggtgcggctgcccctgctgggctgcctgggcgtgtcctggctggtggtgttcctgtgcctgatccggggcgtgaagagcagcggcaaggtggtgtacttcaccgccaccttcccctacgtggtgctgaccatcctgtttgtgcggggcgtgaccctggagggcgcctttgatggcatcatgtactacctgaccccccagtgggacaagatcctggaggccaaggtgtggggagatgctgccagccagatcttctacagcctgggctgtgcctggggcggcctcatcaccatggccagctacaacaagttccacaacaactgctacagagacagcgtcatcatcagcatcaccaactgtgccacctctgtgtatgccggcttcgtcatcttcagcatcctgggcttcatggccaaccacctgggcgtggatgtgtcccgggtggccgaccacggccctggcctggcctttgtggcctacccagaggccctgaccctgctgcccatcagccccctgtggagcctgctcttcttcttcatgctgatcctgctgggcctgggcacccagttctgcctgctggagaccctggtgacagccatcgtggatgaggtgggcaatgagtggatcctgcagaagaagacctacgtgaccctgggcgtggccgtggccggcttcctgctgggcatccccctgaccagccaggccggcatctactggctgctgctgatggacaactatgctgccagcttcagcctggtggtgatcagctgcatcatgtgtgtggccatcatgtacatctacggccacaggaactacttccaggacatccagatgatgctgggcttccccccacccctcttcttccagatctgctggaggtttgtgtccccagccatcatcttcctgcaggcccaggtgcaccggcggctgccccagaaccccctgcactttgccagcctgcctgagagaaatgtgctgctgcaccagctgccccagagaggaggagtgcctgagcatgacccccccaccccacccagccctgcccggacctacggcccccaggtgcgggtgcgggaggtgccccgggcccggcggcagaggagccccaacccagcccccctgtgggccccacccagccccaagccccacccctgcagcgctgctggccccctgggctgggactgccccttcaggaactgccagagcctggccctgagcagcgcccggctgctggccgacagtgatgctgggggccctgagacccggcagtgggagcccggcccctag

SEQ ID NO: 338735 - DNA, 1161 bp, Artificial Sequence
  derived and/or modified sequence
atgttcccctacttcatcatgctgatcttctgtggcatccccctcttcttcatggagctgagctttggccagtttgccagccagggctgcctgggcgtgtggaggatcagccccatgtttaaaggagtgggctacggcatgatggtggtgtccacctacatcggcatctactacaacgtggtgatctgcatcgccttctactacttcttcagctccatgacccacgtgctgccctgggcctactgcaacaacccctggaacacccatgactgtgccggcgtgctggatgccagcaacctgaccaacggcagcaggcctgctgccctgcccagcaacctgagccacctgctgaaccacagcctgcagaggaccagccccagcgaggagtactggaggctgtatgtgctgaagctgagtgatgacatcggcaactttggagaggtgcggctgcccctgctgggctgcctgggcgtgtcctggctggtggtgttcctgtgcctgatccggggcgtgaagagcagcggcaaggtggtgtacttcaccgccaccttcccctacgtggtgctgaccatcctgtttgtgcggggcgtgaccctggagggcgcctttgatggcatcatgtactacctgaccccccagtgggacaagatcctggaggccaaggtgtggggagatgctgccagccagatcttctacagcctgggctgtgcctggggcggcctcatcaccatggccagctacaacaagttccacaacaactgctacagagacagcgtcatcatcagcatcaccaactgtgccacctctgtgtatgccggcttcgtcatcttcagcatcctgggcttcatggccaaccacctgggcgtggatgtgtcccgggtggccgaccacggccctggcctggcctttgtggcctacccagaggccctgaccctgctgcccatcagccccctgtggagcctgctcttcttcttcatgctgatcctgctgggcctgggcacccagttctgcctgctggagaccctggtgacagccatcgtggatgaggtgggcaatgagtggatcctgcagaagaagacctacgtgaccctgggcgtggccgtggccggcttcctgctgggcatccccctgaccagccaggccagcatcggctgctgctag

SEQ ID NO: 338736 - DNA, 1725 bp, Artificial Sequence
  derived and/or modified sequence
atgttcccctacttcatcatgctgatcttctgcggcatccccctgttcttcatggagctcagctttggtcagtttgcatcacaaggctgtctcggagtctggagaataagtccgatgttcaaaggtgtggggtacggaatgatggttgtgtccacatatattggcatttactacaacgtcgtcatttgtattgcgttctattatttcttctcttcgatgactcatgttctgccctgggcctattgcaacaacccgtggaacactcacgattgcgccggggtgctcgacgcctccaacttaaccaacggcagtcggcccgctgctttaccctctaatctgagtcatctgctgaaccattccctgcagcgcactagtcccagcgaggagtactggagactctatgtgttaaagttaagtgacgacataggcaacttcggtgaagtcagactccccctgcttggttgcctcggcgtgtcatggctcgtagtgttcttatgcctcattagaggcgtgaaatctagcgggaaagtggtctactttaccgctaccttcccctatgtggtccttacgatcctgttcgtccgaggcgtaactctggagggggcctttgacggtattatgtactacctcaccccccaatgggacaagatcctcgaggccaaagtatggggcgatgccgccagtcaaatattctactcactgggttgcgcatggggtggtctaatcactatggctagctataataaatttcacaacaactgctatagggactcagtgattatttctatcaccaattgtgccacctctgtctacgcaggtttcgttattttcagcattctgggcttcatggcgaaccacctgggggtggatgttagcagggtggcggaccatggccccggactcgccttcgtcgcttaccccgaagcactcactctgctgccgattagccctctgtggtccctgctgtttttctttatgttgattctgctggggctggggacacagttctgcctccttgagacgttggtcacggctatcgtggacgaggtcggtaatgaatggatcctgcaaaagaagacctacgtcactctcggcgtggctgtggcgggcttcctgctcggcatcccgctgacctcccaggctggcatctactggctactgctcatggacaactacgcagccagctttagtctcgtcgtaatctcctgcatcatgtgcgtggccatcatgtatatttacggacaccgtaactattttcaggacattcaaatgatgttggggtttccacctcctttattttttcagatctgttggagatttgtcagtccagctatcatctttctccaggcccaggtccataggcgcctcccccagaatcccctacattttgcttctttgcccgaaagaaacgtgctgctgcaccaacttcctcaaaggggcggggtccccgaacacgatcctcctactccaccctcgcctgctagaacctatggaccccaggtgcgtgtgagggaggtgccacgggcccggcggcagcgatcccccaaccccgctccgctgtgggcacctccatctcccaaaccgcacccctgttcggctgccggaccactcggatgggattgtccctttaggaactgtcagtctcttgccctcagctctgctcgcctgctggcagactctgatgcaggaggtccagaaacccggcagtgggagcctggaccctag

SEQ ID NO: 338737 - DNA, 1161 bp, Artificial Sequence
  derived and/or modified sequence
atgttcccctacttcatcatgctgatcttctgcggcatccccctgttctttatggagctgtcattcggtcagttcgcctcacagggatgtctgggcgtgtggaggatcagcccaatgttcaaaggggtcggctacggaatgatggtcgtgtccacctatatcggcatttattacaatgtggttatatgcatcgcattttactacttcttctcttccatgacccatgtactgccatgggcatattgtaataacccttggaatacacacgattgtgcgggggtacttgacgccagcaacctgacgaacgggtctaggcccgccgctttaccttcaaacctctcccacctgctcaatcatagccttcagcggacctctcctagcgaggagtattggcggctctacgtgctgaaactgagtgacgacatcggtaacttcggggaggtccggttacccttattggggtgcctgggcgtttcgtggctggtggtgttcctgtgcttgatacgcggagttaaaagttctggcaaagtcgtttactttacagccacatttccctacgtggtgctgaccatcttgttcgttaggggggtaacgctggaaggggcgttcgacggaatcatgtactaccttacgcctcagtgggataagatcctggaagccaaggtttggggcgacgccgcttctcagattttctatagcctgggatgcgcatggggtggattaattaccatggcatcctataataagtttcacaataactgctacagagacagcgtgatcatttccatcaccaactgcgcaacttctgtatatgcagggtttgtcatattttctattctgggttttatggctaatcatctaggcgtcgacgtctctagggtggctgaccatgggcctggactggcttttgtggcttatcccgaggctttaacacttttgcctataagcccattatggtccttgctgttctttttcatgctgatactcctcggtctggggacccagttttgtttgttagagaccctcgtgacagcaattgtcgatgaagttggaaacgaatggatactccagaaaaagacatacgtgactctgggcgttgccgtggctggctttctcttagggattccacttacttcgcaagctagcatcggctgctgttag

SEQ ID NO: 338738 - DNA, 1725 bp, Artificial Sequence
  derived and/or modified sequence
atgtttccttacttcattatgttaatcttttgcgggatcccattattcttcatggaacttagcttcgggcagtttgcgagccagggttgtctgggagtgtggcgaatttccccaatgttcaagggggttggatatgggatgatggttgtgtccacttatataggcatctattacaacgtagtgatctgcatcgcattctattacttctttagttcaatgacccatgtgctaccatgggcctactgtaataatccctggaatacccatgattgcgccggagtgctagatgcatcgaatctgaccaatggcagtcgcccagccgctctgcccagcaatttgagccacctactgaaccactccctccagagaacctcccctagcgaggagtattggcggctatacgtcctaaaactttccgacgacatcggaaacttcggagaagtgagactgcccttgctgggatgcttgggcgtttcttggctagtggtttttctgtgcctgatacggggtgtgaagtcctcaggtaaagtggtgtacttcacagccacatttccgtatgtagtgctcactattctgtttgtgcggggagtcacgctagagggagcgttcgatggcatcatgtactatctgacaccacaatgggataaaatccttgaggccaaggtgtggggcgatgctgcctcccagatattctattctctgggatgcgcttggggcggtttgattactatggcctcttacaacaagtttcataataattgctatcgcgattctgttatcatctcgatcacgaattgcgccacctcggtgtatgctgggttcgtgatatttagtatccttggatttatggccaaccatctcggcgtggatgtgtcacgggtcgccgaccatggaccaggccttgcatttgtggcctaccccgaggctctgaccctgttgcctatctccccgctctggtctctgctgtttttttttatgttgatcttactcggactgggcacgcagttctgtctcctcgaaactcttgtgaccgctatagttgatgaggtgggaaacgaatggattctccagaaaaaaacttacgtgaccctaggagtcgccgttgccggattccttctcggtattccgctgacctctcaggccggaatctattggcttctcctgatggacaattatgccgcttctttctctcttgtagtgatcagttgcattatgtgcgtcgccatcatgtacatatacgggcaccggaactatttccaggatatccaaatgatgctgggcttcccacctccactgttcttccagatttgttggaggttcgtctcccccgcaattattttcctgcaggctcaggtgcacagacggctaccacaaaatccactgcatttcgcttctctgcccgagcggaatgttttgttgcatcagttaccccagcgcggaggtgtcccagagcatgacccccctacgccaccgtcacccgcacggacctatggaccccaggtgcgcgttcgcgaggtccctagggctcgacgtcaacgatcacctaatcctgcgcctttgtgggcccctccatctcctaaaccacatccctgcagtgcagccggaccactgggatgggactgcccttttagaaactgccagtccttggctctgtccagtgcaaggctgttggcagattccgacgccggtgggcctgagacacgccaatgggagcctgggccatag

SEQ ID NO: 338739 - DNA, 1161 bp, Artificial Sequence
  derived and/or modified sequence
atgtttccctatttcatcatgctcatattttgtggaatccctctgttttttatggaactgtccttcggccagtttgcatcccaaggttgtctcggggtatggcgtatttcacccatgtttaaaggagtaggatatggtatgatggtcgtcagtacctatatcggaatttattataatgtggtgatctgcattgcattttactatttcttctcatctatgacacacgtactgccttgggcatattgcaataacccctggaacacccacgactgcgccggtgtgctggatgcatccaacctcaccaacggctcaagaccagctgcactcccaagtaatctgagccatctcttaaatcattccctacaacgcaccagtccctcagaagagtactggcgcctgtacgtgctcaagttgtccgacgatataggcaattttggcgaagtcagactgcctcttctcggctgcctgggggtctcctggctcgtcgtgtttctttgcctgattcgtggcgtcaaatccagcggtaaggtggtgtacttcactgcaacttttccctacgtagtgctgacgatcctgttcgtccgaggtgtgacactggagggcgctttcgatgggattatgtactacctcacgccgcagtgggataagatcctggaagccaaagtatggggggacgccgcttcacagatattttatagcttgggctgtgcatggggcggactgataactatggctagctacaataagtttcataacaattgttatcgagactctgtgatcatcagtatcacaaattgtgccaccagcgtgtatgccggattcgtcatcttttcaatcctcggctttatggctaaccacctcggagtggacgtgtctagggtggcagatcatggaccaggattagccttcgtcgcgtaccccgaggccctgacactgctgccaattagccctttatggtctctgctatttttttttatgctgatcctgttgggtctgggtactcagttctgtctactggaaactctggtcacagccattgtggacgaggtgggcaacgaatggatactgcagaaaaagacttatgtgactttaggcgtcgccgtggccggtttcctcttgggcatacctctgaccagccaagctagcatcggctgctgctag

SEQ ID NO: 338740 - DNA, 2162 bp, Artificial Sequence
  derived and/or modified sequence
ttttccagggtccagggcaagtgcccgcatgggctgggagccggtgtgtcctcatccctggacgccggggacgggtggagatgtcagcggatggcagcgagggtgaggagactcgaaagctacacttctcccctgtaggacatcctgacttgaccttcaaaagaatggtgctgtgcccagcgaggccaccaagagggaccagaacctcaaacggggcaactggggcaaccagatcgagtttgtactgacgagcgtgggctatgccgtgggcctgggcaatgtctggcgcttcccatacctctgctatcgcaacgggggaggcgccttcatgttcccctacttcatcatgctcatcttctgcgggatccccctcttcttcatggagctctccttcggccagtttgcaagccaggggtgcctgggggtctggaggatcagccccatgttcaaaggagtgggctatggtatgatggtggtgtccacctacatcggcatctactacaatgtggtcatctgcatcgccttctactacttcttctcgtccatgacgcacgtgctgccctgggcctactgcaataacccctggaacacgcatgactgcgccggtgtactggacgcctccaacctcaccaatggctctcggccagccgccttgcccagcaacctctcccacctgctcaaccacagcctccagaggaccagccccagcgaggagtactggaggctgtacgtgctgaagctgtcagatgacattgggaactttggggaggtgcggctgcccctccttggctgcctcggtgtctcctggttggtcgtcttcctctgcctcatccgaggggtcaagtcttcagggaaagtggtgtacttcacggccacgttcccctacgtggtgctgaccattctgtttgtccgcggagtgaccctggagggagcctttgacggcatcatgtactacctaaccccgcagtgggacaagatcctggaggccaaggtgtggggtgatgctgcctcccagatcttctactcactgggctgcgcgtggggaggcctcatcaccatggcttcctacaacaagttccacaataactgttaccgggacagtgtcatcatcagcatcaccaactgtgccaccagcgtctatgctggcttcgtcatcttctccatcctcggcttcatggccaatcacctgggcgtggatgtgtcccgtgtggcagaccacggccctggcctggccttcgtggcttaccccgaggccctcacactacttcccatctccccgctgtggtctctgctcttcttcttcatgcttatcctgctggggctgggcactcagttctgcctcctggagacgctggtcacagccattgtggatgaggtggggaatgagtggatcctgcagaaaaagacctatgtgaccttgggcgtggctgtggctggcttcctgctgggcatccccctcaccagccaggcaggcatctattggctgctgctgatggacaactatgcggccagcttctccttggtggtcatctcctgcatcatgtgtgtggccatcatgtacatctacgggcaccggaactacttccaggacatccagatgatgctgggattcccaccacccctcttctttcagatctgctggcgcttcgtctctcccgccatcatcttcctccaggctcaggtccaccgccgcctcccccagaatcctcttcacttcgcgtcgctcccggagcggaacgtgctcctccaccagctcccacagcgagggggagtgccggagcatgacccaccgacgccgccgtccccggctcggacctacgggccgcaggtcagagtgcgggaggtaccgcgggcccgccggcaacgctcaccaaaccccgcccctctatgggccccgccctctcccaagccccacccgtgctctgccgctggtcccctcggctgggattgcccgttccggaactgccagtccttggcgctctcttctgcccggcttttggccgactcggatgccgggggcccagaaaccaggcagtgggaaccagggccctagccccacctcttccgcgtggccatcacccgggaaaccacgccgcgactctagggccccgccccctcccgtgtttggtccggcgggcggcgcgtgccggctgggagttcag

SEQ ID NO: 338741 - DNA, 1577 bp, Artificial Sequence
  derived and/or modified sequence
acaacaggctgtggaagagctgcgagcggcgcggcggggcgggcgaactcggcgcggcacagagcctcgggaggctgatgcaactttccctttaagaaagccacctgggcgcaccgcggtgcggacccagcacgcctgggccgggggctgcagcatgctcttgagatctgtggcctgaaaggcgctggaagcagagcctgtgagtgtggtccccgtcaccagagccccaacccaccgccgccatggtaggaaaaggtgccaaagggatgctggcgccttcatgttcccctacttcatcatgctcatcttctgcgggatccccctcttcttcatggagctctccttcggccagtttgcaagccaggggtgcctgggggtctggaggatcagccccatgttcaaaggagtgggctatggtatgatggtggtgtccacctacatcggcatctactacaatgtggtcatctgcatcgccttctactacttcttctcgtccatgacgcacgtgctgccctgggcctactgcaataacccctggaacacgcatgactgcgccggtgtactggacgcctccaacctcaccaatggctctcggccagccgccttgcccagcaacctctcccacctgctcaaccacagcctccagaggaccagccccagcgaggagtactggaggctgtacgtgctgaagctgtcagatgacattgggaactttggggaggtgcggctgcccctccttggctgcctcggtgtctcctggttggtcgtcttcctctgcctcatccgaggggtcaagtcttcagggaaagtggtgtacttcacggccacgttcccctacgtggtgctgaccattctgtttgtccgcggagtgaccctggagggagcctttgacggcatcatgtactacctaaccccgcagtgggacaagatcctggaggccaaggtgtggggtgatgctgcctcccagatcttctactcactgggctgcgcgtggggaggcctcatcaccatggcttcctacaacaagttccacaataactgttaccgggacagtgtcatcatcagcatcaccaactgtgccaccagcgtctatgctggcttcgtcatcttctccatcctcggcttcatggccaatcacctgggcgtggatgtgtcccgtgtggcagaccacggccctggcctggccttcgtggcttaccccgaggccctcacactacttcccatctccccgctgtggtctctgctcttcttcttcatgcttatcctgctggggctgggcactcagttctgcctcctggagacgctggtcacagccattgtggatgaggtggggaatgagtggatcctgcagaaaaagacctatgtgaccttgggcgtggctgtggctggcttcctgctgggcatccccctcaccagccaggcatctattggctgctgctgatggacaactatgcggccagcttctccttggtggtcatctcctgcatcatgtgtgtggccatcatgtacatctacgggcaccggaactacttccaggacatccagatgatgctgggattcccaccacccctcttctt

SEQ ID NO: 338742 - protein, 109 aa, Artificial Sequence
  derived and/or modified sequence
MSTNICSFKDSAVDFTGRCYFTKICKCKLKDIACLKCGNIVGYHVIVPCSSCLPSCNNGHFWMFHSQAVYDINRLDSTGVNILLWGNLPEIEESTDEDVLNISAEECIR

SEQ ID NO: 338743 - DNA, 330 bp, Artificial Sequence
  derived and/or modified sequence
atgagcaccaacatctgcagcttcaaggacagcgccgtggacttcaccggcagatgctacttcaccaagatctgcaagtgcaagctgaaggacatcgcctgcctgaagtgcggcaacatcgtgggctaccacgtgatcgtgccctgcagcagctgcctgcccagctgcaacaacggccacttctggatgttccacagccaggccgtgtacgacatcaacagactggacagcaccggcgtgaacatcctgctgtggggcaacctgcccgagatcgaggagagcaccgacgaggacgtgctgaacatcagcgccgaggagtgcatcagatag

SEQ ID NO: 338744 - DNA, 330 bp, Artificial Sequence
  derived and/or modified sequence
atgtccacaaacatctgttcatttaaagactccgccgtggacttcaccggcaggtgctactttactaaaatctgtaaatgtaagctgaaagacattgcttgcctgaagtgcggaaatatagtgggataccacgtgattgtgccctgctcctcctgtctgccatcttgcaataatggccatttttggatgttccatagccaggccgtgtacgacatcaatcggctggattccactggagttaatatccttctttggggcaacctccccgagattgaggagagtactgatgaagacgtactgaatatctccgccgaagagtgtattcgctag

SEQ ID NO: 338745 - DNA, 1773 bp, Artificial Sequence
  derived and/or modified sequence
ggaagggatgtcttaaaagaggagaagctttaaattagacgatcggagaaggctgagggaattgctatgaaggggcgggagctgaagtgtagaggactcctttagacagcagaaagggaaagccgttgagaagttcccttcaaactccacctgcctcctctccaattcaaactccactcccttctccaaaagttaaaaggaaagccaagtttgccacgctcccctgttcctactcaataaatacttcttctactccgccaccgggaaaacagaaaaaaaaaactaatttccttcccaatattaggacttagaaaagctctaggtcccgcaacttgaattttagcctaggggaatcaaaatagtaggagcattactcttgtttcctttttcaaaatcccacacctcatccttcctgcgacgccatgtctaccaacatttgtagtttcaaggacagcgcagtggacttcactggaagatgctatttcaccaaaatctgcaaatgtaaactgaaggacatcgcatgtttaaaatgtgggaacattgtaggttatcatgtgattgttccatgtagttcctgtcttccttcctgcaacaacggacacttctggatgtttcacagccaggcagtttatgatattaacagactagactccacaggtgtaaacatcctactttggggcaacttgccagagatagaagagagtacagatgaagatgtgttaaatatctcagcagaggagtgtattagataaatggaattatgatatatatgatatacaaacttttttctatttaaaaatatattaatggatcaactttaaaattgttagttgccagtgatcttttttggaaaacaaaaatggggcatttgttgatttatttattttccgtctctaattagttacctcagtttgattgaagccagtggagttgtgcttttcctctacttctacttcctctcccccacctttttctgcccagtgtaggtgtattcttaaattcagacgggaagattctttcacatatcactcagttacctcccaatctgggggagtttttcttacaacttgataccagataccattaattttacattcctgaataaaggcctagtacccacgcatatttcaaccatgcatatatcaagttcaactgagttttaataggggattaaaaaaacaagctgttaggtttccatgggcactggttctcataggttctattggtgataactgctttaacatggagcaagagtttgtgaatcaggaaatagaataaattaaaatttaaaatatatagaggaatcctcttgattgctcagcatgatgttagataaatgagtttgtcagaaaatatcagtatacgctgtttaccaatgttatttatttacattcttctaaagccattatggatattgtattatgagagctaaacctaaataagttatcctgttccctaggaccttctctgtaaatagtgaattttagacgagtagtctgtcctaaatcttaaatagaaaaaaaactaaagcgatttgcttaagccattgtacattataaagagctgttttgttttgctttgctttgctttgttttgtttttttaaagctgcattcagagccacaaaggaataggaaagtagggtagtgttggattctggttttatgtaactctaaaataaatgtatctctttaatatctcagttgtagggattttgtcaataccaaagcagactgagttgtggttttgtaaataaagttttttctaaaaatga

SEQ ID NO: 338746 - DNA, 330 bp, Artificial Sequence
  derived and/or modified sequence
atgagcaccaacatctgcagcttcaaggacagcgctgtggacttcaccggccgctgctacttcaccaagatctgcaagtgcaagctgaaggacatcgcctgcctgaagtgtggcaacatcgtgggctaccacgtgattgtgccctgcagcagctgcctgcccagctgcaacaacggccacttctggatgttccacagccaggccgtgtatgacatcaaccggctggacagcactggagtgaacatcctgctgtggggcaacctgcctgagattgaggagagcacagatgaagatgtgctgaacatctctgctgaggagtgcatcagatag

SEQ ID NO: 338747 - DNA, 330 bp, Artificial Sequence
  derived and/or modified sequence
atgagcaccaacatctgcagcttcaaggacagcgccgtggacttcaccggacggtgttactttaccaagatttgcaagtgtaaattaaaagacatcgcctgtctgaagtgtgggaatatcgtcggataccacgttattgttccatgttcatcctgcctgccatcatgcaataacggacacttttggatgttccatagccaggctgtgtatgacatcaacagactggattccaccggtgtgaatatcttactgtggggtaatttgcccgaaatcgaggaatcaaccgatgaggatgttctgaacatctccgcagaagaatgcatccgatag

SEQ ID NO: 338748 - DNA, 330 bp, Artificial Sequence
  derived and/or modified sequence
atgtccactaatatttgctcattcaaggattccgcagtcgacttcaccggcaggtgttattttactaagatctgtaagtgcaagctgaaggacattgcttgtctgaaatgcggaaacattgtcggctaccacgtcatcgtgccatgttcttcatgcctcccttcatgtaataacggccacttctggatgttccactcgcaagctgtatatgatataaatagactcgattctaccggggtcaatattctgctgtggggcaacctccccgagattgaagaaagtactgatgaggacgtccttaatatctcggcagaggagtgcatcagatag

SEQ ID NO: 338749 - protein, 319 aa, Artificial Sequence [sequence omitted]

SEQ ID NO: 338750 - protein, 224 aa, Artificial Sequence
  derived and/or modified sequence
MEMKQAIELVESGGMGKIPSAVSTVSMQNIHPKSLPSERILPALSKDKEEEIRKILRNNLQKTRQRLRSYNRHTLVADPYEEAWNQMLLRRQKARQLEQKINNYLTVPAHKLDSPTMSRARIGSDPLAYEPKEDLPVITIDPASPQSPESVDLVNEELKGKVLGLSRDPAKVAEEDEDDDGGIMMRSKETSSPGTDDVFTPAPSDSPSSQRIQRCLSDPGPHPE

SEQ ID NO: 338751 - protein, 476 aa, Artificial Sequence
  derived and/or modified sequence
MAYLSAELFHLSGIMALIASGVVMRPYVEANISHKSHTTIKYFLKMWSSVSETLIFIFLGVSTVAGSHHWNWTFVISTLLFCLIARVLGVLGLTWFINKFRIVKLTPKDQFIIAYGGLRGAIAFSLGYLLDKKHFPMCDLFLTAIITVIFFTVFVQGMTIRPLVDLLAVKKKQETKRSINEEIHTQFLDHLLTGIEDICGHYGHHHWKDKLNRFNKKYVKKCLIAGERSKEPQLIAFYHKMEMKQAIELVESGGMGKIPSAVSTVSMQNIHPKSLPSERILPALSKDKEEEIRKILRNNLQKTRQRLRSYNRHTLVADPYEEAWNQMLLRRQKARQLEQKINNYLTVPAHKLDSPTMSRARIGSDPLAYEPKEDLPVITIDPASPQSPESVDLVNEELKGKVLGLSRDPAKVAEEDEDDDGGIMMRSKETSSPGTDDVFTPAPSDSPSSQRIQRCLSDPGPHPEPGEGEPFFPKGQ

SEQ ID NO: 338752 - DNA, 960 bp, Artificial Sequence
  derived and/or modified sequence
atgaccatcagacccctggtggacctgctggccgtgaagaagaagcaggagaccaagagaagcatcaacgaggagatccacacccagttcctggaccacctgctgaccggcatcgaggacatctgcggccactacggccaccaccactggaaggacaagctgaacagattcaacaagaagtacgtgaagaagtgcctgatcgccggcgagagaagcaaggagccccagctgatcgccttctaccacaagatggagatgaagcaggccatcgagctggtggagagcggcggcatgggcaagatccccagcgccgtgagcaccgtgagcatgcagaacatccaccccaagagcctgcccagcgagagaatcctgcccgccctgagcaaggacaaggaggaggagatcagaaagatcctgagaaacaacctgcagaagaccagacagagactgagaagctacaacagacacaccctggtggccgacccctacgaggaggcctggaaccagatgctgctgagaagacagaaggccagacagctggagcagaagatcaacaactacctgaccgtgcccgcccacaagctggacagccccaccatgagcagagccagaatcggcagcgaccccctggcctacgagcccaaggaggacctgcccgtgatcaccatcgaccccgccagcccccagagccccgagagcgtggacctggtgaacgaggagctgaagggcaaggtgctgggcctgagcagagaccccgccaaggtggccgaggaggacgaggacgacgacggcggcatcatgatgagaagcaaggagaccagcagccccggcaccgacgacgtgttcacccccgcccccagcgacagccccagcagccagagaatccagagatgcctgagcgaccccggcccccaccccgagcccggcgagggcgagcccttcttccccaagggccagtag

SEQ ID NO: 338753 - DNA, 675 bp, Artificial Sequence
  derived and/or modified sequence
atggagatgaagcaggccatcgagctggtggagagcggcggcatgggcaagatccccagcgccgtgagcaccgtgagcatgcagaacatccaccccaagagcctgcccagcgagagaatcctgcccgccctgagcaaggacaaggaggaggagatcagaaagatcctgagaaacaacctgcagaagaccagacagagactgagaagctacaacagacacaccctggtggccgacccctacgaggaggcctggaaccagatgctgctgagaagacagaaggccagacagctggagcagaagatcaacaactacctgaccgtgcccgcccacaagctggacagccccaccatgagcagagccagaatcggcagcgaccccctggcctacgagcccaaggaggacctgcccgtgatcaccatcgaccccgccagcccccagagccccgagagcgtggacctggtgaacgaggagctgaagggcaaggtgctgggcctgagcagagaccccgccaaggtggccgaggaggacgaggacgacgacggcggcatcatgatgagaagcaaggagaccagcagccccggcaccgacgacgtgttcacccccgcccccagcgacagccccagcagccagagaatccagagatgcctgagcgaccccggcccccaccccgagtag

SEQ ID NO: 338754 - DNA, 960 bp, Artificial Sequence
  derived and/or modified sequence
atgaccatccgccccctcgtcgatctgttggcggtgaaaaagaaacaagagacaaagaggtcaatcaacgaagagatccacacccaattcttggatcacttattaacaggcattgaagatatatgtggacactacgggcaccaccactggaaagacaaactgaatagattcaataaaaagtacgtaaagaaatgtctcattgcaggcgaacgttctaaggaaccacagcttatcgccttttatcacaaaatggaaatgaaacaggcaatcgagcttgtggaatcaggaggcatggggaagattcccagcgccgtaagcactgtgtctatgcagaatatacaccctaagtcactgccctccgagagaatacttccggctcttagtaaggacaaagaggaggagatcagaaagatcctaaggaataacctgcagaaaaccaggcagcgccttaggagctacaaccgtcacaccttagtggccgatccctacgaagaggcttggaaccaaatgcttcttcgcaggcagaaagcccggcagctggaacagaagatcaataattacttgactgttcccgcccacaagttagactctcccacaatgagtcgcgcccgcattggcagtgaccctcttgcatacgaaccgaaagaagacttgcccgtcattacaatcgaccccgcctcacctcaaagcccagagtctgtggacctggtcaatgaggaactgaaagggaaggttctaggcctgtctagagatcccgccaaggtagccgaggaggatgaggacgatgatggcggtatcatgatgcgcagcaaagagacctcctctcccggaactgatgacgtgtttaccccagcccctagtgactcccctagctcccaacgcatccagcgctgcctcagtgaccctggcccccaccctgagcccggagagggtgagcctttcttccctaaaggccagtag

SEQ ID NO: 338755 - DNA, 675 bp, Artificial Sequence
  derived and/or modified sequence
atggagatgaagcaggcaatcgaactagtggagagtggagggatgggaaaaattcccagcgcagtatctactgttagtatgcaaaacatacatccaaagtctctgccctccgagaggatacttcccgcgctttccaaggacaaggaagaggagataagaaagattttacgaaataaccttcaaaagacgaggcagcggctgagatcttacaatcgccacacactggtagccgatccttacgaagaagcctggaaccagatgcttcttaggcgccagaaggcacggcagctggagcagaagattaacaattacctgactgtgccggctcataagttggactcccccaccatgtctagggccaggattgggtctgacccacttgcctatgagcccaaggaggacctgccagtgatcaccattgacccagcctcaccacagtcaccggaatccgtggatctcgtgaatgaggagctcaagggtaaagtgcttgggctatcccgcgacccagctaaggtggctgaagaggacgaagatgatgatggaggcattatgatgaggtccaaggagaccagcagtccaggtactgatgatgtgttcacacccgctccttccgactcaccgtctagccagcggattcagcgttgcctgagcgaccctggtccacaccccgaatag

SEQ ID NO: 338756 - DNA, 960 bp, Artificial Sequence
  derived and/or modified sequence
atgaccatccggcccctggtggacctgctggccgtgaagaagaagcaggagaccaagaggagcatcaatgaggagatccacacccagttcctggaccacctgctgaccggcatcgaggacatctgtggccactacggccaccaccactggaaggacaagctgaaccgcttcaacaagaagtatgtgaagaagtgcctgattgctggggagaggagcaaggagccccagctgattgccttctaccacaagatggagatgaagcaggccatcgagctggtggagagcggcggcatgggcaagatccccagcgctgtgtccacagtgtccatgcagaacatccaccccaagagcctgcccagcgagcgcatcctgcctgccctgagcaaggacaaggaggaggagatcaggaagatcctgaggaacaacctgcagaagacccggcagaggctgcggagctacaacagacacaccctggtggccgacccctatgaggaggcctggaaccagatgctgctgcggcggcagaaggcccggcagctggagcagaagatcaacaactacctgactgtgcctgcccacaagctggacagccccaccatgagccgggccagaattggaagtgaccccctggcctatgagcccaaggaggacctgcctgtgatcaccattgatcctgccagcccccagagccctgagagcgtggacctggtgaatgaggagctgaagggcaaggtgctgggcctgagccgggaccctgccaaggtggccgaggaggatgaagatgatgatggcggcatcatgatgaggagcaaggagaccagcagccctggaacagatgatgtgttcaccccagcccccagcgacagccccagcagccagaggatccagcgctgcctgagtgaccccggcccccaccctgagcccggggagggggagcccttcttccccaagggccagtag

SEQ ID NO: 338757 - DNA, 675 bp, Artificial Sequence
  derived and/or modified sequence
atggagatgaagcaggccatcgagctggtggagagcggcggcatgggcaagatccccagcgctgtgtccacagtgtccatgcagaacatccaccccaagagcctgcccagcgagcgcatcctgcctgccctgagcaaggacaaggaggaggagatcaggaagatcctgaggaacaacctgcagaagacccggcagaggctgcggagctacaacagacacaccctggtggccgacccctatgaggaggcctggaaccagatgctgctgcggcggcagaaggcccggcagctggagcagaagatcaacaactacctgactgtgcctgcccacaagctggacagccccaccatgagccgggcccgcatcggcagtgaccccctggcctatgagcccaaggaggacctgcccgtcatcaccatcgaccctgccagcccccagagccctgagagcgtggacctggtgaatgaggagctgaagggcaaggtgctgggcctgagccgggaccctgccaaggtggccgaggaggatgaagatgatgatggcggcatcatgatgaggagcaaggagaccagcagccctggaacagatgatgtgttcaccccagcccccagcgacagccccagcagccagaggatccagcgctgcctgagtgaccccggcccccaccctgagtag

SEQ ID NO: 338758 - DNA, 960 bp, Artificial Sequence
  derived and/or modified sequence
atgaccatccggcccctggtggacctgctggccgtgaagaagaagcaggaaactaaaagatctataaacgaggagattcacacccaatttttagaccatctcctcacaggcattgaggacatctgtggacactatggccaccatcactggaaagataaattaaaccgttttaataagaagtatgtgaaaaagtgtctgatcgcaggagagcggtctaaggagccgcaactgatcgccttctatcataaaatggagatgaagcaggccattgagctcgtagaatccggcggtatgggcaagattccatcagcagtctccacagtgagcatgcaaaatattcacccgaagtctttgcccagcgagcggatcctcccagctctgagcaaggacaaggaggaagagattcggaaaattcttcggaataacctgcagaagacacgtcagcggctccgcagttataaccgtcacaccctggttgcagacccatacgaggaagcctggaaccagatgctcctgagacggcagaaagcccggcagctggaacagaaaattaacaactacctcactgtccctgctcacaagctggacagccctaccatgagtcgggcccggattggctcagatccgctggcctacgagcccaaggaggatttgcccgtgattacgattgaccccgcttctccacagagtccagaatctgtggacctggttaacgaagagctcaaggggaaggtgcttggactatcgagagatccagctaaagtggctgaagaggatgaggacgacgacggcggaattatgatgagatctaaggagaccagttcacctgggacagacgatgtatttacccctgcaccgagtgatagcccaagttcacagcggattcagagatgcctgtctgacccgggaccacaccctgagccgggcgagggggagccattctttccaaaaggacagtag

SEQ ID NO: 338759 - DNA, 675 bp, Artificial Sequence
  derived and/or modified sequence
atggagatgaagcaggccatcgagctggtggagagcggcggcatgggcaaaattcctagtgctgtgtcgactgtgagcatgcagaacatccatcctaagtctctgccctcagagcgcattttgcccgccctgtccaaggacaaggaagaggagattaggaaaatactccgcaataatctacaaaaaacgcgacaacgacttcgctcctataaccgccatacgcttgttgcagacccatacgaagaggcctggaatcagatgctcctgcggagacaaaaggcccgacaactagaacagaaaatcaacaattatctaaccgtacccgctcataaactcgattcccctactatgtcacgcgccaggatcgggtcagatccgctcgcatacgagcctaaagaagacctccccgtcattactatcgaccccgccagcccccagtctcccgagagcgtggacctggtgaacgaagaattgaaagggaaggtactgggactgagccgcgaccctgccaaagtcgccgaggaggacgaggatgatgacggggggatcatgatgaggtccaaagaaacgtctagccctggcacagatgacgtatttactccggctcccagcgactcgccttctagccagagaatacagcggtgtctgagtgatcctggccctcatccagagtag

SEQ ID NO: 338760 - DNA, 960 bp, Artificial Sequence
  derived and/or modified sequence
atgaccattcggccactagttgacctcctagcagtgaagaaaaaacaggaaacaaagcgatcgataaatgaagagattcatacccagtttttagaccaccttctaaccgggatcgaggacatttgtgggcactatgggcatcaccattggaaggataaactgaaccgctttaataaaaagtacgttaagaagtgtctgattgctggtgaaaggtcgaaagaacctcagctcatcgcgttttaccataagatggaaatgaagcaagccatagagttggtcgagtccgggggaatgggaaagatcccttctgctgttagcaccgtgtctatgcagaacatccatcccaagtccctaccttccgaacggatcctgcccgcattgagtaaagacaaggaagaagagattcggaagattcttcgaaacaatttacaaaagactcggcagcgactccgtagctacaaccgtcataccctagtggctgacccctatgaggaggcctggaatcaaatgctgctaagacgccagaaagcaaggcaactcgaacagaagatcaataattatctcacagtgccggctcacaagcttgacagtcccacgatgtccagggccaggattggctctgacccattagcctacgagcctaaggaggatcttccagttatcaccattgaccccgcatcccctcagtccccagagtcggtcgatttggttaatgaagaactcaaaggtaaggtcctgggacttagtcgcgatcctgctaaagtcgcagaggaggacgaagatgatgacggcggaattatgatgcgatcaaaggaaacctcatctcccggtaccgacgacgtgttcacccccgctccttcagatagtcccagttcacagcggatccagagatgtcttagcgaccctggacctcatccagagcctggcgaaggagagcccttcttccccaagggacaatag

SEQ ID NO: 338761 - DNA, 675 bp, Artificial Sequence
  derived and/or modified sequence
atggaaatgaaacaagcaattgaactggtagagtctggcggtatgggaaaaatcccaagtgctgtaagcactgtctctatgcagaatattcacccaaaatcgcttccttctgaacgcatcttacccgctctgagcaaggataaggaagaggagattcggaaaattttgaggaacaacctccaaaagaccagacagcgcctgagaagttataataggcacactctcgtcgccgacccctacgaagaggcatggaatcagatgttattgcgcagacagaaggctcgccagctcgagcagaaaattaacaactatcttacagtccctgcccacaagctggatagccccacgatgtctagagcacgtatcggctctgaccctcttgcatacgagcccaaggaagacctccctgtcatcactattgacccagctagtcctcagtctcccgagtctgtggacctcgtcaacgaggaacttaaaggcaaagtgttagggttatctcgcgacccagctaaggtcgctgaagaggacgaggatgacgatggcggaattatgatgaggagcaaggagacctccagtccagggaccgatgacgttttcactccagcgcctagtgacagtccctcttcgcaacgcattcaaagatgcctctccgatcctggacctcatcctgagtag

SEQ ID NO: 338762 - DNA, 3165 bp, Artificial Sequence
  derived and/or modified sequence
ttttttaccttgattttgcagttgtatgtgctaatgattttccaagcccattttcattgaaggcaacattggggagggggcctccctccagagccagcctgcctgggtttaaatcatggctttactgcttctctgggatcttagaaagctgcttatcctctctgagcctcagtttctgcatctgttaaatagagacaatggaaggacctccctcttagtgttgcggatattggagagctgattgatgctagaacacttccaagcacgtgtgttggtcacatggcaggtgtgcagttccatctgctgctgctgttattactcggtcctcctcacagtcctggtggggaggcagtgcagaggtagttttccctgtgtgtggggcctgacttccatggggttgcagagcaagtctgtggtgcagtccacatctgaacccaggctgtctgctgcctggcccaggccagatgaccagtgtgggggtcatttggcagtgaaacctctgaccgtgtctccaggaagaagcaggccttaaggacctgtctttagataagtgctgggaggtgggagagttctcacacccttgggtcctgggagagagcagagcagagagggcatcctagccttgggggcctggggtgagggagggaggctctgtggcctccctgcctgggtagcagaactggagtgcctgacacctgcctgccccccagggcatgaccattcggcccctggtagacctgttggctgtgaagaaaaagcaagagacgaagcgctccatcaacgaagagatccacacacagttcctggaccaccttctgacaggcatcgaagacatctgtggccactacggtcaccaccactggaaggacaagctcaaccggtttaataagaaatatgtgaagaagtgtctgatagctggcgagcgctccaaggagccccagctcattgccttctaccacaagatggagatgaagcaggccatcgagctggtggagagcgggggcatgggcaagatcccctctgccgtctccaccgtctccatgcagaacatccaccccaagtccctgccttccgagcgcatcctgccagcactgtccaaggacaaggaggaggagatccgcaaaatcctgaggaacaacttgcagaagaccaggcagcggctgcggtcctacaacagacacacgctggtggcagacccctacgaggaagcctggaaccagatgctgctccggaggcagaaggcccggcagctggagcagaagatcaacaactacctgacggtgccagcccacaagctggactcacccaccatgtctcgggcccgcatcggctcagacccactggcctatgagccgaaggaggacctgcctgtcatcaccatcgacccggcttccccgcagtcacccgagtctgtggacctggtgaatgaagagctgaagggcaaagtcttagggttgagccgggatcctgcaaaggtggctgaggaggacgaggacgacgatgggggcatcatgatgcggagcaaggagacttcgtccccaggaaccgacgatgtcttcacccccgcgcccagtgacagccccagctcccagaggatacagcgctgcctcagtgacccaggcccacaccctgagcctggggagggagaaccgttcttccccaaggggcagtaacaccagggccagcaggcagcgcctgtcccctcacagactcttccaccagagcaggggctgctgggggctccccttgcccttcctgacccggattggccctgcccctccccctaccgcatggcagctgggcccacagcccccaccccagcacagctcctcccctgccgcctcccgggaagcatcctccccaccagagctgcctccccaatccatttggcagaactgctggggctggtgaggccggccctgcccctccctagatccaggcttctcccggacctggactagggcctcggaggctcctccctctgcctcatcctcctcctcattcagaccaatcttagtttctaaccaaagagtctctggctcagctgtggtcccacccaggaagggagggagctgaggcctcccttgagtaggccctgctttatcaggggacaaaccaggggtaccaggcacatggctgggggagggactgctgacccaccaaggtctcacactcctcctgccagctctgtcaccctggccaccacccaacctgtccttactcagagctgcgggctgagggcatctctgagtgtctctgcctggagcaggggtggtttctacggtgacagtgacgtgactcagagcttttcgaactgtgctcccacggggaccactgggcccctcaggggaagctgctaggggaaggactggccgtggctccagaatgtgctgcctttttaagttttgtttgttcacactcctatatatgattgtttgcacagagggcgctcctgtttttaaaacattttgaaaacccctggctgaacagtgctctgcctctaactccctcctcacactccagaattacccttcctcatctgtgcctgtctgtccaacccctcccccacgtctctctgcctgctgggctcttaactgttgctcgaagactgtgacatcagaagtaactcccactcctaatcaagagtctctccagcctcacagatgctggcctcttggcacctgcctagctcttgggcctgacctccagtcctgctggcctgctcttacttcccccaccctgggtttggcccctggaacctttcccttgtgtgtaccacaccctgcctgctgtggagcccattgtggaggcggtgggggggagaaggcctcccctgaggatcccctgtcccctggggctggtggattgggcagaatcctgggcccccagagacctttgcccacacacactccttccccttgtccctggggcactcccccaggattgtgcaatagtcagagtgtccctttttgcaggggactgggccatgggtcctcggcccatctgtccatcctcctctccatgcaagtgctgtttgggcaggagtcaccatgcaagggtgacatcgacaaccacgtaccaagccaccgcagctgctgccactctgctgcctgtacagaagaaactgaatctttttcatattctaataaatcaatgtgagttttt

SEQ ID NO: 338763 - DNA, 887 bp, Artificial Sequence
  derived and/or modified sequence
gtagggaaggcgccccacagcgaggcttgacttggccctgggcccctttcagttcctggaccaccttctgacaggcatcgaagacatctgtggccactacggtcaccaccactggaaggacaagctcaaccggtttaataagaaatatgtgaagaagtgtctgatagctggcgagcgctccaaggagccccagctcattgccttctaccacaagatggagatgaagcaggccatcgagctggtggagagcgggggcatgggcaagatcccctctgccgtctccaccgtctccatgcagaacatccaccccaagtccctgccttccgagcgcatcctgccagcactgtccaaggacaaggaggaggagatccgcaaaatcctgaggaacaacttgcagaagaccaggcagcggctgcggtcctacaacagacacacgctggtggcagacccctacgaggaagcctggaaccagatgctgctccggaggcagaaggcccggcagctggagcagaagatcaacaactacctgacggtgccagcccacaagctggactcacccaccatgtctcgggcccgcatcggctcagacccactggcctatgagccgaaggaggacctgcctgtcatcaccatcgacccggcttccccgcagtcacccgagtctgtggacctggtgaatgaagagctgaagggcaaagtcttagggttgagccgggatcctgcaaaggtggctgaggaggacgaggacgacgatgggggcatcatgatgcggagcaaggagacttcgtccccaggaaccgacgatgtcttcacccccgcgcccagtgacagccccagctcccagaggatacagcgctgcctcagtgacccaggcccacaccctgagc

SEQ ID NO: 338764 - protein, 349 aa, Artificial Sequence
  derived and/or modified sequence
MTALPGPLWLLGLALCALGGGGPGLRPPPGCPQRRLGARERRDVQREILAVLGLPGRPRPRAPPAASRLPASAPLFMLDLYHAMAGDDDEDGAPAERRLGRADLVMSFVNMVERDRALGHQEPHWKEFRFDLTQIPAGEAVTAAEFRIYKVPSIHLLNRTLHVSMFQVVQEQSNRESDLFFLDLQTLRAGDEGWLVLDVTAASDCWLLKRHKDLGLRLYVETEDGETWTGWGWTKDSRLQMWKLRLSRTPWVLSLHAPGPAQAPAERPLLCLLQGHCPASPSPIRTPRAVRPLRRRQPKKSNELPQANRLPGIFDDVHGSHGRQVCRRHELYVSFQDLGWLVIADSSCF

SEQ ID NO: 338765 - DNA, 1548 bp, Artificial Sequence
  derived and/or modified sequence
cgcaccaagcgggtggctgcaggagctcgcccatcgcccctgcgctgctcggaccgcggccacagccggactggcgggtacggcggcgacagacggattggccgagagtcccagtccgcagagtagccccggcctcgaggcggtggcgtccgcgtcctctcgtccaggagccaggacaggtgtcgcgcggcgggcgctccagggaccgcgctgaggccgcggtcgccgcccgtcccgccccgccccgccgcccgccgcccgccgagcccagcctccttgccgtcggggcgtccccaggccctgggtcggccgcggagccgatgcgcgcccgctgagcgccccagctgagcgcccccggcctgccatgaccgcgctccccggcccgctctggctcctgggcctggcgctatgcgcgctgggcgggggcggccccggcctgcgacccccgcccggctgtccccagcgacgtctgggcgcgcgcgagcgccgggacgtgcagcgcgagatcctggcggtgctcgggctgcctgggcggccccggccccgcgcgccacccgccgcctcccggctgcccgcgtccgcgccgctcttcatgctggacctgtaccacgccatggccggcgacgacgacgaggacggcgcgcccgcggagcggcgcctgggccgcgccgacctggtcatgagcttcgttaacatggtggagcgagaccgtgccctgggccaccaggagccccattggaaggagttccgctttgacctgacccagatcccggctggggaggcggtcacagctgcggagttccggatttacaaggtgcccagcatccacctgctcaacaggaccctccacgtcagcatgttccaggtggtccaggagcagtccaacagggagtctgacttgttctttttggatcttcagacgctccgagctggagacgagggctggctggtgctggatgtcacagcagccagtgactgctggttgctgaagcgtcacaaggacctgggactccgcctctatgtggagactgaggacggagagacgtggactggctggggctggaccaaggactccaggcttcagatgtggaaactgaggctcagcaggaccccttgggtcctcagcctccacgctcctggacctgcccaggccccggcagagagaccgctgctgtgtctgctgcagggccactgcccggccagtccgagtcccatccgcacccctcgggcagtgaggccactgaggaggaggcagccgaagaaaagcaacgagctgccgcaggccaaccgactcccagggatctttgatgacgtccacggctcccacggccggcaggtctgccgtcggcacgagctctacgtcagcttccaggacctcggctggctggtaattgctgactcttcttgtttctgaaatgacaatcaccacctgtagatcagaagtgaatctgcagggaggacatagaatcatggtgacttcaattttcttatgtatttttttcttctgtgttttccaagttttctaaagtgagaatatggtgagaaagg

SEQ ID NO: 338766 - DNA, 1050 bp, Artificial Sequence
  derived and/or modified sequence
atgaccgctttaccgggtccactttggctgctgggtctggccctctgcgccctgggtggtggtggacccggactccggccaccgcctggctgtcctcagcgtcgcctgggggcaagggaaagaagagatgttcaacgtgaaatactggctgttctgggactaccgggaagacctcggccaagggcgcctcctgcagctagtcgcctgccagcttccgcaccacttttcatgcttgacttgtaccatgcaatggccggtgatgatgatgaggatggtgcaccagctgagagacggttgggacgggctgaccttgtgatgagttttgtcaatatggtcgagcgtgaccgcgctctgggacatcaggagccacactggaaagagttccgttttgatctgacacagatccctgccggagaagccgtgactgcggcagagttccggatctacaaggtgcccagcattcacctacttaatcgcaccctgcacgtgtcaatgtttcaggtcgtgcaggagcagtcaaatagagagtccgacttgttcttcttggatctacagacgctgagggcaggtgacgagggatggcttgtgctggacgtcaccgcagccagcgactgctggctgctgaaaaggcacaaggatctgggcctccggctgtacgtggaaaccgaagacggagagacttggactggatggggttggactaaggattcccgcctacagatgtggaagctgcggttgtctaggactccctgggtgctgagcttgcatgctcctggcccagcccaagcgccagccgaacggcctctgctgtgtctgttgcagggacattgtccagcatccccaagcccaatccgcacccccagggccgtgaggcctctccgcagacggcagcccaagaagtccaacgaactgccccaggcaaataggctcccaggaatcttcgacgacgtccatggctcccacgggaggcaggtgtgccgtcggcacgagctgtacgtgagctttcaagacctggggtggctcgttattgctgatagtagctgtttctag

SEQ ID NO: 338767 - DNA, 1050 bp, Artificial Sequence
  derived and/or modified sequence
atgacggccttacccggccccctgtggctacttggccttgctctgtgtgctttgggtggcggtggaccgggcctccgccccccaccagggtgcccacaaaggcgactgggcgccagagaacgacgagatgtacaacgcgaaatcctggccgtgttaggtctacctggtagaccccgccctagagcgccaccagctgctagcaggctgccggcctccgcccctttatttatgctcgacttgtatcacgcaatggcaggtgacgacgacgaggatggcgcaccagctgagaggcgccttggtcgggcagacctcgtaatgagtttcgtaaatatggtggagcgcgatagagcccttggacatcaggagccccattggaaggagttccgctttgacctcacccagatccccgctggagaagccgtgaccgctgctgagttcagaatctacaaagtcccatcaatacacctcctaaacaggactctgcacgtgagcatgttccaagtggtgcaagaacaatctaatcgggagtctgacctgtttttccttgacctgcagaccctgcgggccggcgatgaggggtggctggtcttagatgtaaccgcagccagcgactgttggctactgaagagacataaggacctgggcctaagactgtacgtagagacggaggacggagaaacatggactgggtgggggtggacaaaagattcccgactgcagatgtggaagttgaggctcagcaggactccctgggtgctctctctccacgcgcctggccctgcccaagcccccgccgagcggcctttgttgtgcctgttgcaaggtcattgtcctgcatctcctagccctatcaggactcctcgggccgtacggccattaagaaggcgacagccgaaaaagtccaatgaactgcctcaagctaaccgactgccaggcatttttgacgacgtgcatggttcccatgggaggcaggtttgcaggagacacgagctgtatgtgtcctttcaggatctggggtggttggttatagccgactctagctgtttctag

SEQ ID NO: 338768 - DNA, 1050 bp, Artificial Sequence
  derived and/or modified sequence
atgacggccttacccggccccctgtggctacttggccttgctctgtgtgctttgggtggcggtggaccgggcctccgccccccaccagggtgcccacaaaggcgactgggcgccagagaacgacgagatgtacaacgcgaaatcctggccgtgttaggtctacctggtagaccccgccctagagcgccaccagctgctagcaggctgccggcctccgcccctttatttatgctcgacttgtatcacgcaatggcaggtgacgacgacgaggatggcgcaccagctgagaggcgccttggtagagccgacttagttatgagtttcgttaatatggttgaacgagatagggctctgggtcatcaggagcctcattggaaagaatttagattcgaccttactcagatccctgccggggaggcagtgaccgcagccgaatttagaatttacaaggtaccatctatccatctcttaaatagaacactgcacgtaagcatgtttcaagtcgttcaggagcagagcaatcgcgagtctgatctcttctttctggatttacagacactgcgggctggagacgagggatggctcgtcctggacgtaacggcagcaagcgactgctggctcctgaaaagacataaagatctcggattgcggttgtacgtcgaaacagaagacggggaaacttggaccggctgggggtggacaaaagattctagactccaaatgtggaagctccgtctgtctagaaccccatgggtcctcagtctgcatgctcccggccccgcacaggcccccgctgagcgccctctgctgtgtctcctccagggccactgcccagcttctccttcccccatcagaactcctagggccgtgagacctcttagaagaagacagcccaaaaagtcgaatgaactgcctcaagccaatagactccccgggatttttgacgatgtccatggttcacacggccgccaggtctgtagacgtcacgaattatatgtcagttttcaggacctcggctggttggttattgctgactcctcatgcttctag

SEQ ID NO: 338769 - DNA, 1050 bp, Artificial Sequence
  derived and/or modified sequence
atgaccgccctgcccggccccctgtggctgctgggcctggccctgtgcgccctgggcggcggcggccccggcctgagacccccccccggctgcccccagagaagactgggcgccagagagagaagagacgtgcagagagagatcctggccgtgctgggcctgcccggcagacccagacccagagccccccccgccgccagcagactgcccgccagcgcccccctgttcatgctggacctgtaccacgccatggccggcgacgacgacgaggacggcgcccccgccgagagaagactgggcagagccgacctggtgatgagcttcgtgaacatggtggagagagacagagccctgggccaccaggagccccactggaaggagttcagattcgacctgacccagatccccgccggcgaggccgtgaccgccgccgagttcagaatctacaaggtgcccagcatccacctgctgaacagaaccctgcacgtgagcatgttccaggtggtgcaggagcagagcaacagagagagcgacctgttcttcctggacctgcagaccctgagagccggcgacgagggctggctggtgctggacgtgaccgccgccagcgactgctggctgctgaagagacacaaggacctgggcctgagactgtacgtggagaccgaggacggcgagacctggaccggctggggctggaccaaggacagcagactgcagatgtggaagctgagactgagcagaaccccctgggtgctgagcctgcacgcccccggccccgcccaggcccccgccgagagacccctgctgtgcctgctgcagggccactgccccgccagccccagccccatcagaacccccagagccgtgagacccctgagaagaagacagcccaagaagagcaacgagctgccccaggccaacagactgcccggcatcttcgacgacgtgcacggcagccacggcagacaggtgtgcagaagacacgagctgtacgtgagcttccaggacctgggctggctggtgatcgccgacagcagctgcttctag

SEQ ID NO: 338770 - DNA, 1050 bp, Artificial Sequence
  derived and/or modified sequence
atgaccgctttaccaggccctctttggctgctgggtcttgctctgtgtgccctaggcggcggggggccgggactgaggcccccccctgggtgtccccaacgtcgattaggggccagggaacggagagatgttcagcgggaaatactggccgttctgggattgcctggcaggccgcgtcctagggcgcctcccgctgcctctaggctcccagcctccgcccccctgtttatgctcgatctgtaccatgctatggccggcgatgatgacgaagacggggccccggccgaacgcaggctgggcagagcagatttggttatgtccttcgtgaacatggtggagagagatagggcacttgggcatcaggaacctcattggaaggagtttcgctttgacttgacccagatccctgccggcgaagcggttaccgctgctgagttcaggatatacaaagttccatcgattcatttgttgaataggactttgcacgtgagcatgttccaggtagtacaagagcaatcaaaccgggagagcgatctcttttttctggacctccagactctaagggcaggcgatgaaggttggttggtgctggacgttacagcagctagcgactgttggctgctcaaaagacacaaggaccttggactgcgactttacgttgagactgaagatggagagacatggaccgggtggggatggacaaaggacagccgtctgcaaatgtggaagttacgcctctctcggaccccatgggttttgtccttgcatgccccagggccagcccaggctcctgctgaacgtccactgctgtgcctgttacaggggcactgtcctgccagcccttcacccataaggaccccaagagcggtcagaccactgcgtaggaggcagcccaagaaaagcaacgagctgcctcaggccaaccggctgccaggaattttcgatgacgtccatggaagccatggccgccaggtttgcaggcgccacgaactgtacgtgtccttccaagatctgggatggctggtaatcgcagatagctcctgtttttag

SEQ ID NO: 338771 - DNA, 1050 bp, Artificial Sequence
  derived and/or modified sequence
atgacagccctgcccggccccctgtggctgctgggcctggccctgtgtgccctgggcggcggcggccctggcctgcggcccccacctggctgcccccagaggcggctgggcgcccgggagaggagagatgtgcagcgggagatcctggccgtgctgggcctgcccggccggccccggccccgggcccctcctgctgccagccggctgcctgccagcgcccccctcttcatgctggacctgtaccacgccatggctggagatgatgatgaagatggagccccagctgagcggcggctgggccgggctgacctggtgatgagctttgtgaacatggtggagcgggaccgggccctgggccaccaggagccccactggaaggagttccgctttgacctgacccagatcccagctggggaggccgtgacagctgctgagttccgcatctacaaggtgcccagcatccacctgctgaacagaaccctgcacgtgtccatgttccaggtggtgcaggagcagagcaaccgggagagtgacctcttcttcctggacctgcagaccctgcgggctggagatgagggctggctggtgctggatgtgacagctgccagtgactgctggctgctgaagaggcacaaggacctgggcctgcggctgtatgtggagacagaagatggagagacctggacaggctggggctggaccaaggacagccggctgcagatgtggaagctgcggctgagcaggaccccctgggtgctgagcctgcacgcccctggccctgcccaggccccagctgagcggcccctgctgtgcctgctgcagggccactgcccagccagccccagccccatccgcacccccagggctgtgcggcccctgcggcggcggcagcccaagaagagcaatgagctgccccaggccaaccggctgcccggcatctttgatgatgtgcacggcagccacggccggcaggtgtgcagaagacatgagctgtatgtgtccttccaggacctgggctggctggtgattgctgacagcagctgcttctag

SEQ ID NO: 338772 - DNA, 1050 bp, Artificial Sequence
  derived and/or modified sequence
atgaccgccctgcccggccccctgtggctgctgggcctggccctgtgtgcactgggggggggaggccctggcctgcggccaccccccggctgccctcaaaggcggctgggagctcgggaaaggcgcgacgtccagcgggaaattctggccgttctcggcttgccaggcagacctaggccacgggctcccccagcggcgtcccggttgcctgcgagtgcgccattgttcatgctagatctgtaccatgccatggcaggggacgacgatgaggacggcgcacccgctgagaggagactcggcagagcagatctcgtgatgtcattcgtgaacatggtagaaagggaccgggccttgggccatcaggaaccccactggaaagaatttaggttcgacctgacacagatacctgccggagaagccgtgacagccgccgagttcagaatatataaagtgccttcaatacacttactgaaccgcaccttacacgtcagtatgttccaggtggtccaggagcagagtaatcgcgagtcagacctgtttttccttgaccttcagacattgcgggccggcgatgaaggctggctggtcttagatgtgacagccgccagcgactgttggcttctgaagagacataaagatctggggctgcgtctctacgtagagaccgaggatggtgagacatggactggctggggttggacaaaggattcaagacttcagatgtggaaattaagactgtctcggaccccgtgggtgctctctctgcacgcccctgggccagcacaggcaccagctgagcgcccgcttctgtgcctcttgcagggacattgtccagccagcccatctcccatcaggaccccgcgtgctgtcaggcctctccggcgacgtcagccgaaaaaaagtaatgagctgccccaagccaatagactacccggaatcttcgatgacgtccatggtagtcatggacgccaggtgtgcaggaggcacgagctttacgttagcttccaagatctgggttggctggtcatcgctgacagcagttgcttctag

SEQ ID NO: 338773 - RNA, 1050 nt, Artificial Sequence
  derived and/or modified sequence
augacggccuuacccggcccccuguggcuacuuggccuugcucugugugcuuuggguggcgguggaccgggccuccgccccccaccagggugcccacaaaggcgacugggcgccagagaacgacgagauguacaacgcgaaauccuggccguguuaggucuaccugguagaccccgcccuagagcgccaccagcugcuagcaggcugccggccuccgccccuuuauuuaugcucgacuuguaucacgcaauggcaggugacgacgacgaggauggcgcaccagcugagaggcgccuuggucgggcagaccucguaaugaguuucguaaauaugguggagcgcgauagagcccuuggacaucaggagccccauuggaaggaguuccgcuuugaccucacccagauccccgcuggagaagccgugaccgcugcugaguucagaaucuacaaagucccaucaauacaccuccuaaacaggacucugcacgugagcauguuccaaguggugcaagaacaaucuaaucgggagucugaccuguuuuuccuugaccugcagacccugcgggccggcgaugagggguggcuggucuuagauguaaccgcagccagcgacuguuggcuacugaagagacauaaggaccugggccuaagacuguacguagagacggaggacggagaaacauggacuggguggggguggacaaaagauucccgacugcagauguggaaguugaggcucagcaggacucccugggugcucucucuccacgcgccuggcccugcccaagcccccgccgagcggccuuuguugugccuguugcaaggucauuguccugcaucuccuagcccuaucaggacuccucgggccguacggccauuaagaaggcgacagccgaaaaaguccaaugaacugccucaagcuaaccgacugccaggcauuuuugacgacgugcaugguucccaugggaggcagguuugcaggagacacgagcuguauguguccuuucaggaucuggggugguugguuauagccgacucuagcuguuucuag

SEQ ID NO: 338774 - RNA, 1050 nt, Artificial Sequence
  derived and/or modified sequence
augacggccuuacccggcccccuguggcuacuuggccuugcucugugugcuuuggguggcgguggaccgggccuccgccccccaccagggugcccacaaaggcgacugggcgccagagaacgacgagauguacaacgcgaaauccuggccguguuaggucuaccugguagaccccgcccuagagcgccaccagcugcuagcaggcugccggccuccgccccuuuauuuaugcucgacuuguaucacgcaauggcaggugacgacgacgaggauggcgcaccagcugagaggcgccuugguagagccgacuuaguuaugaguuucguuaauaugguugaacgagauagggcucugggucaucaggagccucauuggaaagaauuuagauucgaccuuacucagaucccugccggggaggcagugaccgcagccgaauuuagaauuuacaagguaccaucuauccaucucuuaaauagaacacugcacguaagcauguuucaagucguucaggagcagagcaaucgcgagucugaucucuucuuucuggauuuacagacacugcgggcuggagacgagggauggcucguccuggacguaacggcagcaagcgacugcuggcuccugaaaagacauaaagaucucggauugcgguuguacgucgaaacagaagacggggaaacuuggaccggcuggggguggacaaaagauucuagacuccaaauguggaagcuccgucugucuagaaccccauggguccucagucugcaugcucccggccccgcacaggcccccgcugagcgcccucugcugugucuccuccagggccacugcccagcuucuccuucccccaucagaacuccuagggccgugagaccucuuagaagaagacagcccaaaaagucgaaugaacugccucaagccaauagacuccccgggauuuuugacgauguccaugguucacacggccgccaggucuguagacgucacgaauuauaugucaguuuucaggaccucggcugguugguuauugcugacuccucaugcuucuag

SEQ ID NO: 338775 - protein, 500 aa, Artificial Sequence
  derived and/or modified sequence
MPPAVGGPVGYTPPDGGWGWAVVIGAFISIGFSYAFPKSITVFFKEIEGIFHATTSEVSWISSIMLAVMYGGGPISSILVNKYGSRIVMIVGGCLSGCGLIAASFCNTVQQLYVCIGVIGGLGLAFNLNPALTMIGKYFYKRRPLANGLAMAGSPVFLCTLAPLNQVFFGIFGWRGSFLILGGLLLNCCVAGALMRPIGPKPTKAGKDKSKASLEKAGKSGVKKDLHDANTDLIGRHPKQEKRSVFQTINQFLDLTLFTHRGFLLYLSGNVIMFFGLFAPLVFLSSYGKSQHYSSEKSAFLLSILAFVDMVARPSMGLVANTKPIRPRIQYFFAASVVANGVCHMLAPLSTTYVGFCVYAGFFGFAFGWLSSVLFETLMDLVGPQRFSSAVGLVTIVECCPVLLGPPLLGRLNDMYGDYKYTYWACGVVLIISGIYLFIGMGINYRLLAKEQKANEQKKESKEEETSIDVAGKPNEVTKAAESPDQKDTDGGPKEEESPV

SEQ ID NO: 338776 - protein, 215 aa, Artificial Sequence
  derived and/or modified sequence
MPPAVGGPVGYTPPDGGWGWAVVIGAFISIGFSYAFPKSITVFFKEIEGIFHATTSEVSWISSIMLAVMYGGGPISSILVNKYGSRIVMIVGGCLSGCGLIAASFCNTVQQLYVCIGVIGGLGLAFNLNPALTMIGKYFYKRRPLANGLAMAGSPVFLCTLAPLNQVFFGIFGWRGSFLILGGLLLNCCVAGALMRPIGPKPTKAGKDKSKASLE

SEQ ID NO: 338777 - protein, 430 aa, Artificial Sequence
  derived and/or modified sequence
MPPAVGGPVGYTPPDGGWGWAVVIGAFISIGFSYAFPKSITVFFKEIEGIFHATTSEVSWISSIMLAVMYGGGPISSILVNKYGSRIVMIVGGCLSGCGLIAASFCNTVQQLYVCIGVIGGLGLAFNLNPALTMIGKYFYKRRPLANGLAMAGSPVFLCTLAPLNQVFFGIFGWRGSFLILGGLLLNCCVAGALMRPIGPKPTKAGKDKSKASLEKAGKSGVKKDLHDANTDLIGRHPKQEKRSVFQTINQFLDLTLFTHRGFLLYLSGNVIMFFGLFAPLVFLSSYGKSQHYSSEKSAFLLSILAFVDMVARPSMGLVANTKPIRPRIQYFFAASVVANGVCHMLAPLSTTYVGFCVYAGFFGFAFGWLSSVLFETLMDLVGPQRFSSAVGLVTIVECCPVLLGPPLLGIVYLPTNVGLLQNKHVRWEC

SEQ ID NO: 338778 - protein, 296 aa, Artificial Sequence
  derived and/or modified sequence
MPPAVGGPVGYTPPDGGWGWAVVIGAFISIGFSYAFPKSITVFFKEIEGIFHATTSEVSWISSIMLAVMYGGGPISSILVNKYGSRIVMIVGGCLSGCGLIAASFCNTVQQLYVCIGVIGGLGLAFNLNPALTMIGKYFYKRRPLANGLAMAGSPVFLCTLAPLNQVFFGIFGWRGSFLILGGLLLNCCVAGALMRPIGPKPTKAGKDKSKASLEKAGKSGVKKDLHDANTDLIGRHPKQEKRSVFQTINQFLDLTLFTHRGFLLYLSGNVIMFFGLFAPLVFLSSYGKSQHYSSE

SEQ ID NO: 338779 - protein, 456 aa, Artificial Sequence
  derived and/or modified sequence
MPPAVGGPVGYTPPDGGWGWAVVIGAFISIGFSYAFPKSITVFFKEIEGIFHATTSEVSWISSIMLAVMYGGGPISSILVNKYGSRIVMIVGGCLSGCGLIAASFCNTVQQLYVCIGVIGGLGLAFNLNPALTMIGKYFYKRRPLANGLAMAGSPVFLCTLAPLNQVFFGIFGWRGSFLILGGLLLNCCVAGALMRPIGPKPTKAGKDKSKASLEKAGKSGVKKDLHDANTDLIGRHPKQEKRSVFQTINQFLDLTLFTHRGFLLYLSGNVIMFFGLFAPLVFLSSYGKSQHYSSEKSAFLLSILAFVDMVARPSMGLVANTKPIRPRIQYFFAASVVANGVCHMLAPLSTTYVGFCVYAGFFGFAFGWLSSVLFETLMDLVGPQRFSSAVGLVTIVECCPVLLGPPLLGRLNDMYGDYKYTYWACGVVLIISGIYLFIGMGINYRLLAKEQKANE

SEQ ID NO: 338780 - DNA, 1503 bp, Artificial Sequence
  derived and/or modified sequence
atgccaccagccgtcggaggacctgttggatacacaccacctgatggaggctggggttgggctgtcgttatcggcgccttcatcagcatcggtttctcttatgccttcccgaagagcattactgtcttcttcaaggagatcgagggaatcttccacgccaccacctctgaggtgtcatggatctcatctattatgcttgccgtaatgtatggggggggacccatctcctcaattctggtgaataagtacggcagtcggatcgtcatgatcgtggggggatgcctttcaggatgtggcctgattgccgccagcttttgcaacacggttcagcagttgtatgtgtgcattggcgtgataggcggcctcggtctggcctttaatttgaacccagccctcactatgatcggaaagtacttttacaagcggaggccccttgctaatggactcgccatggcagggagtcccgtattcctgtgtacgttggctccgttgaaccaggtgttttttggcatttttgggtggcggggctccttcttgatcctgggcggccttctgctgaactgttgtgttgctggagcactcatgcggccaatcgggcccaaacccacaaaagctggaaaggacaaatccaaggccagcttggaaaaagctgggaagagtggcgtcaaaaaagacctacacgacgcgaatactgacctcattggccggcatccaaagcaggagaagcgaagtgtcttccagacaatcaaccagtttcttgacctgactctattcacccatcggggtttcctgctttatctgtcaggtaatgtcatcatgtttttcgggctgttcgcaccattggtgtttctctcaagctacggcaaatctcagcactattcttccgaaaagagcgccttcttactgagcatcctggcgtttgtcgacatggtggcgcgtccaagcatgggactcgtggcgaacaccaaacccattcgtcctaggatacagtactttttcgccgctagtgtggtcgccaatggagtgtgtcacatgttagcgcctctaagcaccacctacgttggcttttgcgtgtacgccggatttttcggatttgcctttggttggttgtcctcggtactctttgaaacactgatggacctggtgggccctcagcgctttagttccgcagttggactggtgaccatcgtcgagtgctgtccagtgctgttaggaccaccattgctcggacgcttaaacgacatgtacggggactacaaatatacctattgggcatgtggagtcgtgctcattatttcaggcatttacctgttcattggtatggggattaactaccgtctgctcgccaaagagcagaaggctaatgaacagaagaaggaatctaaggaagaggagacttctattgatgtggccgggaagccaaacgaagtaacaaaagcagccgagtcacccgatcagaaagacaccgatggaggacccaaggaggaagaatccccggtttag

SEQ ID NO: 338781 - DNA, 648 bp, Artificial Sequence
  derived and/or modified sequence
atgccacccgccgtgggtggtcccgtcggctatacaccccctgatggaggatggggctgggccgtagtcattggggcgttcatatctattggtttttcttacgcctttccaaaatcaataacagtgttcttcaaagagattgagggcatttttcatgctacaacatcagaggttagttggatctccagcataatgttggcagtgatgtatggcgggggacctatatctagtatacttgtcaacaagtatggcagccggatcgtaatgattgtaggcggatgtctctctgggtgcggcctgattgccgcttcattttgtaacacagtgcaacagctctatgtgtgtatcggagtgatcggcggactcggcctggcatttaatctgaaccccgcattgacaatgataggaaagtacttctataagaggaggcccctggctaatggccttgccatggctggttcacccgtgtttctgtgcaccctggctcctctcaatcaggtgttcttcgggatctttggatggagagggagttttcttatcctgggggggctgttgttgaattgctgcgtcgcgggtgcacttatgcgtcccattggtcccaagcccactaaggctgggaaagataaaagtaaggcatccctggagtag

SEQ ID NO: 338782 - DNA, 1293 bp, Artificial Sequence
  derived and/or modified sequence
atgcccccagctgtcggcgggcccgtgggttacaccccaccagatgggggctggggttgggccgtggtgattggtgcctttattagtatcggcttttcctatgcctttccaaaaagcattacggtgttcttcaaggaaatcgaaggcatatttcatgcgactacatcagaagtcagttggatctcctctattatgcttgcagtgatgtacggcgggggcccaatctctagtattctggtgaataagtatggttcgagaattgtgatgatcgtggggggctgtttgtccggctgcggccttatcgcagcttctttttgcaacacagtgcaacagctttacgtatgcatcggggttatcggtgggctaggcttagcatttaacctcaatccagcactaaccatgatcgggaagtacttctataagcgccgccctctggccaatgggctcgctatggcggggtcacctgttttcttgtgcacactggctccattaaatcaggtcttctttggaatctttggctggcgcggatctttcctcattttgggcgggctattgttaaactgttgtgttgcaggcgccttaatgaggccaatcggcccaaagccgactaaggccgggaaagataagtccaaagcctccttagaaaaggccggcaagtcaggagtcaaaaaagatctgcatgacgcaaatactgatctcatcggcagacatcctaagcaggaaaaaagatcagtgtttcagaccattaaccagttcctcgatctcaccctgttcactcatcgtggctttctcctgtacctgtctggtaatgtgattatgttcttcggactattcgcaccattagtgtttctcagcagttacgggaagtcccagcattactccagcgagaagagtgctttcctgctgtccatactggcatttgtggatatggtggcgcgcccctcaatggggctagtcgccaacaccaaacccatccgcccccggatacaatactttttcgctgcgagtgttgtggccaatggcgtttgtcatatgctcgccccactgtccaccacatatgtagggttctgtgtgtacgccggttttttcggtttcgcatttgggtggcttagctccgtcttgttcgagaccctcatggacctcgtcggcccccagcgattttcaagcgccgtcggattagtgactatcgtcgaatgttgccccgttcttctcggccccccgctgttaggaatagtgtatctacccactaacgtgggtctcctacaaaataagcatgtcagatgggagtgttag

SEQ ID NO: 338783 - DNA, 891 bp, Artificial Sequence
  derived and/or modified sequence
atgccacccgccgtgggagggccagtggggtatacacccccagacggcggctggggctgggcggttgttataggagcgttcatcagcataggatttagctacgcgttcccaaagtccattactgtgttcttcaaagaaatcgagggaattttccacgccactacgtctgaggtgtcatggataagttccataatgctcgcagttatgtacggcggtggacccataagtagtattttggtcaataagtacgggtcacggatcgtaatgatcgtgggtggatgcttatccgggtgtggtttgattgcagcgtcattctgcaatacagtacaacagctctacgtgtgcattggagtcatcggcgggctcggtctggcctttaacctcaaccccgcactcacaatgatcggcaagtatttctataagaggaggccactagccaacggccttgccatggccggctctcccgtgttcctttgcacccttgctccgttgaaccaggtgttttttgggatcttcggatggcgtggcagcttcctgatcctcggtgggctgctcctgaactgttgcgtcgccggtgcactgatgcgacccattggtcctaagcctactaaagctggaaaagataagtcaaaggccagcctggaaaaagcgggtaagtctggagtgaaaaaagacctgcacgatgcgaataccgatctcatcgggcgccatccaaagcaggagaagcgctccgtctttcagaccataaatcagttcctggatctcactctgttcacacatcgcgggttcctgctgtatctcagcggcaatgtgatcatgttcttcgggctcttcgctccattagtgttcttgtccagttacgggaagtcacagcactactcaagtgagtag

SEQ ID NO: 338784 - DNA, 1371 bp, Artificial Sequence
  derived and/or modified sequence
atgccccctgctgtcggcgggcccgtggggtacaccccacctgacggaggctggggctgggctgtcgtgatcggcgcatttatctccatcgggttctcatacgcctttcctaagtctattaccgtgttctttaaagagatcgagggtatttttcacgccacaacatcggaagtctcatggatttccagcatcatgctggccgtgatgtacggcggaggccctatttctagcattctggtgaacaagtatggcagccggattgtgatgattgtgggaggttgtttgagcggctgcggcttaatagccgccagcttttgcaacacggtgcaacagttgtatgtttgcatcggagtgatcggcggactaggattggctttcaatctgaatcccgctctaacaatgatcgggaagtacttctacaagcgccggccgcttgccaacgggctggccatggctgggtctcctgtattcctgtgtacattagcacccctaaaccaagtgttctttgggatctttgggtggaggggatcgtttctcatcctgggggggttgctcctgaattgctgcgttgctggcgccctcatgcgccccattggccccaagcctaccaaggccgggaaggataagtccaaggctagtctggaaaaggcagggaaaagcggcgtcaaaaaggatctccacgatgctaacacagacttgataggtcgccacccaaaacaggagaagcgaagtgttttccagactatcaaccagttcttggacttaactctgttcacgcaccgggggtttctgctttatctgagcggaaatgttattatgttcttcggtctgtttgcacccctcgtgttcctgtcctcctacgggaagtcccagcattattcctccgagaaaagcgcctttctcctgagtattcttgcgttcgtagatatggttgcgcgcccctcgatgggcttggttgcaaacacaaagcccattaggccccggattcaatatttttttgccgcaagtgtggtggctaacggagtttgccacatgctcgcacccctctctacgacctacgtcggcttttgcgtatacgccggtttcttcggcttcgcatttggatggcttagcagtgtgctctttgagaccctgatggacctggtcgggcctcagagattctcaagcgccgtggggcttgtgactattgtagaatgctgtcctgtgcttttgggcccccccctcctaggcaggctcaacgacatgtatggggactacaaatatacatattgggcctgcggagttgttcttattatttcagggatctatctgtttatcggtatggggattaactacagattattagcaaaggagcaaaaagcaaatgagtag

SEQ ID NO: 338785 - DNA, 1503 bp, Artificial Sequence
  derived and/or modified sequence
atgccacccgctgtcggaggccccgtcgggtatactcctccagacggtggatggggctgggctgtggttatcggggcgttcatatccatcggcttttcatatgccttccccaaaagcataactgtattttttaaggagatcgagggaattttccacgccaccacttccgaggtgagctggattagctctattatgctggccgtgatgtacgggggaggtcccatcagctctatcctcgtaaacaaatacggttctaggatagtgatgatcgtaggcggatgcctatcaggatgcggcttgattgccgcttcattctgcaataccgttcagcagttgtatgtctgtattggtgtgattggcggcctgggactggccttcaacctgaaccctgcattgaccatgattgggaagtatttttataaacgcaggccactggctaatgggctggccatggccggatctcccgtgttcctctgcacactcgccccactgaaccaagttttcttcggtatcttcggctggcgtggttcattcctgatactgggaggtttactgttgaattgctgtgtggccggggcgctgatgcgacctattgggccaaagccaacaaaagccgggaaagataagtctaaagccagtcttgagaaggccggaaagagcggcgtgaagaaagatctccatgatgctaatacagacctcattggaaggcaccccaaacaggagaagcgaagcgtattccagacgattaaccaatttctggacctaacactctttacacacagagggttcctcctgtatctctcgggcaacgtcattatgttctttgggctctttgcgccgctggtcttcttgtcctcatacggcaaatctcagcactactcatcagagaaaagcgccttcttgctaagtatactagcatttgtggacatggttgcgagaccctccatgggcttggtggctaatacaaaacctatcagaccccgtatccagtatttctttgcagctagcgtcgttgcgaatggcgtgtgtcacatgctggctccactgtctacgacgtacgtggggttctgcgtctatgcaggctttttcgggttcgctttcggttggctgagctcagttctgtttgagacgctgatggatctcgtggggccccagcggttctctagcgcagtgggtttggttacaatcgtcgaatgctgcccagtgctcctgggccctccacttcttggtcggttaaacgacatgtacggcgactacaagtacacttactgggcatgcggggtggtgctcataatctccggaatctacttgtttatcggcatgggtatcaattatcgcttgctcgcaaaggaacagaaggctaacgagcaaaagaaggagtccaaagaggaggagactagcatcgatgtcgcagggaagcccaacgaagtgactaaggctgccgagagtcctgaccagaaagatacggacggcggacccaaggaagaggaatcccctgtgtag

SEQ ID NO: 338786 - DNA, 1503 bp, Artificial Sequence
  derived and/or modified sequence
atgcccccagctgtgggcggccctgtgggctacaccccaccagatggcggctggggctgggccgtggtgattggagccttcatcagcatcggcttctcctatgccttccccaagagcatcaccgtcttcttcaaggagattgagggcatcttccacgccaccaccagcgaggtgtcctggatcagcagcatcatgctggccgtgatgtatggaggcggccccatcagcagcatcctggtgaacaagtatggcagcagaattgtgatgattgtgggcggctgcctgagcggctgcggcctgattgctgccagcttctgcaacacagtgcagcagctgtatgtgtgcatcggcgtgattggaggcctgggcctggccttcaacctgaacccagccctgaccatgattggcaagtacttctacaagaggcggcccctggccaacggcctggccatggccggcagccctgtgttcctgtgcaccctggcccccctgaaccaggtgttcttcggcatcttcggctggaggggcagcttcctgatcctgggcggcctgctgctgaactgctgcgtggccggggccctgatgaggcccatcggccccaagcccaccaaggccggcaaggacaagagcaaggccagcctggagaaggccggcaagagcggcgtgaagaaggacctgcatgatgccaacacagacctgattggccgccaccccaagcaggagaagaggagcgtcttccagaccatcaaccagttcctggacctgaccctcttcacccaccggggcttcctgctgtacctgtctggaaatgtcatcatgttcttcggcctgtttgcccccctggtgttcctgagcagctatggcaagagccagcactacagcagcgagaagagcgccttcctgctgagcatcctggcctttgtggacatggtggcccggcccagcatgggcctggtggccaacaccaagcccatccggccccgcatccagtacttctttgctgcctctgtggtggccaacggggtgtgccacatgctggcccccctgagcaccacctacgtgggcttctgtgtgtatgccggcttctttggatttgccttcggctggctgagctctgtgctgtttgagaccctgatggacctggtgggcccccagcgcttcagcagcgctgtgggcctggtgaccatcgtggagtgctgccctgtgctgctgggcccccccctgctgggccgcctgaatgacatgtacggggactacaagtacacctactgggcctgtggggtggtgctgatcatcagcggcatctacctgttcatcggcatgggcatcaactaccgcctgctggccaaggagcagaaggccaatgagcagaagaaggagagcaaggaggaggagaccagcattgatgtggccggcaagcccaatgaggtgaccaaggctgctgagagcccagaccagaaggacacagatggcggccccaaggaggaggagagccctgtgtag

SEQ ID NO: 338787 - DNA, 648 bp, Artificial Sequence
  derived and/or modified sequence
atgcccccagctgtgggcggccctgtgggctacaccccaccagatggcggctggggctgggccgtggtgattggagccttcatcagcatcggcttctcctatgccttccccaagagcatcaccgtcttcttcaaggagattgagggcatcttccacgccaccaccagcgaggtgtcctggatcagcagcatcatgctggccgtgatgtatggaggcggccccatcagcagcatcctggtgaacaagtatggcagcagaattgtgatgattgtgggcggctgcctgagcggctgcggcctgattgctgccagcttctgcaacacagtgcagcagctgtatgtgtgcatcggcgtgattggaggcctgggcctggccttcaacctgaacccagccctgaccatgattggcaagtacttctacaagaggcggcccctggccaacggcctggccatggccggcagccctgtgttcctgtgcaccctggcccccctgaaccaggtgttcttcggcatcttcggctggaggggcagcttcctgatcctgggcggcctgctgctgaactgctgcgtggccggggccctgatgaggcccatcggccccaagcccaccaaggccggcaaggacaagagcaaggccagcctggagtag

SEQ ID NO: 338788 - DNA, 1293 bp, Artificial Sequence
  derived and/or modified sequence
atgcccccagctgtgggcggccctgtgggctacaccccaccagatggcggctggggctgggccgtggtgattggagccttcatcagcatcggcttctcctatgccttccccaagagcatcaccgtcttcttcaaggagattgagggcatcttccacgccaccaccagcgaggtgtcctggatcagcagcatcatgctggccgtgatgtatggaggcggccccatcagcagcatcctggtgaacaagtatggcagcagaattgtgatgattgtgggcggctgcctgagcggctgcggcctgattgctgccagcttctgcaacacagtgcagcagctgtatgtgtgcatcggcgtgattggaggcctgggcctggccttcaacctgaacccagccctgaccatgattggcaagtacttctacaagaggcggcccctggccaacggcctggccatggccggcagccctgtgttcctgtgcaccctggcccccctgaaccaggtgttcttcggcatcttcggctggaggggcagcttcctgatcctgggcggcctgctgctgaactgctgcgtggccggggccctgatgaggcccatcggccccaagcccaccaaggccggcaaggacaagagcaaggccagcctggagaaggccggcaagagcggcgtgaagaaggacctgcatgatgccaacacagacctgattggccgccaccccaagcaggagaagaggagcgtcttccagaccatcaaccagttcctggacctgaccctcttcacccaccggggcttcctgctgtacctgtctggaaatgtcatcatgttcttcggcctgtttgcccccctggtgttcctgagcagctatggcaagagccagcactacagcagcgagaagagcgccttcctgctgagcatcctggcctttgtggacatggtggcccggcccagcatgggcctggtggccaacaccaagcccatccggccccgcatccagtacttctttgctgcctctgtggtggccaacggggtgtgccacatgctggcccccctgagcaccacctacgtgggcttctgtgtgtatgccggcttctttggatttgccttcggctggctgagctctgtgctgtttgagaccctgatggacctggtgggcccccagcgcttcagcagcgctgtgggcctggtgaccatcgtggagtgctgccctgtgctgctgggcccccccctgctgggcatcgtgtacctgcccaccaacgtgggcctgctgcagaacaagcacgtgcgctgggagtgctag

SEQ ID NO: 338789 - DNA, 891 bp, Artificial Sequence
  derived and/or modified sequence
atgcccccagctgtgggcggccctgtgggctacaccccaccagatggcggctggggctgggccgtggtgattggagccttcatcagcatcggcttctcctatgccttccccaagagcatcaccgtcttcttcaaggagattgagggcatcttccacgccaccaccagcgaggtgtcctggatcagcagcatcatgctggccgtgatgtatggaggcggccccatcagcagcatcctggtgaacaagtatggcagcagaattgtgatgattgtgggcggctgcctgagcggctgcggcctgattgctgccagcttctgcaacacagtgcagcagctgtatgtgtgcatcggcgtgattggaggcctgggcctggccttcaacctgaacccagccctgaccatgattggcaagtacttctacaagaggcggcccctggccaacggcctggccatggccggcagccctgtgttcctgtgcaccctggcccccctgaaccaggtgttcttcggcatcttcggctggaggggcagcttcctgatcctgggcggcctgctgctgaactgctgcgtggccggggccctgatgaggcccatcggccccaagcccaccaaggccggcaaggacaagagcaaggccagcctggagaaggccggcaagagcggcgtgaagaaggacctgcatgatgccaacacagacctgattggccgccaccccaagcaggagaagaggagcgtcttccagaccatcaaccagttcctggacctgaccctcttcacccaccggggcttcctgctgtacctgtctggaaatgtcatcatgttcttcggcctgtttgcccccctggtgttcctgagcagctatggcaagagccagcactacagcagcgagtag

SEQ ID NO: 338790 - DNA, 1371 bp, Artificial Sequence
  derived and/or modified sequence
atgcccccagctgtgggcggccctgtgggctacaccccaccagatggcggctggggctgggccgtggtgattggagccttcatcagcatcggcttctcctatgccttccccaagagcatcaccgtcttcttcaaggagattgagggcatcttccacgccaccaccagcgaggtgtcctggatcagcagcatcatgctggccgtgatgtatggaggcggccccatcagcagcatcctggtgaacaagtatggcagcagaattgtgatgattgtgggcggctgcctgagcggctgcggcctgattgctgccagcttctgcaacacagtgcagcagctgtatgtgtgcatcggcgtgattggaggcctgggcctggccttcaacctgaacccagccctgaccatgattggcaagtacttctacaagaggcggcccctggccaacggcctggccatggccggcagccctgtgttcctgtgcaccctggcccccctgaaccaggtgttcttcggcatcttcggctggaggggcagcttcctgatcctgggcggcctgctgctgaactgctgcgtggccggggccctgatgaggcccatcggccccaagcccaccaaggccggcaaggacaagagcaaggccagcctggagaaggccggcaagagcggcgtgaagaaggacctgcatgatgccaacacagacctgattggccgccaccccaagcaggagaagaggagcgtcttccagaccatcaaccagttcctggacctgaccctcttcacccaccggggcttcctgctgtacctgtctggaaatgtcatcatgttcttcggcctgtttgcccccctggtgttcctgagcagctatggcaagagccagcactacagcagcgagaagagcgccttcctgctgagcatcctggcctttgtggacatggtggcccggcccagcatgggcctggtggccaacaccaagcccatccggccccgcatccagtacttctttgctgcctctgtggtggccaacggggtgtgccacatgctggcccccctgagcaccacctacgtgggcttctgtgtgtatgccggcttctttggatttgccttcggctggctgagctctgtgctgtttgagaccctgatggacctggtgggcccccagcgcttcagcagcgctgtgggcctggtgaccatcgtggagtgctgccctgtgctgctgggcccccccctgctgggccgcctgaatgacatgtacggggactacaagtacacctactgggcctgtggggtggtgctgatcatcagcggcatctacctgttcatcggcatgggcatcaactaccgcctgctggccaaggagcagaaggccaatgaatag

SEQ ID NO: 338791 - DNA, 1503 bp, Artificial Sequence
  derived and/or modified sequence
atgccccccgccgtgggcggccccgtgggctacaccccccccgacggcggatggggttgggccgtggtgatcggggcatttataagtattggattttcctacgctttccctaagagtattaccgtgttcttcaaggagatcgagggcatcttccatgccacaaccagtgaggtgtcttggataagcagcatcatgctggcagtgatgtatgggggcggcccgattagcagcatcctggttaacaagtacgggagccgaatcgtgatgattgtaggaggctgcttaagcggatgcgggttgatagcggcatccttctgtaataccgtgcagcagctgtatgtgtgtataggggtcattggcggactcgggctggcctttaacttgaaccccgccctgaccatgattggcaaatacttttacaagcggagacctcttgccaacgggctcgcaatggccggttctccagtgtttctgtgcaccttagcacctcttaaccaggtcttctttggcatcttcgggtggagaggcagcttcttgatacttggggggctgctcctgaactgctgtgttgctggggctctgatgagacctatcgggcccaaacctacaaaggccggaaaggacaaatccaaagcatctctggaaaaagctgggaagtcgggcgtcaaaaaagatctccacgatgccaataccgatctcatcggaagacatcctaagcaggagaaacgcagcgtgtttcagaccatcaatcagttcctagacctcaccctgttcacacacagggggttcctcttgtatctctctgggaatgtgataatgttttttggcctctttgccccactcgtttttctttcttcatatgggaagtcgcaacattacagcagcgagaagagcgctttcctgctgtctatcctggccttcgtagacatggtcgccaggccttctatgggccttgtcgcaaatactaaacccatccggccaagaatccagtattttttcgcagcatctgtcgttgcgaatggagtctgccacatgctggctcccctgtcaactacctacgtcggtttttgtgtctacgctggctttttcgggttcgccttcggctggctttcctccgtgttgtttgagactctgatggacctcgtggggcctcagaggttttcatctgccgtcgggctagtaacaattgtcgaatgttgcccagtcttacttggcccaccattgcttgggcgtcttaatgacatgtatggcgactacaagtacacttactgggcctgcggggtggtccttatcattagcggcatttacctgttcatcgggatgggaataaactacaggctgcttgccaaagagcaaaaggcaaacgaacagaaaaaggagagtaaggaagaggaaacctctatcgacgttgccggaaagccaaatgaggtaacgaaggccgccgagagtccggaccagaaggataccgatggcggacctaaagaggaggaatcccctgtgtag

SEQ ID NO: 338792 - DNA, 648 bp, Artificial Sequence
  derived and/or modified sequence
atgccccccgccgtgggcggccccgtgggctacaccccccccgacggcggctgggggtgggcagtggttatcggcgcttttatctccatcgggttttcatatgcattcccaaaaagcataacagtattctttaaggagattgaggggatcttccatgccaccacaagcgaggtcagttggatatcttctatcatgttggccgtgatgtatgggggcggccctatctcctctatccttgtgaataagtatggatcccgcatcgtcatgatcgtcggaggctgcctatccggctgtgggttgatcgctgcatccttttgcaatactgtgcagcagctctacgtgtgtatcggtgtcatcggcgggttgggattggcattcaaccttaacccagcccttactatgatcggcaaatatttttacaaacgcaggcccttggcgaatggcctggcaatggccggatcacctgttttcttgtgcacacttgcccccctgaaccaggtcttctttggaatcttcggctggagagggtcattcttgatcttagggggactgttgttgaactgctgcgttgccggcgcactgatgaggccaatcggacccaagccaaccaaagctggcaaagacaagtctaaagccagcctggaatag

SEQ ID NO: 338793 - DNA, 1293 bp, Artificial Sequence
  derived and/or modified sequence
atgccccccgccgtgggcggccccgtgggctacaccccccccgacggcggatgggggtgggcagtggtgattggggcttttatctccatcggctttagctacgcattccctaagagcatcactgtgttctttaaggagatcgagggtatatttcatgccacaacaagtgaagtctcttggatatcctccattatgctcgcagttatgtatgggggcggacccattagtagcatactggtgaataagtatggatcccgaattgttatgattgtgggcggatgcctgagcgggtgcggtctgatcgctgccagtttctgcaataccgttcaacaactctatgtgtgtattggagtcattggaggacttggcctggcttttaacctaaatcctgcattaacaatgattggcaaatatttctacaagaggcgccctttggctaacggcttggcaatggcaggctcaccggtcttcctgtgtaccctggcccccctgaatcaggtgtttttcgggatcttcggctggagagggagctttctgatcctgggtgggcttctgctcaactgttgcgtagcaggggcgctgatgcgtcctatcggtcccaagcccacaaaggctggcaaggataagtctaaggccagcctggaaaaagctggtaagtccggcgtgaagaaggacctccatgacgcaaacacagacctgatcgggaggcatcccaagcaagagaagagatctgtgtttcagactatcaaccaattcttggatctgaccctcttcacccataggggtttcctcctctatctgtctggaaatgtgatcatgttcttcggcttatttgcccctcttgtgttcctttcatcgtatgggaagagccagcactatagcagtgaaaagtctgcttttctgctttctattcttgcctttgttgatatggtggctagacctagtatgggcttggtcgccaatacgaaaccgataagaccccgtatccagtacttctttgccgcctccgtagtggcaaacggcgtctgtcacatgctagccccactgtcaaccacctacgttggcttctgtgtatatgcgggttttttcgggtttgcttttggctggttaagcagcgtactctttgagacattgatggatctcgtcggaccccagcggttctcctccgccgtgggactcgtaaccattgttgagtgttgtccagtcctcctcggccctcctctcttaggcatagtgtatcttcccactaacgttgggttactgcaaaacaagcatgtccggtgggaatgttag

SEQ ID NO: 338794 - DNA, 891 bp, Artificial Sequence
  derived and/or modified sequence
atgccccccgccgtgggcggccccgtgggctacaccccccccgacggtggttggggctgggcagtagtgattggagcgtttatcagcattggctttagctatgccttccccaagtcaatcactgtgttcttcaaggagattgagggcatcttccacgccactactagtgaggtttcctggatctcttccattatgctcgcagtcatgtatgggggaggcccgatttcgagcatcctcgtgaataagtacggatccaggatcgtgatgatcgtcggcggatgtctctccggctgtggtctcattgctgccagcttttgtaacaccgtgcagcagctttatgtttgtatcggcgtgatcggcggtctgggcctagcattcaacctcaatccagctctgacaatgatcgggaaatacttctacaagagaaggcccctagccaatgggttggccatggccggttctcctgtcttcctctgcacccttgcgccattaaaccaggtcttttttggaatttttggttggcgagggtcttttttgatcctgggcggtctactgcttaattgctgtgtcgccggtgccctgatgcgtcctatcgggccaaaacccacaaaagctggtaaagataagtcgaaggcctccctcgaaaaagcaggcaagtctggggtcaaaaaagacctccacgatgccaatacagacctgatcggacgccatccaaaacaggagaagcggtcagtattccagactattaatcagtttcttgacctgacattattcacccatagaggctttctgctgtacctgtcaggtaacgtaataatgttctttggcctcttcgctcccctcgtgttcctgtcctcctatggcaagtctcagcattattcgtcggaatag

SEQ ID NO: 338795 - DNA, 1371 bp, Artificial Sequence
  derived and/or modified sequence
atgccccccgccgtgggcggccccgtgggctacaccccccccgacggtggctggggctgggccgtggtcattggcgcctttatctctatcggattttcatacgcatttcccaagtctatcacagtgttctttaaagaaatcgaggggatatttcatgcaaccacgtctgaggtgtcctggatcagttcaataatgctcgcagtgatgtatggcgggggtccaatctccagcatcctcgtgaacaaatatggatcccgcatcgtgatgattgtgggcgggtgtctcagcgggtgtggattaattgctgcatccttttgtaacactgtccagcagctctacgtttgcataggcgtgatcgggggcctaggcttagcattcaaccttaatccagccctgacgatgatcgggaagtatttctacaagagaaggccgctggctaatggcctggcaatggccgggagcccagtctttctgtgtaccctggctccactaaaccaggtgttttttgggatttttggctggaggggaagtttcctgattttgggcggactgctcctgaactgctgtgtggcgggtgcgctcatgcggccaatcggaccgaagcctactaaggccggcaaagataaaagtaaggccagtttagagaaggcaggcaagtccggcgtgaaaaaggatttgcatgatgccaataccgatctgattggcagacatccaaaacaggaaaaacgaagtgtgttccaaactattaaccaattcttggatctcactctgtttacgcaccggggatttctcctttatctgagcgggaacgttatcatgtttttcgggcttttcgctcctctagtgtttctgagttcatatggaaagtctcagcattacagttctgaaaagtctgcctttttgttgtctatactggctttcgttgacatggtcgcccgacctagtatgggcctggtagcaaatacaaagcctattaggcccagaatccagtacttctttgccgctagcgtcgtcgccaatggcgtgtgccacatgctggccccactgtccactacatacgtcggattctgtgtgtatgccggctttttcggcttcgcattcggttggctcagttccgtcctatttgaaacgcttatggatttagtgggaccacagcgtttttcgtccgcagtggggctcgtcaccattgttgagtgctgcccagtgctactgggacctcctttgctggggcgcctgaatgacatgtatggcgattacaagtatacatactgggcgtgcggggttgtactgatcatcagcggcatttatctgttcattggcatggggatcaattaccgcctgctagctaaagagcagaaggccaatgaatag

SEQ ID NO: 338796 - DNA, 1503 bp, Artificial Sequence
  derived and/or modified sequence
atgccccccgccgtgggcggccccgtgggctacaccccccccgacggcgggtggggctgggccgtggtgattggggcctttatttctataggcttcagttacgccttccctaagagcatcacagtgtttttcaaagaaatcgagggaattttccatgccaccacttctgaggtgagttggattagttccatcatgcttgcagtcatgtacggtgggggccccatcagctcaattctagtgaacaagtatggatcacgcatcgtgatgattgtcgggggttgcctctccggatgtggtctcatcgccgcctctttttgtaacaccgtgcagcagttatacgtctgtattggcgtcatcggcgggctgggactggcattcaacctgaaccccgccctgacaatgattggaaagtacttttacaagcggagacctcttgccaatgggctggcaatggctggaagccccgtgtttctgtgcaccctcgcccctctgaatcaggtgttcttcggtatcttcgggtggcgtgggtctttcctcatcctgggcgggcttctgctgaactgttgcgtcgccggtgccttgatgcgacccattgggcccaagccaaccaaggcagggaaggacaagtctaaggcatccctggagaaagctggtaaatcgggggtgaagaaggatctacatgacgcgaacaccgatttgattggaagacaccccaaacaggagaagcgttctgtcttccagaccattaaccagttcctggacctgacattgttcacccatcgcggatttcttctttacctgtctgggaacgtcatcatgtttttcggtttgttcgctccactggtgtttctgtcttcctacggtaagagccagcattatagctcagagaagagcgccttcttactttcaattctggctttcgttgacatggtcgcgcggccaagcatgggcctagtggccaatacaaagcccatcaggcctagaattcaatactttttcgccgccagcgttgtcgccaacggcgtgtgccacatgttagctcctctttccaccacttatgtcggcttctgcgtttatgccgggtttttcgggttcgccttcggttggctctcctctgtgctcttcgaaaccttaatggacctcgttggaccgcagagattttcttctgctgtggggctggtcacaatagtcgagtgttgccctgtgctgctcggcccaccactattagggcgtttgaacgatatgtacggggattacaagtacacctattgggcttgcggagtcgtgcttatcatctcgggaatatatctattcattggtatgggcatcaattataggctgctggcgaaagaacaaaaagccaacgagcaaaaaaaagagtcgaaggaagaggagacatctatagacgtcgcaggtaaacctaatgaggtcactaaagctgctgagtccccagaccagaaagatactgacggcggccccaaagaagaggaatctccagtttag

SEQ ID NO: 338797 - DNA, 1503 bp, Artificial Sequence
  derived and/or modified sequence
atgcccccagcggttggcggtccggtcggatacactcccccagacggcggttggggctgggctgtggtgataggcgcatttatttcaataggcttcagttacgctttcccaaagagtatcacagtgttcttcaaagaaatagaggggatctttcacgccaccacttcagaggtgtcctggatctcaagcattatgcttgcggtgatgtatggaggcggaccgatctcgtccatcctggtgaacaagtacgggagccgcattgtcatgattgttggagggtgcctgtcaggctgcgggctgatagcagcctctttctgtaacacagtgcaacagttatacgtttgtatcggtgtgatagggggtctcggcttggctttcaatctgaaccctgcgctgactatgatcggaaaatatttctacaaaaggaggccgttagcaaatggactcgcgatggcaggcagtcccgtattcctttgcacactggcacctctgaatcaggtttttttcggcatatttgggtggcgagggagcttcctaatactgggcggactcttgctgaattgttgcgtggcgggtgcgctgatgcggccaataggtccaaaaccgacaaaagccggtaaggataagagcaaggcctcattggagaaggctggtaaatctggcgtaaagaaagatttgcacgacgcaaacacagatttgattggtcggcatcctaagcaggagaaacgtagtgttttccagactatcaaccaattcctggacctcactctgttcacccatcgtggctttctcctttatctgtcgggaaatgtgattatgttttttggtctgtttgcacccttggtctttttatcatcctacggtaaatctcagcactactccagcgaaaagagcgcattcctgctatccatcctagcttttgttgacatggtcgcacgccctagcatgggcctggtggccaataccaagccaatccgaccgcgaatacagtactttttcgctgcttccgtggtcgccaatggagtatgtcacatgctagcgcctctctccaccacctatgttggattttgtgtctacgccggattctttggcttcgcttttggatggctgagttcggtcctgtttgagacgcttatggacctagtggggcctcagcgtttcagcagcgccgtggggctcgttactatcgttgagtgctgcccagttctactgggtccacccctgctcggacgcctgaacgatatgtacggcgattacaagtatacatattgggcctgcggagtcgtgcttattatctctgggatttatctgttcattgggatgggcattaattaccggttattagctaaagagcaaaaagcgaacgagcagaaaaaggaatccaaggaggaggaaacgtcaatcgatgttgcgggaaagcctaatgaggtaacaaaggccgctgagtcccctgatcagaaggacaccgacggcggtccaaaggaggaggagtcccccgtatag

SEQ ID NO: 338798 - DNA, 648 bp, Artificial Sequence
  derived and/or modified sequence
atgcctcccgcagtgggtggaccagtgggctatacgccccctgacgggggatggggttgggcagttgtaatcggggcattcatcagcatcggcttttcctacgctttccccaagtctataaccgtcttttttaaagaaatcgaggggatcttccatgctaccacctctgaagtctcttggatcagttccatcatgctggccgtgatgtatggcggagggccaatctcgtccatcttggtaaacaagtatggtagcaggatcgtcatgatcgtcggcggttgcctgagcggttgtggcctgatcgctgcatctttttgcaacacagtgcaacagctctacgtctgtattggtgtaattggcggactcggtttggctttcaatttaaaccccgctctgacaatgatcggtaagtacttctacaagcgcagaccattggccaatggcctggcaatggccggtagtcctgtattcctttgcaccctggcaccgctcaaccaggttttttttggcatattcggctggcggggtagcttcctcatcctggggggacttctgctgaactgttgtgtggcgggagccttgatgcgtcctatcgggccaaaaccaacaaaggccggaaaggataagagcaaggcctctctagagtag

SEQ ID NO: 338799 - DNA, 1293 bp, Artificial Sequence
  derived and/or modified sequence
atgccccctgccgttggcggtccagtcggttatacccctccagacggcggatggggttgggccgtcgttattggagcctttatttctattggtttcagctatgctttccccaaatccatcactgtattctttaaggaaatcgaggggatctttcacgccacaactagtgaggtcagctggatatcttctattatgctcgccgttatgtatggtggcggacccattagttctatactcgttaataaatatggttcacggattgtgatgatcgtaggcggttgcctatccggctgcggtctgatcgccgcatccttctgtaacacggtgcagcagctgtacgtctgtatcggtgttattggcggtctgggtttagctttcaacctgaacccagccctaacaatgatcggcaaatacttctataaacgacggcctctggctaatgggctcgcaatggccggttcccctgtgttcttgtgcactcttgcccctctcaatcaagttttttttgggatttttggatggcgcggtagttttctcatcttagggggactgctactgaactgctgcgtggccggtgctctcatgcgacctatagggccaaaaccaaccaaggcaggaaaggataagtctaaagcttccctggagaaagctggcaagtcaggggtcaaaaaagacttgcacgatgccaacaccgacctcattggacgccacccaaaacaggagaaaaggagcgtattccagacaatcaatcagtttctggacctaactttgttcacgcatagaggattcctgttatatctgagcgggaatgtcatcatgtttttcggtctgtttgccccactggtgtttctatcaagctatggcaagtcccagcactacagttcagagaagagcgctttcttactgtccatcctggcattcgtcgacatggttgccaggccgtctatgggtctggttgctaacaccaagccgatcaggccgcgaatccaatacttctttgccgcatccgtggttgctaatggcgtgtgccatatgcttgcaccactgtctacaacttacgtgggattctgcgtgtacgctggctttttcggcttcgccttcggctggctctctagcgttctgtttgaaaccttgatggacctcgtgggcccacagcgtttctccagcgccgtgggcttagtcacaattgttgagtgttgcccagttctacttggccctccactcctgggcatcgtgtacctgcctacaaatgtgggtcttcttcagaataaacacgtaaggtgggagtgttag

SEQ ID NO: 338800 - DNA, 891 bp, Artificial Sequence
  derived and/or modified sequence
atgcctcccgcagttgggggacctgtcggatatacaccaccagacggcggatggggctgggccgtggttatcggcgcatttatctccatcggtttttcatatgctttccctaagtctattacagtgttctttaaggagattgaggggattttccatgcgactacaagcgaggtatcttggatctcatctatcatgctcgccgtgatgtatggcggtgggccaattagctctattctcgttaacaaatacggctcccgaattgtaatgatcgtgggcggttgtctgtctgggtgcgggctcatagcagcatctttctgcaacaccgtccagcagctgtatgtatgtataggtgtgattgggggactgggtctcgcattcaatctgaaccctgccctcaccatgatcggaaaatacttttacaaaagacgcccacttgctaatggactggcgatggccggaagccccgtatttctatgcaccctcgctccactaaaccaggtcttctttggcattttcgggtggaggggatcatttctgatccttggtggcctgttgctcaattgctgtgtggccggagctctgatgcggcctattgggcctaaacctactaaggccggaaaagacaaatccaaagccagcttagaaaaagctgggaagagcggcgtgaaaaaggatttgcatgatgccaacactgacctgatcggaagacaccccaaacaggagaagcgtagtgtgttccaaaccatcaaccaattcttagacctaaccctgtttactcatcgcggattcctgctgtacttgagcggcaatgttatcatgtttttcggactctttgcgcctctcgtatttctgtctagctacggaaagtctcaacactatagcagcgagtag

SEQ ID NO: 338801 - DNA, 1371 bp, Artificial Sequence
  derived and/or modified sequence
atgccaccggctgtggggggtccggtcgggtatacccctcccgatgggggttggggttgggcggtcgtaataggcgcttttatatcgataggtttctcatatgccttcccaaagtcaattaccgttttctttaaagaaattgagggtatctttcatgctaccacttcagaagtgtcatggattagctcaatcatgttggcagtcatgtatgggggagggccaatctcctccatccttgtgaataagtacggcagcagaattgtgatgatcgtggggggatgtttgtcgggttgtggtctcattgccgcttctttttgcaacactgttcagcagctctacgtttgtattggtgtcatcggaggtctcggactggccttcaacctaaatcccgcactgacaatgataggtaagtatttctacaagagaagacccttagctaacgggttggcaatggccggaagccctgtgttcctgtgcactcttgcccctcttaaccaggtcttctttgggatcttcgggtggcgcggatcctttttgatactaggcggtctcctgttgaactgttgcgtcgcgggagccctgatgcgtcctatcgggcctaaaccgacgaaagcgggtaaggacaagagcaaagcatctttggagaaagccggaaagtccggagttaagaaggatctgcacgatgcaaatacagacctgataggtagacatccaaagcaggaaaaaaggtccgtctttcagaccattaaccaatttctggacctcaccctcttcactcatcgtggttttcttttgtacctcagcggcaatgtcattatgttttttggactgttcgcaccactggtcttcctcagttcctatgggaaaagccagcactactctagtgagaaatccgcatttctgttatccattctcgccttcgtggacatggttgctcggccatccatgggactggtggccaatacaaagcccattaggccccgtatccagtacttctttgctgctagcgttgttgccaacggcgtatgtcatatgctcgctcccctgtcgaccacctatgtcggattctgtgtctatgcaggatttttcggattcgcattcggctggctgagcagtgtgttgtttgagactctgatggatttagtgggcccacagaggtttagtagtgccgtcggtctcgtcacaattgtcgaatgttgtccggtgctgctgggcccacccttgctcggccgacttaacgacatgtacggcgactataagtacacctactgggcctgcggtgtcgtgttgataatttcagggatctacctgttcattggcatgggaattaactacagactgttggcgaaggaacaaaaggctaacgagtag

SEQ ID NO: 338802 - DNA, 1503 bp, Artificial Sequence
  derived and/or modified sequence
atgcccccagctgtgggcggacccgttgggtatacaccccctgacggagggtgggggtgggccgtggttattggggctttcatctccattggctttagttatgcatttcctaaatccatcactgttttttttaaagaaattgaaggcatcttccatgcaactacttccgaagttagttggatcagctcaatcatgctggccgtcatgtatgggggaggaccaatcagttcaatcctggtgaataagtatggaagtcgcattgtgatgatagtaggcggttgcctcagcggctgcggcctcattgcggctagtttttgtaatacagtgcagcaactttacgtctgcattggggttatcggaggactgggcctcgccttcaacctcaaccctgccctcacaatgatcggtaaatatttctataaacgaagacctctcgctaatggactggccatggccggttctcctgtgttcctttgcaccctggcacctcttaaccaggtcttttttgggatctttggttggcgcggaagctttctcatactcgggggtctgttacttaattgctgtgttgctggcgcattgatgagaccaattggaccaaaacctaccaaggcgggtaaggataagtccaaggccagtctggaaaaggctgggaagtcaggtgtcaagaaagaccttcacgacgcaaatacagatctcatcgggaggcacccgaagcaagagaagaggagcgtcttccaaacaatcaaccagtttttggatcttaccctgtttacccatcgcggattcttgctgtatttgagcggcaatgtgattatgttttttgggctcttcgcacccctggtgttcctgtcatcatacgggaaaagccagcattacagttcagagaaatctgcatttctgctgagtatcttggcattcgtggatatggtggctcgcccatctatggggctggttgccaataccaagcctatccggccaagaatccagtattttttcgctgcatcggttgtggcgaatggagtgtgccatatgctggctccgctgagtactacatacgttggtttctgtgtgtacgcagggttctttggatttgcttttgggtggctgtccagcgtcctgtttgagaccctcatggatctggtgggacctcagcggttcagctccgccgttggccttgtgactatcgttgaatgttgcccagtgctgctcggacctcctctgctgggcagactgaacgacatgtatggagactacaagtacacctactgggcttgcggggttgtcctgattatatccggtatctacttattcataggtatgggcatcaattatagactgctggccaaggaacaaaaggcaaatgaacaaaagaaagaatcaaaggaggaagagacttcaattgatgtggccggtaaacctaatgaagtcaccaaggccgcagaatcacccgaccaaaaagatacagacggcggtcccaaggaagaggagagccccgtctag

SEQ ID NO: 338803 - DNA, 3910 bp, Artificial Sequence
  derived and/or modified sequence
agagggcgcgcgcggctgaaagcgtgtggaggcgcgggctgcagttcggatgtctgtgtggcggggagggggcggcggccgggagagacgactccgccccctgcgcgcatgctccggccccggcgggttataaggcagcctcgctggcccggccagacaaagtggtgagctgcgacgtgactggctagctgcgtgggtactggaacaagcaaacgaggcagcgagcgaaggacgggagccggaccctgggccccgtggaactccagcctgcgccaccacgtcacgcacacgctcggcgctgcgatccgcgcatataacgatatttggatttgacctgcattttggaatttatctacacttaaaatgccaccagcagttggaggtccagttggatacacccccccagatggaggctggggctgggcagtggtaattggagctttcatttccatcggcttctcttatgcatttcccaaatcaattactgtcttcttcaaagagattgaaggtatattccatgccaccaccagcgaagtgtcatggatatcctccataatgttggctgtcatgtatggtggaggtcctatcagcagtatcctggtgaataaatatggaagtcgtatagtcatgattgttggtggctgcttgtcaggctgtggcttgattgcagcttctttctgtaacaccgtacagcaactatacgtctgtattggagtcattggaggtcttgggcttgccttcaacttgaatccagctctgaccatgattggcaagtatttctacaagaggcgaccattggccaacggactggccatggcaggcagccctgtgttcctctgtactctggcccccctcaatcaggttttcttcggtatctttggatggagaggaagctttctaattcttgggggcttgctactaaactgctgtgttgctggagccctcatgcgaccaatcgggcccaagccaaccaaggcagggaaagataagtctaaagcatcccttgagaaagctggaaaatctggtgtgaaaaaagatctgcatgatgcaaatacagatcttattggaagacaccctaaacaagagaaacgatcagtcttccaaacaattaatcagttcctggacttaaccctattcacccacagaggctttttgctatacctctctggaaatgtgatcatgttttttggactctttgcacctttggtgtttcttagtagttatgggaagagtcagcattattctagtgagaagtctgccttccttctttccattctggcttttgttgacatggtagcccgaccatctatgggacttgtagccaacacaaagccaataagacctcgaattcagtatttctttgcggcttccgttgttgcaaatggagtgtgtcatatgctagcacctttatccactacctatgttggattctgtgtctatgcgggattctttggatttgccttcgggtggctcagctccgtattgtttgaaacattgatggaccttgttggaccccagaggttctccagcgctgtgggattggtgaccattgtggaatgctgtcctgtcctcctggggccaccacttttaggtcggctcaatgacatgtatggagactacaaatacacatactgggcatgtggcgtcgtcctaattatttcaggtatctatctcttcattggcatgggcatcaattatcgacttttggcaaaagaacagaaagcaaacgagcagaaaaaggaaagtaaagaggaagagaccagtatagatgttgctgggaagccaaatgaagttaccaaagcagcagaatctccggaccagaaagacacagatggagggcccaaggaggaggaaagtccagtctgaatccatggggctgaagggtaaattgagcagttcatgacccaggatatctgaaaatattctactggcctgtaatctaccagtggtgctcaatgcaaatagtagacatttgtgtggaaatcataccagttgttcattgatgggatttttgtttgactccttaccaatagcctgaatttgaggagggaatgattggtagcaaaggatgggggaaagaagtaggttctgttttgttttgttttaatcttagcttttaatagtgtcataaagattataatatgtgccttaagttttagtctttagaactctagagagccttaacttcttaaaccatttttgctgaattcatctatttcgagtgttgtgttaaaaggaaaaataacaactaacttgtttgaggcaaatctaaaatttaaaattaatcttgcttcattgttacatgtaatatatttcagacattttcactggaagatttatgaacagaaatattggttgaaagttagagattttacaaaatgctgacaaaaatattttcctagcatcagtagatttctggcatatgtttctgctagctatatatttaggaaattcaaagcataaaactttggcaacatcttggctgttctagacacagtgtacttgtcaacccctctcaggtaccttttcttgggatgcttattagaagccaagtaaagtgcttaaggtttgttttcattaaattagctatttctgctcccctgttcaaagatgcattttgagtgtttatagatcactgccctttttgaaatcacctggtattatttttcttactggaaaagttagtattaaaatctacagaactacatatttgtgcctccttggtaaatacaacacatctaattaaatgtagacagatatttcaaacatcagctgaattcacttaagtttttccaaaacctcagttaaactgtgaagctattggaatttttttttcctggaatttttcccctttgattcacagtggtcccatttatatctgcttctagcttagtgctatgtgtgagatatgtgtgtgtttggtgtttttgtttttttgtttttttttttttaaggtttgcaaattaaaaagggccagaaaaatttggcaccaggcaaacgaataaagataggattgggaaagaagttgctaagtgtgcttagttttaataagtaattccttctcttttttcagagaaggccttacagaaaattgttgtgcttagaattgctggatgcatttttaccctccacacaaacctaaaaattttgtgacccctttcacttacctgaaaagtagagaaatggattcagtataaggataaggagggaaggtggaccagaatgaaaactgtaaatatttttttaacctaatatcacttaaatcgaggcagaaagatacagacattcaatgaattatattcaatgcatttaaaataccactgtaattgacagagtaaaagtatagatacaaaaccttgtgtaagaggctgacttttccaaataaacattttttaagaaaacatttcttctcccaaatgtctattttcttgaggaaaatattgctgtgtcttcattttcattaccaggtttcattttgggccttgctaaattgattgaattaaatcctccagcttttgaaccttgatatttgtgtatatgatttattttcatttgaatttctcctttcctcttctttgctgtaaggcaaggaggaggggaattttaaaaccatcttatttgaactgagagcatccagagcagttaaccttaaggaaacaatgaaaaactccctttgtatgcctgggcatcatggcagatagaggaagagtgttagaggagaaaactgctgctgagagtattggcaggcttggcctcagtttggactctgtaattttctttggacccaagtctgtaacctctgcgtacttcttctctcttaccttctataaaaatgaggattactgttggtgagggaataaggaatgtaagtaaaggaaatctgaaaaaataaaagtaaagcaagtataaa

SEQ ID NO: 338804 - DNA, 865 bp, Artificial Sequence
  derived and/or modified sequence
tccacgtggccgaggtgcacaccccaacccactgggccagtctccccaccctcttacctgctcttctttcccgactcgtctttaatacccaccaggcgccaaccgccgcgggcctggctctatggtggcaagttgcatgggttctcccatcaggacctcccgatgagcctacgagatatttggatttgacctgcattttggaatttatctacacttaaaatgccaccagcagttggaggtccagttggatacacccccccagatggaggctggggctgggcagtggtaattggagctttcatttccatcggcttctcttatgcatttcccaaatcaattactgtcttcttcaaagagattgaaggtatattccatgccaccaccagcgaagtgtcatggatatcctccataatgttggctgtcatgtatggtggaggtcctatcagcagtatcctggtgaataaatatggaagtcgtatagtcatgattgttggtggctgcttgtcaggctgtggcttgattgcagcttctttctgtaacaccgtacagcaactatacgtctgtattggagtcattggaggtcttgggcttgccttcaacttgaatccagctctgaccatgattggcaagtatttctacaagaggcgaccattggccaacggactggccatggcaggcagccctgtgttcctctgtactctggcccccctcaatcaggttttcttcggtatctttggatggagaggaagctttctaattcttgggggcttgctactaaactgctgtgttgctggagccctcatgcgaccaatcgggcccaagccaaccaaggcagggaaagataagtctaaagcatcccttgaga

SEQ ID NO: 338805 - DNA, 3117 bp, Artificial Sequence
  derived and/or modified sequence
acggtgccctcgctgccctggtggggtcggaggggacctccggggttgggagactttgtctccggcggagggaggcggcccagcagagggcatcgtggtcacaggcagccgcgtggcctcggactgcagtgctggtgaaggagaccttgaggcgctggggtcagcgcctctcttagccgagccgcgggccccgtgctaagatgccggtcccaggcctggccgaggagttgggtcgtggtgcccggtgacggtggggaagtcccttcccccctaagtcttcaataggctcctcgagagatgctttgatctggaaaagggataacatgaggctgctgcatgtggtacctccagactctcctggccgcttctgccccaagggaagggactcggggcagaagttatttatgattcgtgacattgtccgccccaaccttcttggcccgccgatccttgccccacctggtgacttgcgagagtggtgcggagagccgcattccccacagccaaggcgtgactgcagggttcgagtagactttgcggaggggacggggcagcccgcagactcctgggagtggtgctgacgggggctctttgtcattcaacctgtggctgccagcgtccgccgcagcgcccttctactcatggacttaaggcggccctgttgagagaaatctggaggatagcgttacacttggtccgatgcaagttttttgttccaagatactttaaaggatacatgtgaaagccagatgaagaagtacatagggcaaagtctggaagggtccccaagtacaggagcctcttcccccgtggaattggggtatgctatcctccctgcacatggatgcaatgaccaacctggaatctcatcagatatttggatttgacctgcattttggaatttatctacacttaaaatgccaccagcagttggaggtccagttggatacacccccccagatggaggctggggctgggcagtggtaattggagctttcatttccatcggcttctcttatgcatttcccaaatcaattactgtcttcttcaaagagattgaaggtatattccatgccaccaccagcgaagtgtcatggatatcctccataatgttggctgtcatgtatggtggaggtcctatcagcagtatcctggtgaataaatatggaagtcgtatagtcatgattgttggtggctgcttgtcaggctgtggcttgattgcagcttctttctgtaacaccgtacagcaactatacgtctgtattggagtcattggaggtcttgggcttgccttcaacttgaatccagctctgaccatgattggcaagtatttctacaagaggcgaccattggccaacggactggccatggcaggcagccctgtgttcctctgtactctggcccccctcaatcaggttttcttcggtatctttggatggagaggaagctttctaattcttgggggcttgctactaaactgctgtgttgctggagccctcatgcgaccaatcgggcccaagccaaccaaggcagggaaagataagtctaaagcatcccttgagaaagctggaaaatctggtgtgaaaaaagatctgcatgatgcaaatacagatcttattggaagacaccctaaacaagagaaacgatcagtcttccaaacaattaatcagttcctggacttaaccctattcacccacagaggctttttgctatacctctctggaaatgtgatcatgttttttggactctttgcacctttggtgtttcttagtagttatgggaagagtcagcattattctagtgagaagtctgccttccttctttccattctggcttttgttgacatggtagcccgaccatctatgggacttgtagccaacacaaagccaataagacctcgaattcagtatttctttgcggcttccgttgttgcaaatggagtgtgtcatatgctagcacctttatccactacctatgttggattctgtgtctatgcgggattctttggatttgccttcgggtggctcagctccgtattgtttgaaacattgatggaccttgttggaccccagaggttctccagcgctgtgggattggtgaccattgtggaatgctgtcctgtcctcctggggccaccacttttaggtatagtatatctccctactaatgtgggtctattacaaaacaagcatgtaagatgggaatgctgacagaaagcaaacattagtgagctatttgggtaagaataaatctttctcatttatgtacccttgatgctgggacaatgcttggcacagcataattgctcaaatatagaatctaattaaatggaaccatcaaggcaaaagggggatcaaatattgttacaaatgtcagtgttttttctttttttttgagatggagtcttgctctgttgcccaggctggagtgcagtggcaccatctcagctcactgcaacctccgcctcccaggttcaagcgattcccctgcctcagcctcccggtagctgggattacagatgcatgccaccatgcctggccaatttttatatctttaatagagacagggtttcgccatgttggccaggctggtctctaactcctgacctcaaacgatccacttgtctcagcctcccaaagtgctgggtaacaggtgtgagccactgtgcctggcctaaaatatgtttttttctgatcgcaaaactgatgtgcttagtgtagaaaagcatgtagaaaaacaacccaatctttaaagcgctagtgattatttcattttaaaaatgaagtatatttcacataagttttttttttttttttttttttttttaagacagtcttggtcttgttgcccaggctggagtgcaatggcgcgatctcggctcactgcaacctctgcctcctgggttcaagcaattctcctgcctcagcctcccaagtagctgtgattacaggcgcccaccaccatgcccagctaatttttgtatttttagtagagacggtttcaccatgttggccaggctcgtcttgaactcctaacctcaggtggtccacccgccttggcctcccaaagtgctgggattacaggcatgagccaccatgcctgatccataaatttttt

SEQ ID NO: 338806 - DNA, 1099 bp, Artificial Sequence
  derived and/or modified sequence
tccagaatgaagttcagagaaacaaaggaatgaatgataacatgacaacatagaagggagagtaagagagtagatagcatgggaaggtccaacccatatccagttggagtctgagaaaagtgaaaagagagaatgggggagaagcaatatttgaagacataatagatatttggatttgacctgcattttggaatttatctacacttaaaatgccaccagcagttggaggtccagttggatacacccccccagatggaggctggggctgggcagtggtaattggagctttcatttccatcggcttctcttatgcatttcccaaatcaattactgtcttcttcaaagagattgaaggtatattccatgccaccaccagcgaagtgtcatggatatcctccataatgttggctgtcatgtatggtggaggtcctatcagcagtatcctggtgaataaatatggaagtcgtatagtcatgattgttggtggctgcttgtcaggctgtggcttgattgcagcttctttctgtaacaccgtacagcaactatacgtctgtattggagtcattggaggtcttgggcttgccttcaacttgaatccagctctgaccatgattggcaagtatttctacaagaggcgaccattggccaacggactggccatggcaggcagccctgtgttcctctgtactctggcccccctcaatcaggttttcttcggtatctttggatggagaggaagctttctaattcttgggggcttgctactaaactgctgtgttgctggagccctcatgcgaccaatcgggcccaagccaaccaaggcagggaaagataagtctaaagcatcccttgagaaagctggaaaatctggtgtgaaaaaagatctgcatgatgcaaatacagatcttattggaagacaccctaaacaagagaaacgatcagtcttccaaacaattaatcagttcctggacttaaccctattcacccacagaggctttttgctatacctctctggaaatgtgatcatgttttttggactctttgcacctttggtgtttcttagtagttatgggaagagtcagcattattctagtgagaa

SEQ ID NO: 338807 - DNA, 2201 bp, Artificial Sequence
  derived and/or modified sequence
gctcggcgctgcgatccgcgcatataacggttagttgggtaacagccggcggcacgcggcgcggaccccacggtgccctcgctgccctggtggggtcggaggggacctccggggttgggagactttgtctccggcggagggaggcggcccagcagagggcatcgtggtcacaggcagccgcgtggcctcggactgcagtgctggtgaaggagaccttgaggcgctggggtcagcgcctctcttagccgagccgcgggccccgtgctaagatgccggtcccaggcctggccgaggagttgggtcgtggtgcccggtgacggtggggaagtcccttcccccctaagtcttcaataggctcctcgagagatgctttgatctggaaaagggataacatgaggctgctgcatgtggtacctccagactctcctggccgcttctgccccaagggaagggactcggggcagaagttatttatgattcgtgacattgtccgccccaaccttcttggcccgccgatccttgccccacctggtgacttgcgagagtggtgcggagagccgcattccccacagccaaggcgtgactgcagggttcgagtagactttgcggaggggacggggcagcccgcagactcctgggagtggtgctgacgggggctctttgtcattcaacctgtggctgccagcgtccgccgcagcgcccttctactcatggacttaaggcggccctgttgagagaaatctggaggatagcgttacacttggtccgatgcaagttttttgttccaaatatttggatttgacctgcattttggaatttatctacacttaaaatgccaccagcagttggaggtccagttggatacacccccccagatggaggctggggctgggcagtggtaattggagctttcatttccatcggcttctcttatgcatttcccaaatcaattactgtcttcttcaaagagattgaaggtatattccatgccaccaccagcgaagtgtcatggatatcctccataatgttggctgtcatgtatggtggaggtcctatcagcagtatcctggtgaataaatatggaagtcgtatagtcatgattgttggtggctgcttgtcaggctgtggcttgattgcagcttctttctgtaacaccgtacagcaactatacgtctgtattggagtcattggaggtcttgggcttgccttcaacttgaatccagctctgaccatgattggcaagtatttctacaagaggcgaccattggccaacggactggccatggcaggcagccctgtgttcctctgtactctggcccccctcaatcaggttttcttcggtatctttggatggagaggaagctttctaattcttgggggcttgctactaaactgctgtgttgctggagccctcatgcgaccaatcgggcccaagccaaccaaggcagggaaagataagtctaaagcatcccttgagaaagctggaaaatctggtgtgaaaaaagatctgcatgatgcaaatacagatcttattggaagacaccctaaacaagagaaacgatcagtcttccaaacaattaatcagttcctggacttaaccctattcacccacagaggctttttgctatacctctctggaaatgtgatcatgttttttggactctttgcacctttggtgtttcttagtagttatgggaagagtcagcattattctagtgagaagtctgccttccttctttccattctggcttttgttgacatggtagcccgaccatctatgggacttgtagccaacacaaagccaataagacctcgaattcagtatttctttgcggcttccgttgttgcaaatggagtgtgtcatatgctagcacctttatccactacctatgttggattctgtgtctatgcgggattctttggatttgccttcgggtggctcagctccgtattgtttgaaacattgatggaccttgttggaccccagaggttctccagcgctgtgggattggtgaccattgtggaatgctgtcctgtcctcctggggccaccacttttaggtcggctcaatgacatgtatggagactacaaatacacatactgggcatgtggcgtcgtcctaattatttcaggtatctatctcttcattggcatgggcatcaattatcgacttttggcaaaagaacagaaagcaaacgagc

SEQ ID NO: 338808 - DNA, 4374 bp, Artificial Sequence
  derived and/or modified sequence
gctcggcgctgcgatccgcgcatataacggttagttgggtaacagccggcggcacgcggcgcggaccccacggtgccctcgctgccctggtggggtcggaggggacctccggggttgggagactttgtctccggcggagggaggcggcccagcagagggcatcgtggtcacaggcagccgcgtggcctcggactgcagtgctggtgaaggagaccttgaggcgctggggtcagcgcctctcttagccgagccgcgggccccgtgctaagatgccggtcccaggcctggccgaggagttgggtcgtggtgcccggtgacggtggggaagtcccttcccccctaagtcttcaataggctcctcgagagatgctttgatctggaaaagggataacatgaggctgctgcatgtggtacctccagactctcctggccgcttctgccccaagggaagggactcggggcagaagttatttatgattcgtgacattgtccgccccaaccttcttggcccgccgatccttgccccacctggtgacttgcgagagtggtgcggagagccgcattccccacagccaaggcgtgactgcagggttcgagtagactttgcggaggggacggggcagcccgcagactcctgggagtggtgctgacgggggctctttgtcattcaacctgtggctgccagcgtccgccgcagcgcccttctactcatggacttaaggcggccctgttgagagaaatctggaggatagcgttacacttggtccgatgcaagttttttgttccaaatatttggatttgacctgcattttggaatttatctacacttaaaatgccaccagcagttggaggtccagttggatacacccccccagatggaggctggggctgggcagtggtaattggagctttcatttccatcggcttctcttatgcatttcccaaatcaattactgtcttcttcaaagagattgaaggtatattccatgccaccaccagcgaagtgtcatggatatcctccataatgttggctgtcatgtatggtggaggtcctatcagcagtatcctggtgaataaatatggaagtcgtatagtcatgattgttggtggctgcttgtcaggctgtggcttgattgcagcttctttctgtaacaccgtacagcaactatacgtctgtattggagtcattggaggtcttgggcttgccttcaacttgaatccagctctgaccatgattggcaagtatttctacaagaggcgaccattggccaacggactggccatggcaggcagccctgtgttcctctgtactctggcccccctcaatcaggttttcttcggtatctttggatggagaggaagctttctaattcttgggggcttgctactaaactgctgtgttgctggagccctcatgcgaccaatcgggcccaagccaaccaaggcagggaaagataagtctaaagcatcccttgagaaagctggaaaatctggtgtgaaaaaagatctgcatgatgcaaatacagatcttattggaagacaccctaaacaagagaaacgatcagtcttccaaacaattaatcagttcctggacttaaccctattcacccacagaggctttttgctatacctctctggaaatgtgatcatgttttttggactctttgcacctttggtgtttcttagtagttatgggaagagtcagcattattctagtgagaagtctgccttccttctttccattctggcttttgttgacatggtagcccgaccatctatgggacttgtagccaacacaaagccaataagacctcgaattcagtatttctttgcggcttccgttgttgcaaatggagtgtgtcatatgctagcacctttatccactacctatgttggattctgtgtctatgcgggattctttggatttgccttcgggtggctcagctccgtattgtttgaaacattgatggaccttgttggaccccagaggttctccagcgctgtgggattggtgaccattgtggaatgctgtcctgtcctcctggggccaccacttttaggtcggctcaatgacatgtatggagactacaaatacacatactgggcatgtggcgtcgtcctaattatttcaggtatctatctcttcattggcatgggcatcaattatcgacttttggcaaaagaacagaaagcaaacgagcagaaaaaggaaagtaaagaggaagagaccagtatagatgttgctgggaagccaaatgaagttaccaaagcagcagaatctccggaccagaaagacacagatggagggcccaaggaggaggaaagtccagtctgaatccatggggctgaagggtaaattgagcagttcatgacccaggatatctgaaaatattctactggcctgtaatctaccagtggtgctcaatgcaaatagtagacatttgtgtggaaatcataccagttgttcattgatgggatttttgtttgactccttaccaatagcctgaatttgaggagggaatgattggtagcaaaggatgggggaaagaagtaggttctgttttgttttgttttaatcttagcttttaatagtgtcataaagattataatatgtgccttaagttttagtctttagaactctagagagccttaacttcttaaaccatttttgctgaattcatctatttcgagtgttgtgttaaaaggaaaaataacaactaacttgtttgaggcaaatctaaaatttaaaattaatcttgcttcattgttacatgtaatatatttcagacattttcactggaagatttatgaacagaaatattggttgaaagttagagattttacaaaatgctgacaaaaatattttcctagcatcagtagatttctggcatatgtttctgctagctatatatttaggaaattcaaagcataaaactttggcaacatcttggctgttctagacacagtgtacttgtcaacccctctcaggtaccttttcttgggatgcttattagaagccaagtaaagtgcttaaggtttgttttcattaaattagctatttctgctcccctgttcaaagatgcattttgagtgtttatagatcactgccctttttgaaatcacctggtattatttttcttactggaaaagttagtattaaaatctacagaactacatatttgtgcctccttggtaaatacaacacatctaattaaatgtagacagatatttcaaacatcagctgaattcacttaagtttttccaaaacctcagttaaactgtgaagctattggaatttttttttcctggaatttttcccctttgattcacagtggtcccatttatatctgcttctagcttagtgctatgtgtgagatatgtgtgtgtttggtgtttttgtttttttgtttttttttttttaaggtttgcaaattaaaaagggccagaaaaatttggcaccaggcaaacgaataaagataggattgggaaagaagttgctaagtgtgcttagttttaataagtaattccttctcttttttcagagaaggccttacagaaaattgttgtgcttagaattgctggatgcatttttaccctccacacaaacctaaaaattttgtgacccctttcacttacctgaaaagtagagaaatggattcagtataaggataaggagggaaggtggaccagaatgaaaactgtaaatatttttttaacctaatatcacttaaatcgaggcagaaagatacagacattcaatgaattatattcaatgcatttaaaataccactgtaattgacagagtaaaagtatagatacaaaaccttgtgtaagaggctgacttttccaaataaacattttttaagaaaacatttcttctcccaaatgtctattttcttgaggaaaatattgctgtgtcttcattttcattaccaggtttcattttgggccttgctaaattgattgaattaaatcctccagcttttgaaccttgatatttgtgtatatgatttattttcatttgaatttctcctttcctcttctttgctgtaaggcaaggaggaggggaattttaaaaccatcttatttgaactgagagcatccagagcagttaaccttaaggaaacaatgaaaaactccctttgtatgcctgggcatcatggcagatagaggaagagtgttagaggagaaaactgctgctgagagtattggcaggcttggcctcagtttggactctgtaattttctttggacccaagtctgtaacctctgcgtacttcttctctcttaccttctataaaaatgaggattactgttggtgagggaataaggaatgtaagtaaaggaaatctgaaaaaataaaagtaaagcaagt

SEQ ID NO: 338809 - DNA, 1503 bp, Artificial Sequence
  derived and/or modified sequence
atgccccccgccgtgggcggccccgtgggctacaccccccccgacggcggctggggctgggccgtggtgatcggcgccttcatcagcatcggcttcagctacgccttccccaagagcatcaccgtgttcttcaaggagatcgagggcatcttccacgccaccaccagcgaggtgagctggatcagcagcatcatgctggccgtgatgtacggcggcggccccatcagcagcatcctggtgaacaagtacggcagcagaatcgtgatgatcgtgggcggctgcctgagcggctgcggcctgatcgccgccagcttctgcaacaccgtgcagcagctgtacgtgtgcatcggcgtgatcggcggcctgggcctggccttcaacctgaaccccgccctgaccatgatcggcaagtacttctacaagagaagacccctggccaacggcctggccatggccggcagccccgtgttcctgtgcaccctggcccccctgaaccaggtgttcttcggcatcttcggctggagaggcagcttcctgatcctgggcggcctgctgctgaactgctgcgtggccggcgccctgatgagacccatcggccccaagcccaccaaggccggcaaggacaagagcaaggccagcctggagaaggccggcaagagcggcgtgaagaaggacctgcacgacgccaacaccgacctgatcggcagacaccccaagcaggagaagagaagcgtgttccagaccatcaaccagttcctggacctgaccctgttcacccacagaggcttcctgctgtacctgagcggcaacgtgatcatgttcttcggcctgttcgcccccctggtgttcctgagcagctacggcaagagccagcactacagcagcgagaagagcgccttcctgctgagcatcctggccttcgtggacatggtggccagacccagcatgggcctggtggccaacaccaagcccatcagacccagaatccagtacttcttcgccgccagcgtggtggccaacggcgtgtgccacatgctggcccccctgagcaccacctacgtgggcttctgcgtgtacgccggcttcttcggcttcgccttcggctggctgagcagcgtgctgttcgagaccctgatggacctggtgggcccccagagattcagcagcgccgtgggcctggtgaccatcgtggagtgctgccccgtgctgctgggcccccccctgctgggcagactgaacgacatgtacggcgactacaagtacacctactgggcctgcggcgtggtgctgatcatcagcggcatctacctgttcatcggcatgggcatcaactacagactgctggccaaggagcagaaggccaacgagcagaagaaggagagcaaggaggaggagaccagcatcgacgtggccggcaagcccaacgaggtgaccaaggccgccgagagccccgaccagaaggacaccgacggcggccccaaggaggaggagagccccgtgtag

SEQ ID NO: 338810 - DNA, 648 bp, Artificial Sequence
  derived and/or modified sequence
atgccccccgccgtgggcggccccgtgggctacaccccccccgacggcggctggggctgggccgtggtgatcggcgccttcatcagcatcggcttcagctacgccttccccaagagcatcaccgtgttcttcaaggagatcgagggcatcttccacgccaccaccagcgaggtgagctggatcagcagcatcatgctggccgtgatgtacggcggcggccccatcagcagcatcctggtgaacaagtacggcagcagaatcgtgatgatcgtgggcggctgcctgagcggctgcggcctgatcgccgccagcttctgcaacaccgtgcagcagctgtacgtgtgcatcggcgtgatcggcggcctgggcctggccttcaacctgaaccccgccctgaccatgatcggcaagtacttctacaagagaagacccctggccaacggcctggccatggccggcagccccgtgttcctgtgcaccctggcccccctgaaccaggtgttcttcggcatcttcggctggagaggcagcttcctgatcctgggcggcctgctgctgaactgctgcgtggccggcgccctgatgagacccatcggccccaagcccaccaaggccggcaaggacaagagcaaggccagcctggagtag

SEQ ID NO: 338811 - DNA, 1293 bp, Artificial Sequence
  derived and/or modified sequence
atgccccccgccgtgggcggccccgtgggctacaccccccccgacggcggctggggctgggccgtggtgatcggcgccttcatcagcatcggcttcagctacgccttccccaagagcatcaccgtgttcttcaaggagatcgagggcatcttccacgccaccaccagcgaggtgagctggatcagcagcatcatgctggccgtgatgtacggcggcggccccatcagcagcatcctggtgaacaagtacggcagcagaatcgtgatgatcgtgggcggctgcctgagcggctgcggcctgatcgccgccagcttctgcaacaccgtgcagcagctgtacgtgtgcatcggcgtgatcggcggcctgggcctggccttcaacctgaaccccgccctgaccatgatcggcaagtacttctacaagagaagacccctggccaacggcctggccatggccggcagccccgtgttcctgtgcaccctggcccccctgaaccaggtgttcttcggcatcttcggctggagaggcagcttcctgatcctgggcggcctgctgctgaactgctgcgtggccggcgccctgatgagacccatcggccccaagcccaccaaggccggcaaggacaagagcaaggccagcctggagaaggccggcaagagcggcgtgaagaaggacctgcacgacgccaacaccgacctgatcggcagacaccccaagcaggagaagagaagcgtgttccagaccatcaaccagttcctggacctgaccctgttcacccacagaggcttcctgctgtacctgagcggcaacgtgatcatgttcttcggcctgttcgcccccctggtgttcctgagcagctacggcaagagccagcactacagcagcgagaagagcgccttcctgctgagcatcctggccttcgtggacatggtggccagacccagcatgggcctggtggccaacaccaagcccatcagacccagaatccagtacttcttcgccgccagcgtggtggccaacggcgtgtgccacatgctggcccccctgagcaccacctacgtgggcttctgcgtgtacgccggcttcttcggcttcgccttcggctggctgagcagcgtgctgttcgagaccctgatggacctggtgggcccccagagattcagcagcgccgtgggcctggtgaccatcgtggagtgctgccccgtgctgctgggcccccccctgctgggcatcgtgtacctgcccaccaacgtgggcctgctgcagaacaagcacgtgagatgggagtgctag

SEQ ID NO: 338812 - DNA, 891 bp, Artificial Sequence
  derived and/or modified sequence
atgccccccgccgtgggcggccccgtgggctacaccccccccgacggcggctggggctgggccgtggtgatcggcgccttcatcagcatcggcttcagctacgccttccccaagagcatcaccgtgttcttcaaggagatcgagggcatcttccacgccaccaccagcgaggtgagctggatcagcagcatcatgctggccgtgatgtacggcggcggccccatcagcagcatcctggtgaacaagtacggcagcagaatcgtgatgatcgtgggcggctgcctgagcggctgcggcctgatcgccgccagcttctgcaacaccgtgcagcagctgtacgtgtgcatcggcgtgatcggcggcctgggcctggccttcaacctgaaccccgccctgaccatgatcggcaagtacttctacaagagaagacccctggccaacggcctggccatggccggcagccccgtgttcctgtgcaccctggcccccctgaaccaggtgttcttcggcatcttcggctggagaggcagcttcctgatcctgggcggcctgctgctgaactgctgcgtggccggcgccctgatgagacccatcggccccaagcccaccaaggccggcaaggacaagagcaaggccagcctggagaaggccggcaagagcggcgtgaagaaggacctgcacgacgccaacaccgacctgatcggcagacaccccaagcaggagaagagaagcgtgttccagaccatcaaccagttcctggacctgaccctgttcacccacagaggcttcctgctgtacctgagcggcaacgtgatcatgttcttcggcctgttcgcccccctggtgttcctgagcagctacggcaagagccagcactacagcagcgagtag

SEQ ID NO: 338813 - DNA, 1371 bp, Artificial Sequence
  derived and/or modified sequence
atgccccccgccgtgggcggccccgtgggctacaccccccccgacggcggctggggctgggccgtggtgatcggcgccttcatcagcatcggcttcagctacgccttccccaagagcatcaccgtgttcttcaaggagatcgagggcatcttccacgccaccaccagcgaggtgagctggatcagcagcatcatgctggccgtgatgtacggcggcggccccatcagcagcatcctggtgaacaagtacggcagcagaatcgtgatgatcgtgggcggctgcctgagcggctgcggcctgatcgccgccagcttctgcaacaccgtgcagcagctgtacgtgtgcatcggcgtgatcggcggcctgggcctggccttcaacctgaaccccgccctgaccatgatcggcaagtacttctacaagagaagacccctggccaacggcctggccatggccggcagccccgtgttcctgtgcaccctggcccccctgaaccaggtgttcttcggcatcttcggctggagaggcagcttcctgatcctgggcggcctgctgctgaactgctgcgtggccggcgccctgatgagacccatcggccccaagcccaccaaggccggcaaggacaagagcaaggccagcctggagaaggccggcaagagcggcgtgaagaaggacctgcacgacgccaacaccgacctgatcggcagacaccccaagcaggagaagagaagcgtgttccagaccatcaaccagttcctggacctgaccctgttcacccacagaggcttcctgctgtacctgagcggcaacgtgatcatgttcttcggcctgttcgcccccctggtgttcctgagcagctacggcaagagccagcactacagcagcgagaagagcgccttcctgctgagcatcctggccttcgtggacatggtggccagacccagcatgggcctggtggccaacaccaagcccatcagacccagaatccagtacttcttcgccgccagcgtggtggccaacggcgtgtgccacatgctggcccccctgagcaccacctacgtgggcttctgcgtgtacgccggcttcttcggcttcgccttcggctggctgagcagcgtgctgttcgagaccctgatggacctggtgggcccccagagattcagcagcgccgtgggcctggtgaccatcgtggagtgctgccccgtgctgctgggcccccccctgctgggcagactgaacgacatgtacggcgactacaagtacacctactgggcctgcggcgtggtgctgatcatcagcggcatctacctgttcatcggcatgggcatcaactacagactgctggccaaggagcagaaggccaacgagtag

SEQ ID NO: 338814 - DNA, 5018 bp, Artificial Sequence
  derived and/or modified sequence
gcccgggactatcccttcgcggtgtagcggcagccggagacctggctgaggaggcaaccgcgtagacacctccctgcttagaaaacaaacactgaaccagaccgatcccagttggagggttcgaaaatgttccagacagcctgtcgggaggggttgttgttgctgttggactaaatagctattcctgattggtcatgtatagggttttttaaggcgggtggggggaggagggggtagaggaaaggctccaaacacctgcaggttgggggcggaaagctgtttgcgattccctggactggttggtcggggacaggaggtaattcccagccattgacccccatttctctctctccctccctcttgccctgcctctttctctccacccctatctttcctggaaactcgctttgggcgcggcagatcgcccaggaccacaccgcagcgtaactgcaggcctctcagcgaaaaagggggaaagcaaagacccgggtgtgcatcctcttcctcggcttccgcccctttccggcggagtggagatcctattcagaggggccggtctctctaaatatgccccaggatgaccgagcggccgccgagcgaggcggctcgcagtgacccccagctagagggacgggacgcggccgaggccagcatggcccccccgcacctggtcctgctgaacggcgtcgccaaggagacgagccgcgcggccgcagcggagcccccagtcatcgaactgggcgcgcgcggaggcccggggggcggccctgccggtgggggcggcgccgcgagagacttaaagggccgcgacgcggcgacggccgaagcgcgccatcgggtgcccaccaccgagctgtgcagacctcccgggcccgccccggcccccgcgcccgcctcggttacagcggagctgcccggcgacggccgcatggtgcagctgagtcctcccgcgctggctgcccccgccgcccccggccgcgcgctgctctacagcctcagccagccgctggcctctctcggcagcgggttctttggggagccggatgccttccctatgttcaccaccaacaatcgagtgaagaggagaccttccccctatgagatggagattactgatggtccccacaccaaagttgtgcggcgtatcttcaccaacagccgggagcgatggcggcagcagaatgtgaacggggcctttgccgagctccgcaagctgatccccacacatcccccggacaagaagctcagcaagaatgagatcctccgcctggccatgaagtatatcaacttcttggccaagctgctcaatgaccaggaggaggagggcacccagcgggccaagactggcaaggaccctgtggtgggggctggtgggggtggaggtgggggagggggcggcgcgcccccagatgacctcctgcaagacgtgctttcccccaactccagctgcggcagctccctggatggggcagccagcccggacagctacacggaggagcccgcgcccaaacacacggcccgcagcctccatcctgccatgctgcctgccgccgatggagccggccctcggtgatgggtctgggccaccaggatcagccaggagggcgttcttaggctgctgggatggtgggcttcagggcaggtggggtgagaattgggcggctctgaagcaaggcggtggacttgaactttcctggatgtctgaactttgggaagcctttactgaccctggggctggcttttctgtttcctgtaccagtaggagatcagaaaaatggagcaaagtggtaggtactttttgtgaagacggcacggtcttccctcttccctcagtcccaaatccttcccaagtaagaggctggagttgtcactgcttttggcctggagtttgggatccctgtctttcctaagacctggggttgtcagctctcatctgaggcatccagcagtctctgccttgcctttagcccctcccaagctggctggggtggcctgtgtggccacttctgtccatatttataggtacccaatagctgcccatttcgtgagccccatcttcacccaggcctatgttgatccatccagcttgccagatgctgcagagtcacaagcctcgaggtgccttcttcagggcctggttgaagaagatgatcagtggacagtctgctctagatgagctgggccggagggtcaggaaacccagtcgcccttacttcttgccctggggatcaaagttctgctttctccccaatgagacttgccttcctaagcctgtggctgtggagacaatgtctgcagccctgagaaagccctgtcgggctttgtgtgaaggcagagaaagggacaatgatagtagagtgatatggagcaagagatattttgggcatgtgggcttcaactcctcgacatcactgttcatgctggcgagtgaatgccagtgtgctgatgggcgtacgctggtgctgagtagatgcgcagccccatctgtgcattctcctggatgcttagagggatttctttgctgtaagatgtctgtttgctgatggtctggtctatgttccgaattgagcacaaaacctgtcctatgaatgctttgcatttggaatttttgcttgacttcagttattggtggaatctttagcgctcaataggaccaggatccagcctcacttctagggtatgggaaatccaatcagagaccaggccctggctaagacccaaacatatgcacattcacttagcagaaccttaaacacccctcagttgtgcagcttttggtcatcaagggtgcgtctgggaggttggtttaatgcaatagaagtgctcccctctgaaagttgtacatgaaatttttgtaaatcacatccttatccttcatcttttaaagaaataaccactgcaagtccttttgtaaagtgaagaatccttttgtagaatgaaccactgccccttcattgatttcctgtgtcaatccagatggtgggatgtggttttcttaaggtgaggcctgtctgtgacctgcatctaagcccatgggacaaattgcacagaagtcctgtatgtctgtcattgtacccttaagtcaccctagccctctccctctaggctctgccttcgaggtcagaggagagatagcctgtggccctgtcctgccatgcaagaactcatcactgtggctgtctggaaagcccccccttatagtttgggcttcagcctagtggcttgtcctcaccatgatggggccctaattcagccatgtacagacagagaatatgtctgctcctttccccttccttttaagtaaggtccaattctcgagcttggggcaacattgttcacctttgtagcactcaggctctccattcaatttcaggctccccagatcatgttttggtgaaaattagggttggttcctttccaacgtttggaagatcctgtgaggagccccatctgtctaaagatagagtcattgctgtaggatctaaggctgtttgcttcaccgtggattcgcttgagttaggaatgagaagtagccacagtatggatgggtggatgggttttatgagatggatcacatattttattaagaactcaaacttctggctccctcttctttcagacttgccatgtgactctggcttggcctatctcctagggctatggtgtggactgaatgggatcatgaaagtagacagttttgagaacgtaaagaactttttcttttccctcaatctcaatcctgcagtggggtttcgcagcctgagtccacgacctaggcagtaggccggtgtgcctgactgcccagcatttgggtaatttagattgtaaaccgctttggcctgagttattgagattgtcctcatttctccagattatctatttgtgtgtgtgtgtgtgtgtgtgtgagagacggtgtcttgttctgtcactcaggctggagtacagtggtgccatcattgctgtctgcagccttgaactctgggctcaagcaatcctctcacctcagcctcccgagtagggaggaccacaggtgtgagccaccacacctggctaatttttacttttttttttttttggtagagatggagtcttgctatattgcccaggctggtcttgaagtcctggcttcaggcaattctcctgcctttgcctccagaagcactgggatcacaggtgtcagccattgcacccagcccagattgtcttaatttctatcttgttccaaggccagggacagtaataagaatggaaaagagatatgggaacactggcagactgtgtaaaatgtaatgcaactacccaaaacaagcctggtaggaaagggcaagtctttaggtctttgtaagaactaaagaagatctgtaatttttattttcaccctctgtaccccatgaccttatccttcctctccttccttgttacccatgaaaaactggcaacattccaagaatagcatctgtacaaaggggaaagaacataaaggtaaaacaaaacaaaacaacattttgagaacaaagatgaccataaccactgaagggaatcacatcttttaagacaaattcatattcttttatttgttatggcagatgacaagatggtacaacctttattcttttccaaaataaaacaaagggcacagcatctgtagtcagccgacaactatttcggccttttgggggtgggtctggccgtacttgtgatttcgatggtacgtgaccctctgctgaagacttgccccctgcccgtgtacatagtgcattgtttctgtgggcgggcccagcactttccgtcaacgttgtactgtatgtgatgaattgcgttggtctctgcatttttctgcagaagaggagtaaccgctccaggtaccttgacctttgtacagcccagaggccaacactgtgggtgtgtgactctttagcaaaaaaaacccatgtggtgatgatgtgtatatatatgtgaggatgtatcgggaagatttctaaataaaagttttacaaaggggaaaaaaaaaaaaaaaa

SEQ ID NO: 338815 - DNA, 5001 bp, Artificial Sequence
  derived and/or modified sequence
gcccgggactatcccttcgcggtgtagcggcagccggagacctggctgaggaggcaaccgcgtagacacctccctgcttagaaaacaaacactgaaccagaccgatcccagttggagggttcgaaaatgttccagacagcctgtcgggaggggttgttgttgctgttggactaaatagctattcctgattggtcatgtatagggttttttaaggcgggtggggggaggagggggtagaggaaaggctccaaacacctgcaggttgggggcggaaagctgtttgcgattccctggactggttggtcggggacaggaggtaattcccagccattgacccccatttctctctctccctccctcttgccctgcctctttctctccacccctatctttcctggaaactcgctttgggcgcggcagatcgcccaggaccacaccgcagcgtaactgcaggcctctcagcgaaaaagggggaaagcaaagacccgggtgtgcatcctcttcctcggcttccgcccctttccggcggagtggagatcctattcagaggggccggtctctctaaatatgccccaggatgaccgagcggccgccgagcgaggcggctcgcagtgacccccagctagagggacgggacgcggccgaggccagcatggcccccccgcacctggtcctgctgaacggcgtcgccaaggagacgagccgcgcggccgcagcggagcccccagtcatcgaactgggcgcgcgcggaggcccggggggcggccctgccggtgggggcggcgccgcgagagacttaaagggccgcgacgcggcgacggccgaagcgcgccatcgggtgcccaccaccgagctgtgcagacctcccgggcccgccccggcccccgcgcccgcctcggttacagcggagctgcccggcgacggccgcatggtgcagctgagtcctcccgcgctggctgcccccgccgcccccggccgcgcgctgctctacagcctcagccagccgctggcctctctcggcagcgggttctttggggagccggatgccttccctatgttcaccaccaacaatcgagtgaagaggagaccttccccctatgagatggagattactgatggtccccacaccaaagttgtgcggcgtatcttcaccaacagccgggagcgatggcggcagcagaatgtgaacggggcctttgccgagctccgcaagctgatccccacacatcccccggacaagaagctcagcaagaatgagatcctccgcctggccatgaagtatatcaacttcttggccaagctgctcaatgaccaggaggaggagggcacccagcgggccaagactggcaaggaccctgtggtgggggctggtgggggtggaggtgggggagggggcggcgcgcccccagatgacctcctgcaagacgtgctttcccccaactccagctgcggcagctccctggatggggcagccagcccggacagctacacggaggagcccgcgcccaaacacacggcccgcagcctccatcctgccatgctgcctgccgccgatggagccggccctcggtgatgggtctgggccaccaggatcagccaggagggcgttcttaggctgctgggatggtgggcttcagggcaggtggggtgagaattgggcggctctgaagcaaggcggtggacttgaactttcctggatgtctgaactttgggaagcctttactgaccctggggctggcttttctgtttcctgtaccagtaggagatcagaaaaatggagcaaagtggtaggtactttttgtgaagacggcacggtcttccctcttccctcagtcccaaatccttcccaagtaagaggctggagttgtcactgcttttggcctggagtttgggatccctgtctttcctaagacctggggttgtcagctctcatctgaggcatccagcagtctctgccttgcctttagcccctcccaagctggctggggtggcctgtgtggccacttctgtccatatttataggtacccaatagctgcccatttcgtgagccccatcttcacccaggcctatgttgatccatccagcttgccagatgctgcagagtcacaagcctcgaggtgccttcttcagggcctggttgaagaagatgatcagtggacagtctgctctagatgagctgggccggagggtcaggaaacccagtcgcccttacttcttgccctggggatcaaagttctgctttctccccaatgagacttgccttcctaagcctgtggctgtggagacaatgtctgcagccctgagaaagccctgtcgggctttgtgtgaaggcagagaaagggacaatgatagtagagtgatatggagcaagagatattttgggcatgtgggcttcaactcctcgacatcactgttcatgctggcgagtgaatgccagtgtgctgatgggcgtacgctggtgctgagtagatgcgcagccccatctgtgcattctcctggatgcttagagggatttctttgctgtaagatgtctgtttgctgatggtctggtctatgttccgaattgagcacaaaacctgtcctatgaatgctttgcatttggaatttttgcttgacttcagttattggtggaatctttagcgctcaataggaccaggatccagcctcacttctagggtatgggaaatccaatcagagaccaggccctggctaagacccaaacatatgcacattcacttagcagaaccttaaacacccctcagttgtgcagcttttggtcatcaagggtgcgtctgggaggttggtttaatgcaatagaagtgctcccctctgaaagttgtacatgaaatttttgtaaatcacatccttatccttcatcttttaaagaaataaccactgcaagtccttttgtaaagtgaagaatccttttgtagaatgaaccactgccccttcattgatttcctgtgtcaatccagatggtgggatgtggttttcttaaggtgaggcctgtctgtgacctgcatctaagcccatgggacaaattgcacagaagtcctgtatgtctgtcattgtacccttaagtcaccctagccctctccctctaggctctgccttcgaggtcagaggagagatagcctgtggccctgtcctgccatgcaagaactcatcactgtggctgtctggaaagcccccccttatagtttgggcttcagcctagtggcttgtcctcaccatgatggggccctaattcagccatgtacagacagagaatatgtctgctcctttccccttccttttaagtaaggtccaattctcgagcttggggcaacattgttcacctttgtagcactcaggctctccattcaatttcaggctccccagatcatgttttggtgaaaattagggttggttcctttccaacgtttggaagatcctgtgaggagccccatctgtctaaagatagagtcattgctgtaggatctaaggctgtttgcttcaccgtggattcgcttgagttaggaatgagaagtagccacagtatggatgggtggatgggttttatgagatggatcacatattttattaagaactcaaacttctggctccctcttctttcagacttgccatgtgactctggcttggcctatctcctagggctatggtgtggactgaatgggatcatgaaagtagacagttttgagaacgtaaagaactttttcttttccctcaatctcaatcctgcagtggggtttcgcagcctgagtccacgacctaggcagtaggccggtgtgcctgactgcccagcatttgggtaatttagattgtaaaccgctttggcctgagttattgagattgtcctcatttctccagattatctatttgtgtgtgtgtgtgtgtgtgtgtgagagacggtgtcttgttctgtcactcaggctggagtacagtggtgccatcattgctgtctgcagccttgaactctgggctcaagcaatcctctcacctcagcctcccgagtagggaggaccacaggtgtgagccaccacacctggctaatttttacttttttttttttttggtagagatggagtcttgctatattgcccaggctggtcttgaagtcctggcttcaggcaattctcctgcctttgcctccagaagcactgggatcacaggtgtcagccattgcacccagcccagattgtcttaatttctatcttgttccaaggccagggacagtaataagaatggaaaagagatatgggaacactggcagactgtgtaaaatgtaatgcaactacccaaaacaagcctggtaggaaagggcaagtctttaggtctttgtaagaactaaagaagatctgtaatttttattttcaccctctgtaccccatgaccttatccttcctctccttccttgttacccatgaaaaactggcaacattccaagaatagcatctgtacaaaggggaaagaacataaaggtaaaacaaaacaaaacaacattttgagaacaaagatgaccataaccactgaagggaatcacatcttttaagacaaattcatattcttttatttgttatggcagatgacaagatggtacaacctttattcttttccaaaataaaacaaagggcacagcatctgtagtcagccgacaactatttcggccttttgggggtgggtctggccgtacttgtgatttcgatggtacgtgaccctctgctgaagacttgccccctgcccgtgtacatagtgcattgtttctgtgggcgggcccagcactttccgtcaacgttgtactgtatgtgatgaattgcgttggtctctgcatttttctgcagaagaggagtaaccgctccaggtaccttgacctttgtacagcccagaggccaacactgtgggtgtgtgactctttagcaaaaaaaacccatgtggtgatgatgtgtatatatatgtgaggatgtatcgggaagatttctaaataaaagttttacaaaggg

SEQ ID NO: 338816 - DNA, 5008 bp, Artificial Sequence
  derived and/or modified sequence
gcccgggactatcccttcgcggtgtagcggcagccggagacctggctgaggaggcaaccgcgtagacacctccctgcttagaaaacaaacactgaaccagaccgatcccagttggagggttcgaaaatgttccagacagcctgtcgggaggggttgttgttgctgttggactaaatagctattcctgattggtcatgtatagggttttttaaggcgggtggggggaggagggggtagaggaaaggctccaaacacctgcaggttgggggcggaaagctgtttgcgattccctggactggttggtcggggacaggaggtaattcccagccattgacccccatttctctctctccctccctcttgccctgcctctttctctccacccctatctttcctggaaactcgctttgggcgcggcagatcgcccaggaccacaccgcagcgtaactgcaggcctctcagcgaaaaagggggaaagcaaagacccgggtgtgcatcctcttcctcggcttccgcccctttccggcggagtggagatcctattcagaggggccggtctctctaaatatgccccaggatgaccgagcggccgccgagcgaggcggctcgcagtgacccccagctagagggacgggacgcggccgaggccagcatggcccccccgcacctggtcctgctgaacggcgtcgccaaggagacgagccgcgcggccgcagcggagcccccagtcatcgaactgggcgcgcgcggaggcccggggggcggccctgccggtgggggcggcgccgcgagagacttaaagggccgcgacgcggcgacggccgaagcgcgccatcgggtgcccaccaccgagctgtgcagacctcccgggcccgccccggcccccgcgcccgcctcggttacagcggagctgcccggcgacggccgcatggtgcagctgagtcctcccgcgctggctgcccccgccgcccccggccgcgcgctgctctacagcctcagccagccgctggcctctctcggcagccacagcgggttctttggggagccggatgccttccctatgttcaccaccaacaatcgagtgaagaggagaccttccccctatgagatggagattactgatggtccccacaccaaagttgtgcggcgtatcttcaccaacagccgggagcgatggcggcagcagaatgtgaacggggcctttgccgagctccgcaagctgatccccacacatcccccggacaagaagctcagcaagaatgagatcctccgcctggccatgaagtatatcaacttcttggccaagctgctcaatgaccaggaggaggagggcacccagcgggccaagactggcaaggaccctgtggtgggggctggtgggggtggaggtgggggagggggcggcgcgcccccagatgacctcctgcaagacgtgctttcccccaactccagctgcggcagctccctggatggggcagccagcccggacagctacacggaggagcccgcgcccaaacacacggcccgcagcctccatcctgccatgctgcctgccgccgatggagccggccctcggtgatgggtctgggccaccaggatcagccaggagggcgttcttaggctgctgggatggtgggcttcagggcaggtggggtgagaattgggcggctctgaagcaaggcggtggacttgaactttcctggatgtctgaactttgggaagcctttactgaccctggggctggcttttctgtttcctgtaccagtaggagatcagaaaaatggagcaaagtggtaggtactttttgtgaagacggcacggtcttccctcttccctcagtcccaaatccttcccaagtaagaggctggagttgtcactgcttttggcctggagtttgggatccctgtctttcctaagacctggggttgtcagctctcatctgaggcatccagcagtctctgccttgcctttagcccctcccaagctggctggggtggcctgtgtggccacttctgtccatatttataggtacccaatagctgcccatttcgtgagccccatcttcacccaggcctatgttgatccatccagcttgccagatgctgcagagtcacaagcctcgaggtgccttcttcagggcctggttgaagaagatgatcagtggacagtctgctctagatgagctgggccggagggtcaggaaacccagtcgcccttacttcttgccctggggatcaaagttctgctttctccccaatgagacttgccttcctaagcctgtggctgtggagacaatgtctgcagccctgagaaagccctgtcgggctttgtgtgaaggcagagaaagggacaatgatagtagagtgatatggagcaagagatattttgggcatgtgggcttcaactcctcgacatcactgttcatgctggcgagtgaatgccagtgtgctgatgggcgtacgctggtgctgagtagatgcgcagccccatctgtgcattctcctggatgcttagagggatttctttgctgtaagatgtctgtttgctgatggtctggtctatgttccgaattgagcacaaaacctgtcctatgaatgctttgcatttggaatttttgcttgacttcagttattggtggaatctttagcgctcaataggaccaggatccagcctcacttctagggtatgggaaatccaatcagagaccaggccctggctaagacccaaacatatgcacattcacttagcagaaccttaaacacccctcagttgtgcagcttttggtcatcaagggtgcgtctgggaggttggtttaatgcaatagaagtgctcccctctgaaagttgtacatgaaatttttgtaaatcacatccttatccttcatcttttaaagaaataaccactgcaagtccttttgtaaagtgaagaatccttttgtagaatgaaccactgccccttcattgatttcctgtgtcaatccagatggtgggatgtggttttcttaaggtgaggcctgtctgtgacctgcatctaagcccatgggacaaattgcacagaagtcctgtatgtctgtcattgtacccttaagtcaccctagccctctccctctaggctctgccttcgaggtcagaggagagatagcctgtggccctgtcctgccatgcaagaactcatcactgtggctgtctggaaagcccccccttatagtttgggcttcagcctagtggcttgtcctcaccatgatggggccctaattcagccatgtacagacagagaatatgtctgctcctttccccttccttttaagtaaggtccaattctcgagcttggggcaacattgttcacctttgtagcactcaggctctccattcaatttcaggctccccagatcatgttttggtgaaaattagggttggttcctttccaacgtttggaagatcctgtgaggagccccatctgtctaaagatagagtcattgctgtaggatctaaggctgtttgcttcaccgtggattcgcttgagttaggaatgagaagtagccacagtatggatgggtggatgggttttatgagatggatcacatattttattaagaactcaaacttctggctccctcttctttcagacttgccatgtgactctggcttggcctatctcctagggctatggtgtggactgaatgggatcatgaaagtagacagttttgagaacgtaaagaactttttcttttccctcaatctcaatcctgcagtggggtttcgcagcctgagtccacgacctaggcagtaggccggtgtgcctgactgcccagcatttgggtaatttagattgtaaaccgctttggcctgagttattgagattgtcctcatttctccagattatctatttgtgtgtgtgtgtgtgtgtgtgtgagagacggtgtcttgttctgtcactcaggctggagtacagtggtgccatcattgctgtctgcagccttgaactctgggctcaagcaatcctctcacctcagcctcccgagtagggaggaccacaggtgtgagccaccacacctggctaatttttacttttttttttttttggtagagatggagtcttgctatattgcccaggctggtcttgaagtcctggcttcaggcaattctcctgcctttgcctccagaagcactgggatcacaggtgtcagccattgcacccagcccagattgtcttaatttctatcttgttccaaggccagggacagtaataagaatggaaaagagatatgggaacactggcagactgtgtaaaatgtaatgcaactacccaaaacaagcctggtaggaaagggcaagtctttaggtctttgtaagaactaaagaagatctgtaatttttattttcaccctctgtaccccatgaccttatccttcctctccttccttgttacccatgaaaaactggcaacattccaagaatagcatctgtacaaaggggaaagaacataaaggtaaaacaaaacaaaacaacattttgagaacaaagatgaccataaccactgaagggaatcacatcttttaagacaaattcatattcttttatttgttatggcagatgacaagatggtacaacctttattcttttccaaaataaaacaaagggcacagcatctgtagtcagccgacaactatttcggccttttgggggtgggtctggccgtacttgtgatttcgatggtacgtgaccctctgctgaagacttgccccctgcccgtgtacatagtgcattgtttctgtgggcgggcccagcactttccgtcaacgttgtactgtatgtgatgaattgcgttggtctctgcatttttctgcagaagaggagtaaccgctccaggtaccttgacctttgtacagcccagaggccaacactgtgggtgtgtgactctttagcaaaaaaaacccatgtggtgatgatgtgtatatatatgtgaggatgtatcgggaagatttctaaataaaagttttacaaagggg

SEQ ID NO: 338817 - DNA, 4641 bp, Artificial Sequence
  derived and/or modified sequence
cgttttcttcgttgcgtacgattgtgctccgttggtgttctcagcagggatctgattctatcgcccaggaccacaccgcagcgtaactgcaggcctctcagcgaaaaagggggaaagcaaagacccgggtgtgcatcctcttcctcggcttccgcccctttccggcggagtggagatcctattcagaggggccggtctctctaaatatgccccaggatgaccgagcggccgccgagcgaggcggctcgcagtgacccccagctagagggacgggacgcggccgaggccagcatggcccccccgcacctggtcctgctgaacggcgtcgccaaggagacgagccgcgcggccgcagcggagcccccagtcatcgaactgggcgcgcgcggaggcccggggggcggccctgccggtgggggcggcgccgcgagagacttaaagggccgcgacgcggcgacggccgaagcgcgccatcgggtgcccaccaccgagctgtgcagacctcccgggcccgccccggcccccgcgcccgcctcggttacagcggagctgcccggcgacggccgcatggtgcagctgagtcctcccgcgctggctgcccccgccgcccccggccgcgcgctgctctacagcctcagccagccgctggcctctctcggcagcgggttctttggggagccggatgccttccctatgttcaccaccaacaatcgagtgaagaggagaccttccccctatgagatggagattactgatggtccccacaccaaagttgtgcggcgtatcttcaccaacagccgggagcgatggcggcagcagaatgtgaacggggcctttgccgagctccgcaagctgatccccacacatcccccggacaagaagctcagcaagaatgagatcctccgcctggccatgaagtatatcaacttcttggccaagctgctcaatgaccaggaggaggagggcacccagcgggccaagactggcaaggaccctgtggtgggggctggtgggggtggaggtgggggagggggcggcgcgcccccagatgacctcctgcaagacgtgctttcccccaactccagctgcggcagctccctggatggggcagccagcccggacagctacacggaggagcccgcgcccaaacacacggcccgcagcctccatcctgccatgctgcctgccgccgatggagccggccctcggtgatgggtctgggccaccaggatcagccaggagggcgttcttaggctgctgggatggtgggcttcagggcaggtggggtgagaattgggcggctctgaagcaaggcggtggacttgaactttcctggatgtctgaactttgggaagcctttactgaccctggggctggcttttctgtttcctgtaccagtaggagatcagaaaaatggagcaaagtggtaggtactttttgtgaagacggcacggtcttccctcttccctcagtcccaaatccttcccaagtaagaggctggagttgtcactgcttttggcctggagtttgggatccctgtctttcctaagacctggggttgtcagctctcatctgaggcatccagcagtctctgccttgcctttagcccctcccaagctggctggggtggcctgtgtggccacttctgtccatatttataggtacccaatagctgcccatttcgtgagccccatcttcacccaggcctatgttgatccatccagcttgccagatgctgcagagtcacaagcctcgaggtgccttcttcagggcctggttgaagaagatgatcagtggacagtctgctctagatgagctgggccggagggtcaggaaacccagtcgcccttacttcttgccctggggatcaaagttctgctttctccccaatgagacttgccttcctaagcctgtggctgtggagacaatgtctgcagccctgagaaagccctgtcgggctttgtgtgaaggcagagaaagggacaatgatagtagagtgatatggagcaagagatattttgggcatgtgggcttcaactcctcgacatcactgttcatgctggcgagtgaatgccagtgtgctgatgggcgtacgctggtgctgagtagatgcgcagccccatctgtgcattctcctggatgcttagagggatttctttgctgtaagatgtctgtttgctgatggtctggtctatgttccgaattgagcacaaaacctgtcctatgaatgctttgcatttggaatttttgcttgacttcagttattggtggaatctttagcgctcaataggaccaggatccagcctcacttctagggtatgggaaatccaatcagagaccaggccctggctaagacccaaacatatgcacattcacttagcagaaccttaaacacccctcagttgtgcagcttttggtcatcaagggtgcgtctgggaggttggtttaatgcaatagaagtgctcccctctgaaagttgtacatgaaatttttgtaaatcacatccttatccttcatcttttaaagaaataaccactgcaagtccttttgtaaagtgaagaatccttttgtagaatgaaccactgccccttcattgatttcctgtgtcaatccagatggtgggatgtggttttcttaaggtgaggcctgtctgtgacctgcatctaagcccatgggacaaattgcacagaagtcctgtatgtctgtcattgtacccttaagtcaccctagccctctccctctaggctctgccttcgaggtcagaggagagatagcctgtggccctgtcctgccatgcaagaactcatcactgtggctgtctggaaagcccccccttatagtttgggcttcagcctagtggcttgtcctcaccatgatggggccctaattcagccatgtacagacagagaatatgtctgctcctttccccttccttttaagtaaggtccaattctcgagcttggggcaacattgttcacctttgtagcactcaggctctccattcaatttcaggctccccagatcatgttttggtgaaaattagggttggttcctttccaacgtttggaagatcctgtgaggagccccatctgtctaaagatagagtcattgctgtaggatctaaggctgtttgcttcaccgtggattcgcttgagttaggaatgagaagtagccacagtatggatgggtggatgggttttatgagatggatcacatattttattaagaactcaaacttctggctccctcttctttcagacttgccatgtgactctggcttggcctatctcctagggctatggtgtggactgaatgggatcatgaaagtagacagttttgagaacgtaaagaactttttcttttccctcaatctcaatcctgcagtggggtttcgcagcctgagtccacgacctaggcagtaggccggtgtgcctgactgcccagcatttgggtaatttagattgtaaaccgctttggcctgagttattgagattgtcctcatttctccagattatctatttgtgtgtgtgtgtgtgtgtgtgtgagagacggtgtcttgttctgtcactcaggctggagtacagtggtgccatcattgctgtctgcagccttgaactctgggctcaagcaatcctctcacctcagcctcccgagtagggaggaccacaggtgtgagccaccacacctggctaatttttacttttttttttttttggtagagatggagtcttgctatattgcccaggctggtcttgaagtcctggcttcaggcaattctcctgcctttgcctccagaagcactgggatcacaggtgtcagccattgcacccagcccagattgtcttaatttctatcttgttccaaggccagggacagtaataagaatggaaaagagatatgggaacactggcagactgtgtaaaatgtaatgcaactacccaaaacaagcctggtaggaaagggcaagtctttaggtctttgtaagaactaaagaagatctgtaatttttattttcaccctctgtaccccatgaccttatccttcctctccttccttgttacccatgaaaaactggcaacattccaagaatagcatctgtacaaaggggaaagaacataaaggtaaaacaaaacaaaacaacattttgagaacaaagatgaccataaccactgaagggaatcacatcttttaagacaaattcatattcttttatttgttatggcagatgacaagatggtacaacctttattcttttccaaaataaaacaaagggcacagcatctgtagtcagccgacaactatttcggccttttgggggtgggtctggccgtacttgtgatttcgatggtacgtgaccctctgctgaagacttgccccctgcccgtgtacatagtgcattgtttctgtgggcgggcccagcactttccgtcaacgttgtactgtatgtgatgaattgcgttggtctctgcatttttctgcagaagaggagtaaccgctccaggtaccttgacctttgtacagcccagaggccaacactgtgggtgtgtgactctttagcaaaaaaaacccatgtggtgatgatgtgtatatatatgtgaggatgtatcgggaagatttctaaataaaagttttacaaagggg

SEQ ID NO: 338818 - DNA, 465 bp, Artificial Sequence
  derived and/or modified sequence
atgggacaggaggaagagttactgaggatcgctaagaaactcgagaagatggttgcgcgaaagaacaccgagggcgccctggacctgctcaagaagctgcactcttgccaaatgtctatccagctgcttcagaccacaaggataggcgttgcagtcaacggcgttcggaaacactgttcagacaaggaagtggtttcactggccaaagtgctgattaagaattggaaacgtctgctcgacagccccgggcctccaaagggggagaagggtgaagagagagagaaagcaaaaaaaaaagagaagggtctggaatgctccgattggaaacccgaggcaggactctctccgccgagaaagaagcgggaagaccctaaaaccaggcgtgacagcgtcgattccaaatcttcggcctcaagcagcccaaagagaccgtcggttgagagggcttgttccctcatgcagtag

SEQ ID NO: 338819 - DNA, 465 bp, Artificial Sequence
  derived and/or modified sequence
atgggccaggaggaggagctgctgcgcatcgccaagaagctggagaagatggtggccaggaagaacacagaaggagccctggacctgctgaagaagctgcacagctgccagatgagcatccagctgctgcagaccacccgcatcggcgtggccgtgaatggagtgaggaagcactgcagcgacaaggaggtggtgtccctggccaaggtgctgatcaagaactggaagaggctgctggacagccctggcccccccaagggggagaagggggaggagcgggagaaggccaagaagaaggagaagggcctggagtgcagcgactggaagccagaggccggcctgagcccccccaggaagaagcgggaggaccccaagacccggcgggacagcgtggacagcaagagcagcgccagcagcagccccaagaggccttctgtggagcgggcctgcagcctgatgcagtag

SEQ ID NO: 338820 - DNA, 465 bp, Artificial Sequence
  derived and/or modified sequence
atgggccaggaggaggagctgctgcggatcgccaagaagctggagaagatggtggcacgtaagaacacagagggcgcccttgatctgctaaagaagctgcactcatgccaaatgtccatccagttgctccagactacccgcattggtgtcgcagttaatggggtgaggaagcattgctccgacaaggaggtggtgagcctcgccaaagttttgattaagaattggaaaagactattggacagccctggacctcccaaaggggagaagggagaggaacgggagaaggctaaaaagaaggagaagggactcgaatgcagcgactggaaacctgaagccgggctgtccccaccccgcaagaagcgtgaggatccgaaaactagacgcgactccgtggatagcaaaagttccgcctccagcagccctaagcgaccaagcgtcgagcgcgcatgtagcttgatgcaatag

SEQ ID NO: 338821 - DNA, 1197 bp, Artificial Sequence
  derived and/or modified sequence
ccttcgcgcctcctgcccccgaggccctactgctgcccctgtgcccctcgccccgccgggcgtcgcgggccaacatgggccaggaagaggagctgctgaggatcgccaaaaagctggagaagatggtggccaggaagaacacggaaggggccctggaccttctgaagaagctgcacagctgccagatgtccatccagctactacagacaaccaggattggagttgctgttaatggggtccgcaagcactgctcagacaaggaggtggtgtccttggccaaagtccttatcaaaaactggaagcggctgctagactcccctggacccccaaaaggagaaaaaggagaggaaagagaaaaggcaaagaagaaggaaaaagggcttgagtgttcagactggaagccagaagcaggcctttctccaccaaggaaaaaacgagaagaccccaaaaccaggagagactctgtggactccaagtcttctgcctcctcctctccaaaaagaccatcggtggaaagagcatgctcgctgatgcagtaactgaaatgccctcgaggtggcgcacagaagcagcgggcccggcctccagatgcctctactcagacctggggcaggaggattttctaaggactggtgcggtgcgggcacatccggggagcagaaggaagctgttgataaatccaacctcccaccccggccgatgatgccctctctgcagtttggctcagttcccaggcgtgtgcattgaaagcaaaatgagtgtggctgcctgaaatgctgcccagacacgaattccagccagccagccagctcctaaccggggaggcgggaccagggctgggtgtgccctgccaggaaggtgggaagaaatgctccaaacagcctagtcttgctcaggtaggaggactctggaaacctctcttttaaagacacagttgatgtgttgaaaagaatttggaagggcgacaggcaggttcgtggtctgactataccctttgctagttggatggataacttggggcagtaacttggatggataattcagttcagctctctgagcttcagtctactgatctgtaaaatggagacaattatgaacccctttcaaggtcattgtgaggattaaatgaggtaatgaaatacccagcactgttcccaaaccatgtaaatgctcaataaatacataatactttgtaat

SEQ ID NO: 338822 - DNA, 465 bp, Artificial Sequence
  derived and/or modified sequence
atggggcaggaggaggagctcctgcggatcgccaaaaagcttgagaagatggttgctcggaaaaatacagagggggctctcgatcttctgaagaagcttcactcctgtcagatgagcattcaactcttgcaaacgacacgcatcggtgttgccgtgaacggtgtgcgtaaacactgctctgataaggaggtggttagcctggcaaaagtgttgatcaagaactggaagcgcctgctggactctccaggcccacccaagggcgaaaagggtgaagagcgcgaaaaagctaagaagaaagagaaagggttagaatgtagtgactggaagcctgaggccggactgtccccccctcggaaaaagcgtgaagatcctaagacccgcagggattccgtcgatagtaagagcagcgccagttccagcccaaagcgcccttccgtggagcgcgcttgtagtctgatgcaatag

SEQ ID NO: 338823 - DNA, 465 bp, Artificial Sequence
  derived and/or modified sequence
atgggccaggaggaggagctgctgagaatcgccaagaagctggagaagatggtggccagaaagaacaccgagggcgccctggacctgctgaagaagctgcacagctgccagatgagcatccagctgctgcagaccaccagaatcggcgtggccgtgaacggcgtgagaaagcactgcagcgacaaggaggtggtgagcctggccaaggtgctgatcaagaactggaagagactgctggacagccccggcccccccaagggcgagaagggcgaggagagagagaaggccaagaagaaggagaagggcctggagtgcagcgactggaagcccgaggccggcctgagcccccccagaaagaagagagaggaccccaagaccagaagagacagcgtggacagcaagagcagcgccagcagcagccccaagagacccagcgtggagagagcctgcagcctgatgcagtag

SEQ ID NO: 338824 - protein, 253 aa, Artificial Sequence
  derived and/or modified sequence
MMMKIPWGSIPVLMLLLLLGLIDISQAQLSCTGPPAIPGIPGIPGTPGPDGQPGTPGIKGEKGLPGLAGDHGEFGEKGDPGIPGNPGKVGPKGPMGPKGGPGAPGAPGPKGESGDYKATQKIAFSATRTINVPLRRDQTIRFDHVITNMNNNYEPRSGKFTCKVPGLYYFTYHASSRGNLCVNLMRGRERAQKVVTFCDYAYNTFQVTTGGMVLKLEQGENVFLQATDKNSLLGMEGANSIFSGFLLFPDMEA

SEQ ID NO: 338825 - protein, 229 aa, Artificial Sequence
  derived and/or modified sequence
MKIPWGSIPVLMLLLLLGLIDISQAQLSCTGPPAIPGIPGIPGTPGPDGQPGTPGIKGEKGLPGLAGDHGEFGEKGDPGIPGNPGKVGPKGPMGPKGGPGAPGAPGPKGESGDYKATQKIAFSATRTINVPLRRDQTIRFDHVITNMNNNYEPRSGKFTCKVPGLYYFTYHASSRGNLCVNLMRGRERAQKVVTFCDYAYNTFQVTTGGMVLKLEQGENVFLQATDKNS

SEQ ID NO: 338826 - protein, 251 aa, Artificial Sequence
  derived and/or modified sequence
MKIPWGSIPVLMLLLLLGLIDISQAQLSCTGPPAIPGIPGIPGTPGPDGQPGTPGIKGEKGLPGLAGDHGEFGEKGDPGIPGNPGKVGPKGPMGPKGGPGAPGAPGPKGESGDYKATQKIAFSATRTINVPLRRDQTIRFDHVITNMNNNYEPRSGKFTCKVPGLYYFTYHASSRGNLCVNLMRGRERAQKVVTFCDYAYNTFQVTTGGMVLKLEQGENVFLQATDKNSLLGMEGANSIFSGFLLFPDMEA

SEQ ID NO: 338827 - protein, 153 aa, Artificial Sequence
  derived and/or modified sequence
MKIPWGSIPVLMLLLLLGLIDISQAQLSCTGPPAIPGIPGIPGTPGPDGQPGTPGIKGEKGLPGLAGDHGEFGEKGDPGIPGNPGKVGPKGPMGPKGGPGAPGAPGPKGESGDYKATQKIAFSATRTINVPLRRDQTIRFDHVITNMNNNYEP

SEQ ID NO: 338828 - DNA, 762 bp, Artificial Sequence
  derived and/or modified sequence
atgatgatgaaaatcccatggggatctataccagtcttgatgctgctgctgctgctagggttgatcgacatatcccaagcacagctgtcctgtacaggcccccctgctatccctggaattcctggaatcccaggcacacccgggccagatgggcagcccgggacgccaggcattaagggcgagaagggcctcccaggactggccggcgaccatggagaatttggtgagaagggcgatcctggtattccggggaatcccggcaaggtgggccccaagggtcctatgggcccaaaaggcggacccggcgcacctggtgcgccaggaccgaagggcgagtccggagattacaaggcgacccaaaagatcgccttctctgcgactaggaccatcaatgtgcctcttaggagagatcagactattcgtttcgaccacgtgatcaccaatatgaacaataattacgagcctcgctcaggtaaatttacttgcaaggtccccgggctttactattttacctatcacgcttcctccagaggtaacctctgcgtgaatctgatgaggggaagggaacgggcacaaaaggtggtgactttttgcgactatgcctataacacgttccaggtcacgaccggaggcatggtcctcaaattagagcaaggggaaaacgtgtttctgcaggccactgacaagaactcactcctcgggatggaaggcgctaactcgatcttctcaggtttcctcttgtttccggatatggaggcctag

SEQ ID NO: 338829 - DNA, 690 bp, Artificial Sequence
  derived and/or modified sequence
atgaagatcccatggggaagcatccccgtgctgatgctgctgctccttttgggactgatcgatatcagccaggcccagctgagctgtactggcccacccgcaattccaggcatccctggcattcccggaacccccggaccagatggccagcccggcacccctggaataaagggagagaaggggctcccaggactcgctggagaccacggcgaattcggagaaaagggggaccccggcatacctggaaatcccggaaaagtcgggcctaagggtcccatgggccccaagggtgggcctggggcccccggtgcacctggaccaaaaggcgagagtggagattataaagctacacagaagatagcatttagcgcaacccggactatcaacgtccccctgcggcgggatcagaccatcagatttgaccatgtgattacaaatatgaacaataactatgagccgcgaagcggaaaatttacgtgcaaagtgcctggattgtactacttcacctatcatgcctccagcagagggaatctctgtgtgaaccttatgcgcggacgagagagggcccaaaaagtcgtaactttttgtgattatgcctacaatacctttcaagtcactactggcggcatggtcttgaagcttgagcagggagagaatgtgttcttgcaggcgactgacaagaacagctag

SEQ ID NO: 338830 - DNA, 756 bp, Artificial Sequence
  derived and/or modified sequence
atgaaaattccttggggtagcataccagttctgatgttgctactcctcctagggctcatcgatattagccaggcccaactaagttgcacaggacccccggctatcccagggatccctggcattcctggcacccccggcccggatggacagcctggaacccccggaatcaaaggagaaaagggcctgcctgggctggctggtgaccacggcgagttcggtgaaaagggggaccccgggattcctggaaatcctgggaaggtcggacccaagggccccatggggcccaaaggcggccctggggcccccggagcacccggaccaaaaggagaatcaggggactacaaggccacacaaaaaatcgcattttcggcaactagaacaattaatgtgccactacggcgggaccaaaccattcggtttgaccacgtaatcacaaacatgaacaataactacgagccacgcagtggtaagtttacgtgtaaggtgcccggactctactacttcacgtatcacgcgtcttccagaggcaatttgtgtgtgaatctcatgaggggacgagaacgagctcagaaagtcgttaccttttgcgactatgcctataataccttccaggtcacaaccggcggaatggtacttaaactcgagcagggagagaatgttttcctgcaggccacggacaaaaactctctcctcggaatggagggggcgaacagcattttcagcgggttcctgctgtttccagacatggaggcctag

SEQ ID NO: 338831 - DNA, 462 bp, Artificial Sequence
  derived and/or modified sequence
atgaaaattccgtggggcagcatcccagtgctaatgctgctgcttcttctcgggctgattgatatcagccaggcccaactcagctgcacaggacccccagctataccaggcataccgggaatccctggcacaccagggccagacgggcagccaggcaccccaggtattaagggcgaaaaaggtttgccagggcttgcaggcgaccatggtgaatttggagaaaagggtgaccctggaattcccggcaatccaggaaaggtaggcccaaaggggcccatgggccctaaagggggtcctggggctcccggcgcacctggccccaaaggagagtcgggcgactataaagcaacacagaaaatcgccttttcagcaacgcggacaattaacgtccccctgcgacgggaccagacaattcgcttcgaccatgtcatcacaaatatgaacaataattatgaaccctag

SEQ ID NO: 338832 - DNA, 762 bp, Artificial Sequence
  derived and/or modified sequence
atgatgatgaagatcccctggggcagcatccctgtgctgatgctgctgctgctgctgggcctgattgacatcagccaggcccagctgagctgcaccggccccccagccatccctggcatccctggcatccctggcaccccaggcccagatggccagcccggcaccccaggcatcaagggggagaagggcctgcccggcctggccggggaccatggagaatttggagagaagggggaccccggcatccctggcaaccctgggaaggtgggccccaagggccccatgggccccaagggcggccctggggcccctggggcccctggccccaagggggagagcggggactacaaggccacccagaagatcgccttcagcgccaccaggaccatcaacgtgcccctgcggcgggaccagaccatccgctttgaccacgtgatcaccaacatgaacaacaactatgagcccaggtctgggaagttcacctgcaaggtgcccggcctgtactacttcacctaccacgccagcagccggggcaacctgtgtgtgaacctgatgaggggccgggagcgggcccagaaggtggtgaccttctgtgactatgcctacaacaccttccaggtgaccactggaggcatggtgctgaagctggagcagggagaaaatgtgttcctgcaggccacagacaagaacagcctgctgggcatggagggcgccaacagcatcttcagcggcttcctgctcttcccagacatggaggcctag

SEQ ID NO: 338833 - DNA, 690 bp, Artificial Sequence
  derived and/or modified sequence
atgaagatcccctggggcagcatccctgtgctgatgctgctgctgctgctgggcctgattgacatcagccaggcccagctgagctgcaccggccccccagccatccctggcatccctggcatccctggcaccccaggcccagatggccagcccggcaccccaggcatcaagggggagaagggcctgcccggcctggccggggaccatggagaatttggagagaagggggaccccggcatccctggcaaccctgggaaggtgggccccaagggccccatgggccccaagggcggccctggggcccctggggcccctggccccaagggggagagcggggactacaaggccacccagaagatcgccttcagcgccaccaggaccatcaacgtgcccctgcggcgggaccagaccatccgctttgaccacgtgatcaccaacatgaacaacaactatgagcccaggtctgggaagttcacctgcaaggtgcccggcctgtactacttcacctaccacgccagcagccggggcaacctgtgtgtgaacctgatgaggggccgggagcgggcccagaaggtggtgaccttctgtgactatgcctacaacaccttccaggtgaccactggaggcatggtgctgaagctggagcagggagaaaatgtgttcctgcaggccacagacaagaacagctag

SEQ ID NO: 338834 - DNA, 756 bp, Artificial Sequence
  derived and/or modified sequence
atgaagatcccctggggcagcatccctgtgctgatgctgctgctgctgctgggcctgattgacatcagccaggcccagctgagctgcaccggccccccagccatccctggcatccctggcatccctggcaccccaggcccagatggccagcccggcaccccaggcatcaagggggagaagggcctgcccggcctggccggggaccatggagaatttggagagaagggggaccccggcatccctggcaaccctgggaaggtgggccccaagggccccatgggccccaagggcggccctggggcccctggggcccctggccccaagggggagagcggggactacaaggccacccagaagatcgccttcagcgccaccaggaccatcaacgtgcccctgcggcgggaccagaccatccgctttgaccacgtgatcaccaacatgaacaacaactatgagcccaggtctgggaagttcacctgcaaggtgcccggcctgtactacttcacctaccacgccagcagccggggcaacctgtgtgtgaacctgatgaggggccgggagcgggcccagaaggtggtgaccttctgtgactatgcctacaacaccttccaggtgaccactggaggcatggtgctgaagctggagcagggagaaaatgtgttcctgcaggccacagacaagaacagcctgctgggcatggagggcgccaacagcatcttcagcggcttcctgctcttcccagacatggaggcctag

SEQ ID NO: 338835 - DNA, 462 bp, Artificial Sequence
  derived and/or modified sequence
atgaagatcccctggggcagcatccctgtgctgatgctgctgctgctgctgggcctgattgacatcagccaggcccagctgagctgcaccggccccccagccatccctggcatccctggcatccctggcaccccaggcccagatggccagcccggcaccccaggcatcaagggggagaagggcctgcccggcctggccggggaccatggagaatttggagagaagggggaccccggcatccctggcaaccctgggaaggtgggccccaagggccccatgggccccaagggcggccctggggcccctggggcccctggccccaagggggagagcggggactacaaggccacccagaagatcgccttcagcgccaccaggaccatcaacgtgcccctgcggcgggaccagaccatccgctttgaccacgtgatcaccaacatgaacaacaactatgagccctag

SEQ ID NO: 338836 - DNA, 762 bp, Artificial Sequence
  derived and/or modified sequence
atgatgatgaagatcccctggggcagcatccccgtgctgatgctgctgcttctcctggggctcatcgatatttcacaggcacaactgagttgcacaggaccacctgcgatccccggcatccccggcattccaggcactccaggtccagacggtcagcctggtacccctggcattaaaggagaaaaaggccttcctggcctggctggggatcatggagagtttggcgaaaaaggggatcccggtatacctggcaacccaggcaaagttggcccaaaaggtccaatggggcccaagggcggccctggagcgcctggagcacctgggcccaagggtgaaagtggcgattataaagctacacaaaagatagctttctctgcaaccaggacgatcaatgtgccattaagaagggatcagacaattcgctttgatcacgtgataaccaatatgaacaacaactatgagccacgctcaggtaaattcacgtgtaaggtgcccgggctctactatttcacttaccacgcttcttccaggggaaatttatgtgtaaaccttatgcggggccgcgagcgcgcacagaaagtggtcactttttgcgactacgcctacaacacattccaggtgacaactggtggcatggtcctcaaactggaacagggcgaaaatgtgttcctccaagccaccgacaagaactccctgctcgggatggagggagcgaacagcatattctcaggcttcctgctattcccagatatggaagcttag

SEQ ID NO: 338837 - DNA, 690 bp, Artificial Sequence
  derived and/or modified sequence
atgaagatcccctggggcagcatccccgtgctgatgctgctgctgctgttggggctgattgatatcagtcaggcgcaactttcatgtacaggaccgcccgctatccccggcattcccggaattcccggtacacccggtcccgatggccaacccgggactcccgggattaagggggagaaaggactgcccggtctggcgggcgatcatggggagtttggtgaaaagggcgaccctggcatccccgggaacccgggaaaggtaggcccaaagggtcctatgggtcctaagggcgggccgggagctccaggagcccctggtcctaaaggcgaatccggcgactataaggcaacccagaaaatagccttttcggctactagaactataaatgtccctctacgcagggatcagactatccgcttcgaccatgtgattacgaacatgaataacaactatgaaccgcggagcggaaagttcacctgcaaggtcccaggtctctactactttacttaccatgcaagtagtcgcggtaatctctgcgtcaatctgatgagaggccgggaaagggctcagaaagtcgtgaccttctgcgattatgcttacaatacattccaggtgaccaccgggggcatggtcttaaagcttgagcagggagagaacgtcttcctgcaggcaaccgataagaatagttag

SEQ ID NO: 338838 - DNA, 756 bp, Artificial Sequence
  derived and/or modified sequence
atgaagatcccctggggcagcatccccgtgctgatgctgctgctgcttctgggcctgattgacattagccaggcacagttgagctgcaccggtccacccgcaatacccggaataccgggtatacctggaacacccggacctgatggccagcccggaacacccggcatcaagggtgaaaaaggcttacccgggttagctggtgaccacggagagttcggtgagaagggcgaccctggaatccccgggaatcctggcaaggttggcccaaagggcccaatgggacccaagggaggaccaggcgcccctggagccccaggtccaaaaggggaaagcggggattacaaggccacacaaaagattgcattctctgccactcgtaccatcaatgtccctttacgaagggaccagactattcgattcgatcatgtcataacaaacatgaataacaactatgagcctagaagtggcaagtttacatgcaaggtgcctgggctgtactattttacctatcacgctagtagccggggcaatctgtgcgtgaacctaatgcggggacgtgaacgcgcccaaaaagtggtaaccttttgtgattatgcttacaacacatttcaggtaaccacaggaggcatggtactgaagttggaacaaggagagaatgtgtttctgcaggctacggataaaaattctctgcttggcatggaaggagcgaatagcatcttcagcggttttctcctcttcccagatatggaagcgtag

SEQ ID NO: 338839 - DNA, 462 bp, Artificial Sequence
  derived and/or modified sequence
atgaagatcccctggggcagcatccccgtgctgatgctgctgctgctcctcggcttgatcgacatctcacaggctcagctctcatgtactggacccccagccattcccggtattcccggcatacccggcacacccggccccgacggccaaccgggaactcctggaattaaaggagaaaagggcctgccgggtctcgccggagatcatggcgaatttggcgaaaagggcgacccaggaatacccggcaatcctggcaaagtaggtccaaagggaccaatgggacccaaagggggcccgggtgcgcctggagctcccggaccgaaaggggaatccggcgattacaaagccacccagaagatagcctttagtgctacaaggaccatcaacgtgcccttgagacgggatcagaccatcagatttgatcacgtgataacaaacatgaacaacaattatgaaccctag

SEQ ID NO: 338840 - DNA, 762 bp, Artificial Sequence
  derived and/or modified sequence
atgatgatgaagatcccatgggggtccatcccggtgcttatgcttctcctgctcctcggactgatcgatatctcccaggcccagctgtcctgcactggtcctcctgcaatccctggtatacccggaattcccggaactcctggccctgacgggcagcctggtactcccggtatcaagggagagaaaggcctccctgggctggccggtgaccatggcgaattcggcgagaagggcgaccccggtatccccggaaatccagggaaagtcggcccaaaagggcctatgggcccaaagggaggcccaggcgctccgggagctccaggcccaaagggtgaaagtggcgattacaaagcaactcagaagatcgctttctctgcaaccagaaccataaacgtgcccctccggagggatcagacaatcagatttgaccacgtcattacaaatatgaacaacaactatgaacccaggtctggaaagtttacctgtaaagtcccaggcctctactacttcacctaccacgcttcctctcggggaaacctgtgtgtaaatctgatgaggggccgtgaaagggcccagaaggtggtcaccttctgtgattatgcctataacactttccaggtgactacaggcggtatggtgttgaagctcgaacaaggcgagaatgtgttcctgcaggctacggacaagaatagtctgttgggaatggaaggcgcaaactccatattctcgggcttcctgctgtttccggacatggaagcttag

SEQ ID NO: 338841 - DNA, 690 bp, Artificial Sequence
  derived and/or modified sequence
atgaagattccctgggggagcatacccgttctgatgctgttacttctgctcggcctgattgacatttcacaggcgcagctgagctgcactgggccaccagcaatcccaggaatccctgggatccccggaaccccaggacctgacggacagccgggtacccccggtatcaagggggaaaagggactgcccggtctggccggagatcatggtgaattcggcgagaaaggcgacccaggaatacccggtaaccccggaaaggtgggacctaaaggtcccatggggcctaagggcggtccaggggctcctggtgctccgggaccgaagggtgagtctggcgattacaaagccacacagaagatcgcatttagcgcgactcgcaccatcaatgtccccttaaggcgcgatcagacaataagattcgatcacgtaattacgaatatgaacaacaactatgagcctagaagcggaaagtttacttgcaaggtgcctggcttgtactatttcacttatcatgcctccagccgcggtaatctgtgcgtcaatttaatgcgcggtcgggagcgcgcacagaaagttgtgacgttttgcgattacgcgtataacacattccaagtcactactggcggtatggtgctgaagctggaacagggagagaatgtttttttgcaagccaccgacaagaatagctag

SEQ ID NO: 338842 - DNA, 756 bp, Artificial Sequence
  derived and/or modified sequence
atgaagataccttggggttctattcccgtgctaatgctgttactgctcctgggactcattgatatatctcaggctcagctcagttgtacagggccaccagccatccctggaatccccggtatccctgggacaccaggaccggatggccagcccggaactccgggaatcaaaggagaaaagggattaccgggtctcgccggtgaccatggggagtttggcgagaagggagatcccggtatcccaggcaaccctgggaaggtaggaccaaaggggccaatggggccaaagggcggacccggtgccccaggggcaccaggccctaaaggagagtctggcgattataaggctactcagaaaattgctttttcagcaacacgcacaatcaacgttccacttcgccgagaccagactataagattcgaccatgtgataacgaacatgaataacaactatgagccgcgaagcggaaaatttacatgtaaagtgcccggtttatactactttacttaccacgcgtcttctagaggaaatctgtgcgtgaacctcatgagaggtagagagcgggctcagaaggtagtgacattttgcgactacgcgtacaatacttttcaggtcacaacaggtggcatggttcttaagctggagcagggcgaaaatgtgtttctccaggcaactgacaagaattctctgttaggcatggaaggggctaacagtatcttctctggcttcttattatttccagatatggaagcctag

SEQ ID NO: 338843 - DNA, 462 bp, Artificial Sequence
  derived and/or modified sequence
atgaaaattccatgggggagcattcccgtcctgatgcttctgttactgctcggactcatagacatctctcaggcgcaactcagttgcactggaccgcctgccatacccggaattcctggcatccccggaacacctgggcctgacggacagcctggaacacccggtatcaagggggaaaagggtctccctgggctcgccggagatcatggagaatttggagagaagggcgacccaggtatccccggaaatcctgggaaagttggccctaagggccctatgggcccaaaagggggacctggcgcacctggtgctcctggccctaagggcgaatcgggcgactacaaagccacgcaaaaaatagcattttccgccacaagaacaatcaatgtgccactccggagggaccaaaccattagattcgaccacgtaattactaatatgaataataattatgaaccttag

SEQ ID NO: 338844 - DNA, 1044 bp, Artificial Sequence
  derived and/or modified sequence
gcccttcccgcctctggggaagggaacttccgcttcggaccgagggcagtaggctctcggctcctggtcccactgctgctcagcccagtggcctcacaggacaccagcttcccaggaggcgtctgacacagtatgatgatgaagatcccatggggcagcatcccagtactgatgttgctcctgctcctgggcctaatcgatatctcccaggcccagctcagctgcaccgggcccccagccatccctggcatcccgggtatccctgggacacctggccccgatggccaacctgggaccccagggataaaaggagagaaagggcttccagggctggctggagaccatggtgagttcggagagaagggagacccagggattcctgggaatccaggaaaagtcggccccaagggccccatgggccctaaaggtggcccaggggcccctggagccccaggccccaaaggtgaatcgggagactacaaggccacccagaaaatcgccttctctgccacaagaaccatcaacgtccccctgcgccgggaccagaccatccgcttcgaccacgtgatcaccaacatgaacaacaattatgagccccgcagtggcaagttcacctgcaaggtgcccggtctctactacttcacctaccacgccagctctcgagggaacctgtgcgtgaacctcatgcgtggccgggagcgtgcacagaaggtggtcaccttctgtgactatgcctacaacaccttccaggtcaccaccggtggcatggtcctcaagctggagcagggggagaacgtcttcctgcaggccaccgacaagaactcactactgggcatggagggtgccaacagcatcttttccgggttcctgctctttccagatatggaggcctgacctgtgggctgcttcacatccaccccggctccccctgccagcaacgctcactctacccccaacaccaccccttgcccaaccaatgcacacagtagggcttggtgaatgctgctgagtgaatgagtaaataaactcttcaaggccaaggga

SEQ ID NO: 338845 - DNA, 977 bp, Artificial Sequence
  derived and/or modified sequence
gcccttcccgcctctggggaagggaacttccgcttcggaccgagggcagtaggctctcggctcctggtcccactgctgctcagcccagtggcctcacaggacaccagcttcccagccctgtcaggttgaaatcagcattgccaagaggctcagagaggttaaggcacttgcctgaggttatgcagccggtagcagatggggctttaaagtcaagtgggcctgactccatgttgcggaaagggactgctggaccgaaggagatggaaaggaggcgtctgacacagtatgatgatgaagatcccatggggcagcatcccagtactgatgttgctcctgctcctgggcctaatcgatatctcccaggcccagctcagctgcaccgggcccccagccatccctggcatcccgggtatccctgggacacctggccccgatggccaacctgggaccccagggataaaaggagagaaagggcttccagggctggctggagaccatggtgagttcggagagaagggagacccagggattcctgggaatccaggaaaagtcggccccaagggccccatgggccctaaaggtggcccaggggcccctggagccccaggccccaaaggtgaatcgggagactacaaggccacccagaaaatcgccttctctgccacaagaaccatcaacgtccccctgcgccgggaccagaccatccgcttcgaccacgtgatcaccaacatgaacaacaattatgagccccgcagtggcaagttcacctgcaaggtgcccggtctctactacttcacctaccacgccagctctcgagggaacctgtgcgtgaacctcatgcgtggccgggagcgtgcacagaaggtggtcaccttctgtgactatgcctacaacaccttccaggtcaccaccggtggcatggtcctcaagctggagcagggggagaacgtcttcctgcaggccaccgacaagaactc

SEQ ID NO: 338846 - DNA, 1254 bp, Artificial Sequence
  derived and/or modified sequence
gtggatgttcccccaggacagcgtgttctccccacagctgctgagttggcagaaccaaacttgccacccacccgtctcatttacagtaaatccagtgggttgcagaaataggacctgaaactgcctgagggcagcagggtggggggacagtgaggggacgggaaaggggccagcctgctggtccatgggaggggaccgtcaggggaaagcccttcccgcctctggggaagggaacttccgcttcggaccgagggcagtaggctctcggctcctggtcccactgctgctcagcccagtggcctcacaggacaccagcttcccaggaggcgtctgacacagtatgatgatgaagatcccatggggcagcatcccagtactgatgttgctcctgctcctgggcctaatcgatatctcccaggcccagctcagctgcaccgggcccccagccatccctggcatcccgggtatccctgggacacctggccccgatggccaacctgggaccccagggataaaaggagagaaagggcttccagggctggctggagaccatggtgagttcggagagaagggagacccagggattcctgggaatccaggaaaagtcggccccaagggccccatgggccctaaaggtggcccaggggcccctggagccccaggccccaaaggtgaatcgggagactacaaggccacccagaaaatcgccttctctgccacaagaaccatcaacgtccccctgcgccgggaccagaccatccgcttcgaccacgtgatcaccaacatgaacaacaattatgagccccgcagtggcaagttcacctgcaaggtgcccggtctctactacttcacctaccacgccagctctcgagggaacctgtgcgtgaacctcatgcgtggccgggagcgtgcacagaaggtggtcaccttctgtgactatgcctacaacaccttccaggtcaccaccggtggcatggtcctcaagctggagcagggggagaacgtcttcctgcaggccaccgacaagaactcactactgggcatggagggtgccaacagcatcttttccgggttcctgctctttccagatatggaggcctgacctgtgggctgcttcacatccaccccggctccccctgccagcaacgctcactctacccccaacaccaccccttgcccaaccaatgcacacagtagggcttggtgaatgctgctgagtgaatgagtaaataaactcttcaaggccaagggaca

SEQ ID NO: 338847 - DNA, 677 bp, Artificial Sequence
  derived and/or modified sequence
agcaggtacaattatggtcccatcctatagcagagaaaattggggctcccttgactgacaacacatcaactggcaagtggcagaggcgggattggaatcaaaggctctgactgtaagccagcactcaggcagcgggcccgccacatgatgctcactgaggaacacccctgcccagtgtagaagaagatcacgaggaggcgtctgacacagtatgatgatgaagatcccatggggcagcatcccagtactgatgttgctcctgctcctgggcctaatcgatatctcccaggcccagctcagctgcaccgggcccccagccatccctggcatcccgggtatccctgggacacctggccccgatggccaacctgggaccccagggataaaaggagagaaagggcttccagggctggctggagaccatggtgagttcggagagaagggagacccagggattcctgggaatccaggaaaagtcggccccaagggccccatgggccctaaaggtggcccaggggcccctggagccccaggccccaaaggtgaatcgggagactacaaggccacccagaaaatcgccttctctgccacaagaaccatcaacgtccccctgcgccgggaccagaccatccgcttcgaccacgtgatcaccaacatgaacaacaattatgagcccc

SEQ ID NO: 338848 - DNA, 762 bp, Artificial Sequence
  derived and/or modified sequence
atgatgatgaagatcccctggggcagcatccccgtgctgatgctgctgctgctgctgggcctgatcgacatcagccaggcccagctgagctgcaccggcccccccgccatccccggcatccccggcatccccggcacccccggccccgacggccagcccggcacccccggcatcaagggcgagaagggcctgcccggcctggccggcgaccacggcgagttcggcgagaagggcgaccccggcatccccggcaaccccggcaaggtgggccccaagggccccatgggccccaagggcggccccggcgcccccggcgcccccggccccaagggcgagagcggcgactacaaggccacccagaagatcgccttcagcgccaccagaaccatcaacgtgcccctgagaagagaccagaccatcagattcgaccacgtgatcaccaacatgaacaacaactacgagcccagaagcggcaagttcacctgcaaggtgcccggcctgtactacttcacctaccacgccagcagcagaggcaacctgtgcgtgaacctgatgagaggcagagagagagcccagaaggtggtgaccttctgcgactacgcctacaacaccttccaggtgaccaccggcggcatggtgctgaagctggagcagggcgagaacgtgttcctgcaggccaccgacaagaacagcctgctgggcatggagggcgccaacagcatcttcagcggcttcctgctgttccccgacatggaggcctag

SEQ ID NO: 338849 - DNA, 690 bp, Artificial Sequence
  derived and/or modified sequence
atgaagatcccctggggcagcatccccgtgctgatgctgctgctgctgctgggcctgatcgacatcagccaggcccagctgagctgcaccggcccccccgccatccccggcatccccggcatccccggcacccccggccccgacggccagcccggcacccccggcatcaagggcgagaagggcctgcccggcctggccggcgaccacggcgagttcggcgagaagggcgaccccggcatccccggcaaccccggcaaggtgggccccaagggccccatgggccccaagggcggccccggcgcccccggcgcccccggccccaagggcgagagcggcgactacaaggccacccagaagatcgccttcagcgccaccagaaccatcaacgtgcccctgagaagagaccagaccatcagattcgaccacgtgatcaccaacatgaacaacaactacgagcccagaagcggcaagttcacctgcaaggtgcccggcctgtactacttcacctaccacgccagcagcagaggcaacctgtgcgtgaacctgatgagaggcagagagagagcccagaaggtggtgaccttctgcgactacgcctacaacaccttccaggtgaccaccggcggcatggtgctgaagctggagcagggcgagaacgtgttcctgcaggccaccgacaagaacagctag

SEQ ID NO: 338850 - DNA, 756 bp, Artificial Sequence
  derived and/or modified sequence
atgaagatcccctggggcagcatccccgtgctgatgctgctgctgctgctgggcctgatcgacatcagccaggcccagctgagctgcaccggcccccccgccatccccggcatccccggcatccccggcacccccggccccgacggccagcccggcacccccggcatcaagggcgagaagggcctgcccggcctggccggcgaccacggcgagttcggcgagaagggcgaccccggcatccccggcaaccccggcaaggtgggccccaagggccccatgggccccaagggcggccccggcgcccccggcgcccccggccccaagggcgagagcggcgactacaaggccacccagaagatcgccttcagcgccaccagaaccatcaacgtgcccctgagaagagaccagaccatcagattcgaccacgtgatcaccaacatgaacaacaactacgagcccagaagcggcaagttcacctgcaaggtgcccggcctgtactacttcacctaccacgccagcagcagaggcaacctgtgcgtgaacctgatgagaggcagagagagagcccagaaggtggtgaccttctgcgactacgcctacaacaccttccaggtgaccaccggcggcatggtgctgaagctggagcagggcgagaacgtgttcctgcaggccaccgacaagaacagcctgctgggcatggagggcgccaacagcatcttcagcggcttcctgctgttccccgacatggaggcctag

SEQ ID NO: 338851 - DNA, 462 bp, Artificial Sequence
  derived and/or modified sequence
atgaagatcccctggggcagcatccccgtgctgatgctgctgctgctgctgggcctgatcgacatcagccaggcccagctgagctgcaccggcccccccgccatccccggcatccccggcatccccggcacccccggccccgacggccagcccggcacccccggcatcaagggcgagaagggcctgcccggcctggccggcgaccacggcgagttcggcgagaagggcgaccccggcatccccggcaaccccggcaaggtgggccccaagggccccatgggccccaagggcggccccggcgcccccggcgcccccggccccaagggcgagagcggcgactacaaggccacccagaagatcgccttcagcgccaccagaaccatcaacgtgcccctgagaagagaccagaccatcagattcgaccacgtgatcaccaacatgaacaacaactacgagccctag

SEQ ID NO: 338852 - protein, 268 aa, Artificial Sequence
  derived and/or modified sequence
MAPVAVWAALAVGLELWAAAHALPAQVAFTPYAPEPGSTCRLREYYDQTAQMCCSKCSPGQHAKVFCTKTSDTVCDSCEDSTYTQLWNWVPECLSCGSRCSSDQVETQACTREQNRICTCRPGWYCALSKQEGCRLCAPLRKCRPGFGVARPGTETSDVVCKPCAPGTFSNTTSSTDICRPHQICNVVAIPGNASMDAVCTSTSPTRSMAPGAVHLPQPVSTRSQHTQPTPEPSTAPSTSFLLPMGPSPPAEGSTGDFALPVVSLSSS

SEQ ID NO: 338853 - protein, 155 aa, Artificial Sequence
  derived and/or modified sequence
MAPVAVWAALAVGLELWAAAHALPAQVAFTPYAPEPGSTCRLREYYDQTAQMCCSKCSPGQHAKVFCTKTSDTVCDSCEDSTYTQLWNWVPECLSCGSRCSSDQVETQACTREQNRICTCRPGWYCALSKQEGCRLCAPLRKCRPGFGVARPDLS

SEQ ID NO: 338854 - protein, 565 aa, Artificial Sequence
  derived and/or modified sequence
MDQMSSRAASASPYTPEHAASVPTHSPYAQPSSTFDTMSPAPVIPSNTDYPGPHHFEVTFQQSSTAKSATWTYSPLLKKLYCQIAKTCPIQIKVSTPPPPGTAIRAMPVYKKAEHVTDVVKRCPNHELGRDFNEGQSAPASHLIRVEGNNLSQYVDDPVTGRQSVVVPYEPPQVGTEFTTILYNFMCNSSCVGGMNRRPILIIITLEMRDGQVLGRRSFEGRICACPGRDRKADEDHYREQQALNESSAKNGAASKRAFKQSPPAVPALGAGVKKRRHGDEDTYYLQVRGRENFEILMKLKESLELMELVPQPLVDSYRQQQQLLQRPSHLQPPSYGPVLSPMNKVHGGMNKLPSVNQLVGQPPPHSSAATPNLGPVGPGMLNNHGHAVPANGEMSSSHSAQSMVSGSHCTPPPPYHADPSLVSFLTGLGCPNCIEYFTSQGLQSIYHLQNLTIEDLGALKIPEQYRMTIWRGLQDLKQGHDYSTAQQLLRSSNAATISIGGSGELQRQRVMEAVHFRVRHTITIPNRGGPGGGPDEWADFGFDLPDCKARKQPIKEEFTEAEIH

SEQ ID NO: 338855 - protein, 636 aa, Artificial Sequence
  derived and/or modified sequence
MAQSTATSPDGGTTFEHLWSSLEPDSTYFDLPQSSRGNNEVVGGTDSSMDVFHLEGMTTSVMAQFNLLSSTMDQMSSRAASASPYTPEHAASVPTHSPYAQPSSTFDTMSPAPVIPSNTDYPGPHHFEVTFQQSSTAKSATWTYSPLLKKLYCQIAKTCPIQIKVSTPPPPGTAIRAMPVYKKAEHVTDVVKRCPNHELGRDFNEGQSAPASHLIRVEGNNLSQYVDDPVTGRQSVVVPYEPPQVGTEFTTILYNFMCNSSCVGGMNRRPILIIITLEMRDGQVLGRRSFEGRICACPGRDRKADEDHYREQQALNESSAKNGAASKRAFKQSPPAVPALGAGVKKRRHGDEDTYYLQVRGRENFEILMKLKESLELMELVPQPLVDSYRQQQQLLQRPSHLQPPSYGPVLSPMNKVHGGMNKLPSVNQLVGQPPPHSSAATPNLGPVGPGMLNNHGHAVPANGEMSSSHSAQSMVSGSHCTPPPPYHADPSLVSFLTGLGCPNCIEYFTSQGLQSIYHLQNLTIEDLGALKIPEQYRMTIWRGLQDLKQGHDYSTAQQLLRSSNAATISIGGSGELQRQRVMEAVHFRVRHTITIPNRGGPGGGPDEWADFGFDLPDCKARKQPIKEEFTEAEIH

SEQ ID NO: 338856 - DNA, 2845 bp, Artificial Sequence
  derived and/or modified sequence
aggggacgcagcgaaaccggggcccgcgccaggccagccgggacggacgccgatgcccggggctgcgacggctgcagagcgagctgccctcggaggccggcgtggggaagatggcccagtccaccgccacctcccctgatgggggcaccacgtttgagcacctctggagctctctggaaccagacagcacctacttcgaccttccccagtcaagccgggggaataatgaggtggtgggcggaacggattccagcatggacgtcttccacctggagggcatgactacatctgtcatggcccagttcaatctgctgagcagcaccatggaccagatgagcagccgcgcggcctcggccagcccctacaccccagagcacgccgccagcgtgcccacccactcgccctacgcacaacccagctccaccttcgacaccatgtcgccggcgcctgtcatcccctccaacaccgactaccccggaccccaccactttgaggtcactttccagcagtccagcacggccaagtcagccacctggacgtactccccgctcttgaagaaactctactgccagatcgccaagacatgccccatccagatcaaggtgtccaccccgccacccccaggcaccgccatccgggccatgcctgtttacaagaaagcggagcacgtgaccgacgtcgtgaaacgctgccccaaccacgagctcgggagggacttcaacgaaggacagtctgctccagccagccacctcatccgcgtggaaggcaataatctctcgcagtatgtggatgaccctgtcaccggcaggcagagcgtcgtggtgccctatgagccaccacaggtggggacggaattcaccaccatcctgtacaacttcatgtgtaacagcagctgtgtagggggcatgaaccggcggcccatcctcatcatcatcaccctggagatgcgggatgggcaggtgctgggccgccggtcctttgagggccgcatctgcgcctgtcctggccgcgaccgaaaagctgatgaggaccactaccgggagcagcaggccctgaacgagagctccgccaagaacggggccgccagcaagcgtgccttcaagcagagcccccctgccgtccccgcccttggtgccggtgtgaagaagcggcggcatggagacgaggacacgtactaccttcaggtgcgaggccgggagaactttgagatcctgatgaagctgaaagagagcctggagctgatggagttggtgccgcagccactggtggactcctatcggcagcagcagcagctcctacagaggccgagtcacctacagcccccgtcctacgggccggtcctctcgcccatgaacaaggtgcacgggggcatgaacaagctgccctccgtcaaccagctggtgggccagcctcccccgcacagttcggcagctacacccaacctggggcccgtgggccccgggatgctcaacaaccatggccacgcagtgccagccaacggcgagatgagcagcagccacagcgcccagtccatggtctcggggtcccactgcactccgccacccccctaccacgccgaccccagcctcgtcagttttttaacaggattggggtgtccaaactgcatcgagtatttcacctcccaagggttacagagcatttaccacctgcagaacctgaccattgaggacctgggggccctgaagatccccgagcagtaccgcatgaccatctggcggggcctgcaggacctgaagcagggccacgactacagcaccgcgcagcagctgctccgctctagcaacgcggccaccatctccatcggcggctcaggggaactgcagcgccagcgggtcatggaggccgtgcacttccgcgtgcgccacaccatcaccatccccaaccgcggcggcccaggcggcggccctgacgagtgggcggacttcggcttcgacctgcccgactgcaaggcccgcaagcagcccatcaaggaggagttcacggaggccgagatccactgagggcctcgcctggctgcagcctgcgccaccgcccagagacccaagctgcctcccctctccttcctgtgtgtccaaaactgcctcaggaggcaggaccttcgggctgtgcccggggaaaggcaaggtccggcccatccccaggcacctcacaggccccaggaaaggcccagccaccgaagccgcctgtggacagcctgagtcacctgcagaaccttctggagctgccctagtgctgggcttgtggggcgggggctggcccactctcagccctgccactgccccggcgtgctccatggcaggcgtgggtggggaccgcagcgtcggctccgacttccaggcttcatcctagagactgtcatctcccaaccaggcgaggtccttccaaaggaaaggatcctctttgctgatggactgccaaaaagtattttgcgacatcttttggttctggatagtagtgagcagccaagtgactgtgtctgaaacaccagtgtattttcagggaatgtccctaactgcgtcttgcccgcgccgggggctggggactctctctgctggacttgggactggcctctgcccccagcacgctgtattctgcaggaccgcctccttcctgcccctaacaacaaccacagtgttgctgaaattggagaaaactggggagggcgcaaccccccccaggcgcggggaagcatgtggtaccgcctcagccagtgcccctcagcctggccacagtcgcctctcctcggggacccctcagcagaaagggacagcctgtccttagaggactggaaattgtcaatatttgataaaatgatacccttttc

SEQ ID NO: 338857 - DNA, 1698 bp, Artificial Sequence
  derived and/or modified sequence
atggaccagatgagcagcagagccgccagcgccagcccctacacccccgagcacgccgccagcgtgcccacccacagcccctacgcccagcccagcagcaccttcgacaccatgagccccgcccccgtgatccccagcaacaccgactaccccggcccccaccacttcgaggtgaccttccagcagagcagcaccgccaagagcgccacctggacctacagccccctgctgaagaagctgtactgccagatcgccaagacctgccccatccagatcaaggtgagcaccccccccccccccggcaccgccatcagagccatgcccgtgtacaagaaggccgagcacgtgaccgacgtggtgaagagatgccccaaccacgagctgggcagagacttcaacgagggccagagcgcccccgccagccacctgatcagagtggagggcaacaacctgagccagtacgtggacgaccccgtgaccggcagacagagcgtggtggtgccctacgagcccccccaggtgggcaccgagttcaccaccatcctgtacaacttcatgtgcaacagcagctgcgtgggcggcatgaacagaagacccatcctgatcatcatcaccctggagatgagagacggccaggtgctgggcagaagaagcttcgagggcagaatctgcgcctgccccggcagagacagaaaggccgacgaggaccactacagagagcagcaggccctgaacgagagcagcgccaagaacggcgccgccagcaagagagccttcaagcagagcccccccgccgtgcccgccctgggcgccggcgtgaagaagagaagacacggcgacgaggacacctactacctgcaggtgagaggcagagagaacttcgagatcctgatgaagctgaaggagagcctggagctgatggagctggtgccccagcccctggtggacagctacagacagcagcagcagctgctgcagagacccagccacctgcagccccccagctacggccccgtgctgagccccatgaacaaggtgcacggcggcatgaacaagctgcccagcgtgaaccagctggtgggccagccccccccccacagcagcgccgccacccccaacctgggccccgtgggccccggcatgctgaacaaccacggccacgccgtgcccgccaacggcgagatgagcagcagccacagcgcccagagcatggtgagcggcagccactgcacccccccccccccctaccacgccgaccccagcctggtgagcttcctgaccggcctgggctgccccaactgcatcgagtacttcaccagccagggcctgcagagcatctaccacctgcagaacctgaccatcgaggacctgggcgccctgaagatccccgagcagtacagaatgaccatctggagaggcctgcaggacctgaagcagggccacgactacagcaccgcccagcagctgctgagaagcagcaacgccgccaccatcagcatcggcggcagcggcgagctgcagagacagagagtgatggaggccgtgcacttcagagtgagacacaccatcaccatccccaacagaggcggccccggcggcggccccgacgagtgggccgacttcggcttcgacctgcccgactgcaaggccagaaagcagcccatcaaggaggagttcaccgaggccgagatccactag

SEQ ID NO: 338858 - DNA, 1911 bp, Artificial Sequence
  derived and/or modified sequence
atggcccagagcaccgccaccagccccgacggcggcaccaccttcgagcacctgtggagcagcctggagcccgacagcacctacttcgacctgccccagagcagcagaggcaacaacgaggtggtgggcggcaccgacagcagcatggacgtgttccacctggagggcatgaccaccagcgtgatggcccagttcaacctgctgagcagcaccatggaccagatgagcagcagagccgccagcgccagcccctacacccccgagcacgccgccagcgtgcccacccacagcccctacgcccagcccagcagcaccttcgacaccatgagccccgcccccgtgatccccagcaacaccgactaccccggcccccaccacttcgaggtgaccttccagcagagcagcaccgccaagagcgccacctggacctacagccccctgctgaagaagctgtactgccagatcgccaagacctgccccatccagatcaaggtgagcaccccccccccccccggcaccgccatcagagccatgcccgtgtacaagaaggccgagcacgtgaccgacgtggtgaagagatgccccaaccacgagctgggcagagacttcaacgagggccagagcgcccccgccagccacctgatcagagtggagggcaacaacctgagccagtacgtggacgaccccgtgaccggcagacagagcgtggtggtgccctacgagcccccccaggtgggcaccgagttcaccaccatcctgtacaacttcatgtgcaacagcagctgcgtgggcggcatgaacagaagacccatcctgatcatcatcaccctggagatgagagacggccaggtgctgggcagaagaagcttcgagggcagaatctgcgcctgccccggcagagacagaaaggccgacgaggaccactacagagagcagcaggccctgaacgagagcagcgccaagaacggcgccgccagcaagagagccttcaagcagagcccccccgccgtgcccgccctgggcgccggcgtgaagaagagaagacacggcgacgaggacacctactacctgcaggtgagaggcagagagaacttcgagatcctgatgaagctgaaggagagcctggagctgatggagctggtgccccagcccctggtggacagctacagacagcagcagcagctgctgcagagacccagccacctgcagccccccagctacggccccgtgctgagccccatgaacaaggtgcacggcggcatgaacaagctgcccagcgtgaaccagctggtgggccagccccccccccacagcagcgccgccacccccaacctgggccccgtgggccccggcatgctgaacaaccacggccacgccgtgcccgccaacggcgagatgagcagcagccacagcgcccagagcatggtgagcggcagccactgcacccccccccccccctaccacgccgaccccagcctggtgagcttcctgaccggcctgggctgccccaactgcatcgagtacttcaccagccagggcctgcagagcatctaccacctgcagaacctgaccatcgaggacctgggcgccctgaagatccccgagcagtacagaatgaccatctggagaggcctgcaggacctgaagcagggccacgactacagcaccgcccagcagctgctgagaagcagcaacgccgccaccatcagcatcggcggcagcggcgagctgcagagacagagagtgatggaggccgtgcacttcagagtgagacacaccatcaccatccccaacagaggcggccccggcggcggccccgacgagtgggccgacttcggcttcgacctgcccgactgcaaggccagaaagcagcccatcaaggaggagttcaccgaggccgagatccactag

SEQ ID NO: 338859 - DNA, 1698 bp, Artificial Sequence
  derived and/or modified sequence
atggaccaaatgagttcaagagccgcctcagccagcccctacactcctgagcatgcagcgtcggtccccacccacagcccatacgctcagcccagcagtactttcgacaccatgtctcctgcgccggtgatcccgtcaaacaccgactatcccggccctcaccatttcgaggtaacctttcagcaaagtagcacagctaagagcgcgacatggacatactcaccgttgttgaagaagctatattgccagatcgctaagacttgccccatacagataaaggtgtctacaccaccccctcctggaaccgccatccgggccatgcccgtctacaagaaagccgaacatgtgacagacgtggtaaagaggtgcccgaaccatgaacttggcagagattttaatgaggggcagtcagcccccgcctcacacttaatccgggtcgaggggaacaaccttagtcagtatgtggatgacccagtgactggtagacagtctgtggtggtgccatatgaaccgcctcaagtgggcactgagtttaccacaatcctctataatttcatgtgcaattcctcgtgtgttggcggcatgaatcgtcgacctattcttatcatcattacactggagatgcgcgacgggcaggtcctgggtcgcaggtctttcgagggacggatctgcgcatgtcctggacgcgatcgcaaagctgatgaggaccactatcgggagcagcaagcgctgaacgagtcgtctgcgaagaacggcgccgcttcaaaacgcgctttcaaacagtccccccccgcggtcccggccctgggagcaggagtgaagaaacgacggcatggagacgaggacacttactacttacaggtgaggggccgcgagaacttcgagattttaatgaagttaaaagaatcccttgaactcatggagctggtcccgcaaccacttgttgacagctacagacaacagcaacaattgttgcagaggccatcacatctgcaaccgccaagctacggccctgtcctcagtccaatgaataaagttcacggcggaatgaacaaattgccgagcgtgaatcaactggttggccaaccccccccacatagttcggctgccacccccaatcttgggcccgtgggacccggcatgttgaataaccatggacacgccgtccccgcaaatggggagatgtcctcctcacatagcgcgcagtccatggtctccggaagtcactgtacaccaccaccaccatatcacgccgaccctagtctggtgtcgttcctgaccggcttggggtgcccgaactgcattgagtacttcacctcacagggtctgcagtctatctaccaccttcagaacctgaccatcgaggatctgggcgccttgaaaatccccgagcagtaccgtatgacgatttggcggggtctgcaagacctgaaacagggtcatgactacagcaccgctcaacagcttctgagaagttcaaatgccgcaacaatctctatcggtggttccggagagctccaaaggcagagggtgatggaagccgtgcatttcagagttcgccacaccatcactatacccaatagaggaggccccggtggcggccccgatgaatgggcagattttggcttcgacctgcccgattgcaaagcccgtaagcagcccataaaagaagaatttactgaagcagagattcattag

SEQ ID NO: 338860 - DNA, 1911 bp, Artificial Sequence
  derived and/or modified sequence
atggcccagagtactgccacatctcctgatgggggtactacgttcgagcatctatggtcttcgctcgagcctgattccacttatttcgatctgccgcagtcttctcggggcaataacgaggtcgtgggcggaactgatagtagcatggatgtcttccacctggaaggaatgacaacctccgtgatggcacagttcaacctcttgtcatctaccatggaccagatgagcagtcgtgcagcatctgcatcaccttataccccagaacacgcagctagcgtgccgacacactctccttacgcacaaccttcgtctacctttgataccatgagccctgccccagtaataccatctaacacagattatccaggaccccaccatttcgaagttacctttcaacagtcgagtacagccaagagcgcgacatggacctatagtcctctgctgaagaagttgtactgtcagatagccaagacttgccccatccagattaaagtgagcacaccccccccccccggcacagccatccgcgctatgccagtgtataaaaaggctgagcacgtcacagatgtggtgaagcgatgccccaatcacgagcttgggagagacttcaacgagggccagagcgctcctgcctcacatctaattcgggtggaagggaataatttatctcagtacgtggatgaccctgtaactggccgacagagtgttgtcgtgccgtatgaaccccctcaggtcgggactgagttcaccacgatcctgtacaattttatgtgcaactccagttgcgttggaggcatgaaccgccgtcccattttgatcattattaccctggagatgagagacggacaggtgctcggtcggcgtagcttcgaggggagaatctgtgcctgtcctggacgcgatcgcaaagccgacgaggaccactacagggaacagcaggcgctcaacgagagcagtgccaagaatggtgctgcttcaaaacgggccttcaaacagagccccccggcggtccccgcactaggggctggggtgaaaaagcgccggcacggggatgaggacacatattatctgcaagtgcggggacgcgagaacttcgagatcctgatgaaactcaaggagtctcttgaactgatggagctggtgcctcagcctctggtcgactcatacaggcagcagcagcagctcctgcagaggccctctcacctccagccacccagctacggccccgttctcagtcctatgaacaaagtgcatggcggcatgaataagttgccgtctgtgaaccagctcgtgggtcagcccccccctcacagctctgctgctacaccaaatctgggtcctgtcggccctggaatgctgaacaaccacgggcatgctgttcccgcaaatggggagatgtcaagcagtcacagcgctcaatccatggtctccggctctcattgcacaccccctcctccatatcatgccgacccctctctggtaagtttcctcaccggcctgggatgtcctaattgtatcgaatacttcacctcacagggcttgcaatctatttatcacctgcagaacctgaccattgaggatcttggggccctgaagatcccagagcagtacagaatgaccatctggcggggattgcaagacttgaaacagggtcatgattacagcacggcacaacagttgctgcgttctagtaatgccgctaccatctcaatcgggggcagtggcgagctccaaagacagcgggtgatggaggccgtgcattttcgggttcggcatacaatcacaatcccgaacaggggggggcctggagggggcccagacgaatgggctgacttcggattcgatctgcccgattgcaaggcacgcaagcagccgattaaggaggagtttacagaggcagagatccattag

SEQ ID NO: 338861 - DNA, 1698 bp, Artificial Sequence
  derived and/or modified sequence
atggaccagatgagcagccgggccgccagcgccagcccctacaccccagagcacgccgcctctgtgcccacccacagcccctatgcccagcccagcagcacctttgacaccatgagccctgcccctgtgatccccagcaacacagactacccaggcccccaccactttgaggtgaccttccagcagagcagcacagccaagagcgccacctggacctacagccccctgctgaagaagctgtactgccagatcgccaagacctgccccatccagatcaaggtgtccaccccacctcctcctggaacagccatccgggccatgcctgtgtacaagaaggccgagcacgtgacagatgtggtgaagcgctgccccaaccacgagctgggccgggacttcaatgaaggccagagcgccccagccagccacctgatccgggtggagggcaacaacctgagccagtatgtggatgatcctgtgacaggccggcagagcgtggtggtgccctatgagcccccccaggtgggcacagagttcaccaccatcctgtacaacttcatgtgcaacagcagctgtgtgggcggcatgaacagaagacccatcctgatcatcatcaccctggagatgagagatggccaggtgctgggccgccgcagctttgagggccgcatctgtgcctgccccggccgggacaggaaggcagatgaggaccactaccgggagcagcaggccctgaatgaaagcagcgccaagaatggagctgccagcaagagggccttcaagcagagccccccagctgtgcctgccctgggcgccggcgtgaagaagagaagacatggagatgaggacacctactacctgcaggtgcggggccgggagaactttgagatcctgatgaagctgaaggagagcctggagctgatggagctggtgccccagcccctggtggacagctaccggcagcagcagcagctgctgcagaggcccagccacctgcagcccccatcctatggccctgtgctgagccccatgaacaaggtgcatggaggcatgaacaagctgcccagcgtgaaccagctggtgggccagcccccaccccacagcagcgctgccacccccaacctgggccctgtgggccctggcatgctgaacaaccacggccatgctgtgcctgccaacggggagatgagcagcagccacagcgcccagagcatggtgtctggcagccactgcaccccacctccaccctaccacgccgaccccagcctggtgtccttcctgaccggcctgggctgccccaactgcatcgagtacttcaccagccagggcctgcagagcatctaccacctgcagaacctgaccatcgaggacctgggcgccctgaagatccctgagcagtacaggatgaccatctggaggggcctgcaggacctgaagcagggccatgactacagcacagcccagcagctgctgcggagcagcaatgctgccaccatcagcatcggcggcagcggggagctgcagaggcagagggtgatggaggccgtgcacttccgggtgcgccacaccatcaccatccccaacagaggaggccctgggggcggcccagatgagtgggccgactttggatttgacctgcctgactgcaaggccaggaagcagcccatcaaggaggagttcacagaggccgagatccactag

SEQ ID NO: 338862 - DNA, 1911 bp, Artificial Sequence
  derived and/or modified sequence
atggcccagagcacagccaccagcccagatggcggcaccacctttgagcacctgtggagcagcctggagccagacagcacctactttgacctgccccagagcagccggggcaacaatgaggtggtgggcggcacagacagctccatggatgtgttccacctggagggcatgaccacctctgtgatggcccagttcaacctgctgagcagcaccatggaccagatgagcagcagagctgccagcgccagcccctacaccccagagcacgccgcctctgtgcccacccacagcccctatgcccagcccagcagcacctttgacaccatgagccctgcccctgtgatccccagcaacacagactacccaggcccccaccactttgaggtgaccttccagcagagcagcacagccaagagcgccacctggacctacagccccctgctgaagaagctgtactgccagatcgccaagacctgccccatccagatcaaggtgtccaccccacctcctcctggaacagccatccgggccatgcctgtgtacaagaaggccgagcacgtgacagatgtggtgaagcgctgccccaaccacgagctgggccgggacttcaatgaaggccagagcgccccagccagccacctgatccgggtggagggcaacaacctgagccagtatgtggatgatcctgtgacaggccggcagagcgtggtggtgccctatgagcccccccaggtgggcacagagttcaccaccatcctgtacaacttcatgtgcaacagcagctgtgtgggcggcatgaacagaagacccatcctgatcatcatcaccctggagatgagagatggccaggtgctgggcagaagaagctttgagggccgcatctgtgcctgccccggccgggacaggaaggcagatgaggaccactaccgggagcagcaggccctgaatgaatcttctgccaagaatggagctgccagcaagagggccttcaagcagagccccccagctgtgcctgccctgggcgctggggtgaagaagagaagacatggagatgaggacacctactacctgcaggtgcggggcagagaaaattttgagatcctgatgaagctgaaggagagcctggagctgatggagctggtgccccagcccctggtggacagctaccggcagcagcagcagctgctgcagaggcccagccacctgcagccccccagctatggccctgtgctgagccccatgaacaaggtgcacggcggcatgaacaagctgcccagcgtgaaccagctggtgggccagcccccaccccacagcagcgctgccacccccaacctgggccctgtgggccctggcatgctgaacaaccacggccatgctgtgcctgccaatggagagatgagcagcagccacagcgcccagagcatggtgtctggcagccactgcaccccacctccaccctaccacgccgaccccagcctggtgtccttcctgaccggcctgggctgccccaactgcatcgagtacttcaccagccagggcctgcagagcatctaccacctgcagaacctgaccatcgaggacctgggcgccctgaagatccctgagcagtacaggatgaccatctggaggggcctgcaggacctgaagcagggccatgactacagcacagcccagcagctgctgcggagcagcaatgctgccaccatcagcattggaggcagcggggagctgcagaggcagagggtgatggaggccgtgcacttccgggtgcgccacaccatcaccatccccaacagaggaggccctgggggcggcccagatgagtgggccgactttggatttgacctgcctgactgcaaggccaggaagcagcccatcaaggaggagttcacagaagctgagatccactag

SEQ ID NO: 338863 - DNA, 1698 bp, Artificial Sequence
  derived and/or modified sequence
atggaccagatgagcagccgggccgccagcgccagcccctacacccccgaacacgccgcaagtgtgccgacgcacagcccttacgcccaaccatctagcacctttgacactatgagccccgcccctgtaataccttccaataccgattatccaggcccccaccactttgaggtcacctttcagcagtcaagcaccgcaaaatccgccacttggacatacagtccgctactcaaaaaactctactgccagattgccaagacctgcccaattcagataaaagttagtaccccaccccctcctggaactgccataagagcaatgcctgtatataagaaagcagaacatgtcactgacgttgtaaagcggtgccctaaccacgagctgggccgcgattttaatgaggggcaatctgcaccagcgagtcacttgatacgcgtagagggtaataatttatcccagtatgtcgacgaccctgtaacaggcagacagagcgtggtggtgccctacgagcctccgcaggtgggaactgaattcacaactatattgtacaactttatgtgtaactccagctgcgttgggggcatgaaccggcgcccgattctcattatcataaccctcgagatgagggatggccaagttctcggaagacggtcgtttgagggaagaatctgcgcctgccctggtcgtgacagaaaggccgacgaggaccactacagagagcagcaggcactgaatgagagtagcgcgaaaaacggggccgccagtaaaagggcttttaaacagagtccgcctgctgtccctgctctgggcgctggcgtgaagaaaagaagacacggggacgaggatacgtactacttgcaggtgcggggcagagagaactttgaaattctgatgaaattgaaagagagcctggagctgatggagctggtcccacagcctctggtggacagttatcgccaacagcagcaactgcttcagcgacccagtcacttacaacctcccagttacgggccagtactgtccccaatgaacaaagtacacggcggtatgaataaactgccttccgttaatcagcttgtgggacagccacccccacacagttccgctgcaaccccaaacctgggccctgttggtccaggaatgctcaataatcacggacatgcagttcccgccaacggggagatgtcaagttcacatagcgcgcagtctatggtatcgggatcccattgcaccccccctcccccataccacgcggacccatcgttggtgtctttcctgaccggactcggctgccccaactgcattgagtactttacatctcaaggattgcagagtatttatcatctacagaacctcaccattgaagaccttggtgccctgaagatccctgaacagtaccgcatgaccatctggcggggcctacaggacctgaagcaaggtcatgattattctactgcacagcagctcctgcggagctcaaacgcggccacgatatccattggcggatcaggggagctgcaacggcagagggtcatggaggcggtacattttcgagtcagacatactattaccattccaaatagagggggaccaggaggaggaccagatgaatgggcagacttcggctttgatttgcctgattgtaaagccaggaagcaacctattaaggaggaatttaccgaagccgaaatacactag

SEQ ID NO: 338864 - DNA, 1911 bp, Artificial Sequence
  derived and/or modified sequence
atggcccagagcaccgccaccagccccgacggcggcaccaccttcgagcacctgtggtcatccctcgaacctgacagcacatatttcgaccttccacagagctctagggggaacaatgaggtcgtcggcggcacggactctagtatggatgtctttcacttggagggcatgactacttccgtcatggctcagtttaatctgcttagctccactatggatcaaatgtcttctcgcgcggcgtccgcctccccttatactcctgagcatgcagcctccgtcccaactcactccccatatgcccagccatcctctacattcgatacaatgagtcctgcaccagtgattccgtctaacaccgactaccccggcccccaccattttgaggtgacatttcagcagagctcaaccgctaaatcggcaacctggacctactccccgttgctcaaaaagctttactgccagattgctaaaacgtgcccaatccagatcaaggtgtctaccccccccccaccgggcactgctatcagggccatgccagtttataaaaaagctgaacatgttaccgatgtggtgaagcggtgccctaatcacgagctgggtagagactttaatgaaggtcagagcgcaccagcttcacaccttatcagagtcgaaggcaacaacctgagtcaatatgtggacgaccctgtgactggtcgacagtcagttgtcgtgccttatgagccgcctcaggttggcacggaattcaccactattctgtacaattttatgtgtaacagcagctgcgttggaggcatgaatcgacggcccatcctcatcatcataactcttgagatgcgggacggccaggttttgggccggcggagcttcgagggtcgtatctgcgcctgtccggggagagaccgcaaagcagatgaggatcactatcgcgagcagcaggcactcaatgaatcatctgccaagaatggggcggcctccaagagagcctttaaacaaagcccacctgccgtgcctgccttaggcgccggcgtgaagaaaaggaggcatggagacgaggatacctattatctgcaggtacgaggtcgggaaaactttgaaattcttatgaagcttaaagaaagcctggagctgatggaactggtgccccaaccattagtggattcctaccggcaacagcagcaactgctgcaaaggccaagccatctgcagccacccagttacggaccggtgctgagtcctatgaataaagttcacgggggcatgaataagttaccttcggtcaatcagctcgtcggacagcctcctcctcactcctcggctgcgacccctaaccttggcccagtgggtccaggcatgctcaacaatcatggccacgctgttccggccaacggagaaatgtcatcaagccatagcgcacagagtatggtgtccggctcacactgcactcctccgcctccctaccacgccgacccatcactcgtaagtttcctaactgggctgggctgtcctaactgtattgagtattttacctcgcagggcctgcagtcaatctatcacctccaaaatctcacaatcgaggacctgggagcattgaaaatccccgaacagtaccggatgactatctggcgaggtctacaggatctgaagcagggccatgactatagcactgctcagcaactacttagatccagtaacgctgctaccatcagtattggcggaagtggcgaattacagcggcaacgcgtgatggaagcagtacacttcagagtgcgacacaccatcaccatacccaatcgaggtggtcccggtggtgggcccgatgagtgggccgattttggctttgacctaccggactgcaaagctcgtaagcagcccatcaaagaagagtttacagaggctgagattcattag

SEQ ID NO: 338865 - DNA, 1698 bp, Artificial Sequence
  derived and/or modified sequence
atggaccagatgagcagccgagccgcttcagcatctccttacaccccagagcacgccgcttctgttccgactcatagcccttacgcccaaccgtcttccacctttgataccatgtctccagccccagtgatcccatctaataccgattacccaggtcctcatcacttcgaagttacattccagcagtccagtaccgccaaatcagccacctggacttacagccctttgctcaagaagttatactgtcagattgcgaagacttgtcctatccagatcaaggtctcaacaccaccgccacctgggaccgccatccgggcaatgccagtgtacaagaaagcagagcacgtcactgatgtggtcaaaaggtgccctaaccacgagctgggcagggacttcaacgagggtcagtccgctcccgcatcacaccttatcagggttgagggaaacaatctttcgcaatacgtggacgacccagtcacaggccgacaatctgttgtcgtcccctacgaacccccacaggtgggcactgaattcactaccattttgtacaatttcatgtgtaactcctcctgcgtggggggtatgaatcgccgtcccatccttattattatcacattggaaatgcgggatggccaggttcttggaaggcgtagctttgagggacgcatctgcgcgtgtcctggacgcgatcgcaaagctgatgaggatcactaccgggaacaacaagctctgaacgagtcctcagccaaaaatggtgccgcatctaagagggcttttaaacaatctcccccagcagtgcccgctctaggagcgggagtgaagaagcgacggcacggggatgaggacacttattatctgcaggtcagaggtagagaaaattttgagatactcatgaagctgaaagaaagtctggagctgatggagcttgtcccacagccattggttgactcctacagacagcagcagcagctgcttcagcgtcctagtcatttgcaaccgcctagctatggacccgttttatccccaatgaacaaagtgcacggtggcatgaacaagctgccatctgtgaaccaactggtgggccagccgcctcctcattctagtgctgcaactcccaatttgggacctgtgggtcctggcatgctgaataatcatggacatgccgttccagctaatggagagatgtcctcatcacactccgctcagtctatggtttcaggttcgcactgcacacccccacctccctaccacgccgacccctcgctcgtgtcatttcttaccggcctaggctgtcctaattgtatcgagtacttcacaagtcagggcctccagtcaatttatcatctccagaatctgacaatagaggacttgggagctttaaagataccagagcagtaccgcatgaccatttggcggggactccaagatttgaaacaggggcatgattactcaacagcccagcagctcctccgctcgagtaatgctgctactattagcataggcggttcaggcgaactccagaggcagcgcgtcatggaagcggttcatttccgagtgcgccatacgataaccatcccgaatcgcggaggtcccggtggcggacctgacgagtgggcggattttggctttgatctgcccgattgtaaggcccgtaaacaaccaatcaaagaggagttcaccgaagctgaaatccactag

SEQ ID NO: 338866 - DNA, 1911 bp, Artificial Sequence
  derived and/or modified sequence
atggcccaaagcactgcaaccagccccgacggcggaacaacttttgaacacctgtggagctcactcgaaccagactctacctatttcgatctgcctcagagttctaggggaaacaacgaggttgtcggcggaaccgattcatccatggatgtgtttcacctggaaggtatgacaacaagcgttatggcacaattcaatttactcagcagcactatggatcagatgtcttcacgggcagctagtgcctctccatacacaccagaacacgctgcaagtgtccctacccattccccttacgctcagccgtctagcaccttcgacacaatgtcccccgctcctgttattcccagcaacaccgattaccctggaccccatcattttgaagtgacatttcagcagtcgtccaccgccaagtcagcgacctggacgtacagccctctactgaagaagctctattgtcagatcgcgaagacctgccctatccaaattaaagtaagcacacctcccccaccaggcactgccatccgcgcaatgcccgtgtataaaaaagcagagcacgtcaccgacgtggtcaagcggtgtcctaatcatgaactgggcagagattttaatgaggggcagagtgcacctgccagccatctgatcagagtggagggaaacaatttgagtcagtatgtggatgatcccgtgaccgggaggcagtcagtcgtggtcccctacgaaccaccgcaggtgggaaccgagtttactacaatattgtacaacttcatgtgtaatagctcatgtgtgggcggaatgaaccggaggccgatcctgataattattactttggagatgcgggacggacaggtcctggggagaaggtctttcgaaggtcggatttgtgcctgtcctggcagagaccgtaaggcagacgaggaccactatcgcgagcaacaagcactcaacgaatccagtgccaagaacggagcagcctccaaacgggcattcaagcagtccccacccgcagtgcccgctttaggtgccggagtaaagaagcgacgccatggcgacgaggatacatattacctacaggtgcggggacgtgagaattttgagatactcatgaagctgaaggagtctctggaactgatggagttggtgccccaacctctggtggactcttaccgccagcaacagcaattgttacagcgcccttcccatctgcagccaccatcctatggcccagtgctatcaccaatgaacaaagttcatggcggaatgaacaagctgccttcagtgaatcagctcgtgggacaacctcccccacactcttcagctgccactccaaatcttggcccagtcggcccaggcatgttgaacaatcatggacacgcggttcccgctaacggtgagatgagttccagccattctgcgcaaagtatggtgagtggttcccattgcacaccccctcctccgtatcatgcagatccttccctggtgtcatttctcacgggattgggatgtcccaattgcattgagtattttactagccagggcctccaatccatttaccacctgcagaacttgaccatagaggacttgggagctctgaaaataccagaacagtatcgcatgactatatggagggggttacaggacctaaagcagggccacgactatagcacagcccaacagctgctccggtctagtaacgccgcaaccatatcaattggcggatccggggagctgcagaggcagcgggtcatggaagccgtccactttcgcgtccggcacaccatcaccattccaaatagaggcggacccggtggtggcccagacgagtgggccgatttcgggttcgacttgccagattgtaaagccaggaaacagcccattaaagaggaattcacagaggccgagatacattag

SEQ ID NO: 338867 - DNA, 1831 bp, Artificial Sequence
  derived and/or modified sequence
aaggtgtccaggaagccctgctaagcatctgtcagtgtctccagcacagcaggaggctgttacaggtggcgcctgattcacatctgcaggacaggcccagttcaatctgctgagcagcaccatggaccagatgagcagccgcgcggcctcggccagcccctacaccccagagcacgccgccagcgtgcccacccactcgccctacgcacaacccagctccaccttcgacaccatgtcgccggcgcctgtcatcccctccaacaccgactaccccggaccccaccactttgaggtcactttccagcagtccagcacggccaagtcagccacctggacgtactccccgctcttgaagaaactctactgccagatcgccaagacatgccccatccagatcaaggtgtccaccccgccacccccaggcaccgccatccgggccatgcctgtttacaagaaagcggagcacgtgaccgacgtcgtgaaacgctgccccaaccacgagctcgggagggacttcaacgaaggacagtctgctccagccagccacctcatccgcgtggaaggcaataatctctcgcagtatgtggatgaccctgtcaccggcaggcagagcgtcgtggtgccctatgagccaccacaggtggggacggaattcaccaccatcctgtacaacttcatgtgtaacagcagctgtgtagggggcatgaaccggcggcccatcctcatcatcatcaccctggagatgcgggatgggcaggtgctgggccgccggtcctttgagggccgcatctgcgcctgtcctggccgcgaccgaaaagctgatgaggaccactaccgggagcagcaggccctgaacgagagctccgccaagaacggggccgccagcaagcgtgccttcaagcagagcccccctgccgtccccgcccttggtgccggtgtgaagaagcggcggcatggagacgaggacacgtactaccttcaggtgcgaggccgggagaactttgagatcctgatgaagctgaaagagagcctggagctgatggagttggtgccgcagccactggtggactcctatcggcagcagcagcagctcctacagaggccgagtcacctacagcccccgtcctacgggccggtcctctcgcccatgaacaaggtgcacgggggcatgaacaagctgccctccgtcaaccagctggtgggccagcctcccccgcacagttcggcagctacacccaacctggggcccgtgggccccgggatgctcaacaaccatggccacgcagtgccagccaacggcgagatgagcagcagccacagcgcccagtccatggtctcggggtcccactgcactccgccacccccctaccacgccgaccccagcctcgtcagttttttaacaggattggggtgtccaaactgcatcgagtatttcacctcccaagggttacagagcatttaccacctgcagaacctgaccattgaggacctgggggccctgaagatccccgagcagtaccgcatgaccatctggcggggcctgcaggacctgaagcagggccacgactacagcaccgcgcagcagctgctccgctctagcaacgcggccaccatctccatcggcggctcaggggaactgcagcgccagcgggtcatggaggccgtgcacttccgcgtgcgccacaccatcaccatccccaaccgcggcggcccaggcggcggccctgacgagtgggcggacttcggcttcgacctgcccgactgcaaggcccgcaagcagcccatcaaggaggagttcacggaggccgagatccactgagggcctcgcctg

SEQ ID NO: 338868 - DNA, 5188 bp, Artificial Sequence
  derived and/or modified sequence
tgcctccccgcccgcgcacccgcccggaggctcgcgcgcccgcgaaggggacgcagcgaaaccggggcccgcgccaggccagccgggacggacgccgatgcccggggctgcgacggctgcagagcgagctgccctcggaggccggcgtggggaagatggcccagtccaccgccacctcccctgatgggggcaccacgtttgagcacctctggagctctctggaaccagacagcacctacttcgaccttccccagtcaagccgggggaataatgaggtggtgggcggaacggattccagcatggacgtcttccacctggagggcatgactacatctgtcatggcccagttcaatctgctgagcagcaccatggaccagatgagcagccgcgcggcctcggccagcccctacaccccagagcacgccgccagcgtgcccacccactcgccctacgcacaacccagctccaccttcgacaccatgtcgccggcgcctgtcatcccctccaacaccgactaccccggaccccaccactttgaggtcactttccagcagtccagcacggccaagtcagccacctggacgtactccccgctcttgaagaaactctactgccagatcgccaagacatgccccatccagatcaaggtgtccaccccgccacccccaggcaccgccatccgggccatgcctgtttacaagaaagcggagcacgtgaccgacgtcgtgaaacgctgccccaaccacgagctcgggagggacttcaacgaaggacagtctgctccagccagccacctcatccgcgtggaaggcaataatctctcgcagtatgtggatgaccctgtcaccggcaggcagagcgtcgtggtgccctatgagccaccacaggtggggacggaattcaccaccatcctgtacaacttcatgtgtaacagcagctgtgtagggggcatgaaccggcggcccatcctcatcatcatcaccctggagatgcgggatgggcaggtgctgggccgccggtcctttgagggccgcatctgcgcctgtcctggccgcgaccgaaaagctgatgaggaccactaccgggagcagcaggccctgaacgagagctccgccaagaacggggccgccagcaagcgtgccttcaagcagagcccccctgccgtccccgcccttggtgccggtgtgaagaagcggcggcatggagacgaggacacgtactaccttcaggtgcgaggccgggagaactttgagatcctgatgaagctgaaagagagcctggagctgatggagttggtgccgcagccactggtggactcctatcggcagcagcagcagctcctacagaggccgagtcacctacagcccccgtcctacgggccggtcctctcgcccatgaacaaggtgcacgggggcatgaacaagctgccctccgtcaaccagctggtgggccagcctcccccgcacagttcggcagctacacccaacctggggcccgtgggccccgggatgctcaacaaccatggccacgcagtgccagccaacggcgagatgagcagcagccacagcgcccagtccatggtctcggggtcccactgcactccgccacccccctaccacgccgaccccagcctcgtcagttttttaacaggattggggtgtccaaactgcatcgagtatttcacctcccaagggttacagagcatttaccacctgcagaacctgaccattgaggacctgggggccctgaagatccccgagcagtaccgcatgaccatctggcggggcctgcaggacctgaagcagggccacgactacagcaccgcgcagcagctgctccgctctagcaacgcggccaccatctccatcggcggctcaggggaactgcagcgccagcgggtcatggaggccgtgcacttccgcgtgcgccacaccatcaccatccccaaccgcggcggcccaggcggcggccctgacgagtgggcggacttcggcttcgacctgcccgactgcaaggcccgcaagcagcccatcaaggaggagttcacggaggccgagatccactgagggcctcgcctggctgcagcctgcgccaccgcccagagacccaagctgcctcccctctccttcctgtgtgtccaaaactgcctcaggaggcaggaccttcgggctgtgcccggggaaaggcaaggtccggcccatccccaggcacctcacaggccccaggaaaggcccagccaccgaagccgcctgtggacagcctgagtcacctgcagaaccttctggagctgccctagtgctgggcttgtggggcgggggctggcccactctcagccctgccactgccccggcgtgctccatggcaggcgtgggtggggaccgcagcgtcggctccgacttccaggcttcatcctagagactgtcatctcccaaccaggcgaggtccttccaaaggaaaggatcctctttgctgatggactgccaaaaagtattttgcgacatcttttggttctggatagtagtgagcagccaagtgactgtgtctgaaacaccagtgtattttcagggaatgtccctaactgcgtcttgcccgcgccgggggctggggactctctctgctggacttgggactggcctctgcccccagcacgctgtattctgcaggaccgcctccttcctgcccctaacaacaaccacagtgttgctgaaattggagaaaactggggagggcgcaaccccccccaggcgcggggaagcatgtggtaccgcctcagccagtgcccctcagcctggccacagtcgcctctcctcggggacccctcagcagaaagggacagcctgtccttagaggactggaaattgtcaatatttgataaaatgatacccttttctacatggtgggtcagcttttttttttttttttttaactttctttctcagcattctctttggagttcaacctagcgcccatgagccaggctgaggaagctgagtgagaagccaggtgggcgggacttgttcccaggaaggccgggtggggaggaagcctagagggaaccccaggaagggcaaatccaggcaaatctgcaggaatgctctgccatgggagcagctcctcccttgccacggccaccttctctagcactgcaaggtccacagggcattgctttcctttctaggcggtggcagtcagggaacagactgaggtaggtgtaggggggtctaggccttcgtggagcaccccagggagttagtaggccccggggagacagagtctgcacaggccctttctggggccacctccatccacgaggagcagcctgagccttggtggccgaaccttgaccgtcccggagcacagcttcagggcagggaaccggagcccctggggggcctcacgggtgtgacgaggcccttcattgcaggcaggtgggccaatgggagccctcacccacgcaagccgagacaccacccagagtgcaggctgcctggccccttctggcacggccagctccacaccccctgcctagggtatgtgtggtcctaagggctaggagcttcccctactaacatctcccagaaaaagcagttaagcccctcagggcacagcaaggttagacacagcccccatccccagatcaggactccatcttgctaagtggcatcaccgtcaccagcctccccttatttaaaagcagcgactggtgttgccgcaggtacctggtctacgaagacgcaggcatccctctcccaccgtccacctccccgggggccgctgacagcacagtcgcctgggtgcacgcttgtgggggcagcaggaacggggctgtcggctctcaggggatctggctgcagccagggcgagggcctggcccttccttccagctccttccggctccttccagctgaagggcaggaagctctggccgcttagcttctagggttccatctccctagaaaggtgcccacgcccagggcatcagtcagtagcggcagcagcagcagactcggggctttcccagggtggcgcagccaccccagctgcatgtcacctcagctctccatcttattgccattttgtagatgaggaagctgagaccagaaaggctaagacccatgccccaggcaccacacccatctcttgggggctgggcacctgctacccgaggccacctcctgaagcccccactcttcccccatgttccacttcaggagccgcgggggcccatcctgacacccggggttcctcagcccagcgcagatgtgcttcagttccagagggcttgttgatttgtttcttaggtacgttacctgtccaccctgagtccagtgaggctgtcccaagagcccctgtagtgtgctcctgggaagggctgggggggctgggggggctgggagaggcccaggggcagctgtcactggaaccccagccagatgtccaaggaagccggccagaacacggagcagccagatggccccagctgcacctgtctagggagcccatgcagcctccttgcactggagaagcagctgtgaaagtagacagagttgagacttcgccgtggtcaggagaaaatgcaaattcccaggaacaagaatcctttaagtgatatgtttttataaaactaaacaaatcaacaaataaatcttgaaggcggatggttttcccagcagtgcaggggttggagggaggctgctggcactcctggggccaagggggacaggcagtggtcctgagtctgctcagagaggcaaggcagaaggagctcgccaggcaggtcagctcacatctgtccaagtcgctctggtcagaaacagcgactctcccccattcccccagcgttcccaccaggcctgggctgctgggaagcccttgctgtacccaggagcccgacccgcagtatcctggcacagagccacttgtcactcagaacagtcagtgtctccaacgcacaaacatccactcctctgttaccagttaaagcactttaatgctttaaggtgaaaacgaaatcccatccgtgtttttcgtgtaagatcgtgcttctccgagcagtattaatggacgccctccaatgacataacaactgtttttggtaatgtaatcttgggaaaatgtgttatttttttagctgtgtttcagtggggatttttgtttttgtaacataataaagtgtatgttccaatga

SEQ ID NO: 338869 - protein, 193 aa, Artificial Sequence
  derived and/or modified sequence
MEANGLGPQGFPELKNDTFLRAAWGEETDYTPVWCMRQAGRYLPEFRETRAAQDFFSTCRSPEACCELTLQALGMEVTMVPGKGPSFPEPLREEQDLERLRDPEVVASELGYVFQAITLTRQRLAGRVPLIGFAGAPWTLMTYMVEGGGSSTMAQAKRWLYQRPQASHQLLRILTDALVPYLVGQVVAGAQAL

SEQ ID NO: 338870 - DNA, 582 bp, Artificial Sequence
  derived and/or modified sequence
atggaggccaacggcctgggcccccagggcttccccgagctgaagaacgacaccttcctgagagccgcctggggcgaggagaccgactacacccccgtgtggtgcatgagacaggccggcagatacctgcccgagttcagagagaccagagccgcccaggacttcttcagcacctgcagaagccccgaggcctgctgcgagctgaccctgcaggccctgggcatggaggtgaccatggtgcccggcaagggccccagcttccccgagcccctgagagaggagcaggacctggagagactgagagaccccgaggtggtggccagcgagctgggctacgtgttccaggccatcaccctgaccagacagagactggccggcagagtgcccctgatcggcttcgccggcgccccctggaccctgatgacctacatggtggagggcggcggcagcagcaccatggcccaggccaagagatggctgtaccagagaccccaggccagccaccagctgctgagaatcctgaccgacgccctggtgccctacctggtgggccaggtggtggccggcgcccaggccctgtag

SEQ ID NO: 338871 - DNA, 582 bp, Artificial Sequence
  derived and/or modified sequence
atggaagcaaacggcttaggacctcaaggctttcctgaactgaagaacgataccttcttacgcgctgcctggggcgaggaaactgattacacaccagtctggtgcatgaggcaggccggaaggtatctcccagagttcagggagactcgagccgctcaggatttttttagcacgtgcagaagtccagaagcttgctgcgagttaacactgcaagcactgggcatggaagtgactatggtccctggcaagggcccatcattccctgagcctctgcgagaagagcaggatctggaacgccttagagaccctgaggtggtcgccagtgagttgggctacgtgttccaggccattacgcttacccgacagaggctggcagggcgagttccccttattggctttgccggggctccgtggacattaatgacgtacatggtggaggggggaggaagctctaccatggcccaagctaagcggtggctgtatcagcgcccccaggcctcccatcagctcctccgtatattgaccgatgctcttgttccttatctcgtgggacaggttgtggccggtgcccaggccctgtag

SEQ ID NO: 338872 - DNA, 582 bp, Artificial Sequence
  derived and/or modified sequence
atggaagccaacggcttgggcccacaagggtttcccgaactcaaaaatgatacattcctccgggctgcgtggggggaggagacagactatacacctgtgtggtgcatgcgacaggctggtagatacctgcctgaatttcgcgagactagggcagctcaggacttcttcagtacctgtcggtcccccgaagcatgctgcgagcttactcttcaggcactgggaatggaagtgacgatggtgcccggcaagggcccatctttccccgaaccattgagggaggaacaggacctggagagactaagggaccctgaggtagtggcctccgaactgggatacgtattccaggccatcaccctgacgagacagaggttggctggtagggtgccactaatcggattcgccggagccccctggaccctgatgacttacatggtcgaagggggaggcagctccactatggctcaagcgaagcgctggctttaccagagaccccaggcctcccatcagttgttgcgaattttgactgacgcccttgtgccctacctggtgggccaggtcgtggcaggcgcgcaagccctgtag

SEQ ID NO: 338873 - DNA, 582 bp, Artificial Sequence
  derived and/or modified sequence
atggaggccaacggcctgggcccccagggcttccctgagctgaagaatgacaccttcctgcgggccgcctggggcgaggagacagactacacccctgtgtggtgcatgaggcaggccggccgctacctgcctgagttccgggagaccagggctgcccaggacttcttcagcacctgccgcagccctgaggcctgctgtgagctgaccctgcaggccctgggcatggaggtgaccatggtgcctgggaagggccccagcttccctgagcccctgcgggaggagcaggacctggagcggctgcgggaccctgaggtggtggccagcgagctgggctacgtgttccaggccatcaccctgacccggcagaggctggccggccgggtgcccctgattggatttgctggggccccctggaccctgatgacctacatggtggagggcggcggcagcagcaccatggcccaggccaagcgctggctgtaccagaggccccaggccagccaccagctgctgcgcatcctgacagatgccctggtgccctacctggtgggccaggtggtggccggggcccaggccctgtag

SEQ ID NO: 338874 - DNA, 582 bp, Artificial Sequence
  derived and/or modified sequence
atggaggccaacggcctgggcccccagggcttccccgagctgaagaacgataccttcctgcgcgccgcctggggtgaggaaaccgattacacgcctgtgtggtgcatgcgacaggcaggaagataccttcccgagtttagggaaactagggccgcacaggatttttttagcacatgcagatccccggaagcatgttgcgaactgacgttacaagctctggggatggaggttaccatggtgcccgggaaaggtccttctttccctgaacctttacgggaagaacaggatttagaacggctccgtgaccccgaagtggtggcctccgaactcgggtatgtcttccaggcaatcacactgaccagacaaaggctggctggtcgggttccgctaataggctttgccggtgcaccttggaccctgatgacctacatggtggaggggggaggttcgagcaccatggcccaggcaaaaagatggctatatcagcgcccacaggccagtcatcagcttttgcgtattctcaccgacgccctggttccctatctggttggtcaggtggtcgccggcgcacaggcgttatag

SEQ ID NO: 338875 - DNA, 582 bp, Artificial Sequence
  derived and/or modified sequence
atggaggccaacggcctgggcccccagggcttccccgagctgaagaacgacaccttccttagggctgcatggggtgaggaaaccgactacacgcctgtttggtgcatgaggcaagcaggcaggtacctgcctgagtttagggagacccgggctgcccaggattttttttctacatgcagatcgcctgaagcctgctgtgagctgacgcttcaggctctaggaatggaggtaaccatggtgcctggcaagggccctagcttcccagaacccttgagggaggaacaagaccttgagcggctgcgggaccctgaggttgtggccagtgaactgggctacgtctttcaggccattaccttaacaaggcagcggctagccggaagggtacccttgataggatttgccggcgctccgtggacactcatgacgtacatggtggaaggtggagggtcatctactatggctcaggccaaaaggtggctgtatcagagaccacaagctagtcaccagctcttgaggatactgaccgacgccctggtgccatatcttgtggggcaggtggtggctggtgctcaagccctttag

SEQ ID NO: 338876 - DNA, 582 bp, Artificial Sequence
  derived and/or modified sequence
atggaggcaaatggacttgggcctcagggattccctgaactgaaaaacgatacttttctgcgcgcagcttggggagaagagacagactacactcccgtgtggtgcatgcgtcaggccggaaggtacctacccgagttccgggaaactagagcagcccaagatttcttttctacctgtaggtcacccgaagcctgttgcgagctgactctgcaggctttggggatggaggtgactatggtgccaggtaagggaccatccttcccggagcctctacgggaagaacaggatctcgagaggttacgggaccctgaggttgtggcttctgaactggggtacgttttccaggcaatcactcttaccagacagcggctggctggacgtgtgcccctgattggctttgctggagcaccctggaccctgatgacatatatggttgaaggcggaggcagctctactatggcacaagccaaaaggtggttgtaccaaagacctcaggcatcacaccagctcttgaggattcttacagatgccttggtcccatacctggttgggcaggtggtggctggcgctcaggctctgtag

SEQ ID NO: 338877 - DNA, 582 bp, Artificial Sequence
  derived and/or modified sequence
atggaggccaacggattgggccctcaagggtttccggagcttaaaaatgatacattcctgagagctgcctggggggaagaaacagattacacacccgtgtggtgtatgaggcaggccggtagatacctgcccgagttcagggagacccgcgctgcgcaagacttcttctccacttgccgttcacctgaggcctgctgtgagttaaccttgcaggctcttggaatggaagttaccatggtgccaggtaaaggtccaagctttcctgagcctctgcgcgaggagcaggacctcgaacgcctgcgcgaccctgaagttgtggcttcagaactgggctacgttttccaggccatcactctcactaggcagcgcctggctgggagagtgccactgatcggcttcgcgggagctccttggacccttatgacctacatggtcgaaggagggggaagttctactatggcccaggccaagcgatggttataccagcggcctcaagcatctcatcagttgctgcgcatactaaccgacgccctggtaccttacctggtgggacaggtggtcgcgggagcgcaggcactgtag

SEQ ID NO: 338878 - DNA, 1128 bp, Artificial Sequence
  derived and/or modified sequence
agacagctgaccatggaagcgaatgggttgggacctcagggttttccggagctgaagaatgacacattcctgcgagcagcctggggagaggaaacagactacactcccgtttggtgcatgcgccaggcaggccgttacttaccagagtttagggaaacccgggctgcccaggactttttcagcacgtgtcgctctcctgaggcctgctgtgaactgactctgcaggcactgggcatggaggtgaccatggtacctggcaaaggacccagcttcccagagccattaagagaagagcaggacctagaacgcctacgggatccagaagtggtagcctctgagctaggctatgtgttccaagccatcacccttacccgacaacgactggctggacgtgtgccgctgattggctttgctggtgccccatggaccctgatgacatacatggttgagggtggtggctcaagcaccatggctcaggccaagcgctggctctatcagagacctcaggctagtcaccagctgcttcgcatcctcactgatgctctggtcccatatctggtaggacaagtggtggctggtgcccaggcattgcagctgtttgagtcccatgcagggcatcttggcccacagctcttcaacaagtttgcactgccttacatccgtgatgtggccaagcaagtgaaggccaggttgcgggaggcaggcctggcaccagtgcccatgatcatctttgctaaggatgggcattttgccctggaggagctggcccaagctggctatgaggtggttgggcttgactggacagtggccccaaagaaagcccgggagtgtgtggggaagacggtgacattgcagggcaacctggacccctgtgccttgtatgcatctgaggaggagatcgggcagttggtgaagcagatgctggatgactttggaccacatcgctacattgccaacctgggccatgggctttatcctgacatggacccagaacatgtgggcgcctttgtggatgctgtgcataaacactcacgtctgcttcgacagaactgagtgtatacctttaccctcaagtaccactaacacagatgattgatcgtttccaggacaataaaagtttcggagttg

SEQ ID NO: 338879 - DNA, 600 bp, Artificial Sequence
  derived and/or modified sequence
gcagttacagacagctgaccatggaagcgaatgggttgggacctcagggttttccggagctgaagaatgacacattcctgcgagcagcctggggagaggaaacagactacactcccgtttggtgcatgcgccaggcaggccgttacttaccagagtttagggaaacccgggctgcccaggactttttcagcacgtgtcgctctcctgaggcctgctgtgaactgactctgcaggcactgggcatggaggtgaccatggtacctggcaaaggacccagcttcccagagccattaagagaagagcaggacctagaacgcctacgggatccagaagtggtagcctctgagctaggctatgtgttccaagccatcacccttacccgacaacgactggctggacgtgtgccgctgattggctttgctggtgccccatggaccctgatgacatacatggttgagggtggtggctcaagcaccatggctcaggccaagcgctggctctatcagagacctcaggctagtcaccagctgcttcgcatcctcactgatgctctggtcccatatctggtaggacaagtggtggctggtgcccaggcattgc

SEQ ID NO: 338880 - DNA, 540 bp, Artificial Sequence
  derived and/or modified sequence
atgagggcactggttctcctgctatccctgtttctgctgggcggccaggcccagcatgtgagtgattggacctatagcgagggagccctggatgaggctcactggccgcaacattaccctgcatgcggaggtcagcgccagtcccctataaaccttcagcgcaccaaagttagatacaatccctccctgaaaggtctgaacatgacagggtatgagactcaggccggtgaatttcctatggtaaataatgggcacacggactggcaggcagaactctttttaccctctctatcctctccttgtggcgagggggctaagcacaagggccagcgacagtggctttgtagccccagtcttgatagttggtgggaggcaatcatagatggcgggagcttgtgggctacactggctgagtgcggcctgcgagctgaaggcccagaagaggggcgccatatggaagagaagtcccccgcttcacagggtgcttgttcgggaagccgcctgccaatcagccgcgggccttgtacattttttctctag

SEQ ID NO: 338881 - DNA, 540 bp, Artificial Sequence
  derived and/or modified sequence
atgagggccctggtgctgctgctgagcctcttcctgctgggcggccaggcccagcacgtgtctgactggacctacagcgagggcgccctggatgaggcccactggccccagcactacccagcctgtggcggccagaggcagagccccatcaacctgcagaggaccaaggtgcgctacaaccccagcctgaagggcctgaacatgacaggctatgagacccaggccggggagttccccatggtgaacaacggccacacagactggcaggccgagctgttcctgcccagcctgagcagcccctgtggggagggcgccaagcacaagggccagaggcagtggctgtgcagccccagcctggacagctggtgggaggccatcattgatggcggcagcctgtgggccaccctggccgagtgtggcctgcgggcagagggccctgaggagggccgccacatggaggagaagagccctgccagccagggcgcctgcagcggcagccggctgcccatcagccggggcccctgcaccttcttcctgtag

SEQ ID NO: 338882 - DNA, 540 bp, Artificial Sequence
  derived and/or modified sequence
atgcgggccctggtgctgctgctgagcctgttcctgctgggcggccaggcgcagcatgtctcagactggacctactctgagggagccctcgacgaagcgcactggcctcagcactatcccgcctgcggtggacaacgccagagtccaattaacctgcagaggaccaaggtgagatacaatccatcactgaagggactgaacatgacggggtacgaaacccaggcaggcgagttccccatggtgaacaacgggcacactgactggcaggctgagttgtttttgccatctttatcctcaccctgtggtgagggtgccaaacacaagggccaacgccagtggttatgcagcccgtcactagactcatggtgggaggccattattgacggcgggagcctctgggccactctcgccgagtgcgggctacgcgccgaaggtcccgaggagggacgacatatggaagagaaatcaccagccagccagggggcttgttccggaagtcgactgcctataagtagggggccctgtacattttttctatag

SEQ ID NO: 338883 - DNA, 540 bp, Artificial Sequence
  derived and/or modified sequence
atgcgcgctttagtgctcctcttgtccttgtttctccttggtggtcaggcccagcatgtgtccgactggacatattctgaaggcgcacttgatgaagctcactggccgcagcactatcccgcttgcggtggtcagagacagtctcccatcaacctgcagcgcactaaggttaggtataatccctctttaaaaggcctaaacatgacaggctatgaaactcaggctggggaattcccaatggttaataacggacacacggactggcaggcggagctttttctcccctctctatccagcccatgcggggagggggcaaagcacaaaggacagcgccaatggctctgttctccatccctcgacagctggtgggaagcaattatcgacggtggaagcctttgggcgaccttggcggagtgtggcctccgggctgaggggccagaggaaggcaggcacatggaagaaaagtcccctgctagtcagggtgcctgcagcgggtcgagactgccaatcagtcgtggcccttgtacctttttcctgtag

SEQ ID NO: 338884 - DNA, 540 bp, Artificial Sequence
  derived and/or modified sequence
atgagggccctggtgttgcttctatccctcttcctgttaggtggacaggcacagcatgtcagcgactggacttatagcgagggagctcttgacgaggctcattggcctcaacattacccagcatgtggtggccagaggcaatctcccatcaatcttcaacgcacaaaggtgaggtataacccttcattgaagggactcaatatgaccggatacgagactcaagctggcgaattcccaatggtaaataatggacacaccgactggcaggccgaactgttcctgccttcccttagctccccttgcggagaaggcgccaaacataaaggacaaaggcagtggttatgtagtcccagcctggactcctggtgggaagctatcatcgatggcgggagcctgtgggccacgctagcggagtgtgggctacgtgccgaagggccagaggaaggcagacacatggaggagaaatcccccgcaagccagggagcatgttccggtagcaggctccctattagtagagggccttgtaccttctttctctag

SEQ ID NO: 338885 - DNA, 540 bp, Artificial Sequence
  derived and/or modified sequence
atgcgggctctggtacttctgctgtccctcttcttgttaggcgggcaagcacaacacgtgtccgattggacctatagtgagggtgccttagatgaagctcactggccccagcactatcctgcttgtggaggtcagcgacagagcccaatcaatctgcagagaactaaagtacgttacaatccatcattaaagggactcaatatgactgggtacgaaacccaagctggtgaatttccaatggtcaataatggacacacagattggcaggccgaactcttcctcccttctctctcctccccctgcggggaaggcgcaaagcacaaaggtcagcgacagtggctctgttctccttctctcgattcctggtgggaggccattatagacggtggatccctgtgggcaacattagctgaatgcgggctaagggcggaagggcccgaagaaggcaggcatatggaggaaaaaagcccagcctctcagggggcgtgttccggcagtcgacttcccatatcaagaggaccgtgtaccttttttttatag

SEQ ID NO: 338886 - DNA, 564 bp, Artificial Sequence
  derived and/or modified sequence
tcttcattacagatgtgcagcaccatgagggccctggtgcttctgctgtccctgttcctgctgggtggccaggcccagcatgtgtctgactggacctactcagaaggggcactggacgaagcgcactggccacagcactaccccgcctgtgggggccagagacagtcgcctatcaacctacagaggacgaaggtgcggtacaacccctccttgaaggggctcaatatgacaggctatgagacccaggcaggggagttccccatggtcaacaatggccacacagattggcaggcggaactcttcctcccctccttgtcctctccttgtggagaaggggcgaagcacaaaggccaaaggcagtggctttgttcaccctccctggacagctggtgggaagcaatcattgatggaggatctctatgggcaacgcttgctgagtgcgggcttcgtgctgagggcccagaagagggaaggcatatggaagagaagagcccagcttcccaaggggcttgcagcggctcccgcctcccaatttccagaggaccctgtaccttcttcctttag

SEQ ID NO: 338887 - DNA, 540 bp, Artificial Sequence
  derived and/or modified sequence
atgagagccctggtgctgctgctgagcctgttcctgctgggcggccaggcccagcacgtgagcgactggacctacagcgagggcgccctggacgaggcccactggccccagcactaccccgcctgcggcggccagagacagagccccatcaacctgcagagaaccaaggtgagatacaaccccagcctgaagggcctgaacatgaccggctacgagacccaggccggcgagttccccatggtgaacaacggccacaccgactggcaggccgagctgttcctgcccagcctgagcagcccctgcggcgagggcgccaagcacaagggccagagacagtggctgtgcagccccagcctggacagctggtgggaggccatcatcgacggcggcagcctgtgggccaccctggccgagtgcggcctgagagccgagggccccgaggagggcagacacatggaggagaagagccccgccagccagggcgcctgcagcggcagcagactgcccatcagcagaggcccctgcaccttcttcctgtag

SEQ ID NO: 338888 - protein, 210 aa, Artificial Sequence
  derived and/or modified sequence
  misc_feature (1)..(1): Xaa can be any naturally occurring amino acid
XSKHIIIHTGEKPYLCDKCGRGFNRVDNLRSHVKTVHQGKAGIKILEPEEGSEVSVVTVDDMVTLATEALAATAVTQLTGPATLPAVVPVGAAVTADETEVLKAEISKAVKQVQEEDPNTHILYACDSCGDKFLDANSLAQHVRIHTAQALVMFQTDADFYQQYGPGGTWPAGQVLQAGELVFRPRDGAEGQPALAETSPTAPECPPPAE

SEQ ID NO: 338889 - DNA, 633 bp, Artificial Sequence
  derived and/or modified sequence
tgaagcaagcacatcatcatccacaccggcgagaagccctacctgtgcgacaagtgcggcagaggcttcaacagagtggacaacctgagaagccacgtgaagaccgtgcaccagggcaaggccggcatcaagatcctggagcccgaggagggcagcgaggtgagcgtggtgaccgtggacgacatggtgaccctggccaccgaggccctggccgccaccgccgtgacccagctgaccggccccgccaccctgcccgccgtggtgcccgtgggcgccgccgtgaccgccgacgagaccgaggtgctgaaggccgagatcagcaaggccgtgaagcaggtgcaggaggaggaccccaacacccacatcctgtacgcctgcgacagctgcggcgacaagttcctggacgccaacagcctggcccagcacgtgagaatccacaccgcccaggccctggtgatgttccagaccgacgccgacttctaccagcagtacggccccggcggcacctggcccgccggccaggtgctgcaggccggcgagctggtgttcagacccagagacggcgccgagggccagcccgccctggccgagaccagccccaccgcccccgagtgccccccccccgccgagtag

SEQ ID NO: 338890 - DNA, 633 bp, Artificial Sequence
  derived and/or modified sequence
taatccaaacacatcatcattcacaccggcgagaagccttacttgtgtgacaagtgcgggcggggtttcaatagagtcgacaatttgcgtagtcatgtgaagacggtccaccaagggaaagccgggattaagatccttgagccggaagagggcagcgaggtaagcgtggtgacagtcgacgacatggttactctcgccaccgaagcattagctgccaccgcagtgactcagctgacaggcccggccactctgccagccgtggtgccggtgggagcagcagtgacagctgacgagaccgaggtgctgaaggcggagatttctaaagcagtcaaacaggtgcaggaggaagaccctaacacccatatcttatatgcatgtgattcttgcggtgataagttcttagatgcgaattcattggcccagcatgtccggatacatacagcacaggctctggttatgtttcagaccgatgccgacttctaccagcagtatggcccaggaggaacttggcccgctgggcaggtgcttcaggcaggcgaactcgtttttcgaccccgggacggtgccgagggtcagccagcactggcagagacatcccccactgcccctgagtgcccgcctccagccgagtag

SEQ ID NO: 338891 - DNA, 633 bp, Artificial Sequence
  derived and/or modified sequence
tgaagcaagcacatcatcatccacactggagagaagccctacctgtgtgacaagtgtggccggggcttcaacagagtggacaacctgcggagccacgtgaagacagtgcaccagggcaaggccggcatcaagatcctggagcctgaggagggcagcgaggtgtctgtggtgacagtggatgacatggtgaccctggccacagaggccctggccgccacagctgtgacccagctgactggacctgccaccctgcctgctgtggtgcctgtgggcgctgctgtgacagcagatgaaacagaggtgctgaaggccgagatcagcaaggctgtgaagcaggtgcaggaggaggaccccaacacccacatcctgtatgcctgtgacagctgtggggacaagttcctggatgccaacagcctggcccagcacgtgcgcatccacacagcccaggccctggtgatgttccagacagatgctgacttctaccagcagtatggccctgggggcacctggccagctggccaggtgctgcaggccggggagctggtgttccggcccagagatggagctgagggccagcctgccctggccgagaccagccccacagcccctgagtgccccccacctgctgagtag

SEQ ID NO: 338892 - DNA, 633 bp, Artificial Sequence
  derived and/or modified sequence
tgaagcaagcacatcatcatccacaccggcgagaagccctacctgtgcgataagtgtggacgaggctttaaccgagttgataacctccgttcacacgtgaaaacagtccaccagggtaaagctggcattaaaatattagaacccgaagagggctctgaggtgtccgtggtaaccgttgacgacatggtgactcttgctaccgaggcactggcggccacggcagttacgcaactgactggtcccgcgacacttcccgccgttgtccccgtcggagccgctgtgaccgccgatgagactgaggtgctgaaggcagagatctcaaaggcagtgaaacaggtacaagaggaggatcctaacacccacatcctatatgcctgcgattcatgcggcgacaagtttctggacgccaattcgctagcccagcacgtgcgaattcacaccgcgcaggccctcgtgatgttccagactgacgccgacttctatcagcagtatggacccgggggtacatggcctgccgggcaggtactgcaggccggcgagctcgtcttcaggccccgagacggcgccgagggacagcctgcactggcagaaacatcccctactgctcccgagtgtccacctccggccgaatag

SEQ ID NO: 338893 - DNA, 633 bp, Artificial Sequence
  derived and/or modified sequence
tagtctaagcatatcattattcataccggcgagaagccatacctctgcgataagtgcggaagagggtttaatagggtcgataacctccgatcacatgtgaaaaccgtacaccaggggaaggctggcattaagatcttagaacccgaagagggctccgaagtatcagtggtcaccgtggacgacatggtgacgctggccaccgaggccctggcggctacggccgtcacacagcttaccggcccagctaccttgcccgcagttgtccccgttggcgcagccgtgaccgctgacgagaccgaagtgttgaaagctgaaatatccaaggcagtcaagcaggtccaggaagaggacccaaatacccacatactctatgcttgcgactcatgtggtgacaagtttctcgacgctaactcccttgcccagcacgttcgaatccacactgctcaggccctggtgatgttccagacggatgcagatttttaccagcagtatggccctgggggaacatggccagccggacaggtgttgcaggccggagagttggtgttccggcctagggacggagcggaaggacaacccgctctcgccgagacaagccccactgccccagaatgtccaccccctgccgagtag

SEQ ID NO: 338894 - DNA, 731 bp, Artificial Sequence
  derived and/or modified sequence
gtccaagcacatcatcattcacactggagagaagccttacctgtgtgataagtgtgggcgtggcttcaaccgggtagacaacctgcgctcccacgtgaagaccgtgcaccagggcaaggcaggcatcaagatcctggagcccgaggagggcagtgaggtcagcgtggtcactgtggatgacatggtcacgctggctaccgaggcactggcagcgacagccgtcactcagctcacaggccctgcgactctgcccgcagtggtgccggtgggagctgcagtgacagccgatgagacggaagtcctgaaggccgagatcagcaaagctgtgaagcaagtgcaggaagaagaccccaacactcacatcctctacgcctgtgactcctgtggggacaagtttctggatgccaacagcctggctcagcatgtgcgaatccacacagcccaggcactggtcatgttccagacagacgcggacttctatcagcagtatgggccaggtggcacgtggcctgccgggcaggtgctgcaggctggggagctggtcttccgccctcgcgacggggctgagggccagcccgcactggcagagacctcccctacagctcctgaatgtcccccgcctgccgagtgagctggcggcccttctgactgtttatttaaggatggatggcaccctggaaccgggaagggtggcctgttccctagagagaataaattggattattttctaa

SEQ ID NO: 338895 - protein, 721 aa, Artificial Sequence
  derived and/or modified sequence
MMCWPWPLSSKCRTSSRPAMPSSHLLSRLPALGEMRRPWPQKVCPVPSPGGDKRAKEEKVATSTLSRLEQAGRSTPIGPSRDLKEERGGQAQSAASGAEQTEKADAPREPPPVELKPDPTSGMAAAEAEAALSESSEQEMEVEPARKGEEEQKEQEEQEEEGAGPAEVKEEGSQLENGEAPEENENEESAGTDSGQELGSEARGLRSGTYGDRTESKAYGSVIHKCEDCGKEFTHTGNFKRHIRIHTGEKPFSCRECSKAFSDPAACKAHEKTHSPLKPYGCEECGKSYRLISLLNLHKKRHSGEARYRCEDCGKLFTTSGNLKRHQLVHSGEKPYQCDYCGRSFSDPTSKMRHLETHDTDKEHKCPHCDKKFNQVGNLKAHLKIHIADGPLKCRECGKQFTTSGNLKRHLRIHSGEKPYVCIHCQRQFADPGALQRHVRIHTGEKPCQCVMCGKAFTQASSLIAHVRQHTGEKPYVCERCGKRFVQSSQLANHIRHHDNIRPHKCSVCSKAFVNVGDLSKHIIIHTGEKPYLCDKCGRGFNRVDNLRSHVKTVHQGKAGIKILEPEEGSEVSVVTVDDMVTLATEALAATAVTQLTVVPVGAAVTADETEVLKAEISKAVKQVQEEDPNTHILYACDSCGDKFLDANSLAQHVRIHTAQALVMFQTDADFYQQYGPGGTWPAGQVLQAGELVFRPRDGAEGQPALAETSPTAPECPPPAE

SEQ ID NO: 338896 - DNA, 723 bp, Artificial Sequence
  derived and/or modified sequence
gaggccctgcccgtgagactgctgagacccctgctgctgagaccccacttccaggacgccccccccggcgaccccagacacggccagggcgcccaggtgcccaccctgagacaggaggtgcagcccggcaacctgaagagacacctgagaatccacagcggcgagaagccctacgtgtgcatccactgccagagacagttcgccgaccccggcgccctgcagagacacgtgagaatccacaccggcgagaagccctgccagtgcgtgatgtgcggcaaggccttcacccaggccagcagcctgatcgcccacgtgagacagcacaccggcgagaagccctacgtgtgcgagagatgcggcaagagattcgtgcagagcagccagctggccaaccacatcagacaccacgacaacatcagaccccacaagtgcagcgtgtgcagcaaggccttcgtgaacgtgggcgacctgagcaagcacatcatcatccacaccggcgagaagccctacctgtgcgacaagtgcggcagaggcttcaacagagtggacaacctgagaagccacgtgaagaccgtgcaccagggcaaggccggcatcaagatcctggagcccgaggagggcagcgaggtgagcgtggtgaccgtggacgacatggtgaccctggccaccgaggccctggccgccaccgccgtgacccagctgaccgtggtgcccgtgggctag

SEQ ID NO: 338897 - DNA, 726 bp, Artificial Sequence
  derived and/or modified sequence
tgagaggccctgcccgtgagactgctgagacccctgctgctgagaccccacttccaggacgccccccccggcgaccccagacacggccagggcgcccaggtgcccaccctgagacaggaggtgcagcccggcaacctgaagagacacctgagaatccacagcggcgagaagccctacgtgtgcatccactgccagagacagttcgccgaccccggcgccctgcagagacacgtgagaatccacaccggcgagaagccctgccagtgcgtgatgtgcggcaaggccttcacccaggccagcagcctgatcgcccacgtgagacagcacaccggcgagaagccctacgtgtgcgagagatgcggcaagagattcgtgcagagcagccagctggccaaccacatcagacaccacgacaacatcagaccccacaagtgcagcgtgtgcagcaaggccttcgtgaacgtgggcgacctgagcaagcacatcatcatccacaccggcgagaagccctacctgtgcgacaagtgcggcagaggcttcaacagagtggacaacctgagaagccacgtgaagaccgtgcaccagggcaaggccggcatcaagatcctggagcccgaggagggcagcgaggtgagcgtggtgaccgtggacgacatggtgaccctggccaccgaggccctggccgccaccgccgtgacccagctgaccgtggtgcccgtgggctag

SEQ ID NO: 338898 - DNA, 2166 bp, Artificial Sequence
  derived and/or modified sequence
atgatgtgctggccctggcccctgagcagcaagtgcagaaccagcagcagacccgccatgcccagcagccacctgctgagcagactgcccgccctgggcgagatgagaagaccctggccccagaaggtgtgccccgtgcccagccccggcggcgacaagagagccaaggaggagaaggtggccaccagcaccctgagcagactggagcaggccggcagaagcacccccatcggccccagcagagacctgaaggaggagagaggcggccaggcccagagcgccgccagcggcgccgagcagaccgagaaggccgacgcccccagagagcccccccccgtggagctgaagcccgaccccaccagcggcatggccgccgccgaggccgaggccgccctgagcgagagcagcgagcaggagatggaggtggagcccgccagaaagggcgaggaggagcagaaggagcaggaggagcaggaggaggagggcgccggccccgccgaggtgaaggaggagggcagccagctggagaacggcgaggcccccgaggagaacgagaacgaggagagcgccggcaccgacagcggccaggagctgggcagcgaggccagaggcctgagaagcggcacctacggcgacagaaccgagagcaaggcctacggcagcgtgatccacaagtgcgaggactgcggcaaggagttcacccacaccggcaacttcaagagacacatcagaatccacaccggcgagaagcccttcagctgcagagagtgcagcaaggccttcagcgaccccgccgcctgcaaggcccacgagaagacccacagccccctgaagccctacggctgcgaggagtgcggcaagagctacagactgatcagcctgctgaacctgcacaagaagagacacagcggcgaggccagatacagatgcgaggactgcggcaagctgttcaccaccagcggcaacctgaagagacaccagctggtgcacagcggcgagaagccctaccagtgcgactactgcggcagaagcttcagcgaccccaccagcaagatgagacacctggagacccacgacaccgacaaggagcacaagtgcccccactgcgacaagaagttcaaccaggtgggcaacctgaaggcccacctgaagatccacatcgccgacggccccctgaagtgcagagagtgcggcaagcagttcaccaccagcggcaacctgaagagacacctgagaatccacagcggcgagaagccctacgtgtgcatccactgccagagacagttcgccgaccccggcgccctgcagagacacgtgagaatccacaccggcgagaagccctgccagtgcgtgatgtgcggcaaggccttcacccaggccagcagcctgatcgcccacgtgagacagcacaccggcgagaagccctacgtgtgcgagagatgcggcaagagattcgtgcagagcagccagctggccaaccacatcagacaccacgacaacatcagaccccacaagtgcagcgtgtgcagcaaggccttcgtgaacgtgggcgacctgagcaagcacatcatcatccacaccggcgagaagccctacctgtgcgacaagtgcggcagaggcttcaacagagtggacaacctgagaagccacgtgaagaccgtgcaccagggcaaggccggcatcaagatcctggagcccgaggagggcagcgaggtgagcgtggtgaccgtggacgacatggtgaccctggccaccgaggccctggccgccaccgccgtgacccagctgaccgtggtgcccgtgggcgccgccgtgaccgccgacgagaccgaggtgctgaaggccgagatcagcaaggccgtgaagcaggtgcaggaggaggaccccaacacccacatcctgtacgcctgcgacagctgcggcgacaagttcctggacgccaacagcctggcccagcacgtgagaatccacaccgcccaggccctggtgatgttccagaccgacgccgacttctaccagcagtacggccccggcggcacctggcccgccggccaggtgctgcaggccggcgagctggtgttcagacccagagacggcgccgagggccagcccgccctggccgagaccagccccaccgcccccgagtgccccccccccgccgagtag

SEQ ID NO: 338899 - DNA, 723 bp, Artificial Sequence
  derived and/or modified sequence
gaagcactgccagtgcggctactgcgtcccctgctgctgagaccgcattttcaggacgctccccccggagatccaagacacggccagggtgctcaggttcctacgttgcggcaggaagtgcagccgggaaatcttaagcggcacctgcgtattcactccggagaaaaaccatatgtgtgtattcattgccagcgacagttcgcagacccaggtgcattgcagcggcacgtccgaatccacactggtgagaagccatgtcagtgtgtaatgtgcggtaaggcatttacacaggcctcttccctgatcgctcacgtccggcaacacactggggagaagccttatgtctgcgaacgctgcggaaagcggttcgtgcaaagctctcagcttgcgaatcacatcaggcaccatgataacatcagaccacataaatgttctgtgtgttccaaggcgtttgtgaatgtcggtgacttatcaaagcatatcataattcataccggagagaagccctacctttgcgacaaatgcggacgcggttttaaccgcgtcgacaacctgcggagtcacgtcaaaacagtgcaccagggtaaggcgggtatcaaaattctggagccagaggagggttccgaagtctcagtggtcacagtggatgacatggttaccttggcaaccgaggcattagccgctactgcggtgacacaactgaccgtggttcctgtcgggtag

SEQ ID NO: 338900 - DNA, 726 bp, Artificial Sequence
  derived and/or modified sequence
taagaagcactgccagtgcggttgctgagaccattactcttgcgaccacattttcaggacgcccccccaggagatcctcggcacggtcaaggcgcccaagtccccacacttcggcaagaagtgcaaccgggaaacttaaaacgacacctgcgcatccacagcggtgagaagccatacgtatgcatacactgtcaaaggcaatttgcagaccccggcgcccttcaacgccacgtacgtattcacactggggagaaaccgtgccagtgtgtcatgtgcgggaaagcgttcactcaggcctcaagcctcattgctcatgtccgtcagcatactggcgaaaagccctacgtctgtgagagatgtgggaagcggtttgtccagtctagccaactggcgaaccacatccggcaccatgacaacatacggccacataaatgtagtgtgtgctccaaagcctttgttaatgttggagatttgtctaaacacatcatcatccatacaggcgagaaaccctacctgtgtgacaagtgtggtcgtggatttaaccgcgtagataacctgcgttcccacgtgaagactgttcatcaagggaaggccggcatcaaaattctcgaacccgaagaagggtccgaggtctccgtggtgacagttgacgacatggtgactctggccactgaggccttggccgctaccgcagtcacacagctcactgtggtgccagtggggtag

SEQ ID NO: 338901 - DNA, 2166 bp, Artificial Sequence
  derived and/or modified sequence
atgatgtgttggccttggccactgtctagcaagtgccggaccagcagccggcctgctatgccttcatcccacctgctgagtcgcctgcccgccctcggagaaatgcgccgaccttggcctcagaaggtgtgccccgtgcctagccccgggggggataagagggcaaaggaggagaaagtagccacaagtaccctttctaggctggaacaggccggtcgatctacacctatcggtccatcccgtgacctgaaagaggaacgcggtggacaagctcaatccgctgctagcggagccgaacagactgagaaggcagacgcgcctcgcgagccacctccggttgagttgaaaccagatccaacctctgggatggctgccgcagaggctgaggcagcactgtctgagagttcggagcaggaaatggaggtggaacctgcgagaaagggcgaggaggaacaaaaagagcaggaggagcaggaagaagagggagctgggccggccgaggtgaaagaggagggttcgcagttagagaatggagaggccccggaggagaatgaaaatgaggaatctgccggcaccgacagcgggcaggaactgggcagtgaggctcggggtctcagatccggtacttatggcgacagaaccgagtccaaggcatacggctctgtaatacacaaatgcgaagattgcggtaaggagtttacacatactggcaacttcaaacggcatatacgcatacatacgggggaaaagccattctcgtgtcgggagtgttccaaggcattctcggacccagctgcttgtaaggcgcatgaaaagactcatagtcccctcaagccctatggctgcgaagaatgcggcaaaagttatagactaatcagtctattaaacttgcacaagaaacggcacagtggcgaggcgcgctatcggtgtgaagactgcggaaagttattcaccaccagtggcaatttgaagagacaccaactggtgcactcgggagagaagccgtaccagtgcgattactgtggccgtagcttttcggatccaactagtaagatgcgccatctggagacgcatgacacggataaggagcataagtgcccccactgtgacaagaaatttaatcaggtggggaacctcaaagctcatttgaaaatacacatcgcggacggcccgctgaaatgtcgcgagtgcggaaagcaattcactacatcggggaacctaaaacgacatctccgtatacatagcggggaaaagccatacgtgtgtatccactgtcagcgccaattcgccgatcccggcgctctccagagacacgtgaggattcacactggggaaaaaccatgtcagtgcgtgatgtgtggaaaagccttcacacaggcctcgagtttgattgctcatgttaggcaacatactggcgaaaagccttacgtgtgcgagcggtgtggcaagaggttcgtacagtctagccagcttgcaaatcacatcaggcaccacgataatatacgaccacataagtgctccgtgtgtagtaaggcatttgtcaacgtcggcgatctttctaaacatatcatcatccataccggggagaaaccctacctatgtgacaagtgcggtaggggatttaacagagtggataacctaaggagccacgtaaaaactgtccatcagggtaaagccgggatcaaaatccttgagcccgaggagggcagtgaggtctctgtggtcactgttgacgatatggtcactctggcaaccgaggcactggccgccaccgccgtgacacaactgactgtcgtcccagtgggtgccgccgtgactgccgatgagaccgaggttcttaaggccgaaatctccaaggctgttaagcaggtacaggaggaggacccaaacacacacatcttatatgcctgcgatagttgtggagataaatttctggatgctaattcactcgctcagcatgtacgcattcatacagctcaggcactcgtcatgtttcagacggatgctgatttttaccaacagtacgggccgggcgggacttggccagctggacaggtcctccaagccggtgagttagtgttcagaccgcgcgatggggcagaagggcaacccgctctggccgaaaccagccccactgctcctgagtgcccacctcccgctgagtag

SEQ ID NO: 338902 - DNA, 723 bp, Artificial Sequence
  derived and/or modified sequence
gaggccctgcctgtgcggctgctgcggcccctgctgctgcggccccacttccaggatgcccctcctggggaccccaggcatggccagggcgcccaggtgcccaccctgcggcaggaggtgcagcccggcaacctgaagaggcacctgcgcatccacagcggggagaagccctacgtgtgcatccactgccagaggcagtttgctgaccccggggccctgcagagacatgtgcgcatccacactggagagaagccctgccagtgtgtgatgtgtgggaaggccttcacccaggccagcagcctcatcgcccacgtgcggcagcacactggagagaagccctacgtgtgtgagcgctgtgggaagagatttgtgcagagcagccagctggccaaccacatccgccaccacgacaacatccggccccacaagtgcagcgtgtgcagcaaggcctttgtgaatgtgggggacctgagcaagcacatcatcatccacactggagagaagccctacctgtgtgacaagtgtggccggggcttcaacagagtggacaacctgcggagccacgtgaagacagtgcaccagggcaaggccggcatcaagatcctggagcctgaggagggcagcgaggtgtctgtggtgacagtggatgacatggtgaccctggccacagaggccctggccgccacagctgtgacccagctgactgtggtgcctgtgggctag

SEQ ID NO: 338903 - DNA, 726 bp, Artificial Sequence
  derived and/or modified sequence
tgagaagccctgcctgtgcggctgctgcggcccctgctgctgcggccccacttccaggatgcccctcctggggaccccaggcatggccagggcgcccaggtgcccaccctgcggcaggaggtgcagcccggcaacctgaagaggcacctgcgcatccacagcggggagaagccctacgtgtgcatccactgccagaggcagtttgctgaccccggggccctgcagagacatgtgcgcatccacactggagagaagccctgccagtgtgtgatgtgtgggaaggccttcacccaggccagcagcctgattgcccacgtgcggcagcacactggagagaagccctacgtgtgtgagcgctgtgggaagagatttgtgcagagcagccagctggccaaccacatccgccaccacgacaacatccggccccacaagtgcagcgtgtgcagcaaggcctttgtgaatgtgggggacctgagcaagcacatcatcatccacactggagagaagccctacctgtgtgacaagtgtggccggggcttcaacagagtggacaacctgcggagccacgtgaagacagtgcaccagggcaaggccggcatcaagatcctggagcctgaggagggcagcgaggtgtctgtggtgacagtggatgacatggtgaccctggccacagaggccctggccgccacagctgtgacccagctgactgtggtgcctgtgggctag

SEQ ID NO: 338904 - DNA, 2166 bp, Artificial Sequence
  derived and/or modified sequence
atgatgtgctggccctggcccctgagcagcaaatgtaggaccagcagcaggcctgccatgcccagcagccacctgctgagccggctgcctgccctgggggagatgaggcggccctggccccagaaggtgtgccctgtgcccagccctggaggagacaagagggccaaggaggagaaggtggccaccagcaccctgagccggctggagcaggccggccgcagcacccccatcggccccagccgggacctgaaggaggagcggggcggccaggcccagagcgctgccagcggggctgagcagacagagaaggcagatgccccccgggagcccccacctgtggagctgaagccagaccccaccagcggcatggctgctgctgaggccgaggccgccctgtctgagagcagcgagcaggagatggaggtggagcccgccaggaaaggagaggaggagcagaaggagcaggaggagcaggaggaggagggcgccggccctgctgaggtgaaggaggagggcagccagctggagaatggagaggccccagaagaaaatgaaaatgaggagagcgctggaacagacagcggccaggagctgggcagcgaggcccggggcctgcggagcggcacctacggggacagaacagagagcaaggcctacggcagcgtcatccacaagtgtgaggactgtgggaaggagttcacccacacaggcaacttcaagaggcacatccgcatccacactggagagaagcccttcagctgccgggagtgcagcaaggccttcagtgaccctgctgcctgcaaggcccacgagaagacccacagccccctgaagccctacggctgtgaggagtgtgggaagagctaccgcctcatcagcctgctgaacctgcacaagaagaggcacagcggggaggcccgctaccgctgtgaggactgtgggaagctgttcaccaccagcggcaacctgaagaggcaccagctggtgcacagcggggagaagccctaccagtgtgactactgcggccgctccttcagtgaccccaccagcaagatgaggcacctggagacccatgacacagacaaggagcacaagtgcccccactgtgacaagaagttcaaccaggtgggcaacctgaaggcccacctgaagatccacatcgcagatggccccctgaagtgccgggagtgtgggaagcagttcaccaccagcggcaacctgaagaggcacctgcgcatccacagcggggagaagccctacgtgtgcatccactgccagaggcagtttgctgaccccggggccctgcagagacatgtgcgcatccacactggagagaagccctgccagtgtgtgatgtgtgggaaggccttcacccaggccagcagcctcatcgcccacgtgcggcagcacactggagagaagccctacgtgtgtgagcgctgtgggaagagatttgtgcagagcagccagctggccaaccacatccgccaccacgacaacatccggccccacaagtgcagcgtgtgcagcaaggcctttgtgaatgtgggggacctgagcaagcacatcatcatccacactggagagaagccctacctgtgtgacaagtgtggccggggcttcaacagagtggacaacctgcggagccacgtgaagacagtgcaccagggcaaggccggcatcaagatcctggagcctgaggagggcagcgaggtgtctgtggtgacagtggatgacatggtgaccctggccacagaggccctggccgccacagctgtgacccagctgactgtggtgcctgtgggcgctgctgtgacagcagatgaaacagaggtgctgaaggccgagatcagcaaggctgtgaagcaggtgcaggaggaggaccccaacacccacatcctgtatgcctgtgacagctgtggggacaagttcctggatgccaacagcctggcccagcacgtgcgcatccacacagcccaggccctggtgatgttccagacagatgctgacttctaccagcagtatggccctgggggcacctggccagctggccaggtgctgcaggccggggagctggtgttccggcccagagatggagctgagggccagcctgccctggccgagaccagccccacagccccagaatgtcctcctcctgctgagtag

SEQ ID NO: 338905 - DNA, 723 bp, Artificial Sequence
  derived and/or modified sequence
gaggccctgcccgtgcggctgctgcggcccctgctgctgcggccccacttccaggatgcaccacccggggaccctcgtcacggacagggtgcccaggtccccaccctcagacaggaagtgcagcctggaaacctgaagagacacctgaggattcactccggagaaaagccgtatgtgtgtatccactgtcaacggcagttcgcggaccccggtgcgctccagcgtcatgttaggatacacaccggcgaaaagccctgccagtgcgtgatgtgtggtaaagctttcactcaagcttcttccctgatagctcatgtcaggcaacacaccggcgagaagccctacgtctgcgagcgctgcggaaagcggttcgtgcagtcatcccagttggctaaccacattagacaccatgacaacatcagaccacacaaatgctctgtatgttctaaggcctttgttaacgttggagacctgagcaagcacatcatcattcacaccggcgagaagccctacttatgcgacaaatgtgggcgaggtttcaacagggtggataatttgcgttcacacgtgaaaactgtacaccaaggcaaggcaggcattaagatcctcgagcctgaggaagggagcgaggtttccgttgtgactgtggatgacatggtgactttagccaccgaagcacttgcagccaccgccgttacccagctcacagtggtgcctgtgggatag

SEQ ID NO: 338906 - DNA, 726 bp, Artificial Sequence
  derived and/or modified sequence
tgagaggccctgcccgtgcggctgctgcggcccctgctgctgcggccccacttccaggatgcacccccaggggaccctagacatgggcagggggctcaggtacctacactcaggcaggaagtgcagccaggcaacctgaaacgacacctgcgcatccattccggcgagaaaccctacgtgtgtatccactgtcagaggcaatttgccgacccaggtgctcttcagcgccatgtgagaatccacactggggaaaagccttgtcagtgcgtcatgtgcgggaaggcctttacacaggcatcttcactgatcgctcacgtgcggcagcacacaggtgagaaaccctatgtgtgcgagagatgtggcaagcgatttgtgcaaagttcccagctggcgaaccacatccggcaccacgacaacatccgccctcataagtgtagcgtttgcagcaaagcctttgtgaatgtgggtgacctttctaagcatattataattcacactggcgaaaagccgtacttgtgtgataagtgcggccgtggctttaacagggtcgacaatctgagatctcatgtgaaaaccgtgcaccagggcaaggccggcatcaagattctggagcctgaagagggttctgaggtgagcgttgtaactgtggatgacatggtgacactggccactgaagctcttgcggctacagcggtgacgcagctgaccgtcgttccggtaggctag

SEQ ID NO: 338907 - DNA, 2166 bp, Artificial Sequence
  derived and/or modified sequence
atgatgtgctggccctggcccctgagcagcaagtgccggaccagctccagaccggccatgccatcctctcacctcttaagccgcctgcccgctctcggtgaaatgagacgaccctggcctcagaaggtgtgcccggtccccagccctgggggggataagcgtgcaaaagaggagaaggtggccacgagcaccttgtcccggctcgagcaagccggtaggtccacccccattgggccgagtagggacttgaaggaggagcggggaggccaggcccagagtgctgcgtcgggggccgaacagacggaaaaggccgacgcccctcgggagccccctcccgtggaactcaaaccagatcccaccagcgggatggctgccgccgaggccgaggcggcgctgtccgagagttcagaacaggagatggaagttgagcctgcccggaaaggggaggaggagcaaaaggaacaggaggagcaagaggaagagggcgccgggcccgctgaggtgaaagaagagggctcccagcttgagaacggggaggcccctgaggagaacgagaatgaagaaagcgcaggcacggacagtggtcaggaattaggatcggaagcccgcggtcttcggagcggcacatatggcgacagaacagagtcaaaagcctacggaagtgtgattcataagtgtgaggactgcggaaaagaatttacgcatacaggcaattttaaaagacacataaggattcacaccggcgagaaacctttcagttgcagggaatgttccaaagcctttagcgaccctgcagcatgcaaagcgcatgaaaagacccatagccccttgaagccttatggatgcgaggaatgcggcaaatcttatcgactgatctctctgttgaatctgcacaagaagagacatagcggtgaggcccgctaccgctgcgaagactgtggcaagttgttcaccacatcagggaacctcaagaggcaccagttggtccacagcggagaaaagccctatcaatgcgactactgtggtaggagtttttctgatccaacatccaagatgaggcatttggaaacacatgacactgacaaggaacataaatgtccacactgtgacaagaagtttaatcaagtgggaaacttgaaagcccatctaaagattcatatcgcggatggaccactcaagtgtcgggagtgcggaaaacagttcactaccagtggaaatctaaaacgccacctccgcattcacagcggcgaaaagccctatgtctgtattcactgtcagaggcaatttgcggaccctggagcacttcagcgtcacgtgagaatacatactggcgagaaaccctgccagtgcgtcatgtgtgggaaggccttcacccaagcctcgtccctaattgcccatgttagacaacataccggcgagaagccctatgtttgcgaacgttgtgggaaacgcttcgtacagtcctctcagctggcaaaccacattcgccaccacgataatatccgccctcataaatgcagtgtttgctctaaggcattcgttaacgtcggggacctttctaagcacatcatcatacatactggagagaagccgtacctgtgcgacaagtgtggcaggggctttaatagggttgataacctgcgtagtcacgtgaaaacggtgcaccaaggtaaagctggaataaagattttggagccagaagaaggatctgaggtctccgtcgtgacggtcgatgacatggtgacactggcgaccgaagctctggctgcaacagccgtcacgcaactcaccgtagtccccgtgggcgctgccgtaacagctgatgaaactgaggtgctcaaagctgagatcagcaaggccgtgaaacaagtgcaggaggaggaccctaacacccacatcctttatgcctgtgacagttgtggtgacaagttcctcgatgctaattctctggcccagcacgtaaggatccacacggcccaggccctggttatgtttcagactgacgctgacttttaccagcagtacggacccggaggtacatggcctgctggacaggtgctgcaggctggagagctggtgtttcgaccacgggacggggcagagggccaacctgccttggccgagactagtcccaccgcccctgagtgtccgcctcctgcagagtag

SEQ ID NO: 338908 - DNA, 723 bp, Artificial Sequence
  derived and/or modified sequence
gaagccctccccgtccgattactcaggcctctcctgttgaggccacacttccaggacgcccctccgggagacccgcgtcacggccagggcgctcaggtgccaaccctgcgccaggaggttcagccaggaaacctgaagaggcatctgaggatccactccggcgagaagccgtatgtgtgcatccattgtcagcggcagttcgccgaccccggagcgctccagaggcatgtgcgcatacatactggagagaaaccttgccagtgcgttatgtgtggtaaagcattcacccaggcctcttcgctaattgcgcatgtacgccagcacaccggcgagaagccatacgtatgcgaaagatgtgggaagcggttcgtgcaatcttctcaactggccaaccatattagacaccacgataacattcggccacacaagtgttctgtttgcagcaaagccttcgtgaatgtgggcgatctaagtaagcacatcattattcacaccggggagaagccctacctgtgtgacaagtgtggacgtggcttcaaccgagttgacaacctccgtagccatgttaaaactgtgcatcaaggtaaggctggcatcaaaatcctcgaacctgaggagggttccgaggtcagtgttgtgaccgtggacgatatggtgactttagccaccgaagccttggctgcgaccgcagtcactcagctcactgtggtgcccgtcggatag

SEQ ID NO: 338909 - DNA, 726 bp, Artificial Sequence
  derived and/or modified sequence
taagaggctcttcccgttcggttgctgaggccccttctgctgaggccgcacttccaggacgcacctcccggagacccaaggcatggccagggcgctcaggtgcccaccctaaggcaggaggtgcaacctgggaacctaaaaagacacctacgcattcactccggggagaagccctatgtgtgcatccattgccagagacagttcgccgatcccggagctctccagcggcacgtacgcatccatactggggagaagccgtgccagtgtgtgatgtgcggcaaggcctttacacaggcttcatctctgattgcccacgtgaggcagcataccggcgagaaaccttacgtttgtgagcgctgcggtaaacggttcgtccagagtagtcagctggccaatcacattaggcaccacgacaacattagaccccacaaatgctcagtgtgcagcaaagctttcgttaacgtgggcgacctgtcaaaacacatcattatacacaccggggaaaagccatacctatgtgacaagtgtggaagggggtttaatagagtggataacttgaggagccatgtgaagaccgtgcaccagggcaaagccggaattaagatcctggaacccgaagaggggtccgaagtgtctgtggtaacagtagacgatatggtgactctggctactgaggcactggcggctaccgctgttacacagctgaccgtggttcctgtgggctag

SEQ ID NO: 338910 - DNA, 2166 bp, Artificial Sequence
  derived and/or modified sequence
atgatgtgttggccctggccactgtcgtccaaatgtcggactagtagcagacccgcaatgccaagttcacacctactgagtcggctccctgcgctgggcgaaatgcgtcgtccctggccacagaaagtgtgccctgttccttcccctggaggggacaagcgtgccaaggaggagaaagtggccacaagcaccctgagtcgcttagagcaggccggacggagtacgcctattggtcctagccgagacctgaaggaagaacgcggtgggcaagctcaaagcgccgcaagcggagctgaacagacagaaaaggccgatgcgcctagagaaccccctccggtggaactgaaaccagatccaaccagcggaatggccgctgccgaggccgaggccgctctgtctgaatcttccgaacaggagatggaggtagagccggctcgaaagggcgaggaggagcagaaagaacaggaggagcaggaggaggagggggcaggacccgctgaggtgaaggaagagggatcacagcttgagaacggggaagcgcctgaggaaaatgagaacgaggaaagtgcaggcaccgactccgggcaggagctagggtctgaagcccgagggttaagaagcggaacatatggcgatcggactgaaagcaaggcttacgggtctgtgatacacaagtgtgaagactgcggcaaggaatttacacatactggaaacttcaaacggcacatacgtatccacacaggagagaagccgttttcttgtagagagtgctccaaagcttttagcgacccagccgcatgcaaggctcacgagaaaactcactctccactgaaaccctacggatgcgaggaatgtgggaagtcataccgccttatctccctgctcaatctacacaagaaacgacactccggcgaagccagatacaggtgtgaggattgcggaaaacttttcaccaccagtggaaacctgaaaagacatcagctagttcattccggagagaagccataccaatgcgattactgcggtcgaagcttctccgatccgaccagtaagatgcggcacctggagacccacgacaccgataaggagcacaagtgtccccactgcgataagaagttcaatcaggtcggaaacttaaaggctcacctgaagatccacattgccgatggccctctgaagtgcagggagtgcgggaaacaatttacaacctctgggaatctgaaacggcacctccggattcattcaggagaaaaaccttatgtgtgcatccattgtcaacggcagtttgctgacccgggagcattgcaacgccacgtgcgaatccacacaggcgagaaaccatgtcagtgcgtcatgtgcggcaaggcattcacacaggcatctagcctcatcgcgcatgtaaggcaacatactggggagaaaccgtatgtgtgcgaacgatgcggcaaaaggtttgtgcagtcatctcagttagccaaccacattagacaccatgataacattcgcccacacaaatgtagtgtgtgctccaaggcgttcgtgaatgtcggcgatttatccaaacatattatcatccacactggagaaaaaccgtatctctgcgataagtgcggccgaggattcaacagagtagataatctcagatctcatgtcaagacagtccatcagggaaaagctggcataaagatactcgagcccgaggagggatcagaagtatccgtcgttaccgtcgacgacatggtcacactcgctacagaagcactcgcagccactgccgtgactcagctgactgtcgtcccagtcggggcagccgtgaccgccgatgagaccgaggtgttgaaagccgagatttcgaaggcagttaagcaggttcaggaggaagatcctaatacccacattttgtacgcctgtgactcttgcggggacaaattcctggacgcaaattcccttgcacagcacgttaggattcacactgcccaggccctggtgatgttccagacagacgcggatttctatcagcaatacgggcctggtgggacttggccagctggacaagtgctgcaggctggggaattggtcttcaggccacgcgatggggctgagggccagcctgctctagccgagaccagccctaccgcacctgagtgtcctcctccagccgaatag

SEQ ID NO: 338911 - DNA, 2511 bp, Artificial Sequence
  derived and/or modified sequence
aacatggcggcgccctttgtctgctctggagtgccgtccccggccttctcgcggccgtgatgcacctccctctgcggtggggtccgggacatggcaggtaatgagccggacgaggggagccaagctggagtttacacaggcaaactgtcagaaaagagtagcctgggctgtctggaaatctgaggcctggggcaggtgctggagtttatgtacacggccaagctgagcctgagccctgagaacgtggatgatgtgctggccgtggccactttcctccaaatgcaggacatcatcacggcctgccatgccctcaagtcacttgctgagccggctaccagccctgggggaaatgcggaggccttggccacagaaggtctgccctgttccatctccaggaggggacaagagagccaaagaggagaaggtggccaccagcacgctgagcaggctggagcaggcaggacgcagcacacccataggccccagcagggacctcaaggaggagcgcggcggtcaggcccagagtgcggccagcggtgcagagcagacagagaaagccgatgcgccccgggagccgccgcctgtggagctcaagccagaccccacgagtggcatggctgctgcagaagctgaggccgctttgtccgagagctcggagcaagaaatggaggtggagcccgcccggaaaggggaagaggagcaaaaggagcaagaggagcaagaggaggagggcgcagggccagctgaggtcaaggaggagggttcccagctggagaacggagaggcccccgaggagaacgagaatgaggagtcagcgggcacagactcggggcaggagctcggctccgaggcccggggcctgcgctcaggcacctacggcgaccgcacggagtccaaggcctacggctccgtcatccacaagtgcgaggactgtgggaaggagttcacgcacacggggaacttcaagcggcacatccgcatccacacgggggagaagcccttctcgtgccgggagtgcagcaaggccttttccgacccggccgcgtgcaaggcccatgagaagacgcacagccctctgaagccctacggctgcgaggagtgcgggaagagctaccgcctcatcagcctgctgaacctgcacaagaagcggcactcgggcgaggcgcgctaccgctgcgaggactgcggcaagctcttcaccacctcgggcaacctcaagcgccaccagctggtgcacagcggcgagaagccctaccagtgcgactactgcggccgctccttctccgaccccacttccaagatgcgccacctggagacccacgacacggacaaggagcacaagtgcccacactgcgacaagaagttcaaccaggtagggaacctgaaggcccacctgaagatccacatcgctgacgggcccctcaagtgccgagagtgtgggaagcagttcaccacctcagggaacctgaagcggcaccttcggatccacagcggggagaagccctacgtgtgcatccactgccagcgacagtttgcagaccccggcgctctgcagcggcacgtccgcattcacacaggtgagaagccatgccagtgtgtgatgtgcggtaaggccttcacccaggccagctccctcatcgcccacgtgcgccagcacaccggggagaagccctacgtctgcgagcgctgcggcaagagattcgtccagtccagccagttggccaatcatattcgccaccacgacaacatccgcccacacaagtgcagcgtgtgcagcaaggccttcgtgaacgtgggggacctgtccaagcacatcatcattcacactggagagaagccttacctgtgtgataagtgtgggcgtggcttcaaccgggtagacaacctgcgctcccacgtgaagaccgtgcaccagggcaaggcaggcatcaagatcctggagcccgaggagggcagtgaggtcagcgtggtcactgtggatgacatggtcacgctggctaccgaggcactggcagcgacagccgtcactcagctcacagtggtgccggtgggagctgcagtgacagccgatgagacggaagtcctgaaggccgagatcagcaaagctgtgaagcaagtgcaggaagaagaccccaacactcacatcctctacgcctgtgactcctgtggggacaagtttctggatgccaacagcctggctcagcatgtgcgaatccacacagcccaggcactggtcatgttccagacagacgcggacttctatcagcagtatgggccaggtggcacgtggcctgccgggcaggtgctgcaggctggggagctggtcttccgccctcgcgacggggctgagggccagcccgcactggcagagacctcccctacagctcctgaatgtcccccgcctgccgagtgagctggcggcccttctgactgtttatttaaggatggatggcaccctggaaccgggaagggtggcctgttccctagagagaataaattggattattttct

SEQ ID NO: 338912 - protein, 307 aa, Artificial Sequence
  derived and/or modified sequence
MNQAELMQLDMEGMLQHFQKVIPHQFDGVPDKLIQAAYQVKYNSKKMKKLEKEYTTIKTKEMEEQVEIKRLRTENRLLKQRIETLEKESASLADRLIQGQVTRAQEAEENYLIKRELATIKQQSDEASAKLEQAENTIRKLQHQQQWHKCSSNYNEDFVLQLEKELVQARLSEAESQCALKEMQDKVLDIEKRNNSLPDENNIARLQEELIAVKLREAEAIMGLKELRQQVKDLEEHWQRHLARTTGRWKDPPKKNAMNELQDELMTIRLREAETQAEIREIKQRMMEMETQSGTCGPLLKIIFFNA

SEQ ID NO: 338913 - DNA, 924 bp, Artificial Sequence
  derived and/or modified sequence
atgaatcaagccgagctgatgcagttagacatggagggtatgcttcagcacttccagaaagtgattccccatcagttcgatggcgtccctgataaactgattcaggctgcctaccaggtgaagtacaattcgaagaagatgaaaaaactggagaaggaatacactacgataaaaactaaggagatggaagaacaagtggagatcaaacgactcaggacagaaaaccgccttctgaaacaacggattgaaactctggagaaagaaagcgcttccctggccgataggctcatacaagggcaggtgacccgggcccaggaggcagaagagaattacctaatcaaacgcgagttagctaccattaagcagcagtccgatgaggccagcgctaagctggaacaagctgagaacaccattagaaaattgcaacaccaacaacagtggcacaaatgtagcagtaactacaacgaggactttgtgctccagttggagaaggaactcgttcaagcacggctcagcgaggctgagtcccagtgtgccctgaaagaaatgcaggacaaagtgctagatatagagaagcgaaataatagtctgcccgacgaaaacaacatcgcccgtttgcaggaagagctgattgccgtgaagctgcgggaggccgaagcaattatgggtttgaaggaactcagacagcaggtcaaggacctggaggagcactggcaacggcatctggctcgaacaaccggtagatggaaagatcctcccaagaagaatgctatgaatgagctccaggatgaactcatgaccatccgcctgcgcgaagcagaaacccaggccgaaatcagggagattaagcagaggatgatggagatggaaacacagagtggtacctgtggcccccttctaaagatcattttttttaatgcatag

SEQ ID NO: 338914 - DNA, 924 bp, Artificial Sequence
  derived and/or modified sequence
atgaaccaggccgagctgatgcagctggacatggagggcatgctgcagcacttccagaaggtgatcccccaccagtttgatggagtgcctgacaagctgatccaggccgcctaccaggtgaagtacaacagcaagaagatgaagaagctggagaaggagtacaccaccatcaagaccaaggagatggaggagcaggtggagatcaagaggctgaggacagagaaccggctgctgaagcagagaattgagaccctggagaaggagagcgccagcctggccgacaggctcatccagggccaggtgacccgggcccaggaggccgaggagaactacctgatcaagcgggagctggccaccatcaagcagcagagtgatgaggccagcgccaagctggagcaggccgagaacaccatcaggaagctgcagcaccagcagcagtggcacaagtgcagcagcaactacaatgaagattttgtgctgcagctggagaaggagctggtgcaggcccggctgtctgaggccgagagccagtgtgccctgaaggagatgcaggacaaggtgctggacatcgagaagaggaacaacagcctgcctgatgagaacaacatcgcccggctgcaggaggagctgattgctgtgaagctgcgggaggccgaggccatcatgggcctgaaggagctgcggcagcaggtgaaggacctggaggagcactggcagaggcacctggcccggaccaccggccgctggaaggacccccccaagaagaatgccatgaatgagctgcaggatgagctgatgaccatccggctgcgggaggccgagacccaggccgagatccgggagatcaagcagaggatgatggagatggagacccagagcggcacctgtggccccctgctgaagatcatcttcttcaatgcctag

SEQ ID NO: 338915 - DNA, 924 bp, Artificial Sequence
  derived and/or modified sequence
atgaaccaggccgagctgatgcagctggacatggagggcatgctgcagcatttccagaaggtgatcccccaccagtttgacggggttcctgataaactgattcaagccgcataccaggtgaaatataatagcaagaagatgaagaagttggagaaggagtatacaaccataaaaaccaaagaaatggaagagcaagtcgagatcaaaaggctccgcaccgaaaataggttgctcaagcagagaatcgagacactggaaaaagagtccgccagcttagcagatcgtctgatccagggccaagtaacacgtgctcaggaagcggaggagaattacctgatcaaacgggagttggcgaccattaagcaacaatctgacgaggctagtgccaagcttgagcaggccgagaataccatacgcaagctccagcaccaacagcaatggcacaaatgctcgtccaactacaatgaggactttgtcttacagcttgaaaaggaactcgtgcaggccaggctgtccgaggcagagtcccagtgtgcccttaaagaaatgcaggataaagtgctggatattgagaaaagaaataattccttacccgacgagaacaatatagccagattacaagaagagctgatcgcggtcaaacttcgcgaggctgaggcaattatggggctaaaagagcttagacagcaggttaaagatctcgaggagcactggcaacgacacctcgcacgcaccaccgggcggtggaaggaccccccaaaaaaaaacgccatgaatgagcttcaggatgagctcatgaccattcggctgcgggaggcggaaacacaagcggagatacgcgagatcaaacaacggatgatggaaatggagacacagtcaggcacctgtggccccttactgaagataattttcttcaacgcgtag

SEQ ID NO: 338916 - DNA, 924 bp, Artificial Sequence
  derived and/or modified sequence
atgaaccaggcagagctcatgcagctagacatggaaggtatgttacagcactttcaaaaggttatcccccatcagttcgacggagtgcctgacaagcttattcaggccgcataccaggtaaagtataacagtaaaaagatgaagaagctggaaaaagaatacactactataaagaccaaggagatggaggagcaggtggaaatcaagaggcttcgcaccgagaatcggctccttaagcagcgcatagagaccttagaaaaagagtctgcatccctcgctgaccgcttaattcaggggcaagtgacccgagcccaggaggccgaagaaaactacttaattaaacgcgagctcgcgacaattaaacagcaatccgacgaagccagcgcgaagctggaacaggccgagaacactattcgtaaacttcaacaccagcagcagtggcacaaatgttctagcaactataacgaggatttcgtacttcagttggagaaagaactggtgcaggcacgactgtccgaagccgagtcccagtgtgcgcttaaagaaatgcaggataaggttctggacatcgagaaacggaataatagcctgcccgatgaaaataacatcgctcgactacaggaagagctgatagcagtcaagcttcgagaggctgaggccatcatgggactgaaggagttacggcagcaggtgaaggatctagaggagcattggcagcgtcacctggcccgaacaacaggtcgttggaaggacccaccgaaaaagaatgccatgaatgagctgcaagatgaacttatgacaatcagactccgggaggcagaaacacaggcagaaattcgcgagataaagcagagaatgatggagatggagacccaaagtggaacttgcggaccactgctgaaaatcattttcttcaacgcctag

SEQ ID NO: 338917 - DNA, 924 bp, Artificial Sequence
  derived and/or modified sequence
atgaaccaggccgagctgatgcagctggacatggagggcatgctgcagcacttccagaaggtgatcccccaccagttcgacggcgtgcccgacaagctgatccaggccgcctaccaggtgaagtacaacagcaagaagatgaagaagctggagaaggagtacaccaccatcaagaccaaggagatggaggagcaggtggagatcaagagactgagaaccgagaacagactgctgaagcagagaatcgagaccctggagaaggagagcgccagcctggccgacagactgatccagggccaggtgaccagagcccaggaggccgaggagaactacctgatcaagagagagctggccaccatcaagcagcagagcgacgaggccagcgccaagctggagcaggccgagaacaccatcagaaagctgcagcaccagcagcagtggcacaagtgcagcagcaactacaacgaggacttcgtgctgcagctggagaaggagctggtgcaggccagactgagcgaggccgagagccagtgcgccctgaaggagatgcaggacaaggtgctggacatcgagaagagaaacaacagcctgcccgacgagaacaacatcgccagactgcaggaggagctgatcgccgtgaagctgagagaggccgaggccatcatgggcctgaaggagctgagacagcaggtgaaggacctggaggagcactggcagagacacctggccagaaccaccggcagatggaaggacccccccaagaagaacgccatgaacgagctgcaggacgagctgatgaccatcagactgagagaggccgagacccaggccgagatcagagagatcaagcagagaatgatggagatggagacccagagcggcacctgcggccccctgctgaagatcatcttcttcaacgcctag

SEQ ID NO: 338918 - DNA, 2007 bp, Artificial Sequence
  derived and/or modified sequence
atggttaccaacaaaatgactgctgcctttagaaaccctagtgggaaacaggtggcgacagacaaagttgcagaaaagctgagctctactctctcatgggtgaagaacacagtatcgcatacagtcagtcagatggccagtcaggtggcaagtccatctacttcattacataccacatcctcatctaccacactatcaacaccagccctttcaccatcttccccatcacagttgagtccagacgacttagaactcctggctaaactggaagaacagaatagattgttagaaacggatagtaagtctttaagatctgtaaatgggtcaagaagaaacagtggctcttctcttgtgtcgagttcatcagcctctagcaacctcagtcaccttgaagaagattcttggattctttggggaagaattgttaatgaatgggaagatgtacgcaaaaagaaggaaaagcaagttaaggaacttgttcataaagggataccccatcactttagagcaatagtttggcaacttttatgcagtgcacaaagtatgccaattaaggatcagtattcagaactcctgaaaatgacctcgccttgtgaaaaattgatccgaagggacattgctagaacttaccctgaacacaacttttttaaggaaaaagatagccttggacaggaggttttatttaatgtaatgaaggcttactctttagtagatcgtgaggttggttactgtcaaggaagtgcttttatagttggattgttgcttatgcagatgccagaagaagaagctttctgtgtatttgttaaattaatgcaagattatagacttcgtgaactttttaaaccaagtatggcagaattgggcctttgtatgtaccagtttgaatgtatgatacaggagcatcttccagagctctttgtacattttcaatctcagagttttcatacctcaatgtatgcatcatcctggtttctgactatctttcttacaacttttccactaccaattgcaacaaggatatttgatatctttatgtctgagggtttagaaatagtgtttcgtgtaggattagcacttcttcagatgaatcaggcagaactgatgcaacttgacatggaagggatgttacagcactttcaaaaggtcattccacatcagtttgatggtgtcccagacaagctaatccaagcagcttaccaagtcaaatacaattcaaaaaaaatgaaaaagcttgaaaaggaatacactacaataaaaacgaaagaaatggaagagcaagttgaaattaaaaggttacgcacagaaaatagacttttaaaacagcgcatcgagacattagaaaaagaaagtgcttccttggcagatagattgatacagggacaagtgacaagagcccaggaggctgaggaaaactacctcataaaacgggagttggccaccatcaaacagcagagtgatgaggccagtgctaagctggagcaagctgaaaataccatcaggaagctccagcaccaacaacaatggcataaatgcagttccaactacaacgaagattttgtgctacagctagagaaggaattggtccaagcccgactgagtgaagctgagtctcagtgtgcattaaaagagatgcaggataaagtcttggatatagagaagaggaataactcccttcctgatgagaataatattgcaaggcttcaggaagaactcattgctgtgaaacttagagaagcagaagccattatgggtttgaaagaacttagacagcaagtcaaggatttagaggaacactggcagcgccacttagctcgtactactgggagatggaaagacccacccaagaaaaatgctatgaatgagttacaagatgaactgatgaccattcgacttagagaagctgaaacacaagcagaaataagagaaataaaacaaaggatgatggaaatggaaacacagtctggaacctgtggaccccttcttaaaataatattttttaatgcgtaa

SEQ ID NO: 338919 - DNA, 480 bp, Artificial Sequence
  derived and/or modified sequence
atggcaaccgttgacccagccggactggcacttcatcctgcatgtccccgtgtgtgggggccatcggaccaacaccgccctccgcaggaaggaagccacctgcctgcgagaaggcgcggtttggctagaaatcaatcttgtcagcaccccgatctcggacctcccgcgtcccgcactgaaaaagaaatgtcagccgtggccgccccaggttgtgccgctcttctccaaccccctcagcagaccagtgtgcagtcatttaagggtatgtctctgagtgttgaagctgggctctgcggagaaccggccggcaagctgctcggggaaggtggaggacagcgggaggcctctctcgtgggaaaaaaaggatgggagtggcggcgtcatagaggtagaaccctgtcagaggaagatcagggggcgcgccccttttcccctggttcctgcgccctgcggggagaccgcgaagggggaattggttag

SEQ ID NO: 338920 - DNA, 480 bp, Artificial Sequence
  derived and/or modified sequence
atggccaccgtggaccccgccggcctggccctgcaccccgcctgccctcgcgtctggggccccagcgatcagcatagacctcctcaggagggttcccacctcccagctagaaggagaggactggcccgtaaccaatcttgccagcaccccgacctcggcccaccagcaagccgcactgagaaagagatgtccgccgtcgcagccccaggctgcgctgccctccttcagccaccgcaacagacttcagtgcagtctttcaagggcatgtccctaagtgttgaagcagggctttgcggggaacccgcgggaaagctgctaggcgagggaggggggcagagagaagcatccttggtggggaaaaaaggatgggagtggcggaggcaccgcgggcgaaccctgagcgaggaggaccagggggccaggccgttcagccctggatcctgtgccctgcgcggtgacagggagggcgggattggctag

SEQ ID NO: 338921 - DNA, 480 bp, Artificial Sequence
  derived and/or modified sequence
atggctacagtcgatcctgctggactagcactgcatcctgcttgtcctcgcgtgtggggcccttctgaccaacatcgccctcctcaagaaggaagccatttgcccgcacgcagacgtggcctggccaggaatcaatcgtgccagcatccagacttgggccctcctgcctctcgaactgaaaaggaaatgtccgctgtggctgccccaggctgcgcagcactcctccaacctcctcagcagacatcagtccaaagttttaagggcatgtctctgtccgttgaggcagggctttgcggggagcctgcaggtaagctcctgggggaagggggaggccaacgggaagcttccctggtaggcaaaaaaggctgggaatggcgtcggcaccggggacgtacactcagcgaagaggatcaaggggctagaccctttagcccaggctcatgcgctctgagaggcgaccgcgaagggggtatagggtag

SEQ ID NO: 338922 - protein, 187 aa, Artificial Sequence
  derived and/or modified sequence
MFRGRTAVFADQVIVGNASLRLKNVQLTDAGTYKCYIITSKGKGNANLEYKTGAFSMPEVNVDYNASSETLRCEAPRWFPQPTVVWASQVDQGANFSEVSNTSFELNSENVTMKVVSVLYNVTINNTYSCMIENDIAKATGDIKVTESEIKRRSHLQLLNSKASLCVSSFFAISWALLPLSPYLMLK

SEQ ID NO: 338923 - protein, 285 aa, Artificial Sequence
  derived and/or modified sequence
MVLLTSRMKPLTSRIISIIIILAGAIALIIGFGISGRHSITVTTVASAGNIGEDGILSCTFEPDIKLSDIVIQWLKEGVLGLVHEFKEGKDELSEQDEMFRGRTAVFADQVIVGNASLRLKNVQLTDAGTYKCYIITSKGKGNANLEYKTGAFSMPEVNVDYNASSETLRCEAPRWFPQPTVVWASQVDQGANFSEVSNTSFELNSENVTMKVVSVLYNVTINNTYSCMIENDIAKATGDIKVTESEIKRRSHLQLLNSKASLCVSSFFAISWALLPLSPYLMLK

SEQ ID NO: 338924 - protein, 569 aa, Artificial Sequence
  derived and/or modified sequence
LGQRQLFQALRVEHRSPEPWLPRAVGGRRRAPDHQCRLPSRGGRPRGSCEAREHLGDRLQRGREDPGWAFLTRELVVKTLIVAEPHVLHAYRMCRPGQPPGSESVCFEVLGFDILLDRKLKPWLLEINRAPSFGTDQKIDYDVKRGVLLNALKLLNIRTSDKRRNLAKQKAEAQRRLYGQNSIKRLLPGSSDWEQQRHQLERRKEELKERLAQVRKQISREEHENRHMGNYRRIYPPEDKALLEKYENLLAVAFQTFLSGRAASFQRELNNPLKRMKEEDILDLLEQCEIDDEKLMGKTTKTRGPKPLCSMPESTEIMKRPKYCSSDSSYDSSSSSSESDENEKEEYQNKKREKQVTYNLKPSNHYKLIQQPSSIRRSVSCPRSISAQSPSSGDTRPFSAQQMISVSRPTSASRSHSLNRASSYMRHLPHSNDACSTNSQVSESLRQLKTKEQEDDLTSQTLFVLKDMKIRFPGKSDAESELLIEDIIDNWKYHKTKVASYWLIKLDSVKQRKVLDIVKTSIRTVLPRIWKVPDVEEVNLYRIFNRVFNRLLWSRGQGLWNCFCDSGYL

SEQ ID NO: 338925 - DNA, 1710 bp, Artificial Sequence
  derived and/or modified sequence
ctgggccagagacagctgttccaggccctgagagtggagcacagaagccccgagccctggctgcccagagccgtgggcggcagaagaagagcccccgaccaccagtgcagactgcccagcagaggcggcagacccagaggcagctgcgaggccagagagcacctgggcgacagactgcagagaggcagagaggaccccggctgggccttcctgaccagagagctggtggtgaagaccctgatcgtggccgagccccacgtgctgcacgcctacagaatgtgcagacccggccagccccccggcagcgagagcgtgtgcttcgaggtgctgggcttcgacatcctgctggacagaaagctgaagccctggctgctggagatcaacagagcccccagcttcggcaccgaccagaagatcgactacgacgtgaagagaggcgtgctgctgaacgccctgaagctgctgaacatcagaaccagcgacaagagaagaaacctggccaagcagaaggccgaggcccagagaagactgtacggccagaacagcatcaagagactgctgcccggcagcagcgactgggagcagcagagacaccagctggagagaagaaaggaggagctgaaggagagactggcccaggtgagaaagcagatcagcagagaggagcacgagaacagacacatgggcaactacagaagaatctacccccccgaggacaaggccctgctggagaagtacgagaacctgctggccgtggccttccagaccttcctgagcggcagagccgccagcttccagagagagctgaacaaccccctgaagagaatgaaggaggaggacatcctggacctgctggagcagtgcgagatcgacgacgagaagctgatgggcaagaccaccaagaccagaggccccaagcccctgtgcagcatgcccgagagcaccgagatcatgaagagacccaagtactgcagcagcgacagcagctacgacagcagcagcagcagcagcgagagcgacgagaacgagaaggaggagtaccagaacaagaagagagagaagcaggtgacctacaacctgaagcccagcaaccactacaagctgatccagcagcccagcagcatcagaagaagcgtgagctgccccagaagcatcagcgcccagagccccagcagcggcgacaccagacccttcagcgcccagcagatgatcagcgtgagcagacccaccagcgccagcagaagccacagcctgaacagagccagcagctacatgagacacctgccccacagcaacgacgcctgcagcaccaacagccaggtgagcgagagcctgagacagctgaagaccaaggagcaggaggacgacctgaccagccagaccctgttcgtgctgaaggacatgaagatcagattccccggcaagagcgacgccgagagcgagctgctgatcgaggacatcatcgacaactggaagtaccacaagaccaaggtggccagctactggctgatcaagctggacagcgtgaagcagagaaaggtgctggacatcgtgaagaccagcatcagaaccgtgctgcccagaatctggaaggtgcccgacgtggaggaggtgaacctgtacagaatcttcaacagagtgttcaacagactgctgtggagcagaggccagggcctgtggaactgcttctgcgacagcggctacctgtag

SEQ ID NO: 338926 - DNA, 1710 bp, Artificial Sequence
  derived and/or modified sequence
ctgggacaacgccagctgtttcaggccctgagagtggagcacaggtctcccgagccttggttgcctagggctgttggcggacgacgcagagcgcccgatcatcagtgcagattaccaagccgtggcgggagaccccggggaagttgcgaggcccgtgagcacctcggcgataggttgcagcggggcagagaagaccctggctgggccttcctgaccagggagcttgttgtgaaaacactgatagtcgccgagccgcatgttttgcacgcatacagaatgtgcagacccggccagccgccagggtccgaatctgtctgctttgaggtgttgggatttgacatcttgcttgatcggaagctcaagccctggctgctggagattaacagagccccttcgttcggaaccgaccagaagattgactacgacgtgaaacgcggagtactcctgaatgctttaaaactgctaaatatcagaactagtgacaagcgccgcaatttggccaagcaaaaagcggaagcacaacgaagattgtatgggcagaactcgataaagcgtttgcttcctgggtcttcagactgggagcagcagcgccaccagctggagcgaaggaaggaagaactgaaagaacggcttgcccaggtaagaaagcaaatctccagggaggagcacgaaaaccgccacatgggtaactacagacgcatctaccctccagaggataaggccttactggaaaaatacgaaaacctcctggccgttgcttttcagacattcctgagcggcagagctgccagcttccagcgcgagctgaataatccgctcaagaggatgaaggaggaggatatcttagaccttctggagcagtgtgaaatagacgatgagaaattaatgggcaagaccacaaagactcggggaccaaagcccctgtgctcaatgccagagtcgaccgagatcatgaaacggcccaaatactgtagctctgatagcagctacgattcaagtagttcttcttcagaatcagacgagaacgaaaaggaagaatatcagaataaaaaacgcgagaagcaagtcacttacaatctgaaaccatctaatcactataagcttattcagcagcctagctctatccgacgctccgtcagctgtcctcggagcatcagtgcgcagtctccaagctcaggggacaccagacctttttcagctcagcagatgatctctgttagtcgccctacatctgccagccggagccactctctcaatcgcgcaagcagttatatgagacatctgcctcacagcaacgacgcttgctctacaaactctcaggtgtctgagtcactccggcagcttaaaacaaaggaacaggaggacgaccttacatcccagactctgtttgttttaaaggacatgaaaatcaggttccctggaaaatcggatgccgagtctgaactgctgatcgaggacataatcgacaactggaagtatcacaagactaaggtcgctagttattggttaattaagctcgattccgtgaaacagcgtaaggttctcgacatcgtcaaaacctctattcgtacagtacttcctcgtatctggaaagtgcccgacgtcgaggaggtgaatctgtatcgcatctttaaccgggtctttaatcggcttctgtggtctcgaggccaaggactgtggaactgcttctgtgactcaggctacctctag

SEQ ID NO: 338927 - DNA, 1710 bp, Artificial Sequence
  derived and/or modified sequence
ctgggccagaggcagctgttccaggccctgcgggtggagcacaggagccctgagccctggctgcccagggctgtgggcggcagaagaagagccccagaccaccagtgccgcctgcccagccggggcggccggccccggggcagctgtgaggcccgggagcacctgggggaccggctgcagaggggccgggaggaccccggctgggccttcctgacccgggagctggtggtgaagaccctgattgtggccgagccccacgtgctgcacgcctacaggatgtgccggcccggccagcccccaggcagcgagagcgtgtgctttgaggtgctgggctttgacatcctgctggacaggaagctgaagccctggctgctggagatcaacagagcccccagctttggaacagaccagaagattgattatgatgtgaagaggggcgtgctgctgaatgccctgaagctgctgaacatccgcaccagtgacaagagaagaaacctggccaagcagaaggccgaggcccagaggcggctgtatggccagaacagcatcaagaggctgctgcccggcagcagtgactgggagcagcagaggcaccagctggagaggaggaaggaggagctgaaggagcggctggcccaggtgaggaagcagatcagccgggaggagcacgagaacagacacatgggcaactaccgccgcatctacccacctgaggacaaggccctgctggagaagtatgagaacctgctggccgtggccttccagaccttcctgagcggccgggccgccagcttccagcgggagctgaacaaccccctgaagaggatgaaggaggaggacatcctggacctgctggagcagtgtgaaattgatgatgagaagctgatgggcaagaccaccaagacccggggccccaagcccctgtgcagcatgcctgagagcacagagatcatgaagaggcccaagtactgcagcagtgacagcagctatgacagcagcagcagcagcagcgagagtgatgaaaatgagaaggaggagtaccagaacaagaagcgggagaagcaggtgacctacaacctgaagcccagcaaccactacaagctgatccagcagcccagcagcatccgccgctctgtgtcctgccccaggagcatcagcgcccagagccccagcagcggggacacccggcccttcagcgcccagcagatgatctctgtgtcccggcccaccagcgccagccgcagccacagcctgaacagagccagcagctacatgaggcacctgccccacagcaatgatgcctgcagcaccaacagccaggtgtctgagagcctgcggcagctgaagaccaaggagcaggaggatgacctgaccagccagaccctgtttgtgctgaaggacatgaagatccgcttccctgggaagagtgatgctgagagcgagctgctgattgaggacatcatcgacaactggaagtaccacaagaccaaggtggccagctactggctgatcaagctggacagcgtgaagcagaggaaggtgctggacatcgtgaagaccagcatcagaacagtgctgccccgcatctggaaggtgcctgatgtggaggaggtgaacctgtaccgcatcttcaacagagtcttcaaccggctgctgtggagccggggccagggcctgtggaactgcttctgtgacagcggctacctgtag

SEQ ID NO: 338928 - DNA, 1710 bp, Artificial Sequence
  derived and/or modified sequence
ctgggccagcggcagctgttccaggccctgcgggtggagcaccggtctcctgaaccttggttgccacgggccgttggcggacgccggcgggctcccgatcaccagtgtagactgccatcacggggcggccgaccccgtggtagctgtgaagcaagggagcacctgggcgatagacttcagcgcggtcgcgaggaccccggttgggcttttctgactcgagaactggtggtgaagacactgattgtggctgaaccccacgtgttgcacgcgtaccggatgtgccgccctgggcagccacccgggagtgagagcgtgtgcttcgaagtgttgggattcgacattttattggatcgtaagctgaagccatggctgcttgagatcaacagagctccctccttcgggactgatcagaagatcgactacgatgtgaagcgcggcgtgctactgaatgccctcaagttgctaaatattcgcacaagcgacaagcgccggaatttagctaagcagaaggcggaggcacaaaggcgtctctatgggcagaattcaattaaacgcttgctgccaggttcttcagactgggagcagcagaggcatcagctagaacggagaaaggaagaattaaaagaaagactggcacaggtgagaaaacagatttccagggaggaacacgagaaccgccacatgggtaactaccgccgaatctatccgcccgaggacaaggccctcctggagaaatatgaaaacttgctggccgtggcctttcagacatttttgtctggccgtgcagcctcttttcagcgtgagctgaataatcccctgaaaagaatgaaggaggaagacatcttggacctgcttgagcagtgcgagatcgacgacgaaaagctgatgggtaagaccacaaaaacgcgaggaccaaagccgctctgtagtatgcctgaatcaaccgagatcatgaagagacccaagtattgtagttcagactcctcatatgacagttcaagtagttcgtctgaaagcgacgagaatgagaaggaagagtaccagaacaaaaaaagagaaaagcaggtcacatataatctcaagccttccaaccactacaagcttatccagcagcccagttctattcgaaggagcgtgtcttgccctagaagtattagtgcacagtctccatcgtctggagatactcgccccttttctgctcaacagatgatttccgtgagcagacctactagtgcttccagaagccatagtctgaacagagccagtagctatatgcgccatctgcctcattccaatgacgcttgctccacaaactcccaggtgtctgaatccctgcgacagttaaagaccaaagaacaagaagacgacctgacatcacaaacgctcttcgttttgaaggatatgaaaattcgctttcctggcaagtccgatgcggaatccgagctactaattgaggatatcattgacaactggaaatatcataagactaaggtagctagctactggttaatcaaactcgattcagttaagcagcggaaggtcttggatattgtcaagacgtccattagaaccgttctcccaaggatatggaaggtacctgacgtcgaagaggtgaacctgtataggatcttcaatagggtgttcaaccggcttctgtggagccggggacaaggcctgtggaactgcttctgcgatagcggttacctgtag

SEQ ID NO: 338929 - DNA, 1710 bp, Artificial Sequence
  derived and/or modified sequence
ctgggtcaacggcagctgttccaggccctccgcgttgaacacagaagtccagagccttggttgccccgtgcagttggcggtcggagacgggcacccgaccatcaatgtcgcctgccatctaggggcggacggcctaggggtagctgtgaggcaagagagcaccttggcgatagactccagcgaggaagggaggatcctggttgggcctttctgacccgcgaactggtggtaaaaaccttgattgttgccgagccacacgtgctccacgcctaccgaatgtgtaggccagggcagcctcccggtagtgagtccgtttgcttcgaagtgttgggcttcgatatactgttggacaggaaacttaaaccttggctgctggagatcaatcgtgcccctagtttcggtactgatcagaaaatcgactatgacgtgaaacgcggagtgctgctcaacgctctgaagcttcttaatatccggacatctgacaagcggagaaacctggcgaagcagaaagctgaagcacagcgcaggctgtacggacagaactcaattaagcggcttctgcccggtagttctgattgggagcagcagagacaccagctggagcgcagaaaagaggaactgaaggagaggctggcccaggtgcgcaagcagatcagtagggaggagcacgagaaccggcatatgggtaattacagacggatttaccctcccgaggacaaggccttactggagaagtacgaaaatttgctagcggtggcatttcagacatttttgtctggtcgcgctgcctcattccagagagagctgaataacccactgaagaggatgaaagaggaagacattcttgacctactggagcagtgtgaaattgacgacgagaagctgatgggaaagaccactaagacacgtggcccaaaaccactctgttccatgcccgagtctaccgagatcatgaagaggcccaagtactgttcaagtgacagtagctacgacagcagttcgtcctccagcgagagcgacgagaacgagaaggaagagtaccagaacaaaaaaagggagaaacaagtgacgtataacctcaaaccatctaaccactacaagctcatccagcagcctagctctatacggaggagtgtgagctgtcctcgctccattagcgctcaaagcccttctagcggcgatactagaccgttcagcgctcagcagatgattagtgtctccaggcccacctcagcaagccggagtcactctttgaatagggccagctcttacatgcgtcaccttccccactctaatgatgcttgttctactaacagtcaggtgagcgagtctttgcgacaactcaagaccaaggagcaggaggacgacctgacgagtcaaacactatttgttctcaaggatatgaagatccggttcccagggaaatctgacgcagaatctgaattgttgatcgaggacatcatcgacaactggaaataccataagaccaaggtggcatcctactggcttataaagctcgatagtgtgaaacaacgcaaggtgctggacatcgttaaaaccagcatcaggacagtgttgcccaggatttggaaggtgcccgacgtggaagaagtcaacctttaccgcatatttaatagagttttcaaccgcttactatggtcccggggtcaggggctttggaattgtttttgcgattccggatacctgtag

SEQ ID NO: 338930 - DNA, 1708 bp, Artificial Sequence
  derived and/or modified sequence
gcttgggcagcgacagctgttccaggcactccgcgtcgagcaccggagtcccgagccgtggctgccacgggcggtgggcgggcggaggagagcaccggaccaccagtgcaggctgccgagtcggggcggccgcccacggggaagctgcgaggcgcgggagcacctgggggaccgcttgcagcggggacgcgaggacccgggctgggctttcctcacccgggaattggtggtaaagaccctgattgtagcagaacctcatgtcctgcatgcctatcgaatgtgtagacctggtcaacctccaggaagcgaaagtgtctgctttgaagtcctgggatttgatattttgttggatagaaaactaaagccatggcttctggagattaaccgagccccaagctttggaactgatcagaaaatagactatgatgtaaaaaggggagtgctgctaaatgcgttgaagctactaaacataaggaccagtgacaaaagaagaaacttggccaaacaaaaagctgaggctcaaaggaggctctatggtcaaaattcaattaaaaggctcttaccaggctcctcagactgggaacagcagagacaccagttggagaggcggaaagaagagttgaaagagagactcgctcaagtacgaaagcagatctcacgagaagaacatgaaaatcgacatatggggaattatagacgaatttatcctcctgaagataaagcattacttgaaaagtatgaaaatttgttagctgttgcctttcagaccttcctttcaggaagagcagcttcattccagcgagagttgaataatcctttgaaaaggatgaaggaagaagatattttggatcttctggagcaatgtgaaattgatgatgaaaagttgatgggaaaaactaccaagactcgaggaccaaagcctctgtgttctatgcctgagagtactgagataatgaaaagaccaaagtactgcagcagtgacagcagttatgatagtagcagcagctcttcagaatctgacgaaaatgaaaaagaagagtaccaaaataagaaaagagaaaagcaagttacatataatcttaaaccctccaaccactacaaattaattcaacaacccagctccataagacgttcagtcagctgccctcggtccatctctgctcaatcaccttccagtggggacacccgcccattttctgctcaacaaatgatatctgtgtcacggccaacttctgcatctcggtcacattccttaaaccgtgcttcctcctacatgaggcatctgcctcacagtaatgatgcctgctctaccaactctcaagtgagtgagtctttgcggcaactgaaaacaaaagaacaagaagatgatctaacaagtcagaccttatttgttctcaaagacatgaagatccggtttccaggaaagtcagatgcagaatcagaacttctgatagaagatatcattgataactggaagtatcataaaaccaaagtggcttcatattggctcataaaattggactctgtaaaacaacgaaaagttttggacatagtgaaaacaagtattcgtacagttcttccacgcatctggaaggtgcctgatgttgaagaagtaaatttatatcggattttcaaccgggtttttaatcgcttactctggagtcgtggccaagggctgtggaactgtttctgtgattcaggatatcta

SEQ ID NO: 338931 - protein, 670 aa, Artificial Sequence
  derived and/or modified sequence
MPSLPQEGVIQGPSPLDLNTELPYQSTMKRKVRKKKKKGTITANVAGTKFEIVRLVIDEMGFMKTPDEDETSNLIWCDSAVQQEKISELQNYQRINHFPGMGEICRKDFLARNMTKMIKSRPLDYTFVPRTWIFPAEYTQFQNYVKELKKKRKQKTFIVKPANGAMGHGISLIRNGDKLPSQDHLIVQEYIEKPFLMEGYKFDLRIYILVTSCDPLKIFLYHDGLVRMGTEKYIPPNESNLTQLYMHLTNYSVNKHNEHFERDETENKGSKRSIKWFTEFLQANQHDVAKFWSDISELVVKTLIVAEPHVLHAYRMCRPGQPPGSESVCFEVLGFDILLDRKLKPWLLEINRAPSFGTDQKIDYDVKRGVLLNALKLLNIRTSDKRRNLAKQKAEAQRRLYGQNSIKRLLPGSSDWEQQRHQLERRKEELKERLAQVRKQISREEHENRHMGNYRRIYPPEDKALLEKYENLLAVAFQTFLSGRAASFQRELNNPLKRMKEEDILDLLEQCEIDDEKLMGKTTKTRGPKPLCSMPESTEIMKRPKYCSSDSSYDSSSSSSESDENEKEEYQNKKREKQVTYNLKPSNHYKLIQQPSSIRRSVSCPRSISAQSPSSGDTRPFSAQQMISVSRPTSASRSHSLNRASSYMRHLPHSNDACSTNSQVVAIIRQ

SEQ ID NO: 338932 - DNA, 1464 bp, Artificial Sequence
  derived and/or modified sequence
gaacaaatggttttttattttaaaaaaaaactttattaaagagatagtttggggcattttttctttacattattttaaaatgacaatatccttctatgttagaaatacaacaattttggaaatcatttctaaatatctttagcaccccactattcttaatgtcatgttacatgaaatttacataatctagtttagaatcagcattactgggaaaaagacaatgttcctatataaattctactacatataatatatatatgctactgtttatgagaagggtcaataggataaagaaactttcaaaaaattatatacacatacacaaatacacaagaacattttatattcattattcaataatccttagaatgatgacaatgcttatatgtaaaaaataatttcactctagagcagattacaagtaaatttatctgccacatacgagaatctatttacttatgttatagcaacatctcttttctaaaataaaaacatggcaaatactcagcttgatcatctgcactatacaacagaatttactcggaatgaccttttgatcatttgcaaaaaattcaatttaatgttaatggatgaagatattatatcactgttggcaatatttataaaaatgtgcttatggctctggaagcaattcctaaaaagaggtagtaaatgttctgagacttcagaattgttagaaaaagttaagcttcagttggcgtttactgcatataagtatgttgacatatgttttcctgagcaaatggcttattctagatatatacgttggtatattcattgaaaattagatttattatgttataaaatgtgactaaaagcccatttaaagggcacatatctctcatcttttggttctaacgtgaagccaaatgaggacaggcgcatgattcagtttatacaataagaaaattgccccaaagtggatgaagcacacacatcagcagctcagccccactccgtacaatccaagtgcattcaacaagtgatatggtttggctgtgtccccacccaaatctcatcttgaattgtaactcccatgattcccacatgtctgtgggaggaacccggtgggaggtgatttaattatgggggtgggtctttcctgtgctgttctcctaatagtgaatgagtctcatgagatctgatggttttaaaaatgggggtttctctgcagaagctctctttttgcctcctgccatccacatacgatgtgacttgctcctctttgtcttccactatgattgtgaggcctcctcagccatgtggaattgtaagttcaataaacctctttgttttgtaaattgcccagtcttgggtatgtcttcatcagcagcatgaaaatggactaatacaacaagtaaatcactgaacatttaatcccagcagttctcttttttcaaacttctcccgttgattttgtgtcagccctgcctgtgctatgct

SEQ ID NO: 338933 - protein, 561 aa, Artificial Sequence
  derived and/or modified sequence
MVSVESEEAEKVTQRNKNYEVLCRNRLGNDLYVERMMQTFNGAPKNKDVQCDKIIMEDKGIMSTAWDLYDSYNAMELVSLSVKQSVVESSSKANVLPKDQDQRLPGSTTEKNSETSSLMDIENVILAKIHEDEEDHSDAILKSDKFHQDLFFMERVLMENIFQPKLAAYRQLPVLKEPEPEEPEDVLESAKHEEVEEESKKEEEEEIHAEESTIPANLERLWSFSCDLTKGLNVSSLAWNKTNPDLLAVGYGHFGFKEQKRGLACCWSIKNPMWPERIYQSPYGVTAVDFSIGAPNLLAVGYHNGTIAIYNVRSNSNVPVLDSSESPQKHLGPVWQLQWIEQDRGTTGDGKREILVSISADGRISKWVIRKGLDCYDLMRLKRTTAASNKKGGEKEKKDEALISRQAPGMCFAFHPKGPVYKVTWNPFCHDVFLSCSADWGVIIWQQENVKPSLSFYPATSVVYDVAWSPKSSYIFAAANENRVEIWDLHISTLDPLIVNTANPGIKFTTILFAKQTDCLLVGDSDGQVSVYELRNMPTVLETGRGDIMDTLLGSKSNQSA

SEQ ID NO: 338934 - DNA, 1686 bp, Artificial Sequence
  derived and/or modified sequence
atggtgagcgtggagagcgaggaggccgagaaggtgacccagagaaacaagaactacgaggtgctgtgcagaaacagactgggcaacgacctgtacgtggagagaatgatgcagaccttcaacggcgcccccaagaacaaggacgtgcagtgcgacaagatcatcatggaggacaagggcatcatgagcaccgcctgggacctgtacgacagctacaacgccatggagctggtgagcctgagcgtgaagcagagcgtggtggagagcagcagcaaggccaacgtgctgcccaaggaccaggaccagagactgcccggcagcaccaccgagaagaacagcgagaccagcagcctgatggacatcgagaacgtgatcctggccaagatccacgaggacgaggaggaccacagcgacgccatcctgaagagcgacaagttccaccaggacctgttcttcatggagagagtgctgatggagaacatcttccagcccaagctggccgcctacagacagctgcccgtgctgaaggagcccgagcccgaggagcccgaggacgtgctggagagcgccaagcacgaggaggtggaggaggagagcaagaaggaggaggaggaggagatccacgccgaggagagcaccatccccgccaacctggagagactgtggagcttcagctgcgacctgaccaagggcctgaacgtgagcagcctggcctggaacaagaccaaccccgacctgctggccgtgggctacggccacttcggcttcaaggagcagaagagaggcctggcctgctgctggagcatcaagaaccccatgtggcccgagagaatctaccagagcccctacggcgtgaccgccgtggacttcagcatcggcgcccccaacctgctggccgtgggctaccacaacggcaccatcgccatctacaacgtgagaagcaacagcaacgtgcccgtgctggacagcagcgagagcccccagaagcacctgggccccgtgtggcagctgcagtggatcgagcaggacagaggcaccaccggcgacggcaagagagagatcctggtgagcatcagcgccgacggcagaatcagcaagtgggtgatcagaaagggcctggactgctacgacctgatgagactgaagagaaccaccgccgccagcaacaagaagggcggcgagaaggagaagaaggacgaggccctgatcagcagacaggcccccggcatgtgcttcgccttccaccccaagggccccgtgtacaaggtgacctggaaccccttctgccacgacgtgttcctgagctgcagcgccgactggggcgtgatcatctggcagcaggagaacgtgaagcccagcctgagcttctaccccgccaccagcgtggtgtacgacgtggcctggagccccaagagcagctacatcttcgccgccgccaacgagaacagagtggagatctgggacctgcacatcagcaccctggaccccctgatcgtgaacaccgccaaccccggcatcaagttcaccaccatcctgttcgccaagcagaccgactgcctgctggtgggcgacagcgacggccaggtgagcgtgtacgagctgagaaacatgcccaccgtgctggagaccggcagaggcgacatcatggacaccctgctgggcagcaagagcaaccagagcgcctag

SEQ ID NO: 338935 - DNA, 1686 bp, Artificial Sequence
  derived and/or modified sequence
atggttagtgtggagtccgaagaagcggagaaggtgacacagagaaataagaattacgaagtgttgtgcaggaacaggttgggaaatgacctctacgtggagaggatgatgcagaccttcaatggcgcgcctaagaacaaagatgtgcagtgcgacaagattattatggaggacaagggaatcatgtccacagcctgggatctatatgatagctataatgcaatggagctggtgtccctctctgttaagcaatcagtggtcgagagctccagtaaagctaacgtacttcccaaggatcaggatcagcgtctcccggggtctacaacagagaagaactccgaaaccagcagcctgatggacattgaaaacgtgattctggctaagatccacgaagatgaagaagatcacagtgacgctatcttgaagagcgataaattccaccaagatctcttttttatggagcgcgtcctgatggagaatatctttcagcctaagctcgccgcttacagacaattacctgtgctgaaagagcccgaacctgaagaacccgaagatgtgctcgagtccgcaaagcatgaagaagtcgaagaagaatcaaagaaagaggaggaggaagaaatccatgccgaggagagcactattccagcaaacctcgaacgactgtggagctttagttgcgacctgactaagggactcaacgtgtcaagcttagcctggaataagaccaatccagacttgctggcagtgggatacggtcattttggcttcaaggaacaaaagaggggactggcctgctgttggtcaatcaagaatccaatgtggccagaaaggatataccagtcgccttacggcgtgaccgctgtggactttagtatcggcgcccccaatcttttggctgtgggataccataacggcaccatcgctatctacaatgtgcgatctaatagtaacgtgcctgttctcgactcatcagaaagcccccagaagcacctgggccccgtgtggcagcttcaatggattgaacaggatcgaggcacaaccggtgacggaaagcgcgagatcttggtttcaatcagtgccgatgggagaatctcaaagtgggtgataaggaaaggcttggattgttacgatctgatgagactgaaacgcactaccgccgcgagcaacaagaaggggggagagaaagaaaaaaaagacgaggcgttgataagcagacaagcacccggtatgtgctttgcattccatccaaagggccccgtctataaggtcacttggaacccattttgtcatgacgtatttctgtcttgttctgctgactggggcgtcataatttggcagcaggagaatgtcaaaccgtccctctctttttacccagctactagtgtcgtctatgatgtggcctggtcgcctaaatcatcatacatctttgccgccgctaacgaaaaccgcgtcgaaatttgggacctgcacattagcacactggatccactgattgtgaatacagccaatcctggaataaagtttacaacaattttgtttgcaaaacagacagactgccttctggtgggggactccgacggacaggttagcgtgtacgaactgaggaatatgcctaccgtactcgagaccggaagaggagacatcatggacacgcttctgggaagcaagtctaatcaatctgcctag

SEQ ID NO: 338936 - DNA, 1686 bp, Artificial Sequence
  derived and/or modified sequence
atggtgtctgtggagagcgaggaggccgagaaggtgacccagaggaacaagaactatgaggtgctgtgcaggaaccggctgggcaatgacctgtatgtggagaggatgatgcagaccttcaatggagcccccaagaacaaggatgtgcagtgtgacaagatcatcatggaggacaagggcatcatgagcacagcctgggacctgtatgacagctacaatgccatggagctggtgtccctgtctgtgaagcagagcgtggtggagagcagcagcaaggccaacgtgctgcccaaggaccaggaccagaggctgcccggcagcaccacagagaagaacagcgagaccagcagcctgatggacattgaaaatgtcatcctggccaagatccatgaagatgaggaggaccacagtgatgccatcctgaagagtgacaagttccaccaggacctcttcttcatggagcgggtgctgatggagaacatcttccagcccaagctggccgcctaccggcagctgcctgtgctgaaggagcctgagcctgaggagccagaagatgtgctggagagcgccaagcatgaggaggtggaggaggagagcaagaaggaggaggaggaggagatccatgctgaggagagcaccatcccagccaacctggagcggctgtggagcttcagctgtgacctgaccaagggcctgaatgtgagcagcctggcctggaacaagaccaacccagacctgctggccgtgggctacggccacttcggcttcaaggagcagaagaggggcctggcctgctgctggagcatcaagaaccccatgtggccagagcgcatctaccagagcccctatggagtgacagctgtggacttcagcatcggggcccccaacctgctggccgtgggctaccacaacggcaccatcgccatctacaacgtgcgcagcaacagcaatgtgcctgtgctggacagcagcgagagcccccagaagcacctgggccctgtgtggcagctgcagtggattgagcaggaccggggcaccactggagatggcaagcgggagatcctggtgtccatctctgcagatggccgcatcagcaagtgggtgatcaggaagggcctggactgctatgacctgatgaggctgaagaggaccacagctgccagcaacaagaagggcggggagaaggagaagaaggatgaggccctgatcagccggcaggcccctggcatgtgctttgccttccaccccaagggccctgtgtacaaggtgacctggaaccccttctgccatgatgtgttcctgagctgcagcgctgactggggcgtcatcatctggcagcaggagaatgtgaagcccagcctgtccttctacccagccacctctgtggtgtatgatgtggcctggagccccaagagcagctacatctttgctgctgccaatgaaaatagagtggagatctgggacctgcacatcagcaccctggaccccctcatcgtgaacacagccaaccctggcatcaagttcaccaccatcctgtttgccaagcagacagactgcctgctggtgggggacagtgatggccaggtgtctgtgtatgagctgaggaacatgcccaccgtgctggagaccggccgcggggacatcatggacaccctgctgggcagcaagagcaaccagagcgcctag

SEQ ID NO: 338937 - DNA, 1686 bp, Artificial Sequence
  derived and/or modified sequence
atggtgagcgtggagagcgaggaggccgagaaggtgacccagcggaataagaactacgaagttctgtgcagaaatagactgggcaacgatctctatgttgaaaggatgatgcagaccttcaatggagcccccaaaaataaggacgtgcagtgtgacaagattattatggaggacaaaggaatcatgagtacagcctgggatctgtatgactcttacaacgccatggagctcgtgagcctgtcggttaagcaaagcgtcgtggaaagttcttcgaaagcaaacgtccttccaaaagaccaggaccagaggttaccaggctccaccacagaaaagaatagcgagacatcttcactgatggacattgaaaatgtgatcttagcaaagatccatgaggatgaggaggatcacagcgatgctattctgaagagcgataagtttcaccaggacctcttctttatggaacgggttttgatggagaatatctttcaaccaaagctggccgcatataggcagttaccggtgctaaaggagccagagcctgaagagccagaggatgtgctggagtccgccaagcatgaagaggtggaggaagagtccaagaaggaggaggaagaggaaattcatgcagaggaatctaccataccagccaatctggaacgcttatggagcttctcgtgtgacctgacaaagggactcaatgttagttcactggcgtggaacaagactaaccctgacctgctcgcagtggggtatggtcactttggttttaaggagcaaaagcggggcttagcttgttgctggagcattaaaaaccctatgtggccggagagaatctatcagagcccctatggtgttaccgcagtcgactttagtatcggcgcccctaacctcctggcggtgggttaccacaatggcaccatcgcaatatataacgttcggagtaatagcaatgtgcccgtgcttgattcctccgaaagcccacagaaacacctgggcccagtctggcagctccaatggattgaacaagataggggaactaccggcgacggcaagcgtgagattctcgtttctatatctgccgatggacgtatctccaagtgggtgattcgcaaagggctcgactgttacgatttgatgagacttaagagaacaacggcagcttctaataagaagggcggcgaaaaagaaaagaaagatgaagctcttatttcacgacaggctcccggaatgtgctttgcctttcacccgaaagggcctgtgtacaaggtgacctggaatcccttctgccatgacgtattcctgtcctgttccgccgactggggagttatcatctggcagcaagagaacgtgaaacccagtctgtcattttacccagctactagcgtcgtgtatgacgtggcttggtcgcccaaaagtagttacatctttgcggccgctaatgagaaccgagttgagatctgggatctccacattagcacactggacccgctaatcgttaacaccgccaaccccggaattaagtttaccaccatcttgttcgccaaacaaacagattgtctactcgtcggggacagcgatggccaggtttccgtttatgagcttagaaacatgccaacagtgctggagaccgggaggggagacatcatggatacactgctgggttctaagtctaatcagagcgcatag

SEQ ID NO: 338938 - DNA, 1686 bp, Artificial Sequence
  derived and/or modified sequence
atggtgagtgtggagtcggaagaggctgagaaagtgacccagcgaaacaagaattacgaggtgctgtgtagaaaccgactaggcaacgatctctatgtcgagcgaatgatgcagactttcaacggcgcacctaagaataaagacgtacagtgcgacaagatcattatggaggataagggcattatgtccaccgcttgggacctatacgattcatacaacgccatggaattagtgtctcttagcgtcaaacagtcggtggttgaaagctctagcaaggcaaacgttttacccaaggatcaggaccagcggttgcccggatcgacgacagaaaaaaacagcgagacctcctctctgatggacatcgaaaacgttatactggcaaagattcacgaagatgaagaagatcatagcgatgcaatcctcaagtccgacaagtttcatcaggatctcttctttatggagagggtcctgatggagaacattttccagcccaaactggcggcatataggcagctacccgtcctgaaggaacccgagcccgaagagcccgaggatgtgttagagagtgctaaacacgaggaggtcgaggaggagagcaaaaaggaggaggaagaggagattcacgctgaagaaagtaccattcccgcaaatctcgagaggctgtggtctttcagctgcgaccttaccaagggtctcaacgtaagctccctggcttggaacaaaacgaaccccgatctgctcgcagttggctatggccattttgggttcaaagaacagaaacgaggcctcgcatgctgctggtcgatcaagaaccccatgtggccagagcgaatatatcagagcccctacggcgtaaccgctgtcgacttcagcataggagcgcctaacctgctggcggtgggttatcacaatggcacaatagcaatctataacgtccggagcaacagtaacgtccccgttttggacagtagcgaatccccacagaaacatctcggtcctgtatggcagctacagtggatcgaacaagatagaggcaccaccggggatggcaaaagagaaattcttgtgtctatttctgccgacgggaggatcagcaagtgggtcatccggaaagggcttgactgctacgatctgatgcgactgaagcgaacaaccgcagcctctaataagaagggcggagagaaagagaaaaaagatgaggctcttatcagcaggcaggcaccagggatgtgttttgcattccacccaaagggccctgtatacaaagtcacttggaatccgttctgccacgatgtgttcctcagttgctccgccgactggggcgtcattatttggcagcaggaaaacgtgaagcctagcctgagtttttatcccgctacctccgtggtgtacgatgttgcctggagccccaagtcaagttatatttttgcagcggctaacgaaaacagagtcgaaatctgggatctgcacatctccacgctggaccctttaatcgtgaatacagccaacccaggcattaagtttacgactatactgttcgccaagcaaacggactgcctccttgtgggcgattctgatggccaggtgtcagtgtatgagctgaggaatatgcctaccgttctggagacaggaaggggcgacatcatggacacattgcttggaagcaaatccaatcaaagtgcctag

SEQ ID NO: 338939 - DNA, 3743 bp, Artificial Sequence
  derived and/or modified sequence
ctcgtgccgccagccaaccgcgcggccgcttgttgagccagggctccaccgtcgccatgacgcccggcaaacattccggagcctcggcccgagccgctaacggaggagcttgggggtacagggacttcagaggcggccaaaaaaaggggtggtgcaccactccccagctggtcgccaccatgccagtctctccggcaggcagtcacaagcagcagaacttcgggttgaacaatgccacacaaccaaagaagtctattagcttttttgctacaatgaaagcaacttcagtgaaaggatatactggtgcaaatcaaagcagaatggctgtgtccaaaaccgtgcttattccacctgaactgaaaactgtagaaaaaccaaatcccaatataaagacaacacaggtatttgacataaatggaactgatgttactccccgacctctttaccatccagatccacttactggtacagcaaaaccaagtaaactcttgacatcacaagaaggatcacttggatcagaatttatatcttcctatagcctttatcagaatacaataaatcctagtacgttagggcagtttacaaggtcagttttaggaagcagtacagtttctaagtcaagtgtatcagcaagtgaatcaatagcagaagacctggaagaaccatcctataaacgggaaagattgactagtttcacagatttgcaagttataagggcagcacctgaaaaaattgtaacaaaagaagacctggagaagaatatagagataatactcacagagacagaaacactgagattttttgacttgcccacagtcatggtctctgtagaatctgaagaagctgagaaagtaactcagagaaacaagaattatgaagtcctttgtagaaacagattaggcaatgacctatatgttgaaaggatgatgcagactttcaatggagcaccaaagaataaagatgttcaatgtgataaaatcataatggaagataaaggcataatgtccactgcctgggatttgtatgattcttacaatgctatggaacttgtatctttatcagtaaaacaatctgtggttgagtcaagtagtaaagcaaatgtacttcctaaagatcaggaccaaagattgccagggagcactacagaaaaaaatagtgaaactagttctctaatggacatagaaaatgtaattctggcaaaaatccatgaagatgaggaagaccactcagatgcaatattaaaatctgacaaatttcatcaggacttattttttatggaacgggttctgatggaaaatatatttcagcccaaacttgcagcttatcgtcagcttcctgttttaaaagaacctgaacctgaagagcctgaagatgttttagaaagtgcaaaacatgaagaggtagaggaagaatctaagaaggaggaggaagaagaaatacatgcagaagaatcaacaatacccgccaacttggaacgactttggtctttttcctgtgacttaaccaaaggcctcaatgtgagcagccttgcctggaataaaacaaatccagatcttttggctgttggctatgggcactttggatttaaagagcaaaaaagaggactggcttgctgctggtcaataaagaatcccatgtggccagaacgtatttatcagagtccatatggagttactgctgtggatttttcaattggagcacctaaccttttagccgttggctatcacaatggcacaattgcaatttacaatgtacggagcaacagtaatgttccagttctggatagtagtgaatcacctcaaaaacatttgggacctgtatggcaactacagtggatagaacaagatcgaggaacaacaggagatggcaaaagagaaatactagtttctatatcagcagatggaagaatctccaaatgggttatacgaaaaggactagactgttatgatttgatgcgattaaagagaactacagctgccagtaacaaaaaaggaggggaaaaggaaaagaaagatgaagctttgatatctcgacaggctcctggaatgtgttttgcttttcatcccaagggtccagtgtataaagtgacatggaatccattttgtcatgatgtatttttaagctgttctgcagattggggtgttattatatggcaacaggagaatgtcaagccatctttgagtttttatccagctacttctgttgtttacgacgttgcctggtctccaaaatcatcctatatatttgcagctgcaaatgagaacagggtggagatttgggaccttcatatcagcactttggaccctctgattgtgaatactgctaaccctggaatcaagttcacaaccattctctttgccaaacaaacagattgccttctggtaggagacagtgatggacaggtttctgtgtatgaactgagaaatatgcctactgttttggaaactggccggggagatataatggatactttgcttggatccaagtcaaaccaatcagcataattcatcattcctaatatttttcttgtagttgttttaaaaaaggaattaacatccaatattctgtattacatactgtacaccagattttgatttcagaaaacaatatttgatgtataacttccacttaatttaaatttaataaacttttatttcagagatatttgattagtttacaatctaagagttattcttaagagtttcagtggaattttcttaatttttctaaagatattcctactctcttgatcatattctaagtacatatgagtacatgtacattcttatacaatgtctaaatgggttagaaaattattatacctatagaagcgaaacttggaaattaatagaatcacttaaaccaaaatctttataagacacaattctattgattttaaagcttctgctttccaggctctgttttccagagtttataattacgtagtttttagtagatgaaaataatggattcttgtacctaacattttatcctcttagatctaagagccgaagctatagaactttgttagactatttggcaagcaaaatatatgacagtaaatatcagaattttatggtttgaccagcgcttatcacattcccaattcagtgagaaaaattcatctgggacacaacagggtactcttctctgtttgcccagaatcagctctggattttaagcccagacttcagtggacccagatagaaaatataaagtctctgatctataggccacatcaggatgttattttatgaagagttctagagcaaggttgcggaaatcggggtggagatggggagcagtgactcctccaaatattcattgctaacaggccattctatgcagtttgttttaacaaatcctgggttaaactgaggccacaggacatgatgggctgttctataaagcattctaagtggagaggagacgatagggcatatgaaattcactaaactctctggaaaaaaaatatgtatatattaaaaaccaagactggaatcagtgcaacagtgggaactaccttttacaagtatccattgcttcataaactccatttgtttggaccaatcccttaaacaaaagcaaggcaaattttacatggatttagagcctaggtcaggttattaggattataaattttccactggtatgtcattgtgattatctttgtttttgtctttctgaaagattggattttctataacaccttgtgtaagaaaataaaaaacttgatctaactg

SEQ ID NO: 338940 - DNA, 471 bp, Artificial Sequence
  derived and/or modified sequence
atggccgccgccggcgagggcacccccagcagcagaggccccagaagagacccccccagaagaccccccagaaacggccacggcaagctgctgttcaaggacggcagctactacgagggcgccttcgtggacggcgagatcaccggcgagggcagaagacactgggcctggagcggcgacaccttcagcggccagttcgtgctgggcgagccccagggctacggcgtgatggagtacaaggccggcggctgctacgagggcgaggtgagccacggcatgagagagggccacggcttcctggtggacagagacggccaggtgtaccagggcagcttccacgacaacaagagacacggccccggccagatgctgttccagaacggcgacaagtacgacggcgactgggtgagagacagaagacagggccacggcgtgctgagatgcgccgacggcagcacctacaagctgtag

SEQ ID NO: 338941 - DNA, 471 bp, Artificial Sequence
  derived and/or modified sequence
atggctgctgcaggagaaggcacgccctcgtccaggggacctcgaagagatcctccccgccgacccccccggaacggacacggaaagctgctgttcaaagacggctcctactatgagggcgcatttgtggacggggagataacaggtgagggacgtagacattgggcatggagcggggacacgttttctgggcagttcgtgttgggcgagcctcaggggtatggcgtcatggaatataaagcggggggctgctatgaaggagaagtgtcccatggtatgagagaaggccacggatttctggtcgatcgcgatggccaagtatatcaaggttcctttcacgacaataaacgacatgggccagggcagatgctctttcaaaatggagacaagtacgacggcgattgggtgcgagacagacgccagggccatggtgtgttgcggtgtgccgacgggagtacatacaagttgtag

SEQ ID NO: 338942 - DNA, 471 bp, Artificial Sequence
  derived and/or modified sequence
atggctgctgctggggagggcacccccagcagccggggcccccggcgggaccccccccggcggcccccaagaaatggacatggcaagctgctcttcaaggatggcagctactatgagggcgcctttgtggatggagagatcaccggggagggccgccgccactgggcctggagcggggacaccttcagcggccagtttgtgctgggggagccccagggctacggcgtgatggagtacaaggccggcggctgctatgaaggagaggtgagccacggcatgagggagggccacggcttcctggtggacagagatggccaggtgtaccagggcagcttccatgacaacaagagacatggccctggccagatgctgttccagaatggagacaagtatgatggagactgggtgcgggaccggcggcagggccatggagtgctgcgctgtgctgatggcagcacctacaagctgtag

SEQ ID NO: 338943 - DNA, 471 bp, Artificial Sequence
  derived and/or modified sequence
atggccgccgccggcgagggcacccccagcagccggggcccccggcgagatccaccccgacggcctccaagaaatggacatggaaagctgctgttcaaagacgggtcatactacgagggagctttcgtcgacggcgagatcaccggcgaaggccgtagacattgggcctggtccggtgataccttcagcggtcagtttgtccttggagagccccagggttacggggtgatggagtataaggcaggtgggtgctatgagggcgaggtgtcccacgggatgagagagggacacggctttctggtggatcgggatggccaggtataccagggctctttccacgataacaagcggcacgggcccggacagatgctcttccaaaatggcgacaagtacgacggcgattgggtgagagaccgccgccaggggcacggggtactccgctgtgctgatggctccacttataaactttag

SEQ ID NO: 338944 - DNA, 1648 bp, Artificial Sequence
  derived and/or modified sequence
ctctggctccgggcccggctagcttcgctccagagattgcgcgggctcagggactaggcccgtggccacacccccccttgcgacaaagaccaatggaagcgggcgttgctggtcgctaagagaaccctcggcggcaagatggcagcggcgggcgagggcaccccgagctcccgcgggccgcgtcgggacccgcctaggcggccgccccggaacggtcacgggaagttgttatttaaagatggcagttattacgaaggggcgtttgtggacggagagatcacgggagaaggccgccggcactgggcctggtcaggagacaccttctctggacagtttgttctgggagagcctcaaggctacggcgtcatggagtacaaagccggcggatgttatgaaggggaggtctcccacggcatgcgggaaggacacgggtttctggtggaccgggatggacaagtgtaccagggctccttccatgacaacaagaggcacggccctgggcagatgctctttcagaacggtgacaagtacgacggcgactgggtccgggaccggcgtcagggacacggggtgctgcgctgcgccgacggctccacctacaagctctgatccacccatctatagtaggagaaactcaaggagacatcggctgctacccaggcaccatgagctcagggttggtgaggcccctccgggagacctgttctccctctcgacagcagcttcttctgacggaaaataagaacagcggatcccaaagcagagaaggctcctcttccacagggacaggagccacgcggctcaggccggtcccggaagccacagaggtcctgggccacgagcacccccaccagcctgtgacgcctcagccatctccgtcccccacactcctagtttacagcttactgctcgacctcccaggacccgagggcttgggcaggccccacacgtcctccagaacatcctcggtgggagacggagcagacagagtagaggccacacgtgtgtgtgcacatcagagtgtctcctacccatgttggcagcagcgcggccctccgggcatccctggctgtatcagctgcgccgtgagtgttggctgtctcacacgccagctttcccggagttgccgctgggtgccgagcacctgctcactgcacggagcaggtggctccttctgggcggctttgcctgccgcagtccccgagcctcctctcctcagctgggcgtgtgtgggaatgcccaaccgggggcctccacggggcctatagcctccacgtttgggcctactgcccttggacccaggggtcacagtccaggaagcctgggccagtgggggactcctggggtgcatgtaacactgagaatcatgtagataatttggggtgtttgagcacgcatggcctgtggggagtctggccggcttgcctcatgtggaccccccaccaccctggggcagaggagggggccggctgttggggccgtcatggaagcactagggttacactagggcaggccccatgtcccctctggaactcctcacagttcacaccttgaagcccaggcacttgcgatgggaccagcgaggtcaaatgcaggacccctggtcctcactgttaccatgaagtgatgcaaatggccggtcttcaga

SEQ ID NO: 338945 - DNA, 471 bp, Artificial Sequence
  derived and/or modified sequence
atggccgctgctggtgaaggcacacccagtagccgcggaccacgcagagacccacctcgcaggcccccaagaaatggtcatggtaagttgctgtttaaagacggcagctactatgaaggggcattcgtggatggggaaatcactggagaaggtaggaggcattgggcgtggtctggcgacaccttctccggtcaatttgtgctcggtgaaccacagggatacggggtgatggagtacaaagcaggcggttgttacgagggagaggtcagccatggtatgcgggagggacatggctttctggttgaccgcgatggtcaggtctatcaaggctctttccacgataacaagcggcacggtccaggccagatgttgtttcaaaacggggacaagtatgatggcgattgggtcagagatcggaggcaggggcacggcgtcctccgttgcgcagatggatccacttacaagctctag

SEQ ID NO: 338946 - DNA, 456 bp, Artificial Sequence
  derived and/or modified sequence
accgccaccaccagactgcccctgctgagagtggacagcgtgagagtgagccccagaaacggcgacaagtacgacggcgactgggtgagagacagaagacagggccacggcgtgctgagatgcgccgacggcagcacctacaagggccagtggcacagcgacgtgttcagcggcctgggcagcatggcccactgcagcggcgtgacctactacggcctgtggatcaacggccaccccgccgagcaggccaccagaatcgtgatcctgggccccgaggtgatggaggtggcccagggcagccccttcagcgtgaacgtgcagctgctgcaggaccacggcgagatcgccaagaacggcgtgagcctgctgctgagcagactggagtgcagcggcgccatgagcgccctgagaaacctgagactgcccagaagcagcgacagcgccctggccagctag

SEQ ID NO: 338947 - DNA, 558 bp, Artificial Sequence
  derived and/or modified sequence
gtgaccggcagctgctacctgaagatggccgtgatcaccaagggcagactgtggaccgagagaagcagagagaaggccgccggcaccggccccggccaggagacccccagcctggacagcctgttctgggagagcctgaaggccaccgccagctggagcaccaagcccgccgacgtgatgaagggcagaagccccaccgcctgcggcaaggacaccggcttctggtggaccggcatggacaagtgcaccagagcccccagcatgaccaccagaggcaccgccctgggcagatgcagcttcagaaccgtgaccagcaccaccgccaccggcagcggcaccggcgtgagagacaccggctgctgcgccgcccccaccgccccccccaccagcagcgacccccccatctacagcagaagaaacagcagaagacacagactgctgcccagacaccacgagctgagagtgggcgaggccccccccggcgacctgttcagcctgagcaccgccggcgtgttcagcgccaacagagtgagctgcctggccgccagcatcccctag

SEQ ID NO: 338948 - DNA, 456 bp, Artificial Sequence
  derived and/or modified sequence
accgccacaaccaggctacctctgctgagggtagatagcgtccgcgtctcaccccgcaacggtgacaagtacgacggcgattgggtccgggatcgccgccaaggacacggcgttttgcggtgcgcagatggctccacatacaaaggtcagtggcatagcgacgtttttagcggcctcggctccatggctcattgctccggcgttacctattacggcttgtggatcaacggccatcctgccgagcaggctacgcggatcgtgatactaggacctgaggtgatggaggtggcccagggatcccccttcagcgtcaacgtgcaattattgcaggaccacggtgagattgccaagaacggcgtctcccttcttttgtctaggctagagtgttcgggtgctatgtcagctctgaggaacctgcggctcccacgttcaagcgacagcgcattagccagctag

SEQ ID NO: 338949 - DNA, 558 bp, Artificial Sequence
  derived and/or modified sequence
gtcaccggatcttgttacttaaagatggccgtgataaccaagggtcggttgtggacggagcgcagtagagagaaggcagccggcacgggtcccggacaggagacaccaagcttggattcgctgttttgggaaagcctcaaagcaactgcttcttggtccaccaagcccgccgatgtgatgaaagggaggagtcctactgcgtgcgggaaagatacaggcttttggtggacaggtatggataaatgtaccagggccccttcaatgactacgagaggaacagccttaggacggtgctcctttaggactgtcacatccaccactgcaactgggtcagggacaggtgtaagagatacgggttgctgtgcagccccaacagctcctcctactagctctgaccctcctatctacagtagaagaaactctaggcgacatcggctgctgccccggcaccacgaactgagagtgggggaggccccgccaggtgatctgttttcgttgtcaacagcaggagtcttttccgcgaatcgagttagctgcctggcggcaagtattccatag

SEQ ID NO: 338950 - DNA, 456 bp, Artificial Sequence
  derived and/or modified sequence
acagccaccacccggctgcccctgctgcgggtggacagcgtgcgggtgagccccagaaatggagacaagtatgatggagactgggtgcgggaccggcggcagggccacggcgtgctgcgctgtgctgatggcagcacctacaagggccagtggcacagtgatgtgttttctggcctgggctccatggcccactgcagcggcgtgacctactacggcctgtggatcaatggccaccctgctgagcaggccacccgcatcgtcatcctgggccctgaggtgatggaggtggcccagggcagccccttctctgtgaatgtgcagctgctgcaggaccacggggagatcgccaagaatggagtgtccctgctgctgagccggctggagtgcagcggggccatgtctgccctgaggaacctgcggctgcccaggagcagtgacagcgccctggccagctag

SEQ ID NO: 338951 - DNA, 558 bp, Artificial Sequence
  derived and/or modified sequence
gtcaccggcagctgctacctgaagatggccgtcatcaccaagggccgcctgtggacagagaggagccgggagaaggctgctggcactggacctggccaggagacccccagcctggacagcctcttctgggagagcctgaaggccacagcctcctggagcaccaagccagcagatgtgatgaagggccgcagccccacagcctgtgggaaggacaccggcttctggtggacaggcatggacaagtgcacccgggcccccagcatgaccacccggggcacagccctgggccgctgcagcttcagaacagtgaccagcaccacagccactggaagtggcactggagtgcgggacaccggctgctgtgccgcccccacagccccacccaccagcagtgacccccccatctacagcagaagaaacagccgccgccaccggctgctgcccaggcaccacgagctgcgggtgggggaggcccctcctggggacctcttcagcctgagcacagctggggtcttcagcgccaacagagtgtcctgcctggccgccagcatcccctag

SEQ ID NO: 338952 - DNA, 456 bp, Artificial Sequence
  derived and/or modified sequence
accgccaccacccggctgcccctgctgcgggtggacagcgtgcgggtatcaccacgaaatggcgacaaatatgacggggactgggtgcgggatcgacgccaaggacacggggttcttcgttgtgcagacgggagtacctacaagggtcaatggcatagcgatgtgttcagtggcctaggctctatggcccactgttcgggcgtaacctactatggactgtggattaacggtcacccagctgagcaggccacgcgaatcgtgatcctggggccagaggtgatggaggttgctcagggctcacccttcagcgtgaatgtgcagctcttgcaggaccatggcgaaattgccaaaaatggggtttctctgctgctttcaaggcttgaatgttctggcgccatgtctgcccttaggaacctgcggctccctagatcctctgattccgcgcttgccagctag

SEQ ID NO: 338953 - DNA, 558 bp, Artificial Sequence
  derived and/or modified sequence
gtgaccggcagctgctacctgaagatggccgtgatcaccaagggccgactttggacggagcggagccgggagaaagccgctggcacgggccccggtcaagagaccccatcactggattcgttgttttgggagtctttaaaggcaaccgcaagttggtccacaaagcctgcagatgtgatgaagggcagatcaccgaccgcatgtgggaaggatacaggtttctggtggaccgggatggacaaatgcaccagagccccatccatgactaccaggggaacggccttgggccggtgctcgttccgcacagtgacttccaccaccgcaaccggttctgggacaggagttcgggatacaggctgctgcgccgcgcctaccgcccccccaacctcctccgacccacccatctactctcggagaaattcacgacgacacagattgctgccccggcaccacgagcttcgcgtaggtgaggcgcctccaggggacttatttagtctttcgactgctggggtgttcagtgctaatcgggtgagttgtctggccgcaagtattccatag

SEQ ID NO: 338954 - DNA, 582 bp, Artificial Sequence
  derived and/or modified sequence
actgccaccacccggctccccctgttgagagtggactccgtgcgtgtgtcccccaggaacggtgacaagtacgacggcgactgggtccgggaccggcgtcagggacacggggtgctgcgctgcgccgacggctccacctacaagggacagtggcacagcgacgtcttcagtggactgggcagcatggcccactgctcaggggtcacctattatgggttgtggatcaatggccacccagcagaacaagctacgaggatcgtgatcttgggtccggaggtgatggaagtggcccaagggtctcccttctcggtgaacgttcagctgctgcaggaccacggggaaattgccaagaatggagtttcactcttgctgtccaggctggagtgcagtggtgcaatgtcggctctccgcaacctccgcctcccgcgttcaagtgattctgccttggcctcctgagtagctgggattacaggcatgtgccatcatgccccactaattttgtattttgagtagagatggggtttcgccatgttggtcaggctggtctcgaactcccgacctcaggtgatcagcccgccccag

SEQ ID NO: 338955 - DNA, 626 bp, Artificial Sequence
  derived and/or modified sequence
gtcacgggaagttgttatttaaagatggcagttattacgaaggggcgtttgtggacggagagatcacgggagaaggccgccggcactgggcctggtcaggagacaccttctctggacagtttgttctgggagagcctcaaggctacggcgtcatggagtacaaagccggcggatgttatgaaggggaggtctcccacggcatgcgggaaggacacgggtttctggtggaccgggatggacaagtgtaccagggctccttccatgacaacaagaggcacggccctgggcagatgctctttcagaacggtgacaagtacgacggcgactgggtccgggaccggcgtcagggacacggggtgctgcgctgcgccgacggctccacctacaagctctgatccacccatctatagtaggagaaactcaaggagacatcggctgctacccaggcaccatgagctcagggttggtgaggcccctccgggagacctgttctccctctcgacagcaggtgtgttttctgcaaaccgtgtctcctgccttgcagccagtattccttaatgcaaagctctatgaagaacctttttttaaaaatgcattctagaaaaaaatgcattcctgaaaataaa

SEQ ID NO: 338956 - DNA, 456 bp, Artificial Sequence
  derived and/or modified sequence
actgcgacaactcggctcccgctgctgcgcgtggatagcgtgcgcgtgtctcccaggaatggagacaagtatgatggggactgggtgagagaccgccgtcagggccacggagtactgcggtgtgctgatgggtctacctacaagggtcaatggcacagcgacgtgttcagtggcctgggatctatggctcactgcagcggcgtaacctattacgggctgtggatcaacggacaccccgctgagcaggctacccgcatcgtaattttaggaccagaggtcatggaagttgcccagggcagccctttttcagtgaatgtccaactgttgcaggaccacggggaaatcgcaaagaacggggtatccctgctgttgtcccggctggaatgctctggcgctatgagtgcgctgaggaatttgagattacccaggagtagcgactccgctttggcatcttag

SEQ ID NO: 338957 - DNA, 558 bp, Artificial Sequence
  derived and/or modified sequence
gtaacaggtagctgctaccttaaaatggccgtgataacaaaaggtcgcctgtggacagagaggtccagagaaaaggctgccggtacggggcctggccaagagacaccatctctcgacagcctgttctgggaatcgctcaaagctacagcaagctggagcaccaaaccagccgacgttatgaaagggagaagtcccactgcctgtggcaaggatactggcttttggtggaccggaatggataaatgcacacgggctccatcaatgacaacacgtggcaccgcattgggaaggtgcagctttcggactgtgacttcgacaaccgcgacgggctccgggaccggcgtccgcgatactggatgttgcgccgcaccaaccgcccctccgactagctctgatcctcccatttactctcggcgaaacagcagacgccaccggttgcttccaaggcatcacgaactgcgggtgggggaggcacctcccggagatctattctcactaagtactgcaggcgtgttctccgccaaccgggtaagctgtcttgccgcatcaataccctag

SEQ ID NO: 338958 - protein, 344 aa, Artificial Sequence
  derived and/or modified sequence
MEKRLGVKPNPASWILSGYYWQTSAKWLRSLYLFYTCFCFSVLWLSTDASESRCQQGKTQFGVGLRSGGENHLWLLEGTPSLQSCWAACCQDSACHVFWWLEGMCIQADCSRPQSCRAFRTHSSNSMLVFLKKFQTADDLGFLPEDDVPHLLGLGWNWASWRQSPPRAALRPAVSSSDQQSLIRKLQKRGSPSDVVTPIVTQHSKVNDSNELGGLTTSGSAEVHKAITISSPLTTDLTAELSGGPKNVSVQPEISEGLATTPSTQQVKSSEKTQIAVPQPVAPSYSYATPTPQASFQSTSAPYPVIKELVVSAGESVQITLPKNEVQLNAYVLQEPPKAHSRPV

SEQ ID NO: 338959 - protein, 685 aa, Artificial Sequence
  derived and/or modified sequence
MEKRLGVKPNPASWILSGYYWQTSAKWLRSLYLFYTCFCFSVLWLSTDASESRCQQGKTQFGVGLRSGGENHLWLLEGTPSLQSCWAACCQDSACHVFWWLEGMCIQADCSRPQSCRAFRTHSSNSMLVFLKKFQTADDLGFLPEDDVPHLLGLGWNWASWRQSPPRAALRPAVSSSDQQSLIRKLQKRGSPSDVVTPIVTQHSKVNDSNELGGLTTSGSAEVHKAITISSPLTTDLTAELSGGPKNVSVQPEISEGLATTPSTQQVKSSEKTQIAVPQPVAPSYSYATPTPQASFQSTSAPYPVIKELVVSAGESVQITLPKNEVQLNAYVLQEPPKGETYTYDWQLITHPRDYSGEMEGKHSQILKLSKLTPGLYEFKVIVEGQNAHGEGYVNVTVKPEPRKNRPPIAIVSPQFQEISLPTTSTVIDGSQSTDDDKIVQYHWEELKGPLREEKISEDTAILKLSKLVPGNYTFSLTVVDSDGATNSTTANLTVNKAVDYPPVANAGPNQVITLPQNSITLFGNQSTDDHGITSYEWSLSPSSKGKVVEMQGVRTPTLQLSAMQEGDYTYQLTVTDTIGQQATAQVTVIVQPENNKPPQADAGPDKELTLPVDSTTLDGSKSSDDQKIISYLWEKTQGPDGVQLENANSSVATVTGLQVGTYVFTLTVKDERNLQSQSSVNVIV

SEQ ID NO: 338960 - protein, 273 aa, Artificial Sequence
  derived and/or modified sequence
MEKRLGVKPNPASWILSGYYWQTSAKWLRSLYLFYTCFCFSVLWLSTDASESRCQQGKTQFGVGLRSGGENHLWLLEGTPSLQSCWAACCQDSACHVFWWLEGMCIQADCSRPQSCRAFRTHSSNSMLVFLKKFQTADDLGFLPEDDVPHLLGLGWNWASWRQSPPRAALRPAVSSSDQQSLIRKLQKRGSPSDVVTPIVTQHSKVNDSNELGGLTTSGSAEVHKAITISSPLTTDLTAELSGGPKNVSVQPEISEGLATTPSTQQVKSSEKT

SEQ ID NO: 338961 - protein, 179 aa, Artificial Sequence
  derived and/or modified sequence
MEKRLGVKPNPASWILSGYYWQTSAKWLRSLYLFYTCFCFSVLWLSTDASESRCQQGKTQFGVGLRSGGENHLWLLEGTPSLQSCWAACCQDSACHVFWWLEGMCIQADCSRPQSCRAFRTHSSNSMLVFLKKFQTADDLGFLPEDDVPHLLGLGWNWASWRQSPPRAALRPAVSSSDQ

SEQ ID NO: 338962 - DNA, 1035 bp, Artificial Sequence
  derived and/or modified sequence
atggagaagagactgggcgtgaagcccaaccccgccagctggatcctgagcggctactactggcagaccagcgccaagtggctgagaagcctgtacctgttctacacctgcttctgcttcagcgtgctgtggctgagcaccgacgccagcgagagcagatgccagcagggcaagacccagttcggcgtgggcctgagaagcggcggcgagaaccacctgtggctgctggagggcacccccagcctgcagagctgctgggccgcctgctgccaggacagcgcctgccacgtgttctggtggctggagggcatgtgcatccaggccgactgcagcagaccccagagctgcagagccttcagaacccacagcagcaacagcatgctggtgttcctgaagaagttccagaccgccgacgacctgggcttcctgcccgaggacgacgtgccccacctgctgggcctgggctggaactgggccagctggagacagagcccccccagagccgccctgagacccgccgtgagcagcagcgaccagcagagcctgatcagaaagctgcagaagagaggcagccccagcgacgtggtgacccccatcgtgacccagcacagcaaggtgaacgacagcaacgagctgggcggcctgaccaccagcggcagcgccgaggtgcacaaggccatcaccatcagcagccccctgaccaccgacctgaccgccgagctgagcggcggccccaagaacgtgagcgtgcagcccgagatcagcgagggcctggccaccacccccagcacccagcaggtgaagagcagcgagaagacccagatcgccgtgccccagcccgtggcccccagctacagctacgccacccccaccccccaggccagcttccagagcaccagcgccccctaccccgtgatcaaggagctggtggtgagcgccggcgagagcgtgcagatcaccctgcccaagaacgaggtgcagctgaacgcctacgtgctgcaggagccccccaaggcccacagcagacccgtgtag

SEQ ID NO: 338963 - DNA, 822 bp, Artificial Sequence
  derived and/or modified sequence
atggagaagagactgggcgtgaagcccaaccccgccagctggatcctgagcggctactactggcagaccagcgccaagtggctgagaagcctgtacctgttctacacctgcttctgcttcagcgtgctgtggctgagcaccgacgccagcgagagcagatgccagcagggcaagacccagttcggcgtgggcctgagaagcggcggcgagaaccacctgtggctgctggagggcacccccagcctgcagagctgctgggccgcctgctgccaggacagcgcctgccacgtgttctggtggctggagggcatgtgcatccaggccgactgcagcagaccccagagctgcagagccttcagaacccacagcagcaacagcatgctggtgttcctgaagaagttccagaccgccgacgacctgggcttcctgcccgaggacgacgtgccccacctgctgggcctgggctggaactgggccagctggagacagagcccccccagagccgccctgagacccgccgtgagcagcagcgaccagcagagcctgatcagaaagctgcagaagagaggcagccccagcgacgtggtgacccccatcgtgacccagcacagcaaggtgaacgacagcaacgagctgggcggcctgaccaccagcggcagcgccgaggtgcacaaggccatcaccatcagcagccccctgaccaccgacctgaccgccgagctgagcggcggccccaagaacgtgagcgtgcagcccgagatcagcgagggcctggccaccacccccagcacccagcaggtgaagagcagcgagaagacctag

SEQ ID NO: 338964 - DNA, 540 bp, Artificial Sequence
  derived and/or modified sequence
atggagaagagactgggcgtgaagcccaaccccgccagctggatcctgagcggctactactggcagaccagcgccaagtggctgagaagcctgtacctgttctacacctgcttctgcttcagcgtgctgtggctgagcaccgacgccagcgagagcagatgccagcagggcaagacccagttcggcgtgggcctgagaagcggcggcgagaaccacctgtggctgctggagggcacccccagcctgcagagctgctgggccgcctgctgccaggacagcgcctgccacgtgttctggtggctggagggcatgtgcatccaggccgactgcagcagaccccagagctgcagagccttcagaacccacagcagcaacagcatgctggtgttcctgaagaagttccagaccgccgacgacctgggcttcctgcccgaggacgacgtgccccacctgctgggcctgggctggaactgggccagctggagacagagcccccccagagccgccctgagacccgccgtgagcagcagcgaccagtag

SEQ ID NO: 338965 - DNA, 1035 bp, Artificial Sequence
  derived and/or modified sequence
atggagaagcggcttggagtgaagcccaacccagctagctggatcctgagcgggtactattggcagacatccgcgaagtggcttagatctctatacctattctatacctgcttttgtttttccgtgttgtggttgagtacggatgccagcgagagtcgctgccagcagggcaaaacccagttcggagttgggctgcggtctggcggagaaaatcacctgtggctgctcgagggcactccctcactgcagtcatgttgggccgcctgttgccaggattccgcctgccatgtgttctggtggcttgaaggaatgtgtattcaggctgattgttcaaggccccaatcttgccgggcttttcgtacacactcttcgaattcgatgcttgtgttcttgaaaaaatttcagaccgcggacgatctcggattccttccggaagatgacgtacctcatctgctgggcttggggtggaattgggcttcttggcggcaaagccctcctagagcagctctgcgcccggctgtttcctcatccgatcaacagagtcttatccgaaagctgcagaaaaggggcagcccttcggatgttgtgactcccatagttacacagcactcaaaagttaatgactccaacgagctcggtggacttacgacgagcgggtccgctgaagtccataaggcgatcaccatctctagccccctgacgacagatttgaccgccgaactcagtggcgggccaaagaacgtctccgtgcagcccgaaattagcgaggggctggcgaccacgccctctacacaacaagtgaagtcctcagagaagacacagattgcggtcccccagcccgtggccccatcatattcttacgccactcctacgccgcaagcatcatttcagagcacaagcgccccctatccagtaatcaaagagctggtcgtcagcgctggcgaaagcgttcagatcacgctgccaaagaacgaggtgcagctgaatgcatacgtgttgcaggagcccccaaaagcccactcccggccagtttag

SEQ ID NO: 338966 - DNA, 822 bp, Artificial Sequence
  derived and/or modified sequence
atggagaagcgtctgggggtgaaacccaacccggcatcctggatcctctccgggtattattggcagacctctgcaaagtggctgaggtctctctatcttttttacacatgcttctgtttctctgtcctttggttgtcgaccgacgcatcagaatcccggtgtcagcagggaaagacgcagttcggggtggggcttcggagcggcggagaaaatcatctgtggcttttggagggaacgccatcccttcaatcgtgttgggcggcctgttgccaggacagcgcatgtcatgttttctggtggctggaaggtatgtgtatacaggcagactgcagccgcccccagtcatgcagagcttttaggacccactcaagcaattccatgctcgtatttttaaagaaattccagacagcggacgatctggggtttttaccagaggacgatgtacctcacttgctggggttgggctggaactgggccagctggagacagtccccccctcgtgcggccttgcggcccgccgtctcttccagcgatcaacaatctttgatacgcaagctacaaaaaaggggatcaccaagcgacgtggtgactcctatcgtgacccaacactctaaagtgaacgattcaaacgagctgggaggcctgactacatctggatcagcggaagttcacaaagcgataaccatttcaagtccactgactacggacctcacagctgagttgtcaggcggcccaaagaacgtctctgtccagccagaaatttctgaggggctggctactacacctagtactcaacaggtaaaaagttcagaaaaaacctag

SEQ ID NO: 338967 - DNA, 540 bp, Artificial Sequence
  derived and/or modified sequence
atggagaaacggctgggagttaagccgaatccagcaagctggatcttgtcagggtactactggcaaacaagtgccaaatggctgagaagcctgtaccttttttacacgtgcttttgtttcagtgtcctgtggctttcaacagatgccagtgaaagccgatgtcagcagggaaagactcagtttggggtgggcctgaggagcgggggagaaaaccatctgtggttattggagggcacccccagcctgcaatcgtgttgggccgcatgctgtcaggatagtgcctgtcatgtgttttggtggttggaaggaatgtgtatccaggccgattgttcccggcctcagtcctgccgggcattcagaacacacagtagcaacagcatgctggtgtttcttaagaaatttcaaacagctgatgatctgggcttcctaccagaagacgatgtgccccacctgctgggactcgggtggaactgggccagctggagacagtccccaccacgggcggccttacgaccagctgtgagctcatccgaccagtag

SEQ ID NO: 338968 - DNA, 1035 bp, Artificial Sequence
  derived and/or modified sequence
atggagaagaggctgggcgtgaagcccaacccagcctcctggatcctgagcggctactactggcagaccagcgccaagtggctgcggagcctgtacctgttctacacctgcttctgcttctctgtgctgtggctgagcacagatgccagcgagagccgctgccagcagggcaagacccagtttggagtgggcctgcggtctggaggagagaaccacctgtggctgctggagggcacccccagcctgcagagctgctgggccgcctgctgccaggacagcgcctgccacgtgttctggtggctggagggcatgtgcatccaggccgactgcagccggccccagagctgccgggccttccgcacccacagcagcaacagcatgctggtgttcctgaagaagttccagacagcagatgacctgggcttcctgcctgaagatgatgtgccccacctgctgggcctgggctggaactgggcctcctggaggcagagccccccccgggccgccctgcggcctgctgtgagcagcagtgaccagcagagcctcatcaggaagctgcagaagaggggcagccccagtgatgtggtgacccccatcgtgacccagcacagcaaggtgaatgacagcaatgagctgggcggcctgaccaccagcggcagcgctgaggtgcacaaggccatcaccatcagcagccccctgaccacagacctgacagctgagctgagcggcggccccaagaatgtgtctgtgcagcctgagatcagcgagggcctggccaccacccccagcacccagcaggtgaagagcagcgagaagacccagattgctgtgccccagcctgtggcccccagctacagctatgccacccccaccccccaggccagcttccagagcaccagcgccccctaccctgtgatcaaggagctggtggtgtctgctggggagagcgtgcagatcaccctgcccaagaatgaggtgcagctgaatgcctacgtgctgcaggagccccccaaggcccacagcaggcctgtgtag

SEQ ID NO: 338969 - DNA, 822 bp, Artificial Sequence
  derived and/or modified sequence
atggagaagaggctgggcgtgaagcccaacccagcctcctggatcctgagcggctactactggcagaccagcgccaagtggctgcggagcctgtacctgttctacacctgcttctgcttctctgtgctgtggctgagcacagatgccagcgagagccgctgccagcagggcaagacccagtttggagtgggcctgcggtctggaggagagaaccacctgtggctgctggagggcacccccagcctgcagagctgctgggccgcctgctgccaggacagcgcctgccacgtgttctggtggctggagggcatgtgcatccaggccgactgcagccggccccagagctgccgggccttccgcacccacagcagcaacagcatgctggtgttcctgaagaagttccagacagcagatgacctgggcttcctgcctgaagatgatgtgccccacctgctgggcctgggctggaactgggcctcctggaggcagagccccccccgggccgccctgcggcctgctgtgagcagcagtgaccagcagagcctcatcaggaagctgcagaagaggggcagccccagtgatgtggtgacccccatcgtgacccagcacagcaaggtgaatgacagcaatgagctgggcggcctgaccaccagcggcagcgctgaggtgcacaaggccatcaccatcagcagccccctgaccacagacctgacagctgagctgagcggcggccccaagaatgtgtctgtgcagcctgagatcagcgagggcctggccaccacccccagcacccagcaggtgaagagcagcgagaagacctag

SEQ ID NO: 338970 - DNA, 540 bp, Artificial Sequence
  derived and/or modified sequence
atggagaagaggctgggcgtgaagcccaacccagcctcctggatcctgagcggctactactggcagaccagcgccaagtggctgcggagcctgtacctgttctacacctgcttctgcttctctgtgctgtggctgagcacagatgccagcgagagccgctgccagcagggcaagacccagtttggagtgggcctgcggtctggaggagagaaccacctgtggctgctggagggcacccccagcctgcagagctgctgggccgcctgctgccaggacagcgcctgccacgtgttctggtggctggagggcatgtgcatccaggccgactgcagccggccccagagctgccgggccttccgcacccacagcagcaacagcatgctggtgttcctgaagaagttccagacagcagatgacctgggcttcctgcctgaagatgatgtgccccacctgctgggcctgggctggaactgggcctcctggaggcagagccccccccgggccgccctgcggcctgctgtgagcagcagtgaccagtag

SEQ ID NO: 338971 - DNA, 1035 bp, Artificial Sequence
  derived and/or modified sequence
atggagaagcggctgggcgtgaagcccaaccccgccagctggatcctttctgggtattactggcagacctctgcaaaatggctacgtagcctgtatctgttttacacatgtttctgttttagcgttctgtggctgtccacagacgcttccgagtcaaggtgccaacagggcaagacccagttcggagtcggcttgcgatcgggaggagaaaaccacctgtggctgttagaggggaccccttctttgcagtcttgctgggctgcttgttgccaggattcagcgtgtcacgttttttggtggttggagggaatgtgtattcaggcggattgcagcagacctcagtcttgccgcgcgtttagaactcatagctctaacagcatgctcgtcttcctgaaaaaatttcagacggcagacgacctgggcttcctgccggaagacgatgtcccccaccttctgggactcggctggaactgggccagctggagacagtcccctccccgagccgcactccgtcctgccgtcagcagttccgatcagcagtcactgatacgcaagttgcagaagagaggatccccctccgatgtggtgacaccgatcgtaactcaacattccaaggtcaacgatagcaatgagctgggcggcctgaccaccagcggaagcgctgaggtgcataaggctattaccatttcttcccctcttacaaccgatctaacagccgaactctctggcgggccgaagaatgtctcagttcagccggaaatatctgagggcctggccaccacacctagcactcagcaagtgaagtcttcagagaaaacacagattgctgtgccccagccagtggctccaagctactcctatgctaccccgacgccacaggcgagtttccagtctacatctgccccgtatcccgtcattaaggaactcgtggtgtctgccggcgaatcagtgcaaatcactctcccaaagaacgaagttcagcttaacgcgtatgtccttcaggaaccccctaaagctcacagtagaccagtgtag

SEQ ID NO: 338972 - DNA, 822 bp, Artificial Sequence
  derived and/or modified sequence
atggagaagcggctgggcgtgaagcccaaccccgccagctggatcctttctggatattattggcagacaagcgccaagtggctacgctcactgtacctgttctatacctgtttctgcttctccgtgctttggctgagcaccgatgcatctgaatctcggtgtcagcaagggaaaacccagttcggcgttggccttagatcaggcggggagaaccatctgtggcttctcgaaggaaccccctcgctacagagctgttgggcagcttgctgtcaagatagcgcctgtcacgtattttggtggctggagggcatgtgtatccaggccgattgttctagacctcaatcttgtagggcttttcggactcatagttcgaacagtatgctcgtctttctcaaaaagtttcaaactgccgatgacttggggtttctgccagaggacgacgttccccacttactgggcctaggatggaactgggctagctggaggcaaagtccaccacgcgctgccctcagacccgcggtgagttcctctgatcaacagtcattgatccgtaagctacagaaaagaggttccccgtcagacgtggtcaccccaattgtaacacagcattcgaaagttaatgattcaaatgaacttggcggccttacgacctcggggagtgccgaggtgcacaaagcaatcactatctcatctcctctgaccaccgatcttacggcggaacttagcggcggccctaaaaacgtgagtgttcaacctgaaatttctgagggtctagccacgacaccttccacacagcaagtgaagtccagcgagaaaacttag

SEQ ID NO: 338973 - DNA, 540 bp, Artificial Sequence
  derived and/or modified sequence
atggagaagcggctgggcgtgaagcccaaccccgccagctggatcctctcagggtattattggcagacgtccgctaaatggcttcgaagcctttacctattttacacatgtttctgcttttcagtgctctggctgagcacggacgccagcgagtcacggtgtcagcaggggaaaacgcagttcggtgtcgggcttcgtagcgggggcgaaaaccatctctggttgttggagggcaccccgtcattacagtcctgttgggccgcctgctgtcaagactctgcctgccatgtattctggtggctcgagggaatgtgtatccaggcggattgttcccgaccacagagttgccgagcattccggactcattcttccaactcaatgctggtgttccttaagaagttccagactgctgacgacttgggattcctgcctgaggatgacgtccctcacctgctgggattagggtggaattgggcctcttggaggcaatcacctccccgtgccgccctgcggccagccgtgagctcttcagatcagtag

SEQ ID NO: 338974 - DNA, 1483 bp, Artificial Sequence
  derived and/or modified sequence
ccggccgccgtcgctgtccagggaggctgaggcgagaggtagctgtccgggtggggagcccgcactaccttcttcctcttcctcctcctcctccgggtgaggggagcgaaggttgggggtccccgagcccatggaccaggaggaggcggaggccgccgagagccggggccccgctatgtggccctgagccccggtaggtggccgggggcggctggctgccaggccgaggaccatgggctcaggggaggggcaagcgggacgggcgatgtcagcggctgcgctggccggatgttgggtccggaggtggcgcccctggctcggccagggcagccagctgcttctgtccttgcagtgtactggttctgcctgtctggagggccatggagaagaggctgggagtcaagccaaatcctgcttcctggattttatcaggatattattggcagacatctgcgaagtggttgagaagcctgtacctgttttatacttgcttttgcttcagcgttctgtggttgtcaacagatgccagtgagagcaggtgccagcaggggaagacacaatttggagttggcctgagatctgggggagaaaatcacctctggcttcttgaaggaaccccctctctccagtcatgttgggctgcctgctgccaggactctgcctgccatgtcttttggtggctagaagggatgtgcattcaggcagactgcagcaggccccagagctgccgggcttttaggacacactcctccaattccatgctggtgtttttaaaaaaattccaaactgcagatgatttgggctttctacctgaagatgatgtaccacatcttctggggctaggttggaactgggcatcttggaggcagagcccacccagagctgcactcagacctgctgtatcttccagtgaccagcagagcttaatcaggaagcttcagaagagaggtagtcccagtgacgtagttacacctatagtgacacagcattctaaagtgaatgactccaacgaattaggtggtctgactaccagtggctctgcagaggtccacaaggcgattacaatttccagtcccctaaccacagacctgactgcagagctgtctggtgggccaaagaatgtatcagtgcaacctgaaatatcagagggtcttgctactacgcccagcactcaacaagtaaaaagttctgagaaaacccagattgctgtcccccagccagtggctccctcctacagttatgctacccctaccccccaggcctctttccagagcacctcagcaccatacccagttataaaggaactggtggtatctgctggagagagtgtccagataaccctgcctaagaatgaagttcaattaaatgcatatgttctccaagaaccacctaaagctcactccaggcctgtatgaattcaaagtgattgtagagggtcaaaatgcccatggggaaggctatgtgaacgtgacagtcaagccag

SEQ ID NO: 338975 - DNA, 889 bp, Artificial Sequence
  derived and/or modified sequence
gtttccggccgccgtcgctgtccagggaggctgaggcgagagtgtactggttctgcctgtctggagggccatggagaagaggctgggagtcaagccaaatcctgcttcctggattttatcaggatattattggcagacatctgcgaagtggttgagaagcctgtacctgttttatacttgcttttgcttcagcgttctgtggttgtcaacagatgccagtgagagcaggtgccagcaggggaagacacaatttggagttggcctgagatctgggggagaaaatcacctctggcttcttgaaggaaccccctctctccagtcatgttgggctgcctgctgccaggactctgcctgccatgtcttttggtggctagaagggatgtgcattcaggcagactgcagcaggccccagagctgccgggcttttaggacacactcctccaattccatgctggtgtttttaaaaaaattccaaactgcagatgatttgggctttctacctgaagatgatgtaccacatcttctggggctaggttggaactgggcatcttggaggcagagcccacccagagctgcactcagacctgctgtatcttccagtgaccagcagagcttaatcaggaagcttcagaagagaggtagtcccagtgacgtagttacacctatagtgacacagcattctaaagtgaatgactccaacgaattaggtggtctgactaccagtggctctgcagaggtccacaaggcgattacaatttccagtcccctaaccacagacctgactgcagagctgtctggtgggccaaagaatgtatcagtgcaacctgaaatatcagagggtcttgctactacgcccagcactcaacaagtaaaaagttctgagaaaacc

SEQ ID NO: 338976 - DNA, 766 bp, Artificial Sequence
  derived and/or modified sequence
atttgcattcagaaatttaaaaaatactgggccagacataaccctcaggttactttacctctgagggtgcaacctcttctcctcaaaagtaagaaagtgtgtttggtcaaagtcacaaagctgttagtagcagaactgcaactaaaactcagagatcttcttgtctgcgggctggtactctttccattctaccacatagtgtactggttctgcctgtctggagggccatggagaagaggctgggagtcaagccaaatcctgcttcctggattttatcaggatattattggcagacatctgcgaagtggttgagaagcctgtacctgttttatacttgcttttgcttcagcgttctgtggttgtcaacagatgccagtgagagcaggtgccagcaggggaagacacaatttggagttggcctgagatctgggggagaaaatcacctctggcttcttgaaggaaccccctctctccagtcatgttgggctgcctgctgccaggactctgcctgccatgtcttttggtggctagaagggatgtgcattcaggcagactgcagcaggccccagagctgccgggcttttaggacacactcctccaattccatgctggtgtttttaaaaaaattccaaactgcagatgatttgggctttctacctgaagatgatgtaccacatcttctggggctaggttggaactgggcatcttggaggcagagcccacccagagctgcactcagacctgctgtatcttccagtgaccagca

SEQ ID NO: 338977 - DNA, 1035 bp, Artificial Sequence
  derived and/or modified sequence
atggaaaagcgtctgggagtcaagcctaacccagcatcatggatcctctcgggttattattggcagaccagtgctaaatggttgagaagtctgtacctgttttacacgtgtttctgtttctctgtcctctggctgtcaacagacgcttccgaaagcagatgtcagcaggggaagacccagtttggggttggcttgcgtagcgggggagaaaaccacctgtggctcctggaggggacacctagcttgcagtcatgttgggctgcctgttgccaggactcagcctgccatgtgttttggtggctggagggaatgtgtattcaagccgattgcagccgtccccagtcttgtcgtgccttcagaactcatagttcgaactcaatgctcgtgtttctcaagaagtttcaaaccgctgacgatctgggcttcctgccagaggatgatgtcccacaccttttggggctgggttggaattgggcaagttggaggcagagcccaccacgagctgcactgcgtcccgctgttagctcatccgatcagcagagtctgatccggaaacttcagaagcgaggcagcccctccgacgttgtgaccccaatcgtgacccagcacagcaaggtcaacgatagtaatgagctgggtggcctcaccaccagtgggtctgctgaggtccataaggccataactatcagttcacctctcactaccgacttgacagccgagctgtccggaggtccaaaaaatgtgagtgtgcagcccgaaatcagcgagggcctggccacgaccccaagtacccagcaggttaaatccagtgagaagacacagatagccgttcctcagcccgtagccccttcttattcctacgctaccccgaccccccaggcatcattccaatcaacctccgcaccctacccggttatcaaagagctggtggtttctgcgggagaatcagtacagatcacccttcccaagaatgaggttcaactgaatgcttatgtgttgcaggagccccctaaagcccattccaggcccgtttag

SEQ ID NO: 338978 - DNA, 822 bp, Artificial Sequence
  derived and/or modified sequence
atggaaaagagactcggtgtgaagcccaaccctgccagctggattctgtcaggatattattggcaaacctcagccaagtggctgcggtccttatacctgttttacacatgtttctgtttcagcgtgctttggttgtctactgacgcatcagagagcagatgccagcaaggcaaaactcaatttggagttggccttcgcagcgggggagagaaccacctatggctgctcgagggaaccccctctttgcagagctgttgggccgcatgctgccaggatagcgcttgccacgtattttggtggcttgaggggatgtgcatacaggcggactgttccaggcctcagtcctgcagagccttcagaacgcacagctccaatagcatgctggtgttccttaaaaaattccagactgccgacgacctggggtttctgcctgaggatgacgtccctcatcttctgggattgggttggaactgggccagctggcgacagtctccgccacgcgcagccctgaggcctgccgtgagctcctctgatcagcagtcgctcattagaaagttgcagaagcggggttctccctctgacgtagttactcccatcgtgactcaacacagcaaggttaatgactcaaatgaactcggaggcctcaccaccagcggaagcgctgaggtgcataaggcaatcacaatcagttcaccgctgacgacagatctaaccgccgaactgagcggcggtccaaaaaacgtgagtgtgcaacccgaaatctcagaggggttagcaactactcccagtacacaacaagtgaaatcttccgagaaaacatag

SEQ ID NO: 338979 - DNA, 540 bp, Artificial Sequence
  derived and/or modified sequence
atggagaaacgtcttggggtcaagccaaatcccgcttcttggatactctcgggctattattggcaaaccagcgctaaatggctgagatccctttatctgttctatacttgcttctgcttttcagtcctgtggcttagtactgatgccagtgagagtcgatgccagcaggggaagactcagttcggagtcggcctgcgctctggcggtgagaatcacctttggttgttggagggtacccccagcctgcagagttgctgggccgcttgctgtcaggacagcgcttgtcacgtgttttggtggctagaaggcatgtgtatacaggcagactgtagcaggccgcaatcctgccgggctttccggacacacagctctaattccatgctcgtcttcttgaaaaaattccagaccgcggatgacctgggcttcctccctgaggatgatgttccacatcttctggggcttggatggaactgggcctcttggcgtcagtccccacctcgcgctgccttgcgtccagcagtgtcttccagtgatcagtag

SEQ ID NO: 338980 - protein, 545 aa, Artificial Sequence
  derived and/or modified sequence
MAGAIIENMSTKKLCIVGGILLVFQIIAFLVGGLIAPGPTTAVSYMSVKCVDARKNHHKTKWFVPWGPNHCDKIRDIEEAIPREIEANDIVFSVHIPLPHMEMSPWFQFMLFILQLDIAFKLNNQIRENAEVSMDVSLAYRDDAFAEWTEMAHERVPRKLKCTFTSPKTPEHEGRYYECDVLPFMEIGSVAHKFYLLNIRLPVNEKKKINVGIGEIKDIRLVGIHQNGGFTKVWFAMKTFLTPSIFIIMVWYWRRITMMSRPPVLLEKVIFALGISMTFINIPVEWFSIGFDWTWMLLFGDIRQGIFYAMLLSFWIIFCGEHMMDQHERNHIAGYWKQVGPIAVGSFCLFIFDMCERGVQLTNPFYSIWTTDIGTELAMAFIIVAGICLCLYFLFLCFMVFQVFRNISGKQSSLPAMSKVRRLHYEGLIFRFKFLMLITLACAAMTVIFFIVSQVTEGHWKWGGVTVQVNSAFFTGIYGMWNLYVFALMFLYAPSHKNYGEDQSNGMQLPCKSREDCALFVSELYQELFSASKYSFINDNAASGI

SEQ ID NO: 338981 - DNA, 1638 bp, Artificial Sequence
  derived and/or modified sequence
atggccggcgccatcatcgagaacatgagcaccaagaagctgtgcatcgtgggcggcatcctgctggtgttccagatcatcgccttcctggtgggcggcctgatcgcccccggccccaccaccgccgtgagctacatgagcgtgaagtgcgtggacgccagaaagaaccaccacaagaccaagtggttcgtgccctggggccccaaccactgcgacaagatcagagacatcgaggaggccatccccagagagatcgaggccaacgacatcgtgttcagcgtgcacatccccctgccccacatggagatgagcccctggttccagttcatgctgttcatcctgcagctggacatcgccttcaagctgaacaaccagatcagagagaacgccgaggtgagcatggacgtgagcctggcctacagagacgacgccttcgccgagtggaccgagatggcccacgagagagtgcccagaaagctgaagtgcaccttcaccagccccaagacccccgagcacgagggcagatactacgagtgcgacgtgctgcccttcatggagatcggcagcgtggcccacaagttctacctgctgaacatcagactgcccgtgaacgagaagaagaagatcaacgtgggcatcggcgagatcaaggacatcagactggtgggcatccaccagaacggcggcttcaccaaggtgtggttcgccatgaagaccttcctgacccccagcatcttcatcatcatggtgtggtactggagaagaatcaccatgatgagcagaccccccgtgctgctggagaaggtgatcttcgccctgggcatcagcatgaccttcatcaacatccccgtggagtggttcagcatcggcttcgactggacctggatgctgctgttcggcgacatcagacagggcatcttctacgccatgctgctgagcttctggatcatcttctgcggcgagcacatgatggaccagcacgagagaaaccacatcgccggctactggaagcaggtgggccccatcgccgtgggcagcttctgcctgttcatcttcgacatgtgcgagagaggcgtgcagctgaccaaccccttctacagcatctggaccaccgacatcggcaccgagctggccatggccttcatcatcgtggccggcatctgcctgtgcctgtacttcctgttcctgtgcttcatggtgttccaggtgttcagaaacatcagcggcaagcagagcagcctgcccgccatgagcaaggtgagaagactgcactacgagggcctgatcttcagattcaagttcctgatgctgatcaccctggcctgcgccgccatgaccgtgatcttcttcatcgtgagccaggtgaccgagggccactggaagtggggcggcgtgaccgtgcaggtgaacagcgccttcttcaccggcatctacggcatgtggaacctgtacgtgttcgccctgatgttcctgtacgcccccagccacaagaactacggcgaggaccagagcaacggcatgcagctgccctgcaagagcagagaggactgcgccctgttcgtgagcgagctgtaccaggagctgttcagcgccagcaagtacagcttcatcaacgacaacgccgccagcggcatctag

SEQ ID NO: 338982 - DNA, 1638 bp, Artificial Sequence
  derived and/or modified sequence
atggccggcgcaattatcgagaatatgagcacgaaaaagttgtgcatcgtgggcggcatcctcctggtgtttcaaattattgccttcttagttggtggcctgattgctccagggcccaccacagcagtatcatacatgtctgtgaaatgtgtcgatgccaggaaaaatcatcacaagaccaagtggttcgtgccctggggacccaaccattgcgacaaaatccgggatatcgaagaggcgatccctcgtgaaatcgaggccaatgatattgtctttagcgtgcatattcctctgcctcatatggaaatgtccccctggtttcagtttatgctcttcatcctgcagctggacatagcctttaagctaaacaaccagatccgtgaaaacgcggaggtgtcaatggacgtgtctttagcttaccgtgatgacgcctttgccgagtggacggaaatggcccacgagagggtgccacgtaagctgaaatgcaccttcacctccccaaaaactcccgagcacgaagggcggtattatgagtgcgacgtgctgccattcatggagattggatctgtcgctcacaaattctacttgctgaacattaggctgccagtgaacgagaagaaaaaaattaatgtgggcattggtgaaattaaagacatcagacttgtgggcatccaccagaacggcggatttaccaaagtgtggttcgctatgaaaactttcctgactccatctatcttcatcatcatggtgtggtactggagacgcataaccatgatgtccagaccaccagtgctgttggagaaggtcatttttgcgctggggatcagcatgacatttataaacatcccagtggagtggttttcgattggatttgattggacatggatgttgttgtttggggacatcaggcaaggcatcttctacgcaatgttgttgtcattttggatcatcttttgcggcgaacatatgatggatcagcatgaaagaaatcacatagccggatattggaagcaggtgggccctatcgccgtgggcagtttctgtctgtttattttcgacatgtgcgagcggggtgtgcaactcaccaaccccttctatagtatttggacgacggacatcggcacagagctggccatggccttcatcattgttgccggaatctgcctatgcctttactttctgtttctctgttttatggtgttccaagtgttcagaaacatctccggaaaacagagtagtctacccgctatgtccaaggtccgacggcttcactacgagggtctcatctttcgctttaagttccttatgctgatcacattagcctgcgccgctatgacagttatattctttatcgtttctcaggttactgagggccactggaagtggggaggtgtaaccgtgcaagtgaattcggccttcttcacaggcatctatggtatgtggaacctgtacgtgtttgcacttatgtttctgtacgctcctagtcacaagaactatggtgaggaccagagcaatggtatgcagctcccgtgtaagtcccgtgaggactgcgctttatttgtatctgagctctaccaggagcttttctcagcaagcaagtacagttttattaacgacaacgctgccagcggcatatag

SEQ ID NO: 338983 - DNA, 1638 bp, Artificial Sequence
  derived and/or modified sequence
atggccggggccatcatcgagaacatgagcaccaagaagctgtgcatcgtgggcggcatcctgctggtgttccagatcatcgccttcctggtgggcggcctgattgcccctggccccaccacagctgtgtcctacatgtctgtgaagtgtgtggatgccaggaagaaccaccacaagaccaagtggtttgtgccctggggccccaaccactgtgacaagatccgggacatcgaggaggccatcccccgggagattgaggccaatgacatcgtgttttctgtgcacatccccctgccccacatggagatgagcccctggttccagttcatgctgttcatcctgcagctggacatcgccttcaagctgaacaaccagatccgggagaatgctgaggtgtccatggatgtgtccctggcctacagagatgatgcctttgctgagtggacagagatggcccacgagcgggtgcccaggaagctgaagtgcaccttcaccagccccaagaccccagagcacgagggccgctactatgaatgtgatgtgctgcccttcatggagatcggctctgtggcccacaagttctacctgctgaacatccggctgcctgtgaatgagaagaagaagatcaacgtgggcattggagagatcaaggacatccggctggtgggcatccaccagaatggaggcttcaccaaggtgtggtttgccatgaagaccttcctgacccccagcatcttcatcatcatggtgtggtactggaggcgcatcaccatgatgagccggccccctgtgctgctggagaaggtgatctttgccctgggcatctccatgaccttcatcaacatccctgtggagtggttcagcattggatttgactggacctggatgctgctgtttggagacatccggcagggcatcttctacgccatgctgctgtccttctggatcatcttctgtggggagcacatgatggaccagcatgaaagaaaccacatcgccggctactggaagcaggtgggccccatcgctgtgggcagcttctgcctcttcatctttgacatgtgtgagcggggcgtgcagctgaccaaccccttctacagcatctggaccacagacattggaacagagctggccatggccttcatcatcgtggccggcatctgcctgtgcctgtacttcctgttcctgtgcttcatggtgttccaggtgttcaggaacatcagcggcaagcagagcagcctgcctgccatgagcaaggtgcggcggctgcactatgagggcctcatcttccgcttcaagttcctgatgctgatcaccctggcctgtgccgccatgaccgtcatcttcttcatcgtgtcccaggtgacagagggccactggaagtggggcggcgtgacagtgcaggtgaacagcgccttcttcaccggcatctacggcatgtggaacctgtatgtgtttgccctgatgttcctgtatgcccccagccacaagaactatggagaggaccagagcaatggcatgcagctgccctgcaagagccgggaggactgtgccctgtttgtgtctgagctgtaccaggagctgttcagcgccagcaagtacagcttcatcaatgacaatgctgccagcggcatctag

SEQ ID NO: 338984 - DNA, 1638 bp, Artificial Sequence
  derived and/or modified sequence
atggccggcgccatcatcgagaacatgagcaccaagaagctgtgcatagtcggcgggattcttttagttttccagattatcgcttttctcgtgggtggcctaatagcgcctggtcctacaactgccgtctcttacatgtcagtaaaatgcgtcgacgcccgcaagaaccatcataaaaccaaatggttcgtgccttggggacccaaccactgtgacaaaattcgggacattgaagaggctattcccagggagattgaggcaaatgatattgtgttctccgtgcatattcccttacctcatatggagatgtccccttggttccaattcatgcttttcattctacagttggacatagcatttaagctgaacaatcagatccgcgaaaatgctgaggtgtccatggacgtttccctagcatatagggatgatgccttcgcggagtggaccgagatggcccatgaacgcgtgcccagaaagctgaagtgcactttcacgtcacccaaaaccccggagcatgaggggcgctattacgaatgtgacgtgttaccgtttatggagattggcagcgttgctcataagttttaccttttgaacatcagactaccagtgaacgaaaagaaaaagatcaacgtcgggatcggagagatcaaggacattcgcttggtcggtatccatcagaatggcggattcacaaaggtgtggttcgcgatgaagacgtttcttacacccagcatattcatcatcatggtgtggtattggcggcgcatcacaatgatgtccagaccgccggttcttcttgaaaaggtcattttcgcactcggaatatctatgactttcatcaacattcccgtggagtggttctccattggctttgactggacgtggatgctacttttcggggacatacggcaaggcatcttttacgccatgttgttaagcttttggatcatcttttgcggagaacacatgatggaccagcatgagaggaatcacatagcaggatattggaagcaagtaggtccgatcgccgtgggtagcttttgcctgtttatctttgatatgtgcgagaggggcgtgcagctcacgaatcctttctatagtatatggacaactgatattggaacagaactggccatggcctttatcatagttgcgggtatatgcctgtgcctctacttcctcttcctgtgcttcatggtgtttcaggtgttcagaaatatttctggcaagcagtccagcttacctgcaatgtccaaggtccggcggctgcattacgagggcctgatttttcgtttcaaattccttatgctgatcaccctagcttgtgccgccatgaccgtcattttcttcattgtgtctcaggttactgaaggtcattggaagtggggcggcgtcacagtgcaagtaaatagcgctttcttcaccgggatttacggcatgtggaatctgtatgtgtttgcattgatgttcttatacgccccctcacataaaaactacggcgaggatcagagtaacggtatgcagcttccttgcaagagcagggaagactgtgcccttttcgttagcgaactctaccaggaattgttctctgcctcaaagtacagcttcattaacgacaacgcagccagtggtatctag

SEQ ID NO: 338985 - DNA, 1638 bp, Artificial Sequence
  derived and/or modified sequence
atggccggagccatcatcgagaatatgtccacgaagaagctttgtatcgtgggcggaatcctcctggtgttccagattattgccttcctcgtgggcggtcttatcgccccaggaccaactacagccgtttcgtacatgtccgtaaagtgcgtcgatgccaggaagaaccaccacaaaaccaagtggtttgtgccttggggccctaatcactgcgacaagatccgggacatcgaggaagcaattccccgagagatagaggcaaacgacatcgtgttctccgtgcacatccctctgccccacatggaaatgagtccatggttccagttcatgctgttcatcctacagctggacattgcctttaagctgaataaccaaattcgggaaaacgctgaggtgtcaatggacgtctcactcgcttacagggacgacgcgttcgccgaatggacagagatggcccacgagcgggtccccagaaaacttaaatgcactttcacttccccaaagaccccagaacacgagggtcgctactacgaatgtgatgtccttccatttatggagatcggttcagttgctcacaaattctacctactgaacatcaggctaccagtgaacgagaaaaagaaaattaatgtgggaattggtgaaattaaagacatacggttggtgggaatccaccaaaacggcggattcaccaaggtgtggttcgcaatgaaaacattcctcactccctcaatcttcataatcatggtttggtattggcgtcgaattactatgatgtccagacccccagtactgctggagaaagtaatctttgctcttggcatttccatgaccttcataaatatcccagtcgaatggttctcaattggcttcgattggacctggatgctcttatttggggacatccgtcaaggaatcttctatgctatgctcctctcattctggataattttttgtggagagcacatgatggaccaacacgaacgcaaccatatcgcgggttactggaagcaggtaggtcccatcgccgtcggatccttttgcctctttattttcgatatgtgcgaacggggtgtgcaattgacaaatccgttctattcaatctggaccacagacattggaacggaacttgcaatggcgtttattattgtggcagggatctgcctgtgcctctacttcttgtttctgtgcttcatggtatttcaagtctttagaaatatcagcggcaagcagagcagtctgccagccatgagcaaagttcgcagactgcactatgaaggcctaatcttcagattcaaatttctgatgttgattactctagcctgtgctgcaatgaccgtcatattcttcatcgtttcccaggtgacagagggacattggaagtgggggggagtgactgtccaggtaaactccgctttctttaccggcatctatgggatgtggaacctttacgtgtttgccctcatgttcctttatgccccttcacacaagaactatggggaagatcaatccaatggcatgcagctaccatgtaagtctcgagaagattgtgcactgttcgtatccgaactgtaccaggaactgttctcagcctcaaagtatagctttattaatgacaacgccgcaagtggaatctag

SEQ ID NO: 338986 - DNA, 2095 bp, Artificial Sequence
  derived and/or modified sequence
ggcggcgtcatgtgatccgcttccctgctcctttaagcgtccacaggcggcggagcggccacaatcacagctccgggcattgggggaacccgagccggctgcgccgggggaatccgtgcgggcgccttccgtcccggtcccatcctcgccgcgctccagcacctctgaagttttgcagcgcccagaaaggaggcgaggaaggagggagtgtgtgagaggagggagcaaaaagctcaccctaaaacatttatttcaaggagaaaagaaaaagggggggcgcaaaaatggctggggcaattatagaaaacatgagcaccaagaagctgtgcattgttggtgggattctgctcgtgttccaaatcatcgcctttctggtgggaggcttgattgctccagggcccacaacggcagtgtcctacatgtcggtgaaatgtgtggatgcccgtaagaaccatcacaagacaaaatggttcgtgccttggggacccaatcattgtgacaagatccgagacattgaagaggcaattccaagggaaattgaagccaatgacatcgtgttttctgttcacattcccctcccccacatggagatgagtccttggttccaattcatgctgtttatcctgcagctggacattgccttcaagctaaacaaccaaatcagagaaaatgcagaagtctccatggacgtttccctggcttaccgtgatgacgcgtttgctgagtggactgaaatggcccatgaaagagtaccacggaaactcaaatgcaccttcacatctcccaagactccagagcatgagggccgttactatgaatgtgatgtccttcctttcatggaaattgggtctgtggcccataagttttaccttttaaacatccggctgcctgtgaatgagaagaagaaaatcaatgtgggaattggggagataaaggatatccggttggtggggatccaccaaaatggaggcttcaccaaggtgtggtttgccatgaagaccttccttacgcccagcatcttcatcattatggtgtggtattggaggaggatcaccatgatgtcccgacccccagtgcttctggaaaaagtcatctttgcccttgggatttccatgacctttatcaatatcccagtggaatggttttccatcgggtttgactggacctggatgctgctgtttggtgacatccgacagggcatcttctatgcgatgcttctgtccttctggatcatcttctgtggcgagcacatgatggatcagcacgagcggaaccacatcgcagggtattggaagcaagtcggacccattgccgttggctccttctgcctcttcatatttgacatgtgtgagagaggggtacaactcacgaatcccttctacagtatctggactacagacattggaacagagctggccatggccttcatcatcgtggctggaatctgcctctgcctctacttcctgtttctatgcttcatggtatttcaggtgtttcggaacatcagtgggaagcagtccagcctgccagctatgagcaaagtccggcggctacactatgaggggctaatttttaggttcaagttcctcatgcttatcaccttggcctgcgctgccatgactgtcatcttcttcatcgttagtcaggtaacggaaggccattggaaatggggcggcgtcacagtccaagtgaacagtgcctttttcacaggcatctatgggatgtggaatctgtatgtctttgctctgatgttcttgtatgcaccatcccataaaaactatggagaagaccagtccaatggaatgcaactcccatgtaaatcgagggaagattgtgctttgtttgtttcggaactttatcaagaattgttcagcgcttcgaaatattccttcatcaatgacaacgcagcttctggtatttgagtcaacaaggcaacacatgtttatcagctttgcatttgcagttgtcacagtcacattgattgtacttgtatacgcacacaaatacactcatttagcctttatctcaaaatgttaaatataaggaaaaaagcgtcaacaataaatattctttgagtattgtcttacttctctta

SEQ ID NO: 338987 - protein, 366 aa, Artificial Sequence
  derived and/or modified sequence
MAARTVIIDHGSGFLKAGTAGWNEPQMVFPNIVNYLPCKENPGPSYARRRVSLGIDICHPDTFSYPIERGRILNWEGVQYLWSFVLENHRREQEVPPVIITETPLREPADRKKMLEILFELLHVPSVLLADQLQMSLYASGLLTGVVVDSGYGLTRVQPFHQGRPLPASGKTLEFAGQDLSAYLLKSLFKEDCDRRCLFQLETVAVTQMNKCYVPQNLGEALDFRERQQSALDESNTYQLPDGSRVELTPMQRVAPEMFFSPQVFEQPGPSIPRAIVESVESCEISLRPLLVSHVMACGGNTLYPGFTKRLFRELMGDHVSSTKATVWEGSNRNFSVWLGASVVAHLSTYQSEWMSREEYGEHMRM

SEQ ID NO: 338988 - DNA, 1861 bp, Artificial Sequence
  derived and/or modified sequence
ttcctgcttgccacgtgctcacagagtaggctgcggcaccacgtgcagccgctctcgtgcaggcgtttgcagtgtgcagctgagttcggcagctcacacagcacccctttcaagttgttttgcagtgggtgcctcttgtgagacactgtttctgagagcagcttttgtggcatcttacagggcagatttctggtcccacccacctctgcctccgccatggctgcaagaaccgttatcattgaccacgggtctggctttttgaaggctggcacggccggctggaatgagcctcagatggtcttcccgaacatcgtgaactacctaccgtgcaaggagaaccctggccccagctatgcccgtaggcgtgtgagcctgggcatcgacatttgccatcctgacacctttagctaccccatcgagcggggccgcatcctcaactgggagggtgtgcagtacctctggtcatttgtgttggagaaccacagacgggagcaagaggtcccccctgtgatcatcacggagacacccttgagggagcctgcggaccgaaagaagatgctggagatcctgtttgagttgctgcatgtcccatcggtcctcctggccgaccagctgcagatgtccctgtatgcctctggcctcctgaccggagtggtggttgattctggctatggcctgacccgcgtgcagcctttccaccagggccgccccttgcccgccagcggcaagacgctggagttcgccggccaggatctctccgcctatctcctcaagagtctctttaaggaagattgcgatagacgctgcctgtttcagctggagacagtcgccgtgactcagatgaacaagtgctacgtgccgcagaatctgggggaggccctggactttcgtgagaggcagcagagtgccttggatgagagcaacacctatcagctcccagacggctcccgcgtggagctgacccccatgcagcgggtggctcctgagatgttctttagcccgcaggtgttcgagcagccggggcccagcatcccacgggccattgtggaatccgtggagtcctgcgagatctccctgcgccccctgctggtctcccacgtgatggcctgcgggggcaacaccctctatcccgggttcacaaagcgcctgttcagggagctgatgggggatcacgtctcctccaccaaggccacagtctgggagggttccaatagaaactttagtgtctggctaggagcgtccgtggtggctcacctttctacctaccagtctgagtggatgtcccgagaggagtatggtgagcatatgaggatgtgaccctactggctcactcctgagaatgggctcctgttagatgggcacgggcggattaattttagcaaaatgttctgggtgggggtagaatgaggtggggtggggtgagctggctttggaattctaggggcatgagggtattttttaggttctaaggttttatcttgttgcaagagtgggacctacccaagggggaagacaagatgtcatccttggaaaccctgcaggggacagtttttccagggtggcctatcattggggtatgagtggctgactgccatctccatgcctgagagccactgatttttcattggcatttcccctggtttgtctcattcttcttggttgagtaggttttaactggggtagcactcctgctaggagtcccaattatttttgactaggggatgggggacagttgacatttctggtcctacaggccctttctggccagggaggcattgctgcaggtgagcctgggatgcccttgccacccgtggttggatcttgttttatatctgcaaataaatagcttgtttggaagcaa

SEQ ID NO: 338989 - DNA, 3229 bp, Artificial Sequence
  derived and/or modified sequence
atgataaagatgcagtacctttctcttaaaaaaaaatgctatggaaagctgtgagaattgaagagacaaattggctgtgtcagtgtggggttatgtcatgatttctagaagccctgaagttgctcttttgagcagctttgcatgacacgctctggtaaaaggtgtgcatctttaaattatttcatggatactttgaaaaatattgtatcacttcaaatacagcaataagtttatatgttctcaagatttcatttgtttttaagaattttaagttcgtggattaatatcactacttgaatactgacagttgttgattagacaccgaaaggttactgattgttgaatgtatctgtgttagagctgtgcactggcacgcttgcatcaggggctggggccacacggccgccacacagattcccccgtgatgcctggagctgcttccagagccgggtgtctccaagaggcacctgtaggacttcccatttagaaatctcttgagtgggtttgtatgttaccttctccaaggtttatttaggacagagatattgctggaaggtcatgggtcagattccctcacaacccacctcgtctgcgggtgcagccccactccaaggctccccgttattggggtatgtgaggagcagtaaatataaaaccagttcaactgtcctcatggaatcaccctttctgtttttgcagtattcataaagctagtgtaaggtctggttttagtctattaaatcttagagatctaaaggaaatgctcaaaatgtagccaggttttaaatgctttaacttttaaaaaatgtaaatttttgtatgtttatagcttctaaatatgaaagttaaagaatgtactgtgatgaaatgttcagtattatgttgcttctcagtatcatgttgcttctcagtattgtgttgcttctgattctatgaatgttcattttaagaccccttgttgaaatgggacagttggcagcggctctgatgagcccgagaagaggcctgcccttgggtgcggagtctccctccgcacgatgctcccacgcgtccaacttgcacccaaggggcttttccctcttccaagtggactccttcaaggaagctgcagctcggtcagcagagaaggggcctgccgccagcgccctggaggaagaggaagaggaacccaagaggatggcttgtctcccagcagccacaccggctttgtgctcagccagttcatttgagtttgcatgtttctctgcactatggattttgagcatttagatttctttaatcaaaagcgttttagtgactccagtagacattttctttctgaggcatcgtgctttgcatgagagcaggccaaggttgaggggaaaagtaaagttaaagtcggttctctttcatagcaacacgtattgtctgacattcagccagctttttttttttctaataatttctgtgcctttctgtcctgtatttactgtatttagaaaaagcagctagaatatttctccattaactcttgagattcacaggactgtctagctctgagtcctagcaatagactccttagaggagtagtacgtttatctagattttctctagataatgcaggcggaagacctgggttcccgggtggggcattgcagttcttcctgtgtttggcttccaggaattacatgaacgacagccttcgcaccgacgtcttcgtgcggttccagccagagagcatcgcctgtgcctgcatttatcttgctgcccggacgctggagatccctttgcccaatcgtccccattggtttcttttgtttggagcaactgaagaagaaattcaggaaatctgcttaaagatcttgcagctttatgctcggaaaaaggttgatctcacacacctggagggtgaagtggaaaaaagaaagcacgctatcgaagagggcccaagcccggggcctgttgcctgggggcacacaggtgctggatggtacctcggggttctctcctgcccccaagctgggtgctgggattacagcctggagtgcagtggcgctatctgggatcactgcaagctccgcctaccagattctggtgattcttgtgcctcagcctcccaagtagctgggattgcaggcgcccaccaccacgctcagagtctcgctgtgttgccagtggaatcccccaaagaaggtaaagggagcaagccttccccactgtctgtgaagaacaccaagaggaggctggagggcgccaagaaagccaaggcggacagccccgtgaacggcttgccaaaggggcgagagagtcggagtcggagccggagccgtgagcagagctactcgaggtccccatcccgatcagcgtctcctaagaggaggaaaagtgacagcggctccacatctggtgggtccaagtcgcagagccgctcccggagcaggagtgactccccaccgagacaggccccccgcagcgctccctacaaaggctctgagattcggggctcccggaagtccaaggactgcaagtacccccagaagccacacaagtctcggagccggagttcttcccgttctcgaagcaggtcacgggagcgggcggataatccgggaaaatacaagaagaaaagtcattactacagagatcagcgacgagagcgctcgaggtcgtatgaacgcacaggccgtcgctatgagcgggaccaccctgggcacagcaggcatcggaggtgaggcggggttgcagtgactggtggccgcaagcccttccctggggagtacctgatggctgccctttgacccccggtggctgccctttgacccccgggtgtgctctcagcgcaagtggtcctagaacaggattctttttggaaatgtctgtcgactggaccttggtggatttggaaatggaactgagggaccggtgacacgtgcttcagaccggtctggggtgcggcgcacacctgggcccgtgcagggctcagctcggcagcagctctgagggcagctcaatgaaaaagtgaatgcacacgcccttgttggcgtggcctggcatggcctggtgctatcggcagccgctctccactccccgactgatactcaattacgtgaagccaagaaagatgatttttagaacctttgcctatattaggttgtacttatgtacatattttgcagtgtttcacaggagaaagtggccttaactgccccttattctctctccacgttgtaaataaacatgtgtttaatac

SEQ ID NO: 338990 - protein, 347 aa, Artificial Sequence [sequence omitted]

SEQ ID NO: 338991 - DNA, 1044 bp, Artificial Sequence
  derived and/or modified sequence
atgaacgacagtctccgaacagatgtgtttgtacgctttcagccggaatctattgcctgcgcgtgtatctatctcgcagcacggacactagaaataccactacctaataggcctcactggttcttgctgttcggagcaaccgaggaggagatccaggaaatctgcttaaagattttgcagctgtatgcccggaaaaaagttgatctaacccatctcgaaggggaagtggagaagagaaaacatgcaatcgaagagggccctagccccgggcctgtggcgtggggacacactggagccggttggtacttaggagttctgagttgcccacaggctggttgttgggattacagcctcgagtgttccggcgccatttgggaccactgcaagcttaggctgcccgattccggcgactcctgtgcatctgcttctcaggtggcaggaatcgcgggagcacatcaccacgcccagagtctggctgttctgccggtggagagccctaaagagggaaaaggtagcaaaccatctccgctatccgtgaagaatacgaagcgcaggctcgaaggagctaagaaagctaaagcagatagcccagttaacggtctgcccaaaggcagggagtcccgctcacgtagcaggtcccgcgaacagtcatacagtcgctcaccctctaggtctgcaagtcccaagaggagaaaatccgactctggttccacatccggagggtctaagagtcaatctagaagccgctcacgtagcgatagccctcccagacaagctccaaggtccgcaccatacaaaggctctgagatccggggcagtcggaagtccaaggactgcaagtatccccagaagccacataagtctcgcagccggagttcatcccgaagccgaagccgatcccgggagcgggccgacaacccagggaagtataaaaagaaaagccattactacagggaccagcgcagagagcggtctcgttcatacgagaggacagggcgccgttatgaaagagatcaccccggtcatagccgtcataggcgatag

SEQ ID NO: 338992 - DNA, 1044 bp, Artificial Sequence
  derived and/or modified sequence
atgaatgacagcctgaggacagatgtgtttgtgcgcttccagcctgagagcatcgcctgtgcctgcatctacctggccgcccggaccctggagatccccctgcccaaccggccccactggttcctgctgtttggagccacagaggaggagatccaggagatctgcctgaagatcctgcagctgtatgccaggaagaaggtggacctgacccacctggagggggaggtggagaagaggaagcacgccatcgaggagggccccagccctggccctgtggcctggggccacactggagctggctggtacctgggcgtgctgagctgcccccaggccggctgctgggactacagcctggagtgcagcggggccatctgggaccactgcaagctgcggctgcctgattctggggacagctgtgccagcgccagccaggtggccggcattgctggggcccaccaccacgcccagagcctggccgtgctgcctgtggagagccccaaggagggcaagggcagcaagcccagccccctgtctgtgaagaacaccaagaggcggctggagggcgccaagaaggccaaggctgacagccctgtgaatggcctgcccaagggccgggagagccgcagccgcagccgcagccgggagcagagctacagccgcagccccagccgcagcgccagccccaagaggaggaagagtgacagcggcagcaccagcggcggcagcaagagccagagccgcagccgcagcagaagtgacagccccccccggcaggcccccaggtctgccccctacaagggcagcgagatccggggcagcaggaagagcaaggactgcaagtacccccagaagccccacaagagccgcagccgcagcagcagccgcagccgcagccgcagccgggagagagctgacaaccctgggaagtacaagaagaagagccactactacagagaccagaggcgggagaggagccgctcctatgaaagaactggaagaagatatgagcgggaccaccctggccacagccgccacagaagatag

SEQ ID NO: 338993 - DNA, 1044 bp, Artificial Sequence
  derived and/or modified sequence
atgaacgacagcctgcggaccgacgtgttcgtgcggttccagcccgaaagcattgcgtgcgcttgtatctatctggcagccagaactttggaaatcccactgccgaatcgcccccactggttcctgctgttcggggccactgaagaagaaattcaggaaatctgtctgaagattctgcagctttatgcccggaagaaggtggaccttacacaccttgagggggaggtcgagaagcgcaagcatgctattgaggaaggcccgagtccgggtccagtggcctggggccacacaggcgctgggtggtacctcggggtgctgtcctgtccccaagcaggctgctgggattacagccttgaatgtagcggggctatctgggaccactgtaagttgcgccttcctgatagcggcgactcctgtgcctcagccagccaggtggctggtatcgcaggagcacaccatcacgcacaatctcttgctgttttgccagtggagagtccaaaggaaggcaaggggtctaagccatcacccctctccgtgaagaataccaagcgccgtctagaaggagccaagaaagccaaggcagattccccagttaatgggttaccgaagggccgggagagccgtagtcgaagcagatcacgtgagcagtcatattcccgctccccatcaaggtctgcatcacctaagcggcggaagtccgacagtggttcaacgtctggggggtccaaaagccagagtaggagtcgatcacgaagcgattcacctccacgccaggcgcctcgcagcgctccctataaggggagcgaaatccgcgggagccgtaagtcaaaggattgcaagtatccccagaagccccacaagagccgctcaaggagtagcagccgctctcgttcacggtctagggagcgcgcagataatcctggaaagtataagaaaaaatcacattattaccgggaccagagaagggagaggagtcggagctacgagcggacggggcgccgatacgagcgtgatcatcccggacatagcagacaccggagatag

SEQ ID NO: 338994 - DNA, 1044 bp, Artificial Sequence
  derived and/or modified sequence
atgaacgacagccttcgcacagatgtgttcgtgaggttccaacccgagagtattgcctgtgcgtgtatctacttggccgctcgcaccttggaaatccccctaccaaaccgacctcattggtttctactcttcggcgctaccgaagaggagatccaggaaatctgtctgaagatcctccagctgtacgccaggaaaaaagtcgatctgacccaccttgagggcgaggtggaaaagaggaaacacgccatcgaagaggggccttctccgggaccagttgcttgggggcataccggagcaggatggtacctgggtgtgctgtcgtgccctcaggctggctgttgggactactcccttgagtgttcgggtgcaatatgggatcattgcaagctcaggctgccagactcaggtgatagttgtgcctccgcatcacaagtggcaggaattgccggtgcccatcaccatgcgcagagccttgctgtccttcccgtggaatcacctaaggaaggcaaaggttccaaaccaagcccgctgtccgtgaaaaacacaaaacgcagacttgaaggagctaagaaggcaaaggctgatagccccgtcaacggtcttccaaaaggacgggagtccagatccaggagtcggagtagagaacaatcttacagtagatctccctccagatccgctagccccaagaggagaaaatcggactctggaagcacttcaggaggctccaagtcacaatctaggagccgtagtagatccgactctcccccacgacaggccccacgttccgccccatacaaaggatcagaaattaggggctcaaggaagtcaaaggactgcaagtacccccaaaagcctcacaagtctcgctctaggtcttccagtcgcagcagaagcagatcacgggagagagctgacaatcccggaaagtataagaagaagtcccactattatcgggaccagcggagggagcgatctagatcatacgagcgcaccgggaggcgttacgagcgggaccacccaggtcattcgcgccatcggagatag

SEQ ID NO: 338995 - DNA, 1044 bp, Artificial Sequence
  derived and/or modified sequence
atgaacgacagcctgagaaccgacgtgttcgtgagattccagcccgagagcatcgcctgcgcctgcatctacctggccgccagaaccctggagatccccctgcccaacagaccccactggttcctgctgttcggcgccaccgaggaggagatccaggagatctgcctgaagatcctgcagctgtacgccagaaagaaggtggacctgacccacctggagggcgaggtggagaagagaaagcacgccatcgaggagggccccagccccggccccgtggcctggggccacaccggcgccggctggtacctgggcgtgctgagctgcccccaggccggctgctgggactacagcctggagtgcagcggcgccatctgggaccactgcaagctgagactgcccgacagcggcgacagctgcgccagcgccagccaggtggccggcatcgccggcgcccaccaccacgcccagagcctggccgtgctgcccgtggagagccccaaggagggcaagggcagcaagcccagccccctgagcgtgaagaacaccaagagaagactggagggcgccaagaaggccaaggccgacagccccgtgaacggcctgcccaagggcagagagagcagaagcagaagcagaagcagagagcagagctacagcagaagccccagcagaagcgccagccccaagagaagaaagagcgacagcggcagcaccagcggcggcagcaagagccagagcagaagcagaagcagaagcgacagcccccccagacaggcccccagaagcgccccctacaagggcagcgagatcagaggcagcagaaagagcaaggactgcaagtacccccagaagccccacaagagcagaagcagaagcagcagcagaagcagaagcagaagcagagagagagccgacaaccccggcaagtacaagaagaagagccactactacagagaccagagaagagagagaagcagaagctacgagagaaccggcagaagatacgagagagaccaccccggccacagcagacacagaagatag

SEQ ID NO: 338996 - protein, 574 aa, Artificial Sequence
  derived and/or modified sequence
MEASLGIQMDEPMAFSPQRDRFQAEGSLKKNEQNFKLAGVKKDIEKLYEAVPQLSNVFKIEDKIGEGTFSSVYLATAQLQVGPEEKIALKHLIPTSHPIRIAAELQCLTVAGGQDNVMGVKYCFRKNDHVVIAMPYLEHESFLDILNSLSFQEVREYMLNLFKALKRIHQFGIVHRDVKPSNFLYNRRLKKYALVDFGLAQGTHDTKIELLKFVQSEAQQERCSQNKSHIITGNKIPLSGPVPKELDQQSTTKASVKRPYTNAQIQIKQGKDGKEGSVGLSVQRSVFGERNFNIHSSISHESPAVKLMKQSKTVDVLSRKLATKKKAISTKVMNSAVMRKTASSCPASLTCDCYATDKVCSICLSRRQQVAPRAGTPGFRAPEVLTKCPNQTTAIDMWSAGVIFLSLLSGRYPFYKASDDLTALAQIMTIRGSRETIQAAKTFGKSILCSKEVPAQDLRKLCERLRGMDSSTPKLTSDIQGHASHQPAISEKTDHKASCLVQTPPGQYSGNSFKKGDSNSCEHCFDEYNTNLEGWNEVPDEAYDLLDKLLDLNPASRITAEEALLHPFFKDMSL

SEQ ID NO: 338997 - protein, 119 aa, Artificial Sequence
  derived and/or modified sequence
MRKTASSCPASLTCDCYATDKVCSICLSRRQQVAPRAGTPGFRAPEVLTKCPNQTTGKSILCSKEVPAQDLRKLCERLRGMDSSTPKLTSDIQGHASHQPAISEKTDHKASCLVQTPPG

SEQ ID NO: 338998 - protein, 546 aa, Artificial Sequence
  derived and/or modified sequence
MEASLGIQMDEPMAFSPQRDRFQAEGSLKKNEQNFKLAGTFSSVYLATAQLQVGPEEKIALKHLIPTSHPIRIAAELQCLTVAGGQDNVMGVKYCFRKNDHVVIAMPYLEHESFLDILNSLSFQEVREYMLNLFKALKRIHQFGIVHRDVKPSNFLYNRRLKKYALVDFGLAQGTHDTKIELLKFVQSEAQQERCSQNKSHIITGNKIPLSGPVPKELDQQSTTKASVKRPYTNAQIQIKQGKDGKEGSVGLSVQRSVFGERNFNIHSSISHESPAVKLMKQSKTVDVLSRKLATKKKAISTKVMNSAVMRKTASSCPASLTCDCYATDKVCSICLSRRQQVAPRAGTPGFRAPEVLTKCPNQTTAIDMWSAGVIFLSLLSGRYPFYKASDDLTALAQIMTIRGSRETIQAAKTFGKSILCSKEVPAQDLRKLCERLRGMDSSTPKLTSDIQGHASHQPAISEKTDHKASCLVQTPPGQYSGNSFKKGDSNSCEHCFDEYNTNLEGWNEVPDEAYDLLDKLLDLNPASRITAEEALLHPFFKDMSL

SEQ ID NO: 338999 - DNA, 1725 bp, Artificial Sequence
  derived and/or modified sequence
atggaagcctctctcggaatccagatggatgagcccatggccttttctcctcaacgtgatcgctttcaggccgaaggatccctgaagaaaaatgaacaaaatttcaagctcgccggagtgaaaaaagacattgagaagttgtatgaagccgtacctcagctcagtaacgtctttaagattgaggataaaataggcgaaggaacattctctagcgtttacctagctacagcacagttgcaagtgggacctgaggagaagattgctttgaagcatctgatcccaacatcccacccaattcgaatcgctgctgaactacagtgtctgacagtcgccggcgggcaagataacgttatgggagttaagtactgctttcgcaagaatgatcacgttgtgatagctatgccatacctggagcatgaatccttcctcgatatcttgaacagtctcagtttccaggaggtgagggaatatatgctgaatctgttcaaggctcttaagaggattcatcaattcggtatcgtgcatcgcgacgtgaaaccatctaactttctttataacaggcggttgaagaagtacgctcttgtggatttcggcctggctcagggtacccacgatacgaagatcgaacttctcaagtttgtgcagtcagaagcccaacaggaaagatgctcccaaaataaaagtcacatcatcaccggaaataagattccgctgagcggtcccgtgcccaaggaactcgatcagcagtctacaactaaggcttccgtgaagcgcccctataccaatgcacagattcagataaagcagggcaaggatggtaaggaaggatctgtaggcttgagcgtgcagaggagcgtttttggggaaagaaacttcaacattcattcttctatctcccatgagtccccagcagttaagctgatgaagcaatcaaagactgtggacgtgctgagcagaaagcttgccacgaaaaaaaaagctatctctacgaaagtgatgaactccgccgttatgagaaaaaccgcctcctcgtgtcccgcatctctgacctgcgattgctacgctaccgataaggtctgctcaatctgtctcagccggcgccagcaagtggccccacgagcagggacaccaggattcagggccccggaagtgctcactaaatgcccgaaccagaccacagccatcgacatgtggagcgccggggtgatttttctgagccttttgagcgggagataccccttctataaagcatccgacgacctaaccgccctggcgcaaataatgacaattagaggatcacgtgaaactattcaagccgctaagacgttcggaaagtccatactctgtagtaaggaagttcccgcacaggatctgaggaagttatgcgagaggctgcggggaatggatagctcaacacccaaactcactagtgatattcagggtcacgcctcacatcagccggcaatttctgaaaaaacagaccataaggcatcatgcttagtgcagacccctccagggcagtactccgggaactcttttaagaagggagacagtaatagctgcgaacactgttttgacgagtacaatacaaatctggagggctggaatgaggtacctgatgaagcatatgacttgctggacaaactgttggatctcaatcctgcctccagaattaccgctgaggaagccctcctccatccgttctttaaagacatgagcttgtag

SEQ ID NO: 339000 - DNA, 1641 bp, Artificial Sequence
  derived and/or modified sequence
atggaggcctccctggggattcagatggatgagccaatggcctttagcccacagcgcgacagattccaggcagaagggtccttaaagaagaacgagcagaacttcaaactcgccggtacgttctcttccgtgtacctggcgactgctcagctgcaggtgggccccgaggaaaagattgcactcaagcatcttattcccacgtcccaccctatccggatcgccgctgaactccagtgtctgactgtggccggcggccaagacaacgtgatgggcgtcaaatactgcttcaggaaaaacgatcatgttgtgatagccatgccttatttagagcacgaatcctttctcgatatcctgaactccctgtcgttccaagaggtccgagaatacatgctgaatctcttcaaagccctcaagagaatacaccagtttgggattgttcaccgggatgtgaagccatcgaacttcctatataacagaaggttgaagaaatatgccctggtagactttgggctggctcaaggcactcacgacactaaaattgaactgctcaagttcgtgcagtccgaggcacagcaggaacggtgtagtcaaaacaagtcccacatcattaccggcaacaagattcctctcagcgggccagttccaaaggaactagatcaacagagcactacaaaggcatccgtgaagagaccttatactaatgctcagattcaaattaaacagggaaaggatgggaaggagggaagtgttggtttaagtgtgcaacggtccgtgttcggagagaggaattttaatatccacagcagcatctcgcacgaaagcccagcagtgaaactaatgaagcagtcaaagaccgtagacgtgttgagcagaaaactcgcaaccaagaagaaggcaatatctaccaaagttatgaacagcgccgtcatgcgtaagacagcctcctcttgccccgcctctctgacttgtgattgctacgccacagataaagtatgcagcatatgtctgagtagacgacagcaggttgccccgcgggccggtactcctgggttcagagcccccgaagtgttaaccaagtgtcccaatcagaccacagcgatcgacatgtggagcgccggagtcatctttctctccctgctctccggtcgataccctttctataaagcctccgatgatttaaccgctttagctcagatcatgaccatccgggggtcaagagagaccattcaggcagcaaagacgtttggcaagtccatactctgctcaaaggaagtccctgctcaggatctccggaaactctgcgaacgtctgagagggatggattcatccactccaaagcttactagcgatatccaagggcatgcctcccatcagcctgccatctctgagaagaccgatcacaaagccagttgtctagtgcaaacacctcccggccaatacagtggcaatagctttaaaaagggtgactcaaatagttgtgaacattgtttcgacgaatataacactaatctggagggatggaatgaagttcctgacgaggcctatgatcttttagacaaactgctggaccttaacccagcgtctaggattacagctgaagaggcattgctccatcccttcttcaaagatatgtcactgtag

SEQ ID NO: 339001 - DNA, 1725 bp, Artificial Sequence
  derived and/or modified sequence
atggaggccagtctggggatacagatggacgaacctatggccttctccccacaacgcgatagattccaagccgaagggtctctgaaaaagaatgagcagaacttcaaattagccggcgtgaaaaaagatattgagaagctatatgaggcggtcccacagctctccaacgtgttcaaaatagaggataaaatcggcgaggggacattctcaagtgtctatctggccacagcacagcttcaggtcggtcccgaggagaagatcgccctgaagcacctgatccctacatcgcatccgatccgtatagcagcggagttgcagtgcctgaccgtggccggcggtcaagataatgtcatgggtgtgaagtactgctttcgcaagaatgaccacgtggtcatagcaatgccttatttggagcatgaatcttttctggacattttaaactctctgagcttccaggaggtcagagaatacatgttaaacctttttaaagcactgaagaggatccaccagttcggaatagtgcaccgggacgtgaagccctcgaacttcttgtataaccgccgactgaagaaatacgccctggtagactttggcttggcccagggaacccatgatactaaaatcgaactcctgaaatttgtgcagtctgaagcccagcaggaacgatgctcccagaacaagagccacatcattactggtaataaaatccccttgagtggccccgtgccaaaagagctcgatcaacaaagcactactaaagccagtgtgaagcggccgtataccaatgcccagattcagatcaagcagggtaaagacggaaaagagggatctgtagggttatcagtgcaacgatccgtgttcggtgagcgtaatttcaatatccatagcagtatctcccacgagtccccagctgtgaagctgatgaagcagtctaagactgtagacgtgctgtccagaaagctggcgaccaagaaaaaagctatctctacaaaagtaatgaactctgccgtgatgcggaaaacagcctcctcttgccccgcgtcacttacatgcgactgttacgccacggataaggtttgctctatttgcttgtctcgacgtcagcaggtggcgcctcgggcagggacaccgggttttcgggccccagaagtcctgactaagtgtccaaatcagacgaccgcaatcgatatgtggtctgccggggtaatctttctgagcctgctgtctgggcggtaccctttctataaggcaagtgatgacctgactgcccttgcccaaatcatgactatccgcggctctcgtgaaaccatccaggcagccaagacttttggtaagtcgatcctctgcagcaaggaggtgccagcccaagacctccgcaaactgtgcgagcgcctgcgaggcatggacagcagtactcccaaactgacctctgatattcaaggacacgcctcacatcagccagcgatttctgagaaaactgatcacaaagcgagttgtctggtgcaaaccccgcctggtcagtattcaggaaatagcttcaagaaaggagatagcaattcttgtgaacattgctttgatgaatacaatactaacctcgaaggatggaacgaagtacccgacgaagcgtatgacttgcttgataagctgctggatctgaaccctgcttctcgcatcaccgccgaggaagccctgctgcatccgttttttaaggatatgagcttatag

SEQ ID NO: 339002 - DNA, 1725 bp, Artificial Sequence
  derived and/or modified sequence
atggaggccagcctgggcatccagatggatgagcccatggccttcagcccccagagggaccgcttccaggccgagggcagcctgaagaagaatgagcagaacttcaagctggccggcgtgaagaaggacatcgagaagctgtatgaggccgtgccccagctgagcaatgtgttcaagattgaggacaagatcggggagggcaccttcagctctgtgtacctggccacagcccagctgcaggtgggccctgaggagaagatcgccctgaagcacctgatccccaccagccaccccatcagaattgctgctgagctgcagtgcctgactgtggccggcggccaggacaacgtgatgggcgtgaagtactgcttcaggaagaatgaccacgtggtgattgccatgccctacctggagcacgagagcttcctggacatcctgaacagcctgtccttccaggaggtgcgggagtacatgctgaacctcttcaaggccctgaagaggatccaccagtttggaattgtgcacagagatgtgaagcccagcaacttcctgtacaacagaaggctgaagaagtatgccctggtggactttggcctggcccagggcacccatgacaccaagattgagctgctgaagtttgtgcagagcgaggcccagcaggagcgctgcagccagaacaagagccacatcatcaccggcaacaagatccccctgagcggccctgtgcccaaggagctggaccagcagagcaccaccaaggcctctgtgaagaggccctacaccaatgcccagatccagatcaagcagggcaaggatggcaaggagggctctgtgggcctgtctgtgcagaggtctgtgtttggagagaggaacttcaacatccacagcagcatcagccatgagagccctgctgtgaagctgatgaagcagagcaagacagtggatgtgctgagcaggaagctggccaccaagaagaaggccatcagcaccaaggtgatgaacagcgctgtgatgaggaagacagccagcagctgcccagccagcctgacctgtgactgctacgccacagacaaggtgtgcagcatctgcctgagccggcggcagcaggtggccccccgggccggcaccccaggcttccgggcccctgaggtgctgaccaagtgccccaaccagaccacagccatcgacatgtggagcgctggggtcatcttcctgagcctgctgagcggccgctaccccttctacaaggccagtgatgacctgacagccctggcccagatcatgaccatccggggcagccgggagaccatccaggccgccaagaccttcggcaagagcatcctgtgcagcaaggaggtgcctgcccaggacctgaggaagctgtgtgagcggctgcggggcatggacagcagcacccccaagctgaccagtgacatccagggccacgccagccaccagcctgccatcagcgagaagacagaccacaaggccagctgcctggtgcagaccccacctggccagtacagcggcaacagcttcaagaagggggacagcaacagctgtgagcactgctttgatgagtacaacaccaacctggagggctggaatgaggtgcctgatgaggcctatgacctgctggacaagctgctggacctgaacccagccagccgcatcacagctgaggaggccctgctgcaccccttcttcaaggacatgagcctgtag

SEQ ID NO: 339003 - DNA, 1641 bp, Artificial Sequence
  derived and/or modified sequence
atggaggccagcctgggcatccagatggatgagcccatggccttcagcccccagagggaccgcttccaggccgagggcagcctgaagaagaatgagcagaacttcaagctggccggcaccttcagctctgtgtacctggccacagcccagctgcaggtgggccctgaggagaagatcgccctgaagcacctgatccccaccagccaccccatcagaattgctgctgagctgcagtgcctgactgtggccggcggccaggacaacgtgatgggcgtgaagtactgcttcaggaagaatgaccacgtggtgattgccatgccctacctggagcacgagagcttcctggacatcctgaacagcctgtccttccaggaggtgcgggagtacatgctgaacctcttcaaggccctgaagaggatccaccagtttggaattgtgcacagagatgtgaagcccagcaacttcctgtacaacagaaggctgaagaagtatgccctggtggactttggcctggcccagggcacccatgacaccaagattgagctgctgaagtttgtgcagagcgaggcccagcaggagcgctgcagccagaacaagagccacatcatcaccggcaacaagatccccctgagcggccctgtgcccaaggagctggaccagcagagcaccaccaaggcctctgtgaagaggccctacaccaatgcccagatccagatcaagcagggcaaggatggcaaggagggctctgtgggcctgtctgtgcagaggtctgtgtttggagagaggaacttcaacatccacagcagcatcagccatgagagccctgctgtgaagctgatgaagcagagcaagacagtggatgtgctgagcaggaagctggccaccaagaagaaggccatcagcaccaaggtgatgaacagcgctgtgatgaggaagacagccagcagctgcccagccagcctgacctgtgactgctacgccacagacaaggtgtgcagcatctgcctgagccggcggcagcaggtggccccccgggccggcaccccaggcttccgggcccctgaggtgctgaccaagtgccccaaccagaccacagccatcgacatgtggagcgctggggtcatcttcctgagcctgctgagcggccgctaccccttctacaaggccagtgatgacctgacagccctggcccagatcatgaccatccggggcagccgggagaccatccaggccgccaagaccttcggcaagagcatcctgtgcagcaaggaggtgcctgcccaggacctgaggaagctgtgtgagcggctgcggggcatggacagcagcacccccaagctgaccagtgacatccagggccacgccagccaccagcctgccatcagcgagaagacagaccacaaggccagctgcctggtgcagaccccacctggccagtacagcggcaacagcttcaagaagggggacagcaacagctgtgagcactgctttgatgagtacaacaccaacctggagggctggaatgaggtgcctgatgaggcctatgacctgctggacaagctgctggacctgaacccagccagccgcatcacagctgaggaggccctgctgcaccccttcttcaaggacatgagcctgtag

SEQ ID NO: 339004 - DNA, 1725 bp, Artificial Sequence
  derived and/or modified sequence
atggaggccagcctgggcatccagatggacgagcccatggccttctctcctcagcgggacagattccaggctgagggttctttgaaaaaaaacgagcaaaactttaagctggccggagtgaagaaagatatcgaaaagttgtatgaggctgtgccccagctgagtaatgtgtttaagatcgaagataaaatcggggaaggcacctttagctccgtgtacctcgcaactgctcagctgcaggtgggccccgaagaaaaaattgcactaaaacatctgattccgacctcccaccccatccgcatagccgccgaactccagtgccttactgtggccgggggccaagacaatgtcatgggggtcaagtactgttttcggaaaaatgaccatgtcgtgatcgccatgccatatctggaacacgaatcattcttggatatactaaactcattgagttttcaagaggtgcgcgaatacatgctcaatttgtttaaggcactgaagcggatacaccagttcggtattgttcacagggacgtgaagccaagcaacttcctttacaaccgcagactaaagaagtacgccttggtcgacttcggccttgctcaggggacacatgacacaaagatcgaactccttaaatttgtgcagtccgaagctcaacaggagagatgcagccaaaacaagtcccatataattacaggcaacaagattccactgtcaggccctgtgcctaaggagttagatcaacagtcgaccactaaagcaagtgtgaagaggccatacaccaatgcccagattcagatcaagcagggaaaggatgggaaagaaggatctgtcggcctgtccgtgcagcgctccgtcttcggagaacgcaactttaacatacactcctccatatcccatgagtcccccgcagtgaagctgatgaagcagtctaagacagtcgatgttctctcccggaagctggctaccaagaagaaggcaataagtaccaaggtgatgaattctgccgtcatgcggaagaccgcgagcagttgtcctgccagccttacttgcgattgttacgccacagacaaagtgtgttctatctgtctctcacggcggcagcaagttgcaccaagagcgggcactcccggatttcgagctcccgaggtgttaacgaagtgccctaatcagacgaccgcaatcgatatgtggtccgccggcgtcatctttctcagtctgctgagcggtcgctaccctttctacaaggccagcgatgacctcacagcgctggcccaaattatgactatcaggggatcgagggagacgatccaggcagcaaagaccttcggcaaatcaattctgtgcagcaaagaggttccagcgcaggacctgcgaaagctgtgcgagcgtctcaggggaatggacagctccactccaaaactgacttcagatatacagggtcacgcaagccaccaacccgccatcagcgaaaaaaccgatcacaaggccagctgcttggtgcaaacccctcccggccagtatagcggtaactcttttaaaaaaggcgatagtaactcttgcgagcattgcttcgacgaatataacacaaacctcgagggctggaatgaggtgccagacgaagcctatgatctgctggacaaacttctggatctgaaccccgcctcccgtattaccgctgaagaggccctcttgcaccccttctttaaagatatgagtctttag

SEQ ID NO: 339005 - DNA, 1641 bp, Artificial Sequence
  derived and/or modified sequence
atggaggccagcctgggcatccagatggacgagcccatggccttcagcccccagagagaccgcttccaggccgaaggaagcctcaaaaagaacgagcagaatttcaaattagcaggtacattttcatcagtctacctggccaccgcacaactccaggttggtccggaggagaagattgctctgaaacatctcattcctacctcacaccccattcgcatcgccgctgagctccagtgcctgaccgtagcgggagggcaggacaacgtaatgggggtgaagtactgctttaggaaaaatgaccatgtcgtgattgcaatgccctatctcgaacacgagtcctttctggatatattaaactccctgtctttccaggaagttcgcgaatatatgctgaacctgtttaaggcattgaagaggattcaccagttcggaatcgttcacagggatgtgaagccaagcaacttcctgtacaatagaaggttaaaaaagtatgctttagtggatttcggactagcccagggaactcacgatacaaaaatcgagctgttgaagtttgtgcagagtgaggcgcagcaggaacggtgttcccagaacaagtctcacattattaccggaaataagatccctcttagtggacccgtccccaaggagcttgaccagcaaagcaccacaaaggcgagtgtcaagcgcccctacacaaatgcccagatacagataaagcagggcaaagacggaaaagaaggaagcgtgggactgtctgtgcaaagaagtgtttttggagagcgtaatttcaatatccatagttccatcagccatgagtcgccggccgtgaagcttatgaagcagagtaagaccgtggacgtactgtcacggaaactggccacaaaaaaaaaggcgataagcacaaaggtgatgaatagcgccgtgatgcgaaagaccgcaagctcatgtcctgccagcctcacgtgcgactgctatgccaccgacaaggtgtgctcaatttgtctatccaggcgtcagcaggtggcccctcgcgctgggacgcccgggttcagggccccggaggtgttaaccaagtgccccaatcagacgaccgccatcgacatgtggtccgcgggagtaattttccttagtttgctcagcggcaggtaccctttctacaaggcaagcgacgacttaaccgccctcgcccagattatgaccatcagggggtctagagagactatacaggccgcgaaaacctttggtaagtcaatcctgtgttctaaggaggtgccagcccaagacttgcgaaagctgtgcgaacgtttaaggggcatggactcaagcaccccaaagcttacgtccgacatccaaggacacgcgtcgcatcagccggccattagtgaaaaaaccgatcacaaagcctcttgcctcgtgcagacaccccccggacagtactctgggaactcatttaagaagggcgactctaactcttgtgagcattgttttgatgagtacaacaccaatctggaggggtggaacgaggtgcctgacgaggcttacgacctactggataaactgttggacctgaacccagcctctagaattacagccgaagaagcactcctccaccccttctttaaggatatgtctttgtag

SEQ ID NO: 339006 - DNA, 1725 bp, Artificial Sequence
  derived and/or modified sequence
atggaggccagcctgggcatccagatggacgagcccatggccttctctcctcaacgggatcggtttcaggctgaaggctccttaaaaaagaacgagcagaacttcaaattagctggcgtcaagaaagacatcgagaagctgtatgaggccgttcctcagctgtccaatgtattcaaaatcgaggacaagatcggcgaaggaaccttctcttccgtctacctagcaaccgcccagctgcaagtggggcccgaagaaaagatcgccctaaagcatctgattcccacttcacatccgattcggatcgcagctgaattacagtgtctgaccgtggcaggcggacaggacaacgtcatgggtgtcaaatactgcttccgcaagaacgatcacgtagtgatcgctatgccttacctggaacatgagtctttcctcgacatacttaattccttgagctttcaagaggtgagagagtacatgctgaacctgttcaaagccctgaaacgcattcatcaatttggcatcgtccatcgcgatgtgaagcctagcaatttcttatataacagacggctcaagaagtatgcattggtggattttggcctcgcccaagggactcacgacacgaaaatagaactgctgaagtttgtgcagagcgaggcccaacaagaacgctgcagtcagaataaatcccacatcattaccgggaacaagattcctctcagcggccccgttcccaaggagctggaccagcagagtaccaccaaggcctctgtgaaaaggccttacaccaatgcccagatccagatcaagcagggcaaggacgggaaggaaggctccgtgggcctctccgtccagaggtcggttttcggcgagcgcaactttaatatacactcatctatctctcatgaaagccctgccgtgaaactgatgaagcagagcaagacagtggacgtcctctccaggaaactagccaccaagaaaaaggctatcagtacgaaagtcatgaattccgctgtgatgcgcaagaccgcctcgtcttgcccagctagtcttacctgtgactgttatgccacagacaaggtgtgctcaatttgcctgtctaggcggcagcaggtggccccccgggccgggaccccgggcttccgcgccccagaagtgctcacgaaatgccccaatcagacaacggccatagacatgtggtcagccggggtcatcttcctgagcctcctgtccggacggtaccccttttataaagcatccgacgatctgacagcattagcacaaattatgacaattagaggctccagggaaactattcaagccgccaagacattcgggaaaagtattctgtgctccaaggaggtccccgcacaggatctacgcaagctgtgcgaaaggcttcggggtatggactctagcaccccaaaattgactagcgatatacaggggcacgcgtcacaccagcctgccatttccgaaaagaccgatcataaagcaagctgccttgtgcagacacccccggggcaatactcaggcaattcatttaagaaaggagactccaacagctgcgaacactgctttgatgaatacaacactaacttggaaggctggaatgaagtccctgacgaagcctacgatttgttggataaattgctcgatctaaatcccgcatcaagaattaccgccgaggaggctctcctccaccccttcttcaaggatatgagcctatag

SEQ ID NO: 339007 - DNA, 1725 bp, Artificial Sequence
  derived and/or modified sequence
atggaagcgagcttggggatacaaatggacgaaccgatggctttttctccacagagggaccgctttcaggccgaggggagcctcaagaagaatgagcagaattttaagcttgccggagtcaaaaaggatatcgaaaagctctacgaggcagtccctcaactgtctaacgtctttaaaattgaggacaaaatcggggagggaacattttcttctgtctacctggcgacagcacaactgcaagtgggaccagaagagaaaattgccctgaaacatctcataccaacctcacacccaattagaattgccgcagaactgcagtgcctcacggtcgctggaggccaggataacgttatgggggtgaagtattgctttcgtaaaaacgatcatgtagtcattgccatgccctatctcgagcatgagagcttcttagatatcctcaactcccttagctttcaggaggtgcgcgagtatatgctcaatttgtttaaggccctaaagagaatccatcagttcggcattgtccatcgcgatgtcaaaccctccaactttctttacaatagacgacttaaaaaatatgccttggtggacttcggcttggctcagggcacccacgacaccaaaattgaattgcttaagttcgtgcaaagtgaggcacagcaggaaagatgctctcaaaataagagccacatcatcactggaaataagatacctctctccggccctgtacctaaagagttggaccaacagtccaccaccaaagccagcgtgaagaggccatacacaaacgcccagattcaaataaagcagggtaaagatggaaaggaaggctccgtgggattgagcgttcagcgttctgtgttcggtgagcggaactttaacattcacagttctattagccacgaatctcccgcagtgaagttgatgaaacagtccaagactgtggacgtgctgtctcgtaagcttgcgaccaaaaaaaaggccatctcaacaaaggtgatgaactctgccgtgatgcggaagacggcctcatcttgtccggcttccctcacatgcgactgctatgccacagacaaggtatgtagcatttgtctatccagacgtcaacaggtggccccaagagccggaacaccaggctttagagcccctgaggttctaaccaagtgtcccaaccagactaccgctatcgatatgtggtctgctggtgtgatttttctaagtctgcttagcgggagatatcctttctacaaagcctctgacgatctgaccgctctagcacagattatgacaatccgaggctccagagagactattcaggctgccaaaacgtttgggaaatccatcctgtgttccaaagaggttcccgctcaggacctgcgcaagctctgtgaacgcctacggggtatggatagttccactcccaagctcacttcagacatacaaggccatgcttctcatcagcccgcaatttccgaaaagacggaccacaaggcctcctgtctggtgcagacgcctcctgggcagtattcaggcaactcgtttaagaaaggtgattccaattcctgcgagcattgtttcgacgaatataataccaacttagaaggctggaacgaggtccccgatgaagcatacgacttgcttgacaagctgctggacctgaatcccgcaagccgcatcaccgctgaagaagccctgcttcatccgttcttcaaggatatgagcctctag

SEQ ID NO: 339008 - DNA, 1641 bp, Artificial Sequence
  derived and/or modified sequence
atggaggcctcgctgggtattcaaatggacgagccaatggcattttctccccaaagagacaggttccaggctgagggttctttaaaaaagaacgagcaaaatttcaaactggctggcaccttcagcagtgtctacttagcaacagcacagttgcaagtgggcccagaagagaagattgcgcttaagcaccttattcctacctctcacccaatccggatagccgcagaattgcagtgcttgactgtcgcaggcggacaggacaatgtgatgggtgtcaagtactgtttccgtaagaatgatcatgtggtcatagctatgccatatctggaacacgagagtttcttggacattctcaactcgctgtctttccaggaagtgcgagagtatatgcttaatctgtttaaagctctgaaaagaattcaccaattcggaatcgttcaccgggacgtgaagccctcaaatttcctgtataatcgcaggctgaaaaaatacgccctggttgactttggcctggctcagggcacacacgacactaagatcgaattactcaagtttgtccagtccgaagcgcaacaggaacgctgtagtcagaataaatcccatatcataacagggaataagattcccctgtctggaccagtgcccaaggagttggatcagcagtccaccaccaaagccagcgtgaaacgaccctacactaatgcacagatccagatcaagcagggtaaggatggaaaagaaggcagcgtgggactgagcgtgcagaggagcgttttcggagaaaggaactttaacattcactcctctatatcacacgagagccccgctgtgaaactcatgaagcaaagcaagactgtcgatgtcctgtctaggaagctggcaaccaaaaaaaaagcgatctccactaaggtcatgaatagcgccgtaatgaggaaaacagcctcgtcctgcccagcttcacttacctgcgactgttatgcgaccgataaggtttgctccatttgcctctcgagacgtcaacaggtggcccctagggctggtaccccgggttttcgggctccagaagttctcaccaaatgtcccaaccagaccaccgcaatagatatgtggtctgcgggtgtcattttcctttccctgctctccggcaggtaccccttctacaaagccagtgatgacctgacggctcttgcccagatcatgactatcagagggagccgcgagaccatacaagctgctaagacctttggcaaatctattctgtgttccaaggaggtacccgcacaggatttgcggaaactgtgcgagcgccttcggggaatggattcttcaactcctaaactgacctcagacattcagggccatgcaagtcatcagcccgctatctctgaaaaaaccgaccacaaagcgagctgcctagttcagacacccccaggccagtactctggcaactcattcaagaagggcgattccaactcctgcgagcactgcttcgatgagtacaatacaaacttagagggttggaatgaggttccggatgaagcatacgaccttctcgataaactcctcgacctcaatcccgcatctcgaattaccgctgaggaggccctgttacacccattttttaaagacatgtccctgtag

SEQ ID NO: 339009 - DNA, 1725 bp, Artificial Sequence
  derived and/or modified sequence
atggaggcttctctgggcattcagatggacgagccaatggccttctctccgcagagagacagattccaggccgaagggtccttaaagaaaaacgagcagaatttcaaacttgcaggggtcaagaaagatatcgagaaactgtacgaagccgtgccccaattatccaacgtttttaagatcgaggataagataggagagggtacattttccagcgtgtatctggccaccgctcagctgcaggtcggccctgaagagaaaatcgccttgaagcatctaatccctacaagccacccaataagaattgcagcagaattacagtgccttacggtggccggtggacaagacaacgtgatgggagtgaaatattgtttccgcaaaaacgaccacgttgtcatcgcaatgccatatttggaacacgagtctttcttggacatcttgaacagcctgtcatttcaggaagtgagggagtatatgctgaacctttttaaagcactgaagcgtatccaccagttcggaattgtacatcgagacgtgaagccctccaattttctgtacaatagaaggctgaagaaatacgccctcgtggatttcgggctcgcacagggcacacatgatacaaaaattgaattgctgaaatttgttcagagcgaagcacagcaagaaagatgtagccagaacaagagccatataatcacaggaaacaaaatcccacttagcggcccagtgccaaaggagttagatcagcagagcactaccaaggcctctgtcaaaagaccgtacaccaacgctcaaatacagatcaagcagggcaaggacggaaaagaaggtagcgtaggtctgagtgtgcaacgcagcgtgttcggtgaaaggaatttcaacatacactccagtatatctcatgagtcacctgcagtgaaattaatgaagcaaagcaagaccgtcgacgttttgagtcggaaacttgccaccaaaaagaaagctatatcaacaaaagtgatgaacagcgctgtcatgagaaaaacggcatcatcttgtcccgcatcactcacctgcgattgttatgcaaccgataaggtctgctcaatttgtctctctaggcgccagcaggtggctccacgcgctggaacgccaggcttcagggccccagaggtactgactaaatgccctaaccagactacggctattgatatgtggtctgcaggtgtgatttttttgtctctcctttcaggccgttacccattttacaaggcctccgatgaccttaccgccctggctcagatcatgacaatccgtggctcacgcgagaccatccaggccgctaagacctttggaaagtccatcttgtgcagcaaagaggtgcccgctcaggatctgcgcaagttatgcgaacgtctacggggaatggactctagcacccccaagctcacctccgatattcaggggcatgcatcccatcagccagcaatctcagaaaagaccgaccacaaggcctcttgcctcgtacagaccccacctgggcagtatagcggcaattcattcaaaaagggagatagcaactcctgcgaacactgcttcgacgagtacaacaccaacctcgagggatggaatgaagttcctgatgaggcctacgatctcctagataaattgctcgatttgaatcccgctagcaggatcactgcagaggaggcactattgcaccctttctttaaagatatgagcttgtag

SEQ ID NO: 339010 - DNA, 3173 bp, Artificial Sequence
  derived and/or modified sequence
ttggagacggcgacccaggcatctggggagccacagaagtcgtactcccttaaaccctgctttgctccccctgtggatgtaaccccttagctggcattttgcatctcaattggcttgtgatggaggcgtctttggggattcagatggatgagccaatggctttttctccccagcgtgaccggtttcaggctgaaggctctttaaaaaaaaacgagcagaattttaaacttgcaggtgttaaaaaagatattgagaagctttatgaagctgtaccacagcttagtaatgtgtttaagattgaggacaaaattggagaaggcactttcagctctgtttatttggccacagcacagttacaagtaggacctgaagagaaaattgctctaaaacacttgattccaacaagtcatcctataagaattgcagctgaacttcagtgcctaacagtggctggggggcaagataatgtcatgggagttaaatactgctttaggaagaatgatcatgtagttattgctatgccatatctggagcatgagtcgtttttggacattctgaattctctttcctttcaagaagtacgggaatatatgcttaatctgttcaaagctttgaaacgcattcatcagtttggtattgttcaccgtgatgttaagcccagcaattttttatataataggcgcctgaaaaagtatgccttggtagactttggtttggcccaaggaacccatgatacgaaaatagagcttcttaaatttgtccagtctgaagctcagcaggaaaggtgttcacaaaacaaatcccacataatcacaggaaacaagattccactgagtggcccagtacctaaggagctggatcagcagtccaccacaaaagcttctgttaaaagaccctacacaaatgcacaaattcagattaaacaaggaaaagacggaaaggagggatctgtaggcctttctgtccagcgctctgtttttggagaaagaaatttcaatatacacagctccatttcacatgagagccctgcagtgaaactcatgaagcagtcaaagactgtggatgtactgtctagaaagttagcaacaaaaaagaaggctatttctacaaaagttatgaatagtgctgtgatgaggaaaactgccagttcttgcccagctagcctgacctgtgactgctatgcaacagataaagtttgtagtatttgcctttcaaggcgtcagcaggttgcccctagggcaggtacaccaggattcagagcaccagaggtcttgacaaagtgccccaatcaaactacagcaattgacatgtggtctgcaggtgtcatatttctttctttgcttagtggacgatatccattttataaagcaagtgatgatttaactgctttggcccaaattatgacaattaggggatccagagaaactatccaagctgctaaaacttttgggaaatcaatattatgtagcaaagaagttccagcacaagacttgagaaaactctgtgagagactcaggggtatggattctagcactcccaagttaacaagtgatatacaagggcatgcttctcatcaaccagctatttcagagaagactgaccataaagcttcttgcctcgttcaaacacctccaggacaatactcagggaattcatttaaaaagggggatagtaatagctgtgagcattgttttgatgagtataataccaatttagaaggctggaatgaggtacctgatgaagcttatgacctgcttgataaacttctagatctaaatccagcttcaagaataacagcagaagaagctttgttgcatccattttttaaagatatgagcttgtgataatggatcttcatttaatgtttactgttatgaggtagaataaaaaagaatactttgtaatagccacaagttcttgtttagagaccagagcaggattaataatttattttaacattttagtgtttggtggcacattctaaaatatagattaagaatacttaaaatgcctgggatagttcttgggactaacaacatgatcttctttgagttaaacctacctaagtagattttaggtgggttcctattaggtcagatttttagcttccctaattacctttcactgacatatacagaaaaaggagcagttttagttttaattaattaaaattaacagatgtgatgaggattaaatgaatcaaaagacttaatttgtagattcttttagagttatgagctaggtatagtttggggaaactcaacctggtgctggtgctcttaacaattttgtaaataaagaagataatttccttttctagaggtacatattaggccttttatgaacactaaaacaatgaggaaatgttggtcatggggcaaagtatcacttaaaattgaattcatccatttttaaaaaacacttcatgaaagcattctggtgtgaattgccatttttttcttactggcttctcaattttcttccttctctgcccctacctaaaacattctcctcggaaattacatggtgctgaccacaaagtttctggatgttttattaaatattgtacgtgtttacagttgggaatttaaaataatacatacactggttgataaagggaagctgcaggaccaaggtgaagattgatagtccaaatgcttttcttttttgagttgtatattttttcacaccatcttagatataattaggtagctgctgaaaggaaaagtgaatacagaattgacggtattattggagatttttcctctgcgtagagccatccagatctctgtatcctgttttgactaagtcttaggtgggttgggaagacagataatgaagtaggcaaagagaaaaggacccaagatagaggtttatattcagaaatggtatatatcaatgacagcatatcaaacttcctatgggaaaaagtctggtgggtggtcagctgacagatttcccatttagtagtcatagaatacagaaatagtttagggacatgtattcattttgttattttgagcattgataggtcagtatatctacctaatctgtttggtaagtataggatatataaaccattaccattgatctgtcttatgccataatcttaaaaaaaatttgaatgctcttgaatttgtatattcaataaagttatccttttatatttttta

SEQ ID NO: 339011 - DNA, 3069 bp, Artificial Sequence
  derived and/or modified sequence
aagtgttgcgcaggcgcatccgatcgactcggtaggtggggatctcttggagacggcgacccaggcatctggggagccacagaagtcgtactcccttaaaccctgctttgctccccctgtggatgtaaccccttagctggcattttgcatctcaattggcttgtgatggaggcgtctttggggattcagatggatgagccaatggctttttctccccagcgtgaccggtttcaggctgaaggctctttaaaaaaaaacgagcagaattttaaacttgcaggtgttaaaaaagatattgagaagctttatgaagctgtaccacagcttagtaatgtgtttaagattgaggacaaaattggagaaggcactttcagctctgtttatttggccacagcacagttacaagtaggacctgaagagaaaattgctctaaaacacttgattccaacaagtcatcctataagaattgcagctgaacttcagtgcctaacagtggctggggggcaagataatgtcatgggagttaaatactgctttaggaagaatgatcatgtagttattgctatgccatatctggagcatgagtcgtttttggacattctgaattctctttcctttcaagaagtacgggaatatatgcttaatctgttcaaagctttgaaacgcattcatcagtttggtattgttcaccgtgatgttaagcccagcaattttttatataataggcgcctgaaaaagtatgccttggtagactttggtttggcccaaggaacccatgatacgaaaatagagcttcttaaatttgtccagtctgaagctcagcaggaaaggtgttcacaaaacaaatcccacataatcacaggaaacaagattccactgagtggcccagtacctaaggagctggatcagcagtccaccacaaaagcttctgttaaaagaccctacacaaatgcacaaattcagattaaacaaggaaaagacggaaaggagggatctgtaggcctttctgtccagcgctctgtttttggagaaagaaatttcaatatacacagctccatttcacatgagagccctgcagtgaaactcatgaagcagtcaaagactgtggatgtactgtctagaaagttagcaacaaaaaagaaggctatttctacaaaagttatgaatagtgctgtgatgaggaaaactgccagttcttgcccagctagcctgacctgtgactgctatgcaacagataaagtttgtagtatttgcctttcaaggcgtcagcaggttgcccctagggcaggtacaccaggattcagagcaccagaggtcttgacaaagtgccccaatcaaactacagggaaatcaatattatgtagcaaagaagttccagcacaagacttgagaaaactctgtgagagactcaggggtatggattctagcactcccaagttaacaagtgatatacaagggcatgcttctcatcaaccagctatttcagagaagactgaccataaagcttcttgcctcgttcaaacacctccaggacaatactcagggaattcatttaaaaagggggatagtaatagctgtgagcattgttttgatgagtataataccaatttagaaggctggaatgaggtacctgatgaagcttatgacctgcttgataaacttctagatctaaatccagcttcaagaataacagcagaagaagctttgttgcatccattttttaaagatatgagcttgtgataatggatcttcatttaatgtttactgttatgaggtagaataaaaaagaatactttgtaatagccacaagttcttgtttagagaccagagcaggattaataatttattttaacattttagtgtttggtggcacattctaaaatatagattaagaatacttaaaatgcctgggatagttcttgggactaacaacatgatcttctttgagttaaacctacctaagtagattttaggtgggttcctattaggtcagatttttagcttccctaattacctttcactgacatatacagaaaaaggagcagttttagttttaattaattaaaattaacagatgtgatgaggattaaatgaatcaaaagacttaatttgtagattcttttagagttatgagctaggtatagtttggggaaactcaacctggtgctggtgctcttaacaattttgtaaataaagaagataatttccttttctagaggtacatattaggccttttatgaacactaaaacaatgaggaaatgttggtcatggggcaaagtatcacttaaaattgaattcatccatttttaaaaaacacttcatgaaagcattctggtgtgaattgccatttttttcttactggcttctcaattttcttccttctctgcccctacctaaaacattctcctcggaaattacatggtgctgaccacaaagtttctggatgttttattaaatattgtacgtgtttacagttgggaatttaaaataatacatacactggttgataaagggaagctgcaggaccaaggtgaagattgatagtccaaatgcttttcttttttgagttgtatattttttcacaccatcttagatataattaggtagctgctgaaaggaaaagtgaatacagaattgacggtattattggagatttttcctctgcgtagagccatccagatctctgtatcctgttttgactaagtcttaggtgggttgggaagacagataatgaagtaggcaaagagaaaaggacccaagatagaggtttatattcagaaatggtatatatcaatgacagcatatcaaacttcctatgggaaaaagtctggtgggtggtcagctgacagatttcccatttagtagtcatagaatacagaaatagtttagggacatgtattcattttgttattttgagcattgataggtcagtatatctacctaatctgtttggtaagtataggatatataaaccattaccattgatctgtcttatgccataatcttaaaaaaaatttgaatgctcttgaatttgtatattcaataaagttatccttttatatttttta

SEQ ID NO: 339012 - DNA, 3313 bp, Artificial Sequence
  derived and/or modified sequence
atctggttcggtctctggcccgagggaagccggtccttcccggctgagctcgcggccagcgctggccggcggattcccattcattcacccttctcctcctccgcccagtactcgtggccagggtcgtatcagttctccgtcaacttgcttggggccttggacgagcctcctggcgcttcctgtcagtggcgaaaagctgctttgctccccctgtggatgtaaccccttagctggcattttgcatctcaattggcttgtgatggaggcgtctttggggattcagatggatgagccaatggctttttctccccagcgtgaccggtttcaggctgaaggctctttaaaaaaaaacgagcagaattttaaacttgcaggtgttaaaaaagatattgagaagctttatgaagctgtaccacagcttagtaatgtgtttaagattgaggacaaaattggagaaggcactttcagctctgtttatttggccacagcacagttacaagtaggacctgaagagaaaattgctctaaaacacttgattccaacaagtcatcctataagaattgcagctgaacttcagtgcctaacagtggctggggggcaagataatgtcatgggagttaaatactgctttaggaagaatgatcatgtagttattgctatgccatatctggagcatgagtcgtttttggacattctgaattctctttcctttcaagaagtacgggaatatatgcttaatctgttcaaagctttgaaacgcattcatcagtttggtattgttcaccgtgatgttaagcccagcaattttttatataataggcgcctgaaaaagtatgccttggtagactttggtttggcccaaggaacccatgatacgaaaatagagcttcttaaatttgtccagtctgaagctcagcaggaaaggtgttcacaaaacaaatcccacataatcacaggaaacaagattccactgagtggcccagtacctaaggagctggatcagcagtccaccacaaaagcttctgttaaaagaccctacacaaatgcacaaattcagattaaacaaggaaaagacggaaaggagggatctgtaggcctttctgtccagcgctctgtttttggagaaagaaatttcaatatacacagctccatttcacatgagagccctgcagtgaaactcatgaagcagtcaaagactgtggatgtactgtctagaaagttagcaacaaaaaagaaggctatttctacaaaagttatgaatagtgctgtgatgaggaaaactgccagttcttgcccagctagcctgacctgtgactgctatgcaacagataaagtttgtagtatttgcctttcaaggcgtcagcaggttgcccctagggcaggtacaccaggattcagagcaccagaggtcttgacaaagtgccccaatcaaactacagcaattgacatgtggtctgcaggtgtcatatttctttctttgcttagtggacgatatccattttataaagcaagtgatgatttaactgctttggcccaaattatgacaattaggggatccagagaaactatccaagctgctaaaacttttgggaaatcaatattatgtagcaaagaagttccagcacaagacttgagaaaactctgtgagagactcaggggtatggattctagcactcccaagttaacaagtgatatacaagggcatgcttctcatcaaccagctatttcagagaagactgaccataaagcttcttgcctcgttcaaacacctccaggacaatactcagggaattcatttaaaaagggggatagtaatagctgtgagcattgttttgatgagtataataccaatttagaaggctggaatgaggtacctgatgaagcttatgacctgcttgataaacttctagatctaaatccagcttcaagaataacagcagaagaagctttgttgcatccattttttaaagatatgagcttgtgataatggatcttcatttaatgtttactgttatgaggtagaataaaaaagaatactttgtaatagccacaagttcttgtttagagaccagagcaggattaataatttattttaacattttagtgtttggtggcacattctaaaatatagattaagaatacttaaaatgcctgggatagttcttgggactaacaacatgatcttctttgagttaaacctacctaagtagattttaggtgggttcctattaggtcagatttttagcttccctaattacctttcactgacatatacagaaaaaggagcagttttagttttaattaattaaaattaacagatgtgatgaggattaaatgaatcaaaagacttaatttgtagattcttttagagttatgagctaggtatagtttggggaaactcaacctggtgctggtgctcttaacaattttgtaaataaagaagataatttccttttctagaggtacatattaggccttttatgaacactaaaacaatgaggaaatgttggtcatggggcaaagtatcacttaaaattgaattcatccatttttaaaaaacacttcatgaaagcattctggtgtgaattgccatttttttcttactggcttctcaattttcttccttctctgcccctacctaaaacattctcctcggaaattacatggtgctgaccacaaagtttctggatgttttattaaatattgtacgtgtttacagttgggaatttaaaataatacatacactggttgataaagggaagctgcaggaccaaggtgaagattgatagtccaaatgcttttcttttttgagttgtatattttttcacaccatcttagatataattaggtagctgctgaaaggaaaagtgaatacagaattgacggtattattggagatttttcctctgcgtagagccatccagatctctgtatcctgttttgactaagtcttaggtgggttgggaagacagataatgaagtaggcaaagagaaaaggacccaagatagaggtttatattcagaaatggtatatatcaatgacagcatatcaaacttcctatgggaaaaagtctggtgggtggtcagctgacagatttcccatttagtagtcatagaatacagaaatagtttagggacatgtattcattttgttattttgagcattgataggtcagtatatctacctaatctgtttggtaagtataggatatataaaccattaccattgatctgtcttatgccataatcttaaaaaaaatttgaatgctcttgaatttgtatattcaataaagttatccttttatatttttta

SEQ ID NO: 339013 - DNA, 1866 bp, Artificial Sequence
  derived and/or modified sequence
gttgcgcaggcgcatccgatcgactcggtaggtggggatctcttggagacggcgacccaggcatctggggagccacagaagtcgtactcccttaaaccctgctttgctccccctgtggatgtaaccccttagctggcattttgcatctcaattggcttgtgatggaggcgtctttggggattcagatggatgagccaatggctttttctccccagcgtgaccggtttcaggctgaaggctctttaaaaaaaaacgagcagaattttaaacttgcaggcactttcagctctgtttatttggccacagcacagttacaagtaggacctgaagagaaaattgctctaaaacacttgattccaacaagtcatcctataagaattgcagctgaacttcagtgcctaacagtggctggggggcaagataatgtcatgggagttaaatactgctttaggaagaatgatcatgtagttattgctatgccatatctggagcatgagtcgtttttggacattctgaattctctttcctttcaagaagtacgggaatatatgcttaatctgttcaaagctttgaaacgcattcatcagtttggtattgttcaccgtgatgttaagcccagcaattttttatataataggcgcctgaaaaagtatgccttggtagactttggtttggcccaaggaacccatgatacgaaaatagagcttcttaaatttgtccagtctgaagctcagcaggaaaggtgttcacaaaacaaatcccacataatcacaggaaacaagattccactgagtggcccagtacctaaggagctggatcagcagtccaccacaaaagcttctgttaaaagaccctacacaaatgcacaaattcagattaaacaaggaaaagacggaaaggagggatctgtaggcctttctgtccagcgctctgtttttggagaaagaaatttcaatatacacagctccatttcacatgagagccctgcagtgaaactcatgaagcagtcaaagactgtggatgtactgtctagaaagttagcaacaaaaaagaaggctatttctacaaaagttatgaatagtgctgtgatgaggaaaactgccagttcttgcccagctagcctgacctgtgactgctatgcaacagataaagtttgtagtatttgcctttcaaggcgtcagcaggttgcccctagggcaggtacaccaggattcagagcaccagaggtcttgacaaagtgccccaatcaaactacagcaattgacatgtggtctgcaggtgtcatatttctttctttgcttagtggacgatatccattttataaagcaagtgatgatttaactgctttggcccaaattatgacaattaggggatccagagaaactatccaagctgctaaaacttttgggaaatcaatattatgtagcaaagaagttccagcacaagacttgagaaaactctgtgagagactcaggggtatggattctagcactcccaagttaacaagtgatatacaagggcatgcttctcatcaaccagctatttcagagaagactgaccataaagcttcttgcctcgttcaaacacctccaggacaatactcagggaattcatttaaaaagggggatagtaatagctgtgagcattgttttgatgagtataataccaatttagaaggctggaatgaggtacctgatgaagcttatgacctgcttgataaacttctagatctaaatccagcttcaagaataacagcagaagaagctttgttgcatccattttttaaagatatgagcttgtgataatggatcttcatttaatgtttactgttatgaggtagaataaaaaagaatactttgtaatagc

SEQ ID NO: 339014 - DNA, 1725 bp, Artificial Sequence
  derived and/or modified sequence
atggaggccagcctgggcatccagatggacgagcccatggccttcagcccccagagagacagattccaggccgagggcagcctgaagaagaacgagcagaacttcaagctggccggcgtgaagaaggacatcgagaagctgtacgaggccgtgccccagctgagcaacgtgttcaagatcgaggacaagatcggcgagggcaccttcagcagcgtgtacctggccaccgcccagctgcaggtgggccccgaggagaagatcgccctgaagcacctgatccccaccagccaccccatcagaatcgccgccgagctgcagtgcctgaccgtggccggcggccaggacaacgtgatgggcgtgaagtactgcttcagaaagaacgaccacgtggtgatcgccatgccctacctggagcacgagagcttcctggacatcctgaacagcctgagcttccaggaggtgagagagtacatgctgaacctgttcaaggccctgaagagaatccaccagttcggcatcgtgcacagagacgtgaagcccagcaacttcctgtacaacagaagactgaagaagtacgccctggtggacttcggcctggcccagggcacccacgacaccaagatcgagctgctgaagttcgtgcagagcgaggcccagcaggagagatgcagccagaacaagagccacatcatcaccggcaacaagatccccctgagcggccccgtgcccaaggagctggaccagcagagcaccaccaaggccagcgtgaagagaccctacaccaacgcccagatccagatcaagcagggcaaggacggcaaggagggcagcgtgggcctgagcgtgcagagaagcgtgttcggcgagagaaacttcaacatccacagcagcatcagccacgagagccccgccgtgaagctgatgaagcagagcaagaccgtggacgtgctgagcagaaagctggccaccaagaagaaggccatcagcaccaaggtgatgaacagcgccgtgatgagaaagaccgccagcagctgccccgccagcctgacctgcgactgctacgccaccgacaaggtgtgcagcatctgcctgagcagaagacagcaggtggcccccagagccggcacccccggcttcagagcccccgaggtgctgaccaagtgccccaaccagaccaccgccatcgacatgtggagcgccggcgtgatcttcctgagcctgctgagcggcagataccccttctacaaggccagcgacgacctgaccgccctggcccagatcatgaccatcagaggcagcagagagaccatccaggccgccaagaccttcggcaagagcatcctgtgcagcaaggaggtgcccgcccaggacctgagaaagctgtgcgagagactgagaggcatggacagcagcacccccaagctgaccagcgacatccagggccacgccagccaccagcccgccatcagcgagaagaccgaccacaaggccagctgcctggtgcagaccccccccggccagtacagcggcaacagcttcaagaagggcgacagcaacagctgcgagcactgcttcgacgagtacaacaccaacctggagggctggaacgaggtgcccgacgaggcctacgacctgctggacaagctgctggacctgaaccccgccagcagaatcaccgccgaggaggccctgctgcaccccttcttcaaggacatgagcctgtag

SEQ ID NO: 339015 - DNA, 1641 bp, Artificial Sequence
  derived and/or modified sequence
atggaggccagcctgggcatccagatggacgagcccatggccttcagcccccagagagacagattccaggccgagggcagcctgaagaagaacgagcagaacttcaagctggccggcaccttcagcagcgtgtacctggccaccgcccagctgcaggtgggccccgaggagaagatcgccctgaagcacctgatccccaccagccaccccatcagaatcgccgccgagctgcagtgcctgaccgtggccggcggccaggacaacgtgatgggcgtgaagtactgcttcagaaagaacgaccacgtggtgatcgccatgccctacctggagcacgagagcttcctggacatcctgaacagcctgagcttccaggaggtgagagagtacatgctgaacctgttcaaggccctgaagagaatccaccagttcggcatcgtgcacagagacgtgaagcccagcaacttcctgtacaacagaagactgaagaagtacgccctggtggacttcggcctggcccagggcacccacgacaccaagatcgagctgctgaagttcgtgcagagcgaggcccagcaggagagatgcagccagaacaagagccacatcatcaccggcaacaagatccccctgagcggccccgtgcccaaggagctggaccagcagagcaccaccaaggccagcgtgaagagaccctacaccaacgcccagatccagatcaagcagggcaaggacggcaaggagggcagcgtgggcctgagcgtgcagagaagcgtgttcggcgagagaaacttcaacatccacagcagcatcagccacgagagccccgccgtgaagctgatgaagcagagcaagaccgtggacgtgctgagcagaaagctggccaccaagaagaaggccatcagcaccaaggtgatgaacagcgccgtgatgagaaagaccgccagcagctgccccgccagcctgacctgcgactgctacgccaccgacaaggtgtgcagcatctgcctgagcagaagacagcaggtggcccccagagccggcacccccggcttcagagcccccgaggtgctgaccaagtgccccaaccagaccaccgccatcgacatgtggagcgccggcgtgatcttcctgagcctgctgagcggcagataccccttctacaaggccagcgacgacctgaccgccctggcccagatcatgaccatcagaggcagcagagagaccatccaggccgccaagaccttcggcaagagcatcctgtgcagcaaggaggtgcccgcccaggacctgagaaagctgtgcgagagactgagaggcatggacagcagcacccccaagctgaccagcgacatccagggccacgccagccaccagcccgccatcagcgagaagaccgaccacaaggccagctgcctggtgcagaccccccccggccagtacagcggcaacagcttcaagaagggcgacagcaacagctgcgagcactgcttcgacgagtacaacaccaacctggagggctggaacgaggtgcccgacgaggcctacgacctgctggacaagctgctggacctgaaccccgccagcagaatcaccgccgaggaggccctgctgcaccccttcttcaaggacatgagcctgtag

SEQ ID NO: 339016 - DNA, 360 bp, Artificial Sequence
  derived and/or modified sequence
atgaggaaaaccgcgtcttcttgcccagctagcctgacctgcgactgctatgctacagacaaggtctgtagtatctgcctgagccggcgacagcaggtcgcgccccgtgctggaacacccgggttcagggccccagaagttctgaccaagtgcccaaaccagactaccggaaaatcaatcctttgttccaaggaagttcctgctcaggatctacgtaagctatgtgagagactacgggggatggatagctcaacccctaagctcacgtctgacattcaggggcatgccagtcaccagccggccatctccgagaagacggatcacaaagccagttgtttggtgcagacacccccaggctag

SEQ ID NO: 339017 - DNA, 360 bp, Artificial Sequence
  derived and/or modified sequence
atgaggaagacagccagcagctgcccagccagcctgacctgtgactgctacgccacagacaaggtgtgcagcatctgcctgagccggcggcagcaggtggcccccagggctggcaccccaggcttccgggcccctgaggtgctgaccaagtgccccaaccagaccaccgggaagagcatcctgtgcagcaaggaggtgcctgcccaggacctgaggaagctgtgtgagcggctgcggggcatggacagcagcacccccaagctgaccagtgacatccagggccacgccagccaccagcctgccatcagcgagaagacagaccacaaggccagctgcctggtgcagaccccacctggatag

SEQ ID NO: 339018 - DNA, 360 bp, Artificial Sequence
  derived and/or modified sequence
atgcggaagaccgccagcagctgccccgccagcctgacctgcgactgttatgccaccgataaggtctgctccatttgtctgagcagaagacaacaagtcgctccaagggccggaacccctggctttcgagcccccgaggtccttaccaaatgccctaatcagaccactggcaagagcatcttatgctcaaaagaagtacctgcccaggacctgagaaaactgtgcgaacggttgagaggcatggactctagcaccccaaaactgacctccgatatccaaggtcacgcaagtcaccaacccgccatcagcgagaaaactgaccacaaggctagttgtctcgtgcagacgccacctggctag

SEQ ID NO: 339019 - DNA, 360 bp, Artificial Sequence
  derived and/or modified sequence
atgcgtaagactgccagcagttgcccggcatcactgacttgcgattgctatgccaccgacaaggtgtgttccatctgcctgtctagacgacagcaggttgccccacgagcaggcacacccggatttagagctcccgaggtgttgactaagtgtcctaaccagacaaccgggaagtccattttgtgcagcaaggaagtgcctgcacaggatctgcggaagctgtgcgagagattacgaggcatggacagctctacacccaagttgaccagcgacatccagggacacgcatcgcaccaacctgctattagtgagaagaccgaccacaaagccagctgcctggtgcagaccccccctggttag

SEQ ID NO: 339020 - DNA, 360 bp, Artificial Sequence
  derived and/or modified sequence
atgagaaagaccgccagcagctgccccgccagcctgacctgcgactgctacgccaccgacaaggtgtgcagcatctgcctgagcagaagacagcaggtggcccccagagccggcacccccggcttcagagcccccgaggtgctgaccaagtgccccaaccagaccaccggcaagagcatcctgtgcagcaaggaggtgcccgcccaggacctgagaaagctgtgcgagagactgagaggcatggacagcagcacccccaagctgaccagcgacatccagggccacgccagccaccagcccgccatcagcgagaagaccgaccacaaggccagctgcctggtgcagaccccccccggctag

SEQ ID NO: 339021 - protein, 188 aa, Artificial Sequence
  derived and/or modified sequence
  misc_feature (1)..(1): Xaa can be any naturally occurring amino acid
XEIKAGKSLKPTPQSKGLTTVFSGIGQPAFQPDSPLPSVSPALSPVRSPTPPAAGFQPLLNGSLVPVPPTTPAPGVQLDVEALIPTHDEQGRPIPEWKRQVMVRKMQLKMQEEEEQRRKEEEEEARLASMPAWRRDLLRKKLEEEREQKRKEEERQKQEELRREKEQSEKLRTLGYDESKLAPWQRQI

SEQ ID NO: 339022 - DNA, 867 bp, Artificial Sequence
  derived and/or modified sequence
atggcacactcagaagaggcggccttactcccaggcaatcatgttcctaatggctgcgcagccgaccctaaagcatccagggaattaccacctcctcctcctcccccaccccccccattacccgaggcggctagtagtcctcccccagctccgccactgcccctggaatcggctggccccgggtgtggacaaaggcgatcctcatcttctacagggtcaactaagagtttcaacatgatgtctcctaccggcgataattctgagctcctcgcggagataaaagcagggaaatccctgaagcccaccccccagagcaaaggattaactacagtattttctggcatagggcagccagcgttccagcccgattctcctctcccatcggtcagtcctgctttatcacctgtgaggtctcctaccccccctgctgctggatttcagcctttgctgaatggatccctggtgccggtaccccccaccaccccagcccccggagtccaattagacgtggaagcgctcattcccacgcacgacgaacagggaagacccatcccggaatggaaaagacaggtaatggtccgcaagatgcagttaaagatgcaggaggaggaggaacaaaggagaaaagaagaggaggaagaagcaaggcttgcgagcatgccagcttggcgccgggacctactgcggaagaagttggaggaggagcgggagcagaaacggaaagaagaagagagacaaaagcaagaggagctgcgacgcgaaaaagagcaatctgagaagctgcggacacttgggtacgacgagagtaagttggcgccttggcagagacaggttattctgaaaaagggggacatcgctaaatattag

SEQ ID NO: 339023 - DNA, 567 bp, Artificial Sequence
  derived and/or modified sequence
tgagaaataaaagctggcaagtcgctgaaaccaaccccccagagcaaggggttgactactgtgttttctggaatcgggcagcctgccttccagcctgattccccgttaccctccgtttcaccagccctgagccccgtcaggtcccctacaccacccgcagctggttttcagcctttgttgaatggttccctggtaccagtgccccccacaacccccgctcctggtgtccagctggacgtcgaggctctcattccaacccacgatgagcaaggacgccctatacctgagtggaagcgccaagtgatggtgcgcaaaatgcagctgaagatgcaagaggaggaggaacagcggcgcaaggaggaggaagaggaggccagactcgcctcaatgcctgcttggagacgagacctcctgagaaagaaactggaggaggaaagggagcaaaagcggaaagaagaggagaggcagaaacaggaggaactgcggcgggagaaggaacagagcgagaaactcagaaccctcggctacgatgagagtaagcttgccccatggcagcgacagatttag

SEQ ID NO: 339024 - DNA, 867 bp, Artificial Sequence
  derived and/or modified sequence
atggcccacagcgaggaggccgccctgctgcccggcaaccacgtgcccaacggctgtgccgctgaccccaaggccagccgggagctgcccccacctcctcctcctcctcctccacccctgcctgaggccgccagcagccccccaccagccccacccctgcccctggagagcgctggccctggctgcggccagaggaggagcagcagcagcacaggcagcaccaagagcttcaacatgatgagccccactggagacaacagcgagctgctggccgagatcaaggccggcaagagcctgaagcccaccccccagagcaagggcctgaccaccgtcttctctggaattggccagcctgccttccagcctgacagccccctgcccagcgtgtccccagccctgagccctgtgcgcagccccaccccacctgctgctggcttccagcccctgctgaatggcagcctggtgcctgtgccccccaccaccccagcccctggggtgcagctggatgtggaggccctgatccccacccatgatgagcagggccggcccatccctgagtggaagaggcaggtgatggtgaggaagatgcagctgaagatgcaggaggaggaggagcagaggaggaaggaggaggaggaggaggcccggctggcctccatgcctgcctggaggcgggacctgctgaggaagaagctggaggaggagcgggagcagaagaggaaggaggaggagcggcagaagcaggaggagctgcggcgggagaaggagcagagcgagaagctgcggaccctgggctatgatgagagcaagctggccccctggcagaggcaggtgatcctgaagaagggggacatcgccaagtactag

SEQ ID NO: 339025 - DNA, 567 bp, Artificial Sequence
  derived and/or modified sequence
tgagaaatcaaggccggcaagagcctgaagcccaccccccagagcaagggcctgaccaccgtcttctctggaattggccagcctgccttccagcctgacagccccctgcccagcgtgtccccagccctgagccctgtgcgcagccccaccccacctgctgctggcttccagcccctgctgaatggcagcctggtgcctgtgccccccaccaccccagcccctggggtgcagctggatgtggaggccctgatccccacccatgatgagcagggccggcccatccctgagtggaagaggcaggtgatggtgaggaagatgcagctgaagatgcaggaggaggaggagcagaggaggaaggaggaggaggaggaggcccggctggcctccatgcctgcctggaggcgggacctgctgaggaagaagctggaggaggagcgggagcagaagaggaaggaggaggagcggcagaagcaggaggagctgcggcgggagaaggagcagagcgagaagctgcggaccctgggctatgatgagagcaagctggccccctggcagaggcagatctag

SEQ ID NO: 339026 - DNA, 867 bp, Artificial Sequence
  derived and/or modified sequence
atggcccacagcgaggaggccgccctgctgcccggcaaccacgtgccaaacggatgtgccgccgatcctaaggccagcagggagcttccaccaccaccccctcctccccccccccctcttcctgaggccgcttcaagccccccccctgctcctcctctgccgttggaatctgcaggaccaggctgcggccagaggcgtagctcttccagcacgggatctacgaaaagttttaatatgatgagtccaaccggggacaacagtgaattattagcggagataaaggctggcaaatcactcaagcctacaccccaaagcaagggactgaccacagtcttttccggaatcggtcagcccgccttccagcctgattctccgttaccgtccgtgtcacccgcactgtcacccgtgcggtctccaaccccacctgccgcaggattccaacccctgttgaacggttcacttgtgccggtgccacccacgactcctgccccaggggtgcagttagacgtcgaggccctgattccaacccatgatgaacagggccgcccaataccggagtggaaacggcaggtgatggtccggaaaatgcagttgaagatgcaggaggaagaggagcagcgcaggaaggaggaagaagaagaagctcggttggcgagcatgccagcctggcggcgcgatctactccggaagaagcttgaagaagagagagaacagaagcgcaaggaagaggagcggcagaagcaagaagaactgagacgagaaaaggaacagagtgagaaactgaggacgttgggttatgatgaatcgaaactcgcaccttggcaaagacaggtcattctgaaaaaaggcgacatcgccaagtattag

SEQ ID NO: 339027 - DNA, 567 bp, Artificial Sequence
  derived and/or modified sequence
tgagagatcaaggccggcaagagcctgaagcccaccccccagagcaaaggcctgactacagttttctcaggcatcggtcagccagctttccagcccgactcgccactgccaagtgtgtcacctgccttgagtccagtcaggagccccacgcctccagccgccgggttccagcccctgctaaacggatccttggtgcctgttcccccgactacaccggccccaggggtgcaactggacgtggaggctctgatccccacccacgatgagcaaggccggccaattcctgagtggaagcggcaggttatggtgagaaagatgcaactaaagatgcaggaggaagaagaacagcgtcgcaaggaagaggaggaagaagcaaggcttgccagcatgccggcttggcgccgcgacttgctgaggaagaaattggaggaagagagggagcagaagcggaaggaagaagagagacagaagcaagaggaattgcggcgggagaaagaacagtccgaaaagcttagaactctgggttacgacgagtctaagcttgctccctggcagcggcagatatag

SEQ ID NO: 339028 - DNA, 867 bp, Artificial Sequence
  derived and/or modified sequence
atggctcactcagaagaagcggctctgcttcctggcaaccacgtgccgaatggctgtgccgctgacccaaaggcctcacgagaactcccaccccctcccccaccccctccacccccactgcctgaggccgcatcatcgccacctcctgcaccacccctgccactagagtccgccggtcccggatgcggtcagcggagatccagctccagtacgggtagcaccaagtcgttcaacatgatgtctcccaccggcgataactccgagttgctcgccgagataaaagctgggaagtccctcaaacccaccccccagtctaagggtctgaccactgttttctccggaattggacagccagctttccagcccgattcccctcttccctccgtttctccagctctgagcccagtgagatcacccactccccctgctgctggattccagcctctacttaacgggtctctggtgccggttccaccaacaactcctgcacctggggtacagctggatgttgaagccctgattcccactcatgatgagcagggacgtcctattccagaatggaaaaggcaggtcatggtccggaagatgcaattaaagatgcaggaggaggaagaacagaggagaaaggaggaagaggaggaggcgcgacttgcctctatgcccgcttggcgacgcgaccttttgaggaaaaagttagaggaggaacgtgaacagaagcggaaagaggaggagagacaaaaacaggaggagctccgcagagagaaagagcagtctgagaaactgcgaacactgggctatgatgaaagcaaactggcgccatggcagagacaggtgattttaaagaagggggacatcgccaagtactag

SEQ ID NO: 339029 - DNA, 567 bp, Artificial Sequence
  derived and/or modified sequence
tgagagattaaggccggtaagtccctgaagccaacccctcagagtaaaggtctgactaccgtttttagtgggatcggccagcctgcttttcaacccgattcccccttgccatctgtgtcccctgccctgtccccagtgaggagcccaacaccgccagctgctgggttccagccgctcttgaatggtagtctagttcctgtgccaccgaccacacccgctcctggggtgcaactggatgtcgaggccttgattcccacacatgacgagcaggggagaccaataccagagtggaagcgccaagtcatggtccgaaagatgcaactcaaaatgcaagaggaggaggagcagaggcgcaaagaagaagaagaggaggcgaggttggcaagcatgcctgcctggaggcgcgacctcttgcgtaagaagttagaagaggaacgcgagcagaagcgaaaggaggaagagcgtcaaaagcaagaagaactaagacgggaaaaagaacagagcgaaaagctgcgtactctgggctacgatgaatctaaactggcaccgtggcaacgccagatctag

SEQ ID NO: 339030 - DNA, 867 bp, Artificial Sequence
  derived and/or modified sequence
atggcccacagcgaggaggccgccctgctgcccggcaaccacgtgcccaacggctgcgccgccgaccccaaggccagcagagagctgccccccccccccccccccccccccccccccctgcccgaggccgccagcagccccccccccgccccccccctgcccctggagagcgccggccccggctgcggccagagaagaagcagcagcagcaccggcagcaccaagagcttcaacatgatgagccccaccggcgacaacagcgagctgctggccgagatcaaggccggcaagagcctgaagcccaccccccagagcaagggcctgaccaccgtgttcagcggcatcggccagcccgccttccagcccgacagccccctgcccagcgtgagccccgccctgagccccgtgagaagccccaccccccccgccgccggcttccagcccctgctgaacggcagcctggtgcccgtgccccccaccacccccgcccccggcgtgcagctggacgtggaggccctgatccccacccacgacgagcagggcagacccatccccgagtggaagagacaggtgatggtgagaaagatgcagctgaagatgcaggaggaggaggagcagagaagaaaggaggaggaggaggaggccagactggccagcatgcccgcctggagaagagacctgctgagaaagaagctggaggaggagagagagcagaagagaaaggaggaggagagacagaagcaggaggagctgagaagagagaaggagcagagcgagaagctgagaaccctgggctacgacgagagcaagctggccccctggcagagacaggtgatcctgaagaagggcgacatcgccaagtactag

SEQ ID NO: 339031 - DNA, 567 bp, Artificial Sequence
  derived and/or modified sequence
tgagagatcaaggccggcaagagcctgaagcccaccccccagagcaagggcctgaccaccgtgttcagcggcatcggccagcccgccttccagcccgacagccccctgcccagcgtgagccccgccctgagccccgtgagaagccccaccccccccgccgccggcttccagcccctgctgaacggcagcctggtgcccgtgccccccaccacccccgcccccggcgtgcagctggacgtggaggccctgatccccacccacgacgagcagggcagacccatccccgagtggaagagacaggtgatggtgagaaagatgcagctgaagatgcaggaggaggaggagcagagaagaaaggaggaggaggaggaggccagactggccagcatgcccgcctggagaagagacctgctgagaaagaagctggaggaggagagagagcagaagagaaaggaggaggagagacagaagcaggaggagctgagaagagagaaggagcagagcgagaagctgagaaccctgggctacgacgagagcaagctggccccctggcagagacagatctag

SEQ ID NO: 339032 - DNA, 1665 bp, Artificial Sequence
  derived and/or modified sequence
atggcgcacagcgaggaggcggcgctgcttcctgggaaccatgttcctaacggctgcgccgcggaccccaaggcgtccagggagctgccaccgccgcccccaccgccgccgccgcccctgccggaggccgcgagttcgccaccgccggccccgcctctgcccctcgagagcgctggccctggctgcgggcagcgccgctcctcctcgtccaccggcagcaccaagtctttcaacatgatgtccccgacgggcgacaactcggagctactggctgagattaaggcaggcaagagcctgaagccgacgccccagagcaaggggctgaccacagtgttctcaggcatcgggcagccggccttccagcccgattcgccgctgccttctgtgtcacctgcactgtcaccagtccggagccccacaccgccagctgcggggtttcagccgctgctcaatggaagcttggttcccgtgccgcccactactcctgcgccgggagtgcagctggacgtggaggctctcatccccacgcacgatgagcagggccggcccatccccgagtggaagcgccaggtgatggtgcgcaagatgcagctgaagatgcaggaggaggaggagcagaggcggaaggaggaggaggaggaggcccggctggccagcatgcccgcctggaggcgggacctcctgcggaagaagctggaagaagagagggagcagaagcggaaagaggaggagcgacagaagcaggaggagctgcggcgggagaaggaacagtcagagaagctgcggacgctgggctacgatgagagcaagctggcgccctggcagcgacaggtcatcctgaagaagggggacatcgctaagtactagaggccgcagactcctgtccgcagcctcgcagctccgtggggccctccgccccagccccagccagccaggccctggtggaaaggctgggagccgcacagccctcccctcctgcgctggaaaccctccctgacccccaccctggccccccgtatccccagcccttggcaacactggagtgcacacgccgccacggttgcccagaaaaagtgcccaagctgctgacgcaaacaacaacaaatgctgcttatttgcatgccgacttacatatatttgcatgttcgttgactatcaaagagtgcagagctctccccagccccgtgggtggtgactttgttttcctgcggggctcagccccctccaggatgcagccccctcccccgcaccccggaaccggcgtcgctggcgcatcctgggtggaggcaggccccgagctcggggaaggggttttcccttcctctctgacccagatctgcgcgcggcctagcccgggcctcatttcttatccccgccaagggtttcctctcagtcatttgtttaccagaaacatgaaaactgcctgtctggccgggccgcacttgtggcccccgggaccccacctctggccccacctccctcaagtctgcgccccgtccccagccagacccactcgctgccgggaccctttcactgccccggtggagtgaatagaggatgaggggccctgaccctgtgtctccaactgctgcaccccatcccgaccctgtctccgccacctcgcagccccattaaagcgctctcatctgggctccggttcactca

SEQ ID NO: 339033 - DNA, 750 bp, Artificial Sequence
  derived and/or modified sequence
tgagattaaggcaggcaagagcctgaagccgacgccccagagcaaggggctgaccacagtgttctcaggcatcgggcagccggccttccagcccgattcgccgctgccttctgtgtcacctgcactgtcaccagtccggagccccacaccgccagctgcggggtttcagccgctgctcaatggaagcttggttcccgtgccgcccactactcctgcgccgggagtgcagctggacgtggaggctctcatccccacgcacgatgagcagggccggcccatccccgagtggaagcgccaggtgatggtgcgcaagatgcagctgaagatgcaggaggaggaggagcagaggcggaaggaggaggaggaggaggcccggctggccagcatgcccgcctggaggcgggacctcctgcggaagaagctggaagaagagagggagcagaagcggaaagaggaggagcgacagaagcaggaggagctgcggcgggagaaggaacagtcagagaagctgcggacgctgggctacgatgagagcaagctggcgccctggcagcgacagatttaataccgcgatctcagccaaactccggccgagaagttgagaaatgtcttcaccccctctcgacattcgttcgtgcttcttcgccttggctggagcgataggggcgagcaggggtggggccggctggtgctgctacgcagggccgtgccagcggcttaataagtgacataaaatgtctacacgcataa

SEQ ID NO: 339034 - DNA, 645 bp, Artificial Sequence
  derived and/or modified sequence
gacgggatgactccattgcatgccgccgcacaaatgggtcactcccccgtgatcgtctggttggataaagacggggcaacagccatgcacttcgctgcgagccgaggccacaccaaggtactctcttggttactactgcatgggggcgaaattagcgccgacctttgggggggcacacctctgcacgacgctgccgagaatggcgagctggagtgctgccaaatcctggtggttaacggggctgagttggatgtgcgggatcgagacgggtataccgccgccgatttgagcgacttcaatggacatagccactgcacgaggtatttgagaaccgtagagaatctgagtgtggagcaccgggtcctgtccagagatccgtccgctgaactggaagctaaacagccggactctggcatgtcctctccaaatactaccgtgagcgtccagccccttaatttcgacctgtcatctcccaccagtaccctctctaattacgattcatgttccagctctcactcctccatcaagggccagcaccctccatgcggactgagcagtgcacgtgcagccgacatccagtcttatatggatatgttaaaccccgaactgggcctgccccggggtacgataggaaaacccacatag

SEQ ID NO: 339035 - DNA, 645 bp, Artificial Sequence
  derived and/or modified sequence
gatggcatgacccccctgcacgccgccgcccagatgggccacagccctgtgattgtgtggctggacaaggatggagccacagccatgcactttgctgccagccggggccacaccaaggtgctgtcctggctgctgctgcatggaggagagatctctgctgacctgtggggcggcacccccctgcatgatgctgctgaaaatggagagctggagtgctgccagatcctggtggtgaatggagctgagctggatgtgcgggacagagatggctacacagctgctgacctgagtgacttcaacggccacagccactgcacccgctacctgaggacagtggagaacctgtctgtggagcaccgggtgctgagccgggaccccagcgctgagctggaggccaagcagccagattctggcatgagcagccccaacaccaccgtgtctgtgcagcccctgaactttgacctgagcagccccaccagcaccctgagcaactatgacagctgcagcagcagccacagcagcatcaagggccagcaccccccctgtggcctgagcagcgcccgggctgctgacatccagagctacatggacatgctgaaccctgagctgggcctgccccggggcaccatcggcaagcccacctag

SEQ ID NO: 339036 - DNA, 645 bp, Artificial Sequence
  derived and/or modified sequence
gacggcatgacccccctgcacgccgccgcccagatgggccacagccccgtaattgtgtggctcgataaagacggtgctaccgccatgcactttgccgcctccagaggccacacaaaggttctgtcttggctccttctgcatggtggtgaaatctccgcagacctctggggcggaacacccttgcacgacgcagctgagaatggcgagctggagtgctgccaaattcttgttgttaatggagcagagcttgatgtcagggaccgcgacggctacaccgcagcagatctttcagactttaacgggcactctcactgcacacgctacctgcgaacagtcgaaaaccttagtgtcgagcatcgggttctgagtcgagatcctagcgcagagctggaggccaagcaaccggattcagggatgtcatcccccaacactacagtgtccgtccagcccttgaacttcgatctttcgagtccaacatccacgctgtccaactatgacagttgttctagctctcatagctccattaaaggtcagcaccctccctgtggattgagtagcgcacgtgccgcagacatccagtcttatatggacatgctgaaccccgagcttggcttgccacggggaactatcgggaagccaacctag

SEQ ID NO: 339037 - DNA, 645 bp, Artificial Sequence
  derived and/or modified sequence
gatggcatgactccactccacgcagctgctcagatgggccactctccagtaatcgtgtggcttgataaggacggggctactgcgatgcacttcgcagcttctagaggccacactaaggtgcttagctggcttctgctgcacggtggagagatatctgcagatctttggggtggcactcccttacacgatgctgctgagaacggcgaattggaatgctgccagatactggtcgttaatggcgctgagttggacgttcgagaccgggacggatatacagccgcagatcttagcgatttcaacgggcactcacattgcacaaggtacttgagaaccgtggaaaacctttcagttgaacacagagtcctctcccgggatcctagcgctgagctggaggctaagcagcctgattccggcatgagcagcccaaacaccactgtgtccgtgcaaccactcaacttcgacctctccagccctacaagcacgctttcgaattatgacagctgctcatcatctcactcgtccattaaggggcagcatccaccatgcgggctaagcagcgcccgagctgcagatatccaatcctacatggatatgttgaacccggagctgggactgccacgcggaacaattgggaagcccacatag

SEQ ID NO: 339038 - DNA, 645 bp, Artificial Sequence
  derived and/or modified sequence
gacggcatgacccccctgcacgccgccgcccagatgggccacagccccgtgatcgtgtggctggacaaggacggcgccaccgccatgcacttcgccgccagcagaggccacaccaaggtgctgagctggctgctgctgcacggcggcgagatcagcgccgacctgtggggcggcacccccctgcacgacgccgccgagaacggcgagctggagtgctgccagatcctggtggtgaacggcgccgagctggacgtgagagacagagacggctacaccgccgccgacctgagcgacttcaacggccacagccactgcaccagatacctgagaaccgtggagaacctgagcgtggagcacagagtgctgagcagagaccccagcgccgagctggaggccaagcagcccgacagcggcatgagcagccccaacaccaccgtgagcgtgcagcccctgaacttcgacctgagcagccccaccagcaccctgagcaactacgacagctgcagcagcagccacagcagcatcaagggccagcaccccccctgcggcctgagcagcgccagagccgccgacatccagagctacatggacatgctgaaccccgagctgggcctgcccagaggcaccatcggcaagcccacctag

SEQ ID NO: 339039 - DNA, 641 bp, Artificial Sequence
  derived and/or modified sequence
gacggcatgaccccgctgcacgccgcggcgcagatgggccacagcccagtcatcgtgtggttggacaaagacggcgccaccgccatgcacttcgcggcgagccgcggccacaccaaggtgctcagctggctgctgctgcacggcggggagatctcggctgacctgtggggcgggaccccgctgcacgacgccgccgagaacggggagctagagtgctgccagatcctggtagtgaacggcgcggagctggacgtccgcgaccgcgacgggtacacggccgccgacctgtcggacttcaacggccacagccactgcacccgctacctgcgcacggtggagaacctgagcgtggagcaccgcgtgctttcccgggatccatccgcagagctggaggctaagcagccggattcaggcatgtcctcacccaataccacggtgtcggtccagccgctgaactttgacctcagctcgcctaccagcaccctctccaactacgactcctgctcctccagccactccagcatcaagggccagcaccctccatgtgggctttccagcgctagagctgcagacatacagagctacatggacatgctgaacccggagctgggcctgcctcggggcacgattgggaagcccac

SEQ ID NO: 339040 - DNA, 333 bp, Artificial Sequence
  derived and/or modified sequence
atgacctacccaccccaccgggccttcagcagaagtgatgtgccctaccccctgctgagcagccctgtgcagtggcccctgagcctggtggtgggggacaccagcacccgctggccccagcagcccagcgccctggagagtgactgccccggccccagccacccctgcctggccggcctgctgggccccatgcaccctgtggacatccccctgagcacagccctgcacagcaagcaccagaggcggctgacccagtgtgtgctgatggtgcagagccccagcaagcagaggagcctgtacctgctgaacaagaagatcccccatgatgcctag

SEQ ID NO: 339041 - DNA, 1449 bp, Artificial Sequence
  derived and/or modified sequence
atgctgagggtcgagaccgaggctagagcgcgtgcaaaagccgagcgtgaaaacgccgacataatcagagagcagatccggctaaaggcaagtgaacacaggcagacggtcctggaatccatacgcacggcgggcacactctttggcgaggggttccgggccttcgtgactgaccgagataaggtgaccgccactgtggctgggttgacactgctcgcagtaggcgtgtacagtgcaaaaaacgctaccgccgttacaggcaggttcatcgaggccaggttgggaaagcctagtttggtccgtgaaaccagtcgcatcaccgtactcgaggccttgcgacatccaatccaggtgagcaggcgccttctctctcggccccaggacgttctggagggcgtagtgctgtcagtgtcaccctccctggaggctcgggtccgggatattgccattgccactcggaacaccaagaagaacaggggcctatatcgtcatatcctattatacggccccccagggactggcaaaactctgttcgccaagaagctggcacttcacagcggcatggattatgcgatcatgacaggcggcgatgtcgccccaatgggacgagaaggcgtcaccgcgatgcacaaattgttcgattgggccaataccagtcggagaggcttgcaggaagagatctctaaggacctgagagctacactgaatgccttcctctatcatatgggccagcactccaataaccggtttatgctggtgcttgccagtaacctccctgaacaatttgattgtgccatcaactcaagaatagacgtgatggtgcacttcgatctcccccagcaagaggaaagagaacgtttggtccgcttgcatttcgataattgtgtcctcaagcctgcgaccgagggaaaacgaatgggcgtcgggcagctaccagtgtttagacccccccctcatggcgttggctcagcagcactggccgcgtctctgggaaacagcttccccagaaggctgaagctcgctcaattcgactacggaaggaaatgttctgaggttgcaaggcttactgagggtatgagtggacgggaaattgctcagcttgccgtatcgtggcaggcaactgcttacgccagtaaggacggtgttctcactgaagctatgatggatgcctgcgtgcaggatgccgttcagcagtaccggcaaaaaatgcgctggctgaaggcagaagggcccgggcgcggtgtggaacaccctctcagcggcgtccaaggtgagacgctcacatcatggtctctcgcaacagatccctcctatccctgtttggccggcccctgtacatttcgtatctgcagctggatgggaaccggcctctgcccaggcccattgtcaccaagaatgtcctgcggcggaggaagaccattctgtcccccaggacaccctctactctag

SEQ ID NO: 339042 - DNA, 1449 bp, Artificial Sequence
  derived and/or modified sequence
atgctgcgggtggagacagaggcccgggcccgggccaaggccgagagagaaaatgctgacatcatccgggagcagatccggctgaaggccagcgagcaccggcagacagtgctggagagcatcagaacagctggcaccctgtttggagagggcttccgggcctttgtgacagaccgggacaaggtgacagccaccgtggccggcctgaccctgctggccgtgggcgtgtacagcgccaagaatgccacagctgtgacaggccgcttcatcgaggcccggctgggcaagcccagcctggtgcgggagaccagccgcatcaccgtgctggaggccctgcggcaccccatccaggtgtcccggcggctgctgagccggccccaggatgtgctggagggcgtggtgctgtctgtgagccccagcctggaggcccgggtgcgggacatcgccatcgccaccaggaacaccaagaagaacagaggcctgtaccgccacatcctgctgtatggccccccaggcaccgggaagaccctgtttgccaagaagctggccctgcacagcggcatggactatgccatcatgactggaggagatgtggcccccatgggccgggagggcgtgacagccatgcacaagctgtttgactgggccaacaccagccggcggggcctgcaggaggagatcagcaaggacctgcgggccaccctgaatgccttcctgtaccacatgggccagcacagcaacaaccgcttcatgctggtgctggccagcaacctgcctgagcagtttgactgtgccatcaacagcagaattgatgtgatggtgcactttgacctgccccagcaggaggagcgggagcggctggtgcggctgcactttgacaactgtgtgctgaagccagccacagagggcaagaggatgggcgtgggccagctgcccgtcttccggcccccacctcatggagtgggcagcgctgccctggccgccagcctgggcaacagcttcccccggcggctgaagctggcccagtttgattatggcaggaagtgcagcgaggtggcccggctgacagagggcatgagcggccgggagatcgcccagctggccgtgtcctggcaggccacagcctatgccagcaaggatggagtgctgacagaggccatgatggatgcctgtgtgcaggatgctgtgcagcagtaccggcagaagatgcgctggctgaaggccgagggccctggccggggcgtggagcaccccctgagcggcgtgcagggcgagaccctgacctcctggagcctggccacagaccccagctacccctgcctggccggcccctgcaccttccgcatctgctcctggatgggcaccggcctgtgccccggccccctgagccccaggatgagctgtggcggcggccggcccttctgccccccaggccaccccctgctgtag

SEQ ID NO: 339043 - DNA, 1449 bp, Artificial Sequence
  derived and/or modified sequence
atgctgcgggtggagaccgaggcccgggcccgggccaaggccgagagagagaacgcggatattatcagagagcaaattcggctgaaggcgagcgaacaccggcagaccgtgttggagagtatccgcactgcagggactctgttcggggaagggttccgagctttcgttactgatcgggacaaggtcaccgcaaccgttgccgggctaaccctcctggcagtcggggtatattctgcaaaaaatgctactgcagtcacaggtcggttcattgaggcccgcctcggcaagccaagcctggtgcgtgaaacatccagaattaccgtacttgaggcgttgagacaccccattcaggtttcccgccggctgctctcgcgccctcaggacgtcctggagggcgtggttctctcagtgtcccccagcctggaggcgcgtgtgagagatattgctattgcgacgcgcaacacaaagaagaacagaggcctataccgacatatcctcctgtatggaccgccaggcaccggcaagacactcttcgctaaaaaactagccctccattcgggaatggactatgctataatgactgggggtgacgtggctccaatgggacgcgagggtgtgacagcaatgcataagctctttgactgggcaaatactagccgacgggggctacaggaagagatctccaaagacctgagagccacactgaatgctttcctttaccacatgggccaacactccaataaccgttttatgctggtcctggcctctaatttacctgagcagttcgactgcgccatcaacagtcggattgatgtcatggtgcacttcgatctccctcagcaggaggagcgcgagcgcctcgtacgattacacttcgataactgtgttctgaagcccgctacagaaggcaagaggatgggcgtcggccagctgccggtcttcagaccccccccccatggcgtgggttccgctgctttggccgccagcttgggtaattcatttccaaggcgattaaagttagcccagtttgactacgggcgcaagtgcagcgaggtggcccgactcaccgagggtatgtccgggagggaaatcgcccagttggccgtcagttggcaggctacagcctacgcgtcgaaagatggagtcctaactgaagctatgatggatgcctgtgtccaagacgcagtccagcaatacaggcagaagatgcggtggctcaaagctgaaggcccaggtcggggcgtcgaacaccctctgagcggggtacagggtgagacgctgacgagttggagtctcgccacagatcccagctacccatgcctcgctggcccttgcacttttcggatctgctcctggatggggaccggactctgtccaggaccactatcgcctaggatgtcctgcggcggggggcgcccattttgccccccgggtcatcccctactctag

SEQ ID NO: 339044 - DNA, 1449 bp, Artificial Sequence
  derived and/or modified sequence
atgttgagggtcgaaacggaggcaagagctcgagccaaagccgaacgagaaaacgcggacatcataagggaacagatccggctgaaggcaagtgaacacaggcagacagttcttgagagcattcgaacagctgggacactgtttggcgagggtttcagggctttcgtcaccgatagggacaaggtaactgctacagttgccggtttgacactgttagctgtcggggtttacagtgctaaaaacgctacagccgttaccggcagatttattgaggcccgactcggaaaaccctctctggttagggagacctctcgaattactgtcctggaggcccttagacatcctattcaggtgagcagaagacttttatcccgcccacaagatgtactggaaggagtcgtcctgtcagttagcccgagcctagaggcacgagtgagggatatcgcgatcgccaccagaaatacgaaaaagaatagagggttgtacaggcacatcctcctttatggcccacccggaaccgggaagacactctttgccaagaagctcgcactccacagtggcatggactacgcaatcatgactggcggtgatgtggcccctatgggcagagagggagtgactgcaatgcacaaactgtttgactgggctaatacgtcacggaggggactgcaagaggaaattagcaaggatttgagggccacgctgaatgcctttttgtaccacatgggacagcactcaaacaatcgtttcatgctggtgcttgctagcaacctcccagagcagtttgattgtgctattaactccaggattgatgttatggtccactttgaccttccgcaacaagaggaacgggaacggctggtgaggctgcacttcgataattgcgtgctgaaaccagctactgagggcaaacgcatgggtgtgggtcagctccccgtgtttcggcctcccccacacggtgtgggcagtgcagccctggctgcttctctcggaaattccttccctaggagactgaaactggcccaatttgattatgggaggaaatgcagcgaagtcgcaagattaaccgagggcatgtcaggtcgagagatcgcgcagctggccgtttcttggcaggctacagcttacgcctctaaggacggggttttaacagaggccatgatggacgcatgcgtgcaagacgccgtgcagcagtataggcagaagatgcgttggctcaaggctgagggaccaggcagaggtgttgaacaccctcttagcggcgtgcaaggcgagacactcacctcgtggtccctggccactgacccctcctatccttgcctcgccggaccctgcacttttcgcatatgctcctggatgggcaccggcctttgcccgggacccttaagcccccgtatgagctgtggaggcggtaggccattctgcccgcctggccaccccctcctatag

SEQ ID NO: 339045 - DNA, 2138 bp, Artificial Sequence
  derived and/or modified sequence
gtgtttcgcctgcgcagtggtcctggccaccggctcgcggcgcgtggaggctgctcccagccgcgcccgagtcagactcgggtgggggtcccggcggcggtagcggcggcggcggtgcgagcatgtcgtggctcttcggcgttaacaagggccccaagggtgaaggcgcggggccgccgccgcctttgccgcccgcgcagcccggggccgagggcggcggggaccgcggtttgggagaccggccggcgcccaaggacaaatggagcaacttcgaccccaccggcctggagcgcgccgccaaggcggcgcgcgagctggagcactcgcgttacgccaaggaggccctgaatctggcgcagatgcaggagcagacgctgcagttggagcaacagtccaagctcaaacaacttctcaatgaggagaatttacggaagcaggaggagtccgtgcagaagcaccgtcagaccgtcttggagtccatcaggacggctggcaccttgtttggggaaggattccgtgcctttgtgacagaccgggacaaagtgacagccacggtggctgggctgacgctgctggctgtcggggtctactcagccaagaatgcgacagccgtcactggccgcttcatcgaggctcggctggggaagccgtccctagtgagggagacgtcccgcatcacggtgctggaggcgctgcggcaccccatccagcaggtcagccggcggctcctcagtcgaccccaggacgtgctggagggtgttgtgcttagtcccagcctggaagcacgggtgcgcgacatcgccatagcaaccaggaacaccaagaagaaccggggcctgtacaggcacatcctgctgtatgggccaccaggcaccgggaagacgctgtttgccaagaaactcgccctgcactcaggcatggactacgccatcatgacaggcggggacgtggcccccatggggcgggaaggcgtgaccgccatgcacaagctctttgactgggccaataccagccggcgcggcctcctgctcttcatggatgaagcagacgccttccttcggaagcgagccactgaggagataagcaaggacctcagagccacactgaacgccttcctgtaccacatgggccaacacagcaacaaattcatgctggtcctggccagcaatctgcctgagcagttcgactgtgccatcaacagccgcattgacgtgatggtccacttcgacctgccgcagcaggaggagcgggagcgcctggtgagactgcattttgacaactgtgttcttaagccggccacagaaggaaaacggcgcctgaagctggcccagtttgactacgggaggaagtgctcggaggtcgctcggctgacggagggcatgtcgggccgggagatcgctcagctggccgtgtcctggcaggccacggcatatgcctccaaggacggggtcctcactgaggccatgatggacgcctgtgtgcaagatgctgtccagcagtaccgacagaagatgcgctggctgaaggcggaggggcctgggcgcggggtcgagcaccccctatccggagtccaaggcgagaccctcacctcatggagcctggccacggacccctcctacccctgccttgccggcccctgcacatttaggatatgctcctggatggggactgggctgtgcccagggcctctgtcccccaggatgtcttgtggtggcggtcggccgttctgccccccagggcaccccctgttgtaggcactggctagggaggggcaggcctccttcctgcccctcgagacactcttgggagatgcattttccgtctggctcacagggggagggtgaggctttgtaccccagcccctgcccaggccactgtgagggtgggtgctggctgagcccctggggcagaaggagtggggcaggcggggtctttgttctcggctcccacagcagagccaggtgagggggggcctgccaggactagacagaagtggggcggcctgaaccctgcttccagccatggccaggggccacggaacccggcaggggtgtctgaggccgccctgtcagctggccggtccaagcctgtggctggagctggtgtgtgtttatctaataaagtcccacaggtgcctc

SEQ ID NO: 339046 - DNA, 1449 bp, Artificial Sequence
  derived and/or modified sequence
atgctgagagtggagaccgaggccagagccagagccaaggccgagagagagaacgccgacatcatcagagagcagatcagactgaaggccagcgagcacagacagaccgtgctggagagcatcagaaccgccggcaccctgttcggcgagggcttcagagccttcgtgaccgacagagacaaggtgaccgccaccgtggccggcctgaccctgctggccgtgggcgtgtacagcgccaagaacgccaccgccgtgaccggcagattcatcgaggccagactgggcaagcccagcctggtgagagagaccagcagaatcaccgtgctggaggccctgagacaccccatccaggtgagcagaagactgctgagcagaccccaggacgtgctggagggcgtggtgctgagcgtgagccccagcctggaggccagagtgagagacatcgccatcgccaccagaaacaccaagaagaacagaggcctgtacagacacatcctgctgtacggcccccccggcaccggcaagaccctgttcgccaagaagctggccctgcacagcggcatggactacgccatcatgaccggcggcgacgtggcccccatgggcagagagggcgtgaccgccatgcacaagctgttcgactgggccaacaccagcagaagaggcctgcaggaggagatcagcaaggacctgagagccaccctgaacgccttcctgtaccacatgggccagcacagcaacaacagattcatgctggtgctggccagcaacctgcccgagcagttcgactgcgccatcaacagcagaatcgacgtgatggtgcacttcgacctgccccagcaggaggagagagagagactggtgagactgcacttcgacaactgcgtgctgaagcccgccaccgagggcaagagaatgggcgtgggccagctgcccgtgttcagaccccccccccacggcgtgggcagcgccgccctggccgccagcctgggcaacagcttccccagaagactgaagctggcccagttcgactacggcagaaagtgcagcgaggtggccagactgaccgagggcatgagcggcagagagatcgcccagctggccgtgagctggcaggccaccgcctacgccagcaaggacggcgtgctgaccgaggccatgatggacgcctgcgtgcaggacgccgtgcagcagtacagacagaagatgagatggctgaaggccgagggccccggcagaggcgtggagcaccccctgagcggcgtgcagggcgagaccctgaccagctggagcctggccaccgaccccagctacccctgcctggccggcccctgcaccttcagaatctgcagctggatgggcaccggcctgtgccccggccccctgagccccagaatgagctgcggcggcggcagacccttctgcccccccggccaccccctgctgtag

SEQ ID NO: 339047 - protein, 116 aa, Artificial Sequence
  derived and/or modified sequence
MRRATVEREMELRHKNEMLRVETEARARAKAERENADIIREQIRLKASEHRQTVLESIRTAGTLFGEGFRAFVTDRDKVTATVNIFIKQGWQVAERQHFRRRRWADHEVRRSRSSW

SEQ ID NO: 339048 - DNA, 2612 bp, Artificial Sequence
  derived and/or modified sequence
accggctcgcggcgcgtggaggctgctcccagccgcgcgcgagtcagactcgggtgggggtcccggcggcggtagcggcggcggcggtgcgagcatgtcgtggctcttcggcattaacaagggccccaagggtgaaggcgcggggccgccgccgcctttgccgcccgcgcagcccggggccgagggcggcggggaccgcgggttgggagaccggccggcgcccaaggacaaatggagcaacttcgaccccaccggcctggagcgcgccgccaaggcggcgcgcgagctggagcactcgcgttatgccaaggacgccctgaatctggcacagatgcaggagcagacgctgcagttggagcaacagtccaagctcaaaatgcggctggaagccctgagcctgctgcacacactagtctgggcatggagtctctgccgtgccggagccgtgcagacacaggagcggctgtcaggcagtgccagccctgagcaagtgccagctggtgagtgctgtgctctgcaggagtatgaggccgccgtggagcagctcaagagcgagcagatccgggcgcaggctgaggagaggaggaagaccctgagcgaggagacccggcagcaccaggccagggcccagtatcaagacaagctggcccggcagcgctacgaggaccaactgaagcagcagcaacttctcaatgaggagaatttacggaagcaggaggagtccgtgcagaagcaggaagccatgcggcgagccaccgtggagcgggagatggagctgcggcacaagaatgagatgctgcgagtggaggccgaggcccgggcgcgcgccaaggccgagcgggagaatgcagacatcatccgcgagcagatccgcctgaaggcggccgagcaccgtcagaccgtcttggagtccatcaggacggctggcaccttgtttggggaaggattccgtgcctttgtgacagactgggacaaagtgacagccacggtggctgggctgacgctgctggctgttggggtctactcagccaagaatgccacgcttgtcgccggccgcttcatcgaggctcggctggggaagccgtccctagtgagggagacgtcccgcatcacggtgcttgaggcgctgcggcaccccatccaggtcagccggcggctcctcagtcgaccccaggacgcgctggagggtgttgtgctcagtcccagcctggaagcacgggtgcgcgacatcgccatagcaacaaggaacaccaagaagaaccgcagcctgtacaggaacatcctgatgtacgggccaccaggcaccgggaagacgctgtttgccaagaaactcgccctgcactcaggcatggactacgccatcatgacaggcggggacgtggcccccatggggcgggaaggcgtgaccgccatgcacaagctctttgactgggccaataccagccggcgcggcctcctgctctttgtggatgaagcggacgccttccttcggaagcgagccaccgagaagataagcgaggacctcagggccacactgaacgccttcctgtaccgcacgggccagcacagcaacaagttcatgctggtcctggccagcaaccaaccagagcagttcgactgggccatcaatgaccgcatcaatgagatggtccacttcgacctgccagggcaggaggaacgggagcgcctggtgagaatgtattttgacaagtatgttcttaagccggccacagaaggaaagcagcgcctgaagctggcccagtttgactacgggaggaagtgctcggaggtcgctcggctgacggagggcatgtcgggccgggagatcgctcagctggccgtgtcctggcaggccacggcgtatgcctccgaggacggggtcctgaccgaggccatgatggacacccgcgtgcaagatgctgtccagcagcaccagcagaagatgtgctggctgaaggcggaagggcctgggcgtggggacgagccctccccatcctgagtccacagggagatccacagctcacggagcctggccgcggacccctcccacccctgccttgccggcccctgcacatttaggatatgctcctgggtggggactgggctgtgcccagggcctctgtcccccaggatgtcttgtggtgcgggtcggccgttctgccccccagggcaccccctgttgtaggcactggctagggaggggcaggcctccttcctgcccctcgagacactcttgggagatgcattttccgtctggctcacagggggagggtgaggctttgcaccccagcccctgcccaggccactgtgagggtgggtgctggctgagcccccggggcagcaggagccaggcaggtgatgtctttgttctcggctcccacagcagagccaggtgagggggcgcctgccagggccagacccaggtggggcagcctgaaccctgcttccccctgtggccggcatgccccgatctttcacacactggtgaccctgagagaggagggaggagggaacctggcgggggtgtctgaggccgcactgtcagctggccggtccaagcctgtggctggagctggggtctgtttacctaataaagtcccacaggtgcctca

SEQ ID NO: 339049 - DNA, 2689 bp, Artificial Sequence
  derived and/or modified sequence
accggctcgcggcgcgtggaggctgctcccagccgcgcgcgagtcagactcgggtgggggtcccggcggcggtagcggcggcggcggtgcgagcatgtcgtggctcttcggcattaacaagggccccaagggtgaaggcgcggggccgccgccgcctttgccgcccgcgcagcccggggccgagggcggcggggaccgcgggttgggagaccggccggcgcccaaggacaaatggagcaacttcgaccccaccggcctggagcgcgccgccaaggcggcgcgcgagctggagcactcgcgttatgccaaggacgccctgaatctggcacagatgcaggagcagacgctgcagttggagcaacagtccaagctcaaaatgcggctggaagccctgagcctgctgcacacactagtctgggcatggagtctctgccgtgccggagccgtgcagacacaggagcggctgtcaggcagtgccagccctgagcaagtgccagctggtgagtgctgtgctctgcaggagtatgaggccgccgtggagcagctcaagagcgagcagatccgggcgcaggctgaggagaggaggaagaccctgagcgaggagacccggcagcaccaggccagggcccagtatcaagacaagctggcccggcagcgctacgaggaccaactgaagcagcagcaacttctcaatgaggagaatttacggaagcaggaggagtccgtgcagaagcaggaagccatgcggcgagccaccgtggagcgggagatggagctgcggcacaagaatgagatgctgcgagtggaggccgaggcccgggcgcgcgccaaggccgagcgggagaatgcagacatcatccgcgagcagatccgcctgaaggcggccgagcaccgtcagaccgtcttggagtccatcaggacggctggcaccttgtttggggaaggattccgtgcctttgtgacagactgggacaaagtgacagccacggtggctgggctgacgctgctggctgttggggtctactcagccaagaatgccacgcttgtcgccggccgcttcatcgaggctcggctggggaagccgtccctagtgagggagacgtcccgcatcacggtgcttgaggcgctgcggcaccccatccaggtcagccggcggctcctcagtcgaccccaggacgcgctggagggtgttgtgctcagtcccagcctggaagcacgggtgcgcgacatcgccatagcaacaaggaacaccaagaagaaccgcagcctgtacaggaacatcctgatgtacgggccaccaggcaccgggaagacgctgtttgccaagaaactcgccctgcactcaggcatggactacgccatcatgacaggcggggacgtggcccccatggggcgggaaggcgtgaccgccatgcacaagctctttgactgggccaataccagccggcgcggcctcctgctctttgtggatgaagcggacgccttccttcggaagcgagccaccgagaagataagcgaggacctcagggccacactgaacgccttcctgtaccgcacgggccagcacagcaacaaccccagtcacgtgtcacacggaggatcaagtcctgctggtcggccgtggctgactcctcaggcacgttgggctcccaggttcatgctggtcctggccagcaaccaaccagagcagttcgactgggccatcaatgaccgcatcaatgagatggtccacttcgacctgccagggcaggaggaacgggagcgcctggtgagaatgtattttgacaagtatgttcttaagccggccacagaaggaaagcagcgcctgaagctggcccagtttgactacgggaggaagtgctcggaggtcgctcggctgacggagggcatgtcgggccgggagatcgctcagctggccgtgtcctggcaggccacggcgtatgcctccgaggacggggtcctgaccgaggccatgatggacacccgcgtgcaagatgctgtccagcagcaccagcagaagatgtgctggctgaaggcggaagggcctgggcgtggggacgagccctccccatcctgagtccacagggagatccacagctcacggagcctggccgcggacccctcccacccctgccttgccggcccctgcacatttaggatatgctcctgggtggggactgggctgtgcccagggcctctgtcccccaggatgtcttgtggtgcgggtcggccgttctgccccccagggcaccccctgttgtaggcactggctagggaggggcaggcctccttcctgcccctcgagacactcttgggagatgcattttccgtctggctcacagggggagggtgaggctttgcaccccagcccctgcccaggccactgtgagggtgggtgctggctgagcccccggggcagcaggagccaggcaggtgatgtctttgttctcggctcccacagcagagccaggtgagggggcgcctgccagggccagacccaggtggggcagcctgaaccctgcttccccctgtggccggcatgccccgatctttcacacactggtgaccctgagagaggagggaggagggaacctggcgggggtgtctgaggccgcactgtcagctggccggtccaagcctgtggctggagctggggtctgtttacctaataaagtcccacaggtgcctc

SEQ ID NO: 339050 - protein, 650 aa, Artificial Sequence
  derived and/or modified sequence
MMYHLDGNSHFRHLNVPRPYACRECGRTFRDRNSLLKHMIIHQERRQKLMEEIRELKELQDEGRSARLQCPQCVFGTNCPKTFVQHAKTHEKDKRYYCCEECNFMAVTENELECHRGIAHGAVVKCPMVTSDIAQRKTQKKTFMKDSVVGSSKKSATYICKMCPFTTSAKSVLKKHTEYLHSSSCVDSFGSPLGLDKRKNDILEEPVDSDSTKTLTKQQSTTFPKNSALKQDVKRTFGSTSQSSSFSKIHKRPHRIQKARKSIAQSGVNMCNQNSSPHKNVTIKSSVDQKPKYFHQAAKEKSNAKANSHYLYRHKYENYRMIKKSGESYPVHFKKEEASSLNSLHLFSSSSNSHNNFISDPHKPDAKRPESFKDHRRVAVKRVIKESKKESSVGGEDLDSYPDFLHKMTVVVLQKLNSAEKKDSYETEDESSWDNVELGDYTTQAIEDETYSDINQEHVNLFPLFKSKVEGQEPGENATLSYDQNDGFYFEYYEDTGSNNFLHEIHDPQHLETADASLSKHSSVFHWTDLSLEKKSCPYCPATFETGVGLSNHVRGHLHRAGLSYEARHVVSPEQIATSDKMQHFKRTGTGTPVKRVRKAIEKSETTSEHTCQLCGGWFDTKIGLSNHVRGHLKRLGKTKWDAHKSPICV

SEQ ID NO: 339051 - protein, 1047 aa, Artificial Sequence
  derived and/or modified sequence
MAPRLQLEKAAWRWAETVRPEEVSQEHIETAYRIWLEPCIRGVCRRNCKGNPNCLVGIGEHIWLGEIDENSFHNIDDPNCERRKKNSFVGLTNLGATCYVNTFLQVWFLNLELRQALYLCPSTCSDYMLGDGIQEEKDYEPQTICEHLQYLFALLQNSNRRYIDPSGFVKALGLDTGQQQDAQEFSKLFMSLLEDTLSKQKNPDVRNIVQQQFCGEYAYVTVCNQCGRESKLLSKFYELELNIQGHKQLTDCISEFLKEEKLEGDNRYFCENCQSKQNATRKIRLLSLPCTLNLQLMRFVFDRQTGHKKKLNTYIGFSEILDMEPYVEHKGGSYVYELSAVLIHRGVSAYSGHYIAHVKDPQSGEWYKFNDEDIEKMEGKKLQLGIEEDLEPSKSQTRKPKCGKGTHCSRNAYMLVYRLQTQEKPNTTVQVPAFLQELVDRDNSKFEEWCIEMAEMRKQSVDKGKAKHEEVKELYQRLPAGAEPYEFVSLEWLQKWLDESTPTKPIDNHACLCSHDKLHPDKISIMKRISEYAADIFYSRYGGGPRLTVKALCKECVVERCRILRLKNQLNEDYKTVNNLLKAAVKGSDGFWVGKSSLRSWRQLALEQLDEQDGDAEQSNGKMNGSTLNKDESKEERKEEEELNFNEDILCPHAVFFFSKYIFLNSGELCISENERRLVSKEAWSKLQQYFPKAPEFPSYKECCSQCKILEREGEENEALHKMIANEQKTSLPNLFQDKNRPCLSNWPEDTDVLYIVSQFFVEEWRKFVRKPTRCSPVSSVGNSALLCPHGGLMFTFASMTKEDSKLIALIWPSEWQMIQKLFVVDHVIKITRIEVGDVNPSETQYISEPKLCPECREGLLCQQQRDLREYTQATIYVHKVVDNKKVMKDSAPELNVSSSETEEDKEEAKPDGEKDPDFNQSNGGTKRQKISHQNYIAYQKQVIRRSMRHRKVRGEKALLVSANQTLKELKIQIMHAFSVAPFDQNLSIDGKILSDDCATLGTLGVIPESVILLKADEPIADYAAMDDVMQVCMPEEGFKGTGLLGH

SEQ ID NO: 339052 - DNA, 3144 bp, Artificial Sequence
  derived and/or modified sequence
atggcccccagactgcagctggagaaggccgcctggagatgggccgagaccgtgagacccgaggaggtgagccaggagcacatcgagaccgcctacagaatctggctggagccctgcatcagaggcgtgtgcagaagaaactgcaagggcaaccccaactgcctggtgggcatcggcgagcacatctggctgggcgagatcgacgagaacagcttccacaacatcgacgaccccaactgcgagagaagaaagaagaacagcttcgtgggcctgaccaacctgggcgccacctgctacgtgaacaccttcctgcaggtgtggttcctgaacctggagctgagacaggccctgtacctgtgccccagcacctgcagcgactacatgctgggcgacggcatccaggaggagaaggactacgagccccagaccatctgcgagcacctgcagtacctgttcgccctgctgcagaacagcaacagaagatacatcgaccccagcggcttcgtgaaggccctgggcctggacaccggccagcagcaggacgcccaggagttcagcaagctgttcatgagcctgctggaggacaccctgagcaagcagaagaaccccgacgtgagaaacatcgtgcagcagcagttctgcggcgagtacgcctacgtgaccgtgtgcaaccagtgcggcagagagagcaagctgctgagcaagttctacgagctggagctgaacatccagggccacaagcagctgaccgactgcatcagcgagttcctgaaggaggagaagctggagggcgacaacagatacttctgcgagaactgccagagcaagcagaacgccaccagaaagatcagactgctgagcctgccctgcaccctgaacctgcagctgatgagattcgtgttcgacagacagaccggccacaagaagaagctgaacacctacatcggcttcagcgagatcctggacatggagccctacgtggagcacaagggcggcagctacgtgtacgagctgagcgccgtgctgatccacagaggcgtgagcgcctacagcggccactacatcgcccacgtgaaggacccccagagcggcgagtggtacaagttcaacgacgaggacatcgagaagatggagggcaagaagctgcagctgggcatcgaggaggacctggagcccagcaagagccagaccagaaagcccaagtgcggcaagggcacccactgcagcagaaacgcctacatgctggtgtacagactgcagacccaggagaagcccaacaccaccgtgcaggtgcccgccttcctgcaggagctggtggacagagacaacagcaagttcgaggagtggtgcatcgagatggccgagatgagaaagcagagcgtggacaagggcaaggccaagcacgaggaggtgaaggagctgtaccagagactgcccgccggcgccgagccctacgagttcgtgagcctggagtggctgcagaagtggctggacgagagcacccccaccaagcccatcgacaaccacgcctgcctgtgcagccacgacaagctgcaccccgacaagatcagcatcatgaagagaatcagcgagtacgccgccgacatcttctacagcagatacggcggcggccccagactgaccgtgaaggccctgtgcaaggagtgcgtggtggagagatgcagaatcctgagactgaagaaccagctgaacgaggactacaagaccgtgaacaacctgctgaaggccgccgtgaagggcagcgacggcttctgggtgggcaagagcagcctgagaagctggagacagctggccctggagcagctggacgagcaggacggcgacgccgagcagagcaacggcaagatgaacggcagcaccctgaacaaggacgagagcaaggaggagagaaaggaggaggaggagctgaacttcaacgaggacatcctgtgcccccacgccgtgttcttcttcagcaagtacatcttcctgaacagcggcgagctgtgcatcagcgagaacgagagaagactggtgagcaaggaggcctggagcaagctgcagcagtacttccccaaggcccccgagttccccagctacaaggagtgctgcagccagtgcaagatcctggagagagagggcgaggagaacgaggccctgcacaagatgatcgccaacgagcagaagaccagcctgcccaacctgttccaggacaagaacagaccctgcctgagcaactggcccgaggacaccgacgtgctgtacatcgtgagccagttcttcgtggaggagtggagaaagttcgtgagaaagcccaccagatgcagccccgtgagcagcgtgggcaacagcgccctgctgtgcccccacggcggcctgatgttcaccttcgccagcatgaccaaggaggacagcaagctgatcgccctgatctggcccagcgagtggcagatgatccagaagctgttcgtggtggaccacgtgatcaagatcaccagaatcgaggtgggcgacgtgaaccccagcgagacccagtacatcagcgagcccaagctgtgccccgagtgcagagagggcctgctgtgccagcagcagagagacctgagagagtacacccaggccaccatctacgtgcacaaggtggtggacaacaagaaggtgatgaaggacagcgcccccgagctgaacgtgagcagcagcgagaccgaggaggacaaggaggaggccaagcccgacggcgagaaggaccccgacttcaaccagagcaacggcggcaccaagagacagaagatcagccaccagaactacatcgcctaccagaagcaggtgatcagaagaagcatgagacacagaaaggtgagaggcgagaaggccctgctggtgagcgccaaccagaccctgaaggagctgaagatccagatcatgcacgccttcagcgtggcccccttcgaccagaacctgagcatcgacggcaagatcctgagcgacgactgcgccaccctgggcaccctgggcgtgatccccgagagcgtgatcctgctgaaggccgacgagcccatcgccgactacgccgccatggacgacgtgatgcaggtgtgcatgcccgaggagggcttcaagggcaccggcctgctgggccactag

SEQ ID NO: 339053 - DNA, 3144 bp, Artificial Sequence
  derived and/or modified sequence
atggctcccaggcttcagctagaaaaggcagcctggaggtgggcagaaaccgtccggcctgaggaagtgagccaggagcacatcgaaacagcataccggatctggttggagccctgcataaggggggtgtgccgcaggaattgcaaaggcaacccaaactgcctggttgggataggagagcacatatggctgggtgagatcgacgaaaatagcttccacaacattgacgatcccaactgcgagaggcgcaagaaaaactcgttcgtcggcttaacaaacctgggagccacctgctatgtgaatacattcctgcaagtgtggtttctcaacctggaattgagacaagcattgtacctctgtcctagtacctgttccgattatatgcttggggacggaattcaggaggagaaagattacgaaccgcagacgatctgtgaacacctgcagtatctcttcgctctgctgcaaaattctaatcgcagatacatcgatccatcaggatttgttaaggccctgggcttggacacagggcagcaacaggatgcacaggagttcagcaagttgtttatgtccttgctagaagacacactctcgaaacagaagaaccctgatgtccgcaacattgttcagcagcagttttgtggcgaatatgcttatgtaaccgtatgcaatcaatgcgggcgcgaatctaaattacttagtaagttctatgagctcgagctgaacatacaagggcacaaacagctgaccgactgcatcagcgaattcctgaaagaagaaaaactcgaaggcgacaatcgctatttctgtgagaattgtcagtccaaacaaaacgcgactcgtaagatccgtctgctttctctaccttgcaccttaaacttgcagctgatgaggtttgtgttcgacagacagaccgggcacaaaaagaagcttaacacatatataggcttctctgagatcctggacatggagccttatgtcgaacacaagggcgggtcttatgtgtatgagctctctgccgttctcatacaccggggcgtgtccgcttattctggccattatatcgcccatgtaaaagatccacagtccggggaatggtacaagtttaatgatgaggatatcgaaaaaatggagggaaagaaactgcaactaggcattgaagaggacctcgagccatctaagagccagacccgcaagccaaagtgcggtaaagggacacactgttcccgcaatgcctatatgctcgtgtatcggcttcaaacccaggagaagcctaacacaaccgtgcaggttcccgccttcttacaggagttggtggatcgagataactctaaatttgaagagtggtgtatagagatggcagagatgcgcaaacagagtgtggacaagggaaaagccaaacacgaggaggtgaaggaactttatcaacgtctgcctgccggcgctgaaccttatgagttcgtgagcctggagtggctccagaaatggctggacgaatccacacctaccaaacctatcgataaccatgcatgcctgtgctcgcacgataagctccaccccgataagattagtataatgaagagaatctctgaatacgcagctgatattttctacagccgatacggtggaggcccccggctgacggtcaaggccctgtgcaaagagtgcgtcgttgagcggtgtcgcattctgcggctcaagaatcagctgaacgaggactataaaaccgtgaacaacctgcttaaggccgctgtgaagggatctgacgggttctgggtcggcaaatcgtcactcagaagctggcggcagctggctctggagcagctggatgagcaagacggcgacgctgaacagtcgaacggcaaaatgaacgggtcaacactgaataaagacgaaagtaaggaggaaaggaaggaggaggaagaattgaactttaacgaggatatcctttgcccacacgccgtgttcttcttttctaaatacattttcttgaattcaggagagctgtgtatctccgagaacgagaggcggctcgtgagcaaggaggcttggtctaagctgcagcaatattttcctaaagctcccgagttcccaagttacaaggagtgttgctctcagtgcaaaattcttgagagagaaggagaagaaaacgaggccctccataaaatgatcgctaacgagcagaaaaccagcctgcccaacctgttccaggataagaaccgaccctgtctttctaattggccggaggacactgatgttctgtacatcgtgagccaattctttgttgaagaatggagaaagttcgtaaggaagccgacacggtgcagcccggtcagctcagtgggaaactccgcgctcctctgcccccacggcggactgatgttcacttttgcttccatgaccaaagaggactccaagcttatagccctgatatggcctagtgaatggcagatgatccagaagcttttcgtcgtcgatcacgtaattaaaataacacggatcgaagtgggcgacgtgaaccctagcgagacccagtatatatcggagcccaaattatgcccggaatgcagagaggggctgctgtgccaacaacagcgagacctgcgcgagtatacgcaggcaacaatctatgttcacaaggtggtggataacaagaaggtaatgaaagacagcgccccagagctgaacgtttcaagttcagagaccgaggaggacaaagaggaggcgaagcccgacggagagaaagatcctgacttcaaccagtcaaacggcggcacgaagagacagaaaatcagccaccaaaattatatcgcctaccagaaacaggtaatccgcagatcaatgagacacagaaaagtaaggggtgagaaagcattgctggtatccgccaatcagacattaaaggaattgaagattcagatcatgcatgccttttccgtcgccccttttgaccagaatctgtctatcgatgggaaaatcctgagtgatgattgcgctactctagggacacttggagttattccagagtctgtgattctgttaaaagccgatgagcctattgccgattacgctgccatggacgacgttatgcaggtgtgcatgccagaggaggggtttaaggggacaggtctgcttgggcattag

SEQ ID NO: 339054 - DNA, 3144 bp, Artificial Sequence
  derived and/or modified sequence
atggccccccggctgcagctggagaaggccgcctggcgctgggccgagaccgtgcggcctgaggaggtgtcccaggagcacatcgagacagcctaccgcatctggctggagccctgcatccggggcgtgtgcagaagaaactgcaagggcaaccccaactgcctggtgggcatcggggagcacatctggctgggggagattgatgaaaattccttccacaacattgatgaccccaactgtgagaggaggaagaagaacagctttgtgggcctgaccaacctgggcgccacctgctacgtgaacaccttcctgcaggtgtggttcctgaacctggagctgcggcaggccctgtacctgtgccccagcacctgcagcgactacatgctgggagatggcatccaggaggagaaggactatgagccccagaccatctgtgagcacctgcagtacctgtttgccctgctgcagaacagcaacagacgctacatcgaccccagcggctttgtgaaggccctgggcctggacaccggccagcagcaggatgcccaggagttcagcaagctgttcatgagcctgctggaggacaccctgagcaagcagaagaacccagatgtgaggaacatcgtgcagcagcagttctgtggggagtatgcctacgtgacagtgtgcaaccagtgtggccgggagagcaagctgctgagcaagttctatgagctggagctgaacatccagggccacaagcagctgacagactgcatcagcgagttcctgaaggaggagaagctggagggggacaaccgctacttctgtgagaactgccagagcaagcagaatgccaccaggaagatccggctgctgagcctgccctgcaccctgaacctgcagctgatgagatttgtgtttgaccggcagacaggccacaagaagaagctgaacacctacatcggcttcagcgagatcctggacatggagccctacgtggagcacaagggcggcagctatgtgtatgagctgtctgctgtgctgatccaccggggcgtgtctgcctacagcggccactacatcgcccacgtgaaggacccccagagcggggagtggtacaagttcaatgatgaggacatcgagaagatggagggcaagaagctgcagctgggcatcgaggaggacctggagcccagcaagagccagaccaggaagcccaagtgtgggaagggcacccactgcagcagaaatgcctacatgctggtgtaccgcctgcagacccaggagaagcccaacaccaccgtgcaggtgcctgccttcctgcaggagctggtggaccgggacaacagcaagtttgaggagtggtgcatcgagatggccgagatgaggaagcagagcgtggacaagggcaaggccaagcatgaggaggtgaaggagctgtaccagaggctgcctgctggagctgagccctatgaatttgtgtccctggagtggctgcagaagtggctggatgagagcacccccaccaagcccatcgacaaccacgcctgcctgtgcagccatgacaagctgcacccagacaagatcagcatcatgaagaggatcagtgaatatgctgctgacatcttctacagccgctatggaggcggcccccggctgactgtgaaggccctgtgcaaggaatgtgtggtggagcgctgccgcatcctgcggctgaagaaccagctgaatgaagactacaagacagtgaacaacctgctgaaggctgctgtgaagggcagtgatggcttctgggtgggcaagagcagcctgcgctcctggaggcagctggccctggagcagctggatgagcaggatggagatgctgagcagagcaatggcaagatgaatggcagcaccctgaacaaggatgagagcaaggaggagaggaaggaggaggaggagctgaacttcaatgaagacatcctgtgcccccatgctgtgttcttcttcagcaagtacatcttcctgaacagcggggagctgtgcatcagtgaaaatgaaagaaggctggtgtccaaggaggcctggagcaagctgcagcagtacttccccaaggcccctgagttccccagctacaaggagtgctgcagccagtgcaagatcctggagcgggagggggaggagaatgaggccctgcacaagatgattgccaatgagcagaagaccagcctgcccaacctcttccaggacaagaaccggccctgcctgagcaactggccagaggacacagatgtgctgtacatcgtgtcccagttctttgtggaggagtggaggaagtttgtgaggaagcccacccgctgcagccctgtgtcctctgtgggcaacagcgccctgctgtgcccccacggcggcctgatgttcacctttgcctccatgaccaaggaggacagcaagctgattgccctgatctggcccagcgagtggcagatgatccagaagctgtttgtggtggaccacgtgatcaagatcacccgcatcgaggtgggagatgtgaaccccagcgagacccagtacatcagcgagcccaagctgtgcccagaatgtcgggagggcctgctgtgccagcagcagagggacctgcgggagtacacccaggccaccatctacgtgcacaaggtggtggacaacaagaaggtgatgaaggacagcgcccctgagctgaatgtgagcagcagcgagacagaggaggacaaggaggaggccaagccagatggagagaaggaccctgacttcaaccagagcaatggaggcaccaagaggcagaagatcagccaccagaactacatcgcctaccagaagcaggtgatcagaagatccatgaggcacaggaaggtgcggggggagaaggccctgctggtgtctgccaaccagaccctgaaggagctgaagatccagatcatgcacgccttctctgtggccccctttgaccagaacctgagcattgatggcaagatcctgagtgatgactgtgccaccctgggcaccctgggcgtcatccctgagagcgtcatcctgctgaaggcagatgagcccatcgctgactatgctgccatggatgatgtgatgcaggtgtgcatgcctgaggagggcttcaagggcaccggcctgctgggccactag

SEQ ID NO: 339055 - DNA, 3144 bp, Artificial Sequence
  derived and/or modified sequence
atggccccccggctgcagctggagaaggccgcctggcggtgggccgagacagtgaggcctgaagaggtttcacaagagcacattgagaccgcttatcgcatatggctggagccctgtatcagaggcgtctgtagacgcaattgtaagggcaacccaaactgcctcgtcggtataggcgagcacatctggctcggcgaaatcgacgagaattcctttcataatatcgacgacccgaactgcgagaggcggaagaaaaatagctttgtcggactgactaacctcggagccacttgttacgtcaatacctttctgcaggtgtggttcttgaacctcgagctgaggcaggcattgtacctgtgccctagtacctgctctgattatatgcttggcgatggcatccaggaggaaaaagattatgaaccccagacgatctgcgaacacttgcagtatctgttcgctcttctgcaaaattctaatagaagatatattgaccccagtgggtttgtgaaagccctcggactcgatactggacagcagcaagacgctcaagaattctctaagctctttatgagtttgcttgaagacactctgagcaaacagaagaacccagatgtgcgaaacattgtccaacagcagttttgcggagagtatgcgtatgtgactgtatgtaatcagtgcggccgagaatccaaactactgtccaaattctacgaacttgagctcaatattcagggacataaacagctcacggattgtatctccgaattcctgaaagaggagaagttggaaggggacaataggtatttctgcgagaactgccagtctaagcagaacgccacgaggaagattaggctcttgagcctgccttgcacgcttaatctgcagctcatgaggttcgttttcgatcgacaaacaggccataagaaaaaattgaacacatacatcgggttttctgaaatccttgatatggagccctacgttgagcataagggcggcagttacgtctatgaactgtcagctgtcctcattcacagaggagtgagcgcatattccggacactatatcgctcatgtgaaggacccgcagtccggggagtggtataagtttaatgacgaggatatcgaaaagatggagggtaagaagctccagcttggtatcgaagaggacttggaaccatcaaagtctcagacgcggaaaccgaaatgcggaaaaggaacacactgcagcagaaacgcgtacatgctggtttacaggctacagacccaagaaaagccaaacacaacagtccaggtcccagccttcttgcaggagctcgtcgacagggataactcaaagtttgaagagtggtgcatcgagatggcagaaatgcgcaaacagtccgtggacaaaggtaaggcgaaacatgaggaggtgaaagagctgtaccaacgcctgcccgccggcgctgaaccttatgaatttgtgagcctggagtggctacaaaaatggctagacgagtccacaccaacgaagcctatcgacaaccacgcgtgtctatgttctcacgacaagctgcacccggacaagataagcataatgaaaagaataagtgaatatgcagctgatatcttctattcccgctacggcggggggcctcgactaaccgtgaaggcattatgcaaggagtgcgttgttgagaggtgccgtatactccgtttgaagaatcagttgaatgaggattacaagactgttaacaatctgctcaaggcagcggtaaaaggctcagacgggttctgggtgggcaaaagtagtctccgctcatggcggcaactcgcccttgagcaattggatgagcaggacggggatgccgaacagtctaacggcaagatgaacggaagcacattgaataaagacgagtccaaagaggaacgtaaagaggaggaagaactcaattttaatgaagacattttatgcccacacgcggtgttcttcttttccaagtacatcttcctgaacagtggtgagctgtgcatcagcgagaatgaaagaagactcgtcagtaaagaggcttggagtaagctacagcaatatttccccaaggctccagagtttcccagctataaagaatgttgctcccagtgtaaaattctggaacgagagggggaggaaaacgaggccctacataagatgatcgcgaatgagcagaagacttccctgccgaatctttttcaggacaagaatcgaccctgtttgtcaaattggcctgaggacacggatgtgctctacattgtctcccagtttttcgtggaagagtggaggaaatttgtgcgcaagcctaccaggtgctcaccagtgtctagcgtcggaaatagcgccctgctgtgcccacacggcgggctaatgttcaccttcgcaagcatgaccaaagaagatagtaaactcattgctctaatctggcccagtgaatggcagatgatccaaaagctcttcgtcgtggaccatgtgattaagattactcggatcgaggtgggcgatgtgaaccctagtgaaacccagtacatcagtgaacctaaattgtgtccagagtgcagggagggactactatgccagcagcagagggacctgagggaatatacccaggccactatatacgtccacaaggtcgtggataacaaaaaggtgatgaaagattccgccccagagctcaatgtgagtagctccgaaactgaagaggacaaggaagaagctaaaccagatggtgagaaggatccagacttcaaccagagcaacggagggactaagaggcagaaaatttcgcatcaaaattatatagcgtatcagaagcaggttatcaggagatctatgagacaccgtaaagttcgcggggagaaggcgctgttggtgagtgctaatcagactctaaaagaactgaaaatacagattatgcacgccttcagcgtggcacctttcgatcagaacctcagcatcgacggtaagatcctgagcgacgactgtgccaccttggggaccctcggcgttataccggagtccgttatccttttgaaggccgatgagccaatcgccgactacgccgcaatggatgatgtaatgcaggtgtgcatgcctgaagaggggttcaaaggcactggcttgctaggacactag

SEQ ID NO: 339056 - DNA, 3144 bp, Artificial Sequence
  derived and/or modified sequence
atggccccacgcctgcagctggagaaggccgcatggcgatgggcagaaacagttcgccctgaagaggtgagccaggagcacatcgagactgcctacaggatctggctggagccctgtatccggggtgtgtgccggaggaactgtaagggaaacccgaactgcctcgtgggaatcggcgaacatatctggctcggcgagattgatgagaattctttccacaacattgatgatccaaactgcgagcggagaaagaagaattctttcgtcgggttgacaaacctgggtgccacctgttacgtcaatacattcctccaggtgtggtttcttaatttggaactgcgccaggccctctacctctgtccgagcacctgttctgactacatgctaggggatggcattcaggaggagaaagactacgagccacagaccatttgtgagcatctgcaatacctgtttgccctgctgcagaacagcaacagaagatatattgacccgtcggggtttgtcaaagctctcggattggatactggacagcagcaggatgcacaggagttcagcaagctgttcatgagtctgctcgaggacaccttgagcaagcaaaagaatcccgacgtgcgcaacatagttcagcaacagttttgtggcgagtacgcctacgtgacagtttgcaatcagtgcgggcgagagtcaaaactgctgtctaaattctatgaactagaattgaatatacaagggcacaaacagctgaccgattgcatttcagaatttctcaaggaagagaagctggagggtgataatagatacttctgcgagaattgccagtcaaaacaaaatgctacacggaagatccgcctcctgagcttgccatgcaccttgaatctgcagctaatgcgtttcgtcttcgatagacagacgggccacaagaagaaattgaatacctatataggatttagcgaaattctggatatggaaccctacgtcgagcacaaaggagggtcttacgtctatgagctctccgctgttctgattcacaggggggtctccgcatacagcgggcattacatcgcacatgtgaaagatccgcagtccggggagtggtacaagttcaacgacgaggatatcgaaaagatggaaggaaaaaagctgcaacttggaatcgaagaggacctagaaccttcgaagagtcagacacgtaagcccaaatgcggcaaaggcactcactgctcaagaaatgcatatatgctggtataccgactgcaaacccaagaaaaacccaataccacagtccaagttcccgcattccttcaggagctggtagatcgggataactcaaaattcgaggagtggtgcattgaaatggccgaaatgcggaagcaatctgtagataagggtaaggccaaacacgaggaggtcaaagagctgtatcaacgacttccggctggggcagagccctacgagtttgtcagccttgagtggctccagaaatggctcgatgagagcaccccaaccaagcccatcgataaccacgcttgtctctgttcccacgataagctgcacccagacaaaatatccatcatgaaacgcatctctgaatacgccgctgacatattttactcccgatacgggggaggccctagacttactgtgaaagccctgtgcaaagagtgcgtcgttgaacgctgtagaatcctgcgcctcaagaatcagctcaatgaggactataagaccgttaataatctgctgaaagccgcagtgaagggttcggatggcttttgggtcggtaaatcaagtctgaggagctggaggcaactggctctagaacagctagatgagcaagacggagatgcggaacaatccaatgggaaaatgaatggttctactctcaacaaagatgagtctaaggaggagcggaaggaagaggaagagcttaactttaacgaggacattctgtgcccacatgcagtcttcttttttagtaagtacatttttctaaactccggagagttgtgcatcagcgagaacgaaagacgcctagtgtccaaggaggcatggtctaaactacagcagtacttccccaaagcacctgagtttccctcttacaaggagtgctgtagccagtgtaagatactggaacgtgagggtgaggagaatgaggctctccataaaatgatcgccaatgagcagaagacttctctgcctaatctgttccaggataagaacaggccgtgtctttctaattggcctgaggatacagatgtgctgtacattgtgtcccagttcttcgtggaggaatggcggaaattcgtgcgaaagcccacccggtgtagccccgtttcttccgtgggcaactcagcactgctctgcccccacgggggactcatgtttactttcgcatccatgacaaaagaagacagtaagctcatcgccttaatttggccaagcgagtggcaaatgatccaaaagctgtttgtggtcgatcacgttatcaagatcacaagaatcgaggtgggggacgttaatccgagcgagacgcagtacatttccgagcctaaactgtgccctgaatgccgggaaggcttgctctgccaacagcaaagggacctgcgggaatatacacaggctaccatttacgtgcataaagtggttgacaacaagaaagttatgaaggacagtgcccctgaactgaatgtgagctcatctgaaaccgaggaagacaaagaggaggccaaacctgatggggagaaagatcctgactttaatcagtctaacggcggaacaaaaaggcagaaaatctcccaccaaaactatatcgcctaccagaagcaggtcattcgccgaagcatgcgtcaccgtaaggtcaggggcgaaaaagctctgttggtaagtgccaaccagactttaaaggagctcaagattcaaattatgcatgctttttccgtggccccatttgaccagaatctgtctatcgatgggaaaattctgtcagatgactgcgctactctcggcactcttggggtcatccccgaatctgtgatattattgaaggccgacgaacctattgctgactatgcggctatggatgacgtaatgcaggtgtgtatgcctgaggagggcttcaaggggacaggcttgctgggacactag

SEQ ID NO: 339057 - DNA, 3228 bp, Artificial Sequence
  derived and/or modified sequence
gtctggctcgggaggcgttcctggggccaaggccatggccccgcggctgcagctggagaaggcggcctggcgctgggcggagacggtgcggcccgaggaggtgtcgcaggagcacatcgagaccgcttaccgcatctggctggagccctgcattcgcggcgtgtgcagacgaaactgcaaaggaaatccgaattgcttggttggtattggtgagcatatttggttaggagaaatagatgaaaatagttttcataacatcgatgatcccaactgtgagaggagaaaaaagaactcatttgtgggcctgactaaccttggagccacttgttatgtcaacacatttcttcaagtgtggtttctcaacttggagcttcggcaggcactctacttatgtccaagcacttgtagtgactacatgctgggagacggcatccaagaagaaaaagattatgagcctcaaacaatttgtgagcatctccagtacttgtttgccttgttgcaaaacagtaataggcgatacattgatccatcaggatttgttaaagccttgggcctggacactggacaacagcaggatgctcaagaattttcaaagctctttatgtctctattggaagatactttgtctaaacaaaagaatccagatgtgcgcaatattgttcaacagcagttctgtggagaatatgcctatgtaactgtttgcaaccagtgtggcagagagtctaagcttttgtcaaaattttatgagctggagttaaatatccaaggccacaaacagttaacagattgtatctcggaatttttgaaggaagaaaaattagaaggagacaatcgctatttttgcgagaactgtcaaagcaaacagaatgcaacaagaaagattcgacttcttagccttccttgcactctgaacttgcagctaatgcgttttgtctttgacaggcaaactggacataagaaaaagctgaatacctacattggcttctcagaaattttggatatggagccttatgtggaacataaaggtgggtcctacgtgtatgaactcagcgcagtcctcatacacagaggagtgagtgcttattctggccactacatcgcccacgtgaaagatccacagtctggtgaatggtataagtttaatgatgaagacatagaaaagatggaggggaagaaattacaactagggattgaggaagatctagaaccttctaagtctcagacacgtaaacccaagtgtggcaaaggaactcattgctctcgaaatgcatatatgttggtttatagactgcaaactcaagaaaagcccaacactactgttcaagttccagcctttcttcaagagctggtagatcgggataattccaaatttgaggagtggtgtattgaaatggctgagatgcgtaagcaaagtgtggataaaggaaaagcaaaacacgaagaggttaaggagctgtaccaaaggttacctgctggagctgagccctatgagtttgtctctctggaatggctgcaaaagtggttggatgaatcaacacctaccaaacctattgataatcacgcttgcctgtgttcccatgacaagcttcacccggataaaatatcaattatgaagaggatatctgaatatgcagctgacattttctatagtagatatggaggaggtccaagactaactgtgaaagccctgtgtaaggaatgtgtagtagaacgttgtcgcatattgcgtctgaagaaccaactaaatgaagattataaaactgttaataatctgctgaaagcagcagtaaagggcagcgatggattttgggtggggaagtcctccttgcggagttggcgccagctagctcttgaacagctggatgagcaagatggtgatgcagaacaaagcaacggaaagatgaacggtagcaccttaaataaagatgaatcaaaggaagaaagaaaagaagaggaggaattaaattttaatgaagatattctgtgtccacatgctgttttttttttttccaaatatatttttttaaactcaggtgagttatgcatatctgaaaatgaaagaaggcttgtttctaaagaggcttggagcaaactgcagcagtactttccaaaggctcctgagtttccaagttacaaagagtgctgttcacagtgcaagattttagaaagagaaggggaagaaaatgaagccttacataagatgattgcaaacgagcaaaagacttctctcccaaatttgttccaggataaaaacagaccgtgtctcagtaactggccagaggatacggatgtcctctacatcgtgtctcagttctttgtagaagagtggcggaaatttgttagaaagcctacaagatgcagccctgtgtcatcagttgggaacagtgctcttttgtgtccccacgggggcctcatgtttacatttgcttccatgaccaaagaagattctaaacttatagctctcatatggcccagtgagtggcaaatgatacaaaagctctttgttgtggatcatgtaattaaaatcacgagaattgaagtgggagatgtaaacccttcagaaacacagtatatttctgagcccaaactctgtccagaatgcagagaaggcttattgtgtcagcagcagagggacctgcgtgaatacactcaagccaccatctatgtccataaagttgtggataataaaaaggtgatgaaggattcggctccggaactgaatgtgagtagttctgaaacagaggaggacaaggaagaagctaaaccagatggagaaaaagatccagattttaatcaaagcaatggtggaacaaagcggcaaaagatatcccatcaaaattatatagcctatcaaaagcaagttattcgccgaagtatgcgacatagaaaagttcgtggtgagaaagcacttctcgtttctgctaatcagacgttaaaagaattgaaaattcagatcatgcatgcattttcagttgctccttttgaccagaatttgtcaattgatggaaagattttaagtgatgactgtgccaccctaggcacccttggcgtcattcctgaatctgtcattttattgaaggctgatgaaccaattgcagattatgctgcaatggatgatgtcatgcaagtttgtatgccagaagaagggtttaaaggtactggtcttcttggacattaatctttgaatacttgctgactgctaagaaatgaccagaggggaagaggagt

SEQ ID NO: 339058 - DNA, 765 bp, Artificial Sequence
  derived and/or modified sequence
atggacgaggcagatcgcagactgcttagaagatgtcggctgagactggtcgaagagttgcaggtggaccagctgtgggacgccctattgagccgagaactgttcaggccacacatgatcgaagacatccagagagctgggagcggatcgagaagggaccaggcaaggcagctcatcatcgatctggagactaggggatctcaagcactgccactatttataagttgtctggaggataccggtcaagatatgctcgcaagttttttgagaacaaatcggcaggcggcaaaactgagcaagccaacacttgagaatttaacacctgtggtgcttaggccagagatccgaaaacccgaagtactgagacccgaaactcctcggccagtcgatattggatctgggggcttcggcgacgtgggtgccctggagtcacttcgtggaaacgccgacctcgcatatatcctgagcatggagccgtgtggccactgcctcattatcaacaacgtcaatttttgccgggagagcggtctgagaacaagaaccggctccaacatcgactgtgagaagttaaggagaagattctctagtctgcacttcatggtcgaagttaaaggtgatttaactgcaaaagccagtcatttgcaattccccggcgcggtgtacggcacggacgggtgcccagtgtcagtggaaaaaatcgtaaacatttttaacggcacttcatgtccttccctgggcgggaagcccaagctcttttttatttag

SEQ ID NO: 339059 - DNA, 765 bp, Artificial Sequence
  derived and/or modified sequence
atggatgaggccgaccggcggctgctgcggcgctgccgcctgcggctggtggaggagctgcaggtggaccagctgtgggatgccctgctgagccgggagctgttccggccccacatgattgaggacatccagagagctggcagcggcagcagaagagaccaggcccggcagctgatcatcgacctggagacccggggcagccaggccctgcccctcttcatcagctgcctggaggacaccggccaggacatgctggccagcttcctgcggaccaaccggcaggccgccaagctgagcaagcccaccctggagaacctgacccctgtggtgctgcggcctgagatcaggaagccagaggtgctgcggcctgagacccccaggcctgtggacatcggcagcggcggctttggagatgtgggcgccctggagagcctgcggggaaatgctgacctggcctacatcctgtccatggagccctgtggccactgcctgatcatcaacaacgtgaacttctgccgggagagcggcctgcggaccaggacaggcagcaacatcgactgtgagaagctgcggcggcgcttcagcagcctgcacttcatggtggaggtgaagggggacctgacagccaaggccagccacctgcagtttcctggagctgtgtatggaacagatggctgccctgtgtctgtggagaagatcgtgaacatcttcaacggcaccagctgccccagcctgggcggcaagcccaagctgttcttcatctag

SEQ ID NO: 339060 - DNA, 765 bp, Artificial Sequence
  derived and/or modified sequence
atggacgaggccgaccggcggctgctgcggcggtgccggctgcggttagtcgaagagttgcaagtcgaccaactctgggatgctctcctgagtcgggagttatttaggccccacatgatagaagacatacagcgggccggaagcggttcgaggcgtgatcaggctcgtcagctgatcattgatctagaaacccgaggatcccaggccctgcccctcttcatatcttgccttgaggatactggccaggacatgctggcttcattcctgaggactaatcgacaggccgccaagctgagcaaaccaaccctcgaaaacctgactcccgtggtactgcgaccagaaatcaggaaacccgaagtcctgcggccagaaactccgcggcctgttgacatcggatccgggggctttggggatgtgggcgcccttgagtctttgcgtggcaacgccgatctcgcctacatcctctcaatggaaccctgcggccactgcttaataattaataacgtgaacttctgccgggaatctggactcaggaccaggacaggttctaacatagactgcgaaaaactaaggaggcgcttctcttcactgcactttatggtggaggtcaagggcgacctgactgcaaaggcgtcccatctgcaatttcctggggctgtgtatgggactgatgggtgcccagtgagcgttgaaaaaatagtgaacatattcaatgggacctcatgcccgagtttgggagggaaaccaaaactgtttttcatctag

SEQ ID NO: 339061 - DNA, 765 bp, Artificial Sequence
  derived and/or modified sequence
atggacgaagcagatcgcaggttactgagaagatgtcggttgaggctggttgaggaactgcaggtcgaccaactgtgggatgcactcctctcccgggagctgtttcgtccgcatatgattgaagacattcagcgcgctgggagcggtagcaggcgggaccaggcaaggcagctgatcatagacctggaaactcggggttctcaggctcttcccctttttatcagttgcctggaagacaccggccaggatatgctggcttcctttcttcgcaccaatcgacaggccgctaaacttagtaagccaaccttggaaaatttgactccggtggtactaagacccgagattaggaaacccgaagtgctgaggcccgagactcctcggccagtggacatcgggagcggcggttttggagacgtgggggctctcgagagcctgcgtggcaacgctgaccttgcatatatactctcaatggagccatgtgggcactgtctgatcatcaacaatgtgaatttttgcagagaatcaggactcagaacaaggacaggaagcaatatcgattgtgagaagcttaggcgcagattttcatcgctgcatttcatggtggaggtgaagggcgacctgaccgcaaaggccagccatctgcagtttcccggtgcggtatatggcacggacgggtgtccagtgtccgtagagaaaatcgtgaatatctttaatggcactagttgtccttccctgggcggaaaaccaaaattattcttcatttag

SEQ ID NO: 339062 - DNA, 781 bp, Artificial Sequence
  derived and/or modified sequence
ttagttggctactcgccatggacgaagcggatcggcggctcctgcggcggtgccggctgcggctggtggaagagctgcaggtggaccagctctgggacgccctgctgagccgcgagctgttcaggccccatatgatcgaggacatccagcgggcaggctctggatctcggcgggatcaggccaggcagctgatcatagatctggagactcgagggagtcaggctcttcctttgttcatctcctgcttagaggacacaggccaggacatgctggcttcgtttctgcgaactaacaggcaagcagcaaagttgtcgaagccaaccctagaaaaccttaccccagtggtgctcagaccagagattcgcaaaccagaggttctcagaccggaaacacccagaccagtggacattggttctggaggatttggtgatgtcggtgctcttgagagtttgaggggaaatgcagatttggcttacatcctgagcatggagccctgtggccactgcctcattatcaacaatgtgaacttctgccgtgagtccgggctccgcacccgcactggctccaacatcgactgtgagaagttgcggcgtcgcttctcctcgctgcatttcatggtggaggtgaagggcgacctgactgccaaggccagccacctgcagttcccaggggctgtctacggcacagatggatgccctgtgtcggtcgagaagattgtgaacatcttcaatgggaccagctgccccagcctgggagggaagcccaagctctttttcatcca

SEQ ID NO: 339063 - DNA, 765 bp, Artificial Sequence
  derived and/or modified sequence
atggacgaggccgacagaagactgctgagaagatgcagactgagactggtggaggagctgcaggtggaccagctgtgggacgccctgctgagcagagagctgttcagaccccacatgatcgaggacatccagagagccggcagcggcagcagaagagaccaggccagacagctgatcatcgacctggagaccagaggcagccaggccctgcccctgttcatcagctgcctggaggacaccggccaggacatgctggccagcttcctgagaaccaacagacaggccgccaagctgagcaagcccaccctggagaacctgacccccgtggtgctgagacccgagatcagaaagcccgaggtgctgagacccgagacccccagacccgtggacatcggcagcggcggcttcggcgacgtgggcgccctggagagcctgagaggcaacgccgacctggcctacatcctgagcatggagccctgcggccactgcctgatcatcaacaacgtgaacttctgcagagagagcggcctgagaaccagaaccggcagcaacatcgactgcgagaagctgagaagaagattcagcagcctgcacttcatggtggaggtgaagggcgacctgaccgccaaggccagccacctgcagttccccggcgccgtgtacggcaccgacggctgccccgtgagcgtggagaagatcgtgaacatcttcaacggcaccagctgccccagcctgggcggcaagcccaagctgttcttcatctag

SEQ ID NO: 339064 - DNA, 603 bp, Artificial Sequence
  derived and/or modified sequence
atggagccctgtggacactgcctcatcatcaataacgtaaatttctgcagggaatcgggcctgaggacaaggaccggcagtaatatcgattgtgaaaagcttcgccgcagattctcctccctacattttatggtggaggtgaagggcgatctgactgcaaagaagatggtactggcactgctcgaactggcccagcaggaccatggagctctcgactgctgcgtggtggtcatactctcccacggctgccaggccagccacctgcagtttccgggagccgtgtatggcacggacggctgtccagtttctgtcgagaaaatcgtaaacatattcaacggaacttcgtgtccgtctttaggggggaaacctaagctctttttcatccaggcgtgtgggggtggctttgtgtcatggcgtgatcctaagtccgggagttggtacgttgagaccttggacgatatcttcgaacaatgggcacattcagaggatctccagagtctgctgttaagggtggccaacgccgtttctgtcaaaggaatctacaaacagatgccaggttgctttaactttctccgaaaaaagttgtttttcaaaacttcctag

SEQ ID NO: 339065 - DNA, 1002 bp, Artificial Sequence
  derived and/or modified sequence
atgttggcctcatttctgcgaacaaacagacaggccgcaaagctgagcaaacccacactcgagaatctgaccccagtcgtcctgagaccggaaatacgcaaacccgaggtgttgaggccggagacaccgagacccgtggacattggcagtggggggttcggggatgtcggcgccctggagtccctgcgggggaatgcagacctcgcatacattttaagcatggagccctgtggccactgtcttatcatcaataacgtaaatttttgccgagagtctgggctgcgaactagaacgggtagcaacattgactgcgaaaaattgaggcgtcggtttagtagtctgcactttatggtggaggtcaagggagatctgaccgccaaaaaaatggtgctcgcgttgttagagctcgcccagcaggaccatggggcactagactgttgtgtggtcgtgattctgtcccatggttgccaggcaagtcacttgcagtttccaggtgcggtgtacggaaccgatggatgccctgtaagtgtagagaagattgtaaatatattcaacgggacatcatgcccttcactagggggcaaacccaaactctttttcatacaggcctgtggcggagagcagaaagaccatggctttgaggtggccagtacttcacctgaggacgaatccccaggatctaatcctgagcctgatgcgaccccgttccaggagggtctacggactttcgatcagctggacgcgatttcatccctgcccacccctagcgacatctttgtcagttattctacttttccaggcttcgtatcctggagagaccctaagtctgggagctggtacgtggaaacattggacgacatctttgagcagtgggcgcactctgaagacctccagagccttctcctacgggtggccaatgccgtatcagtgaagggtatatataagcaaatgcctgggtgctttaacttcctgaggaagaagctgttctttaagactagctag

SEQ ID NO: 339066 - DNA, 801 bp, Artificial Sequence
  derived and/or modified sequence
atgctggcgtcttttttgaggaccaaccgccaagccgcaaaattatctaaaccgaccttagaaaacttgaccccagtggttctgcggccagagataaggaaacccgaagtgctccggcctgagacgccacgcccagtcgacataggaagtggcggcttcggggatgtgggcgcactggagagcctccgcggcaatgcagacctcgcttacattctgtccatggagccatgtggtcactgtttgatcattaataatgtcaatttttgcagggagtcagggttgcggacccggacggggagcaacatcgactgtgagaagttgcggcggcgattttcgagcctgcactttatggtggaagtcaaaggcgacctcacagccaaaaaaatggtgttggccctcctagaactcgcgcagcaggaccatggtgccctggactgttgtgtcgtcgtgattctttcccatggctgccaggcttctcatctgcagttcccaggcgctgtgtatggaacagacggctgcccagtgagcgtagagaaaattgtgaacatctttaacggcacttcctgtccttccctgggcggcaagcccaagctctttttcatccaggcctgcggaggagaacagaaggaccacggcttcgaggtggcctctacttcacctgaagacgagtcccctgggtctaaccccgaaccagacgcgactccattccaggaagggctgcggacttttgaccagctggatgccatatcgagcctgcctacacccagcgatatttttgtctcctattctactttcccatag

SEQ ID NO: 339067 - DNA, 603 bp, Artificial Sequence
  derived and/or modified sequence
atggagccctgtggccactgcctgatcatcaacaacgtgaacttctgccgggagagcggcctgcggaccaggacaggcagcaacatcgactgtgagaagctgcggcggcgcttcagcagcctgcacttcatggtggaggtgaagggggacctgacagccaagaagatggtgctggccctgctggagctggcccagcaggaccacggggccctggactgctgcgtggtggtgatcctgagccacggctgccaggccagccacctgcagtttcctggagctgtgtatggaacagatggctgccctgtgtctgtggagaagatcgtgaacatcttcaacggcaccagctgccccagcctgggcggcaagcccaagctgttcttcatccaggcctgtggcggcggctttgtgtcctggagggaccccaagagcggctcctggtacgtggagaccctggatgacatctttgagcagtgggcccacagcgaggacctgcagagcctgctgctgcgggtggccaatgctgtgtctgtgaagggcatctacaagcagatgcctggctgcttcaacttcctgaggaagaagctgttcttcaagaccagctag

SEQ ID NO: 339068 - DNA, 1002 bp, Artificial Sequence
  derived and/or modified sequence
atgctggccagcttcctgcggaccaaccggcaggccgccaagctgagcaagcccaccctggagaacctgacccctgtggtgctgcggcctgagatcaggaagccagaggtgctgcggcctgagacccccaggcctgtggacatcggcagcggcggctttggagatgtgggcgccctggagagcctgcggggaaatgctgacctggcctacatcctgtccatggagccctgtggccactgcctgatcatcaacaacgtgaacttctgccgggagagcggcctgcggaccaggacaggcagcaacatcgactgtgagaagctgcggcggcgcttcagcagcctgcacttcatggtggaggtgaagggggacctgacagccaagaagatggtgctggccctgctggagctggcccagcaggaccatggagccctggactgctgcgtggtggtgatcctgagccacggctgccaggccagccacctgcagtttcctggagctgtgtatggaacagatggctgccctgtgtctgtggagaagatcgtgaacatcttcaacggcaccagctgccccagcctgggcggcaagcccaagctgttcttcatccaggcctgtggcggggagcagaaggaccacggctttgaggtggccagcaccagcccagaagatgagagccctggcagcaaccctgagccagatgccacccccttccaggagggcctgcggacctttgaccagctggatgccatcagcagcctgcccacccccagcgacatctttgtgtcctacagcaccttccctggctttgtgtcctggagggaccccaagagcggctcctggtacgtggagaccctggatgacatctttgagcagtgggcccacagcgaggacctgcagagcctgctgctgcgggtggccaatgctgtgtctgtgaagggcatctacaagcagatgcctggctgcttcaacttcctgaggaagaagctgttcttcaagaccagctag

SEQ ID NO: 339069 - DNA, 801 bp, Artificial Sequence
  derived and/or modified sequence
atgctggccagcttcctgcggaccaaccggcaggccgccaagctgagcaagcccaccctggagaacctgacccctgtggtgctgcggcctgagatcaggaagccagaggtgctgcggcctgagacccccaggcctgtggacatcggcagcggcggctttggagatgtgggcgccctggagagcctgcggggaaatgctgacctggcctacatcctgtccatggagccctgtggccactgcctgatcatcaacaacgtgaacttctgccgggagagcggcctgcggaccaggacaggcagcaacatcgactgtgagaagctgcggcggcgcttcagcagcctgcacttcatggtggaggtgaagggggacctgacagccaagaagatggtgctggccctgctggagctggcccagcaggaccatggagccctggactgctgcgtggtggtgatcctgagccacggctgccaggccagccacctgcagtttcctggagctgtgtatggaacagatggctgccctgtgtctgtggagaagatcgtgaacatcttcaacggcaccagctgccccagcctgggcggcaagcccaagctgttcttcatccaggcctgtggcggggagcagaaggaccacggctttgaggtggccagcaccagcccagaagatgagagccctggcagcaaccctgagccagatgccacccccttccaggagggcctgcggacctttgaccagctggatgccatcagcagcctgcccacccccagcgacatctttgtgtcctacagcaccttcccctag

SEQ ID NO: 339070 - DNA, 603 bp, Artificial Sequence
  derived and/or modified sequence
atggagccctgcggccactgcctgatcatcaacaacgtgaacttctgtcgcgagagcggtctccgtacgcgcactggcagtaacatcgactgcgagaaattgcgtcgcaggttttcaagcttacattttatggtggaggtgaagggggacttaacggccaagaagatggtgcttgctctgctggaactcgcccaacaggatcatggcgctctcgattgctgtgtcgttgtgattctgagccacggctgccaggcttcacacctgcagtttcctggtgctgtgtatgggaccgacggctgtcccgtgagcgtagaaaaaatcgtgaacatttttaatgggacaagctgcccttctctgggagggaaacctaaacttttcttcatccaggcgtgcggcggcggatttgtctcctggcgggatcccaaaagtggcagctggtacgtggaaacactcgatgatattttcgaacaatgggcccacagtgaggacttgcaaagcctgctgcttcgtgtggccaatgcagtgagtgtgaaaggcatatacaagcagatgcccggctgttttaacttcctgcgcaaaaagctgttcttcaaaacatcttag

SEQ ID NO: 339071 - DNA, 1002 bp, Artificial Sequence
  derived and/or modified sequence
atgctggccagcttcctgcggaccaaccggcaggccgccaagctgagcaaacctactttagaaaatctgactccggttgtgcttcgtccagaaattcgcaagccagaagtgctgcggccagagacacccaggcctgtggatattggttcggggggcttcggcgatgtgggcgcacttgaatccctacggggcaacgctgacctggcctacatcttgtcaatggagccgtgcggccattgtctgatcatcaacaacgtgaacttttgccgggaaagtggcctcaggacacggaccggaagtaacattgattgcgagaagctgagacgacgattctcatctctgcatttcatggtggaagtcaagggcgatctgaccgccaagaaaatggtcctcgcactcctcgaactggcacaacaagaccatggtgcactggattgctgcgtagtggtgatactctcacatgggtgccaggcctcccatttacagtttccaggggccgtgtatggcaccgatggatgtcccgtgagcgtggagaagatcgttaacatttttaacggtacaagctgcccctccctgggcggcaagccaaagcttttctttatacaggcatgtggtggagaacagaaggatcatggatttgaagttgcaagcacatcgccggaagatgagtcaccaggaagcaaccctgagcccgacgctacacctttccaggagggcttaaggactttcgatcaactggacgcgatcagctccctccccacaccttcagacatctttgtgtcctactccacgttccctgggttcgtgagctggagagaccctaagagtggaagctggtatgtagagacacttgacgatatattcgaacagtgggcccattcagaggacctacagagtctgcttctgcgggtcgccaatgccgttagcgtgaagggcatctacaaacaaatgcctggctgtttcaatttcctcaggaaaaaactgttctttaagaccagctag

SEQ ID NO: 339072 - DNA, 801 bp, Artificial Sequence
  derived and/or modified sequence
atgctggccagcttcctgcggaccaaccggcaggccgccaagctgagcaaacctactttggagaacctcacaccagttgtgctgcgaccggagatccgcaaaccagaggtcctgagacctgagacgccccggccagtcgatataggctctggtggctttggggatgttggggctctcgagagtcttcggggcaacgcagatcttgcatacattttgagtatggagccatgcggccactgcttgattatcaataacgtaaacttttgtagggaatcgggcctgaggaccaggaccgggtccaacattgactgtgagaaactgcggagaaggttttcttcattacacttcatggtggaagtaaagggagatctgacagctaaaaagatggtgctcgcactgcttgagctggcacaacaggatcatggagctcttgactgctgcgtggttgtcattctgagccacggatgtcaggccagccatttacagttcccaggggcggtgtatggcactgatggctgtccagtctctgtcgagaaaattgtgaacattttcaacggcacttcatgcccatcgctggggggtaaacctaagctcttttttatccaggcttgtgggggtgagcagaaagaccacggcttcgaggtcgcttctacttccccggaggacgaaagccccggctcaaatcctgagcccgacgcgacccccttccaggagggtctgcggacattcgatcaattggatgcgatctcttctctgccgactccctcggatatttttgtctcatatagcacatttccctag

SEQ ID NO: 339073 - DNA, 603 bp, Artificial Sequence
  derived and/or modified sequence
atggagccttgcggccattgtctgatcatcaacaacgtgaatttctgtcgggaaagcggactccgcaccaggactggctccaacatcgattgtgagaagctgaggaggaggttcagttcactgcattttatggtcgaagtaaagggcgaccttaccgccaaaaaaatggtccttgctcttttggaactggctcagcaggatcacggcgctctggattgttgcgtggtggtcatcctgtcgcacgggtgtcaggcaagccaccttcagtttccaggggctgtgtacggaaccgacggttgtcctgtctcagttgagaagattgtgaacatcttcaatggtacttcatgcccctcactgggtggcaaaccaaaactgttcttcatccaggcctgtgggggtgggtttgtgagctggcgagacccaaagtccggctcttggtacgtggagactcttgatgatattttcgagcagtgggctcattcggaggacctccagagcctgctgttgcgggtagctaatgctgtaagcgtcaaaggcatttataagcagatgccagggtgctttaatttccttaggaaaaagcttttcttcaagacttcttag

SEQ ID NO: 339074 - DNA, 1002 bp, Artificial Sequence
  derived and/or modified sequence
atgcttgcctcattcctacgcactaaccggcaggctgccaagctcagtaaacctaccctcgaaaacttaacacccgtcgtcctccgcccagaaatcagaaagcctgaagttctgagacccgagactcctcggcctgtggacatcgggtccggaggattcggagacgttggcgctctagagtccttgagggggaacgcggacctagcatacatactgagcatggaaccttgcgggcactgtctgatcattaataacgtcaacttttgccgggagtctgggttgagaacaagaacagggagcaacattgactgtgaaaagctgagaagacggttctcaagccttcacttcatggtcgaggtgaagggcgacctcacagctaaaaagatggttctggctctactggaattggctcagcaagatcacggagcactggactgctgtgtagtcgtgatcctgagccatggttgccaagccagtcacttgcagtttccgggtgccgtgtacgggactgacggctgccccgtttcagtggagaagatcgtcaatatttttaatgggaccagctgtcctagccttggagggaaaccaaagctgttcttcatccaggcatgtggcggagaacagaaagatcatggattcgaggtagcctcaacctcccctgaagatgaaagtccagggtcaaaccctgagccggatgccaccccttttcaggagggtctgcggacgtttgaccagctcgatgccatttcttcactaccgacaccctccgacatattcgtctcttactcaacgtttccaggctttgtgtcttggcgcgaccctaagtcagggagctggtatgtggagactttagacgatatttttgaacagtgggctcattcggaggacctccagtccctattactacgtgtagcaaacgccgtgagcgttaaggggatttataaacagatgcctggatgcttcaatttcttaaggaagaagcttttctttaaaacgtcctag

SEQ ID NO: 339075 - DNA, 801 bp, Artificial Sequence
  derived and/or modified sequence
atgctcgctagcttcctgcggacaaacagacaggccgctaaactttctaaaccaacactggagaacctgacacccgtggttctgaggcccgaaattcgcaaaccagaggtattgcggccagagactccaaggcccgtggacataggaagcggtggatttggcgatgttggagctttggagtctcttcgtggcaatgcagacctcgcttatatcctcagtatggagccttgcggtcactgcctaatcatcaacaacgttaatttctgccgggagtctggattacgcactcgcactggtagtaatatcgattgcgagaaactcaggaggaggttctcatcactgcactttatggtagaggtgaaaggcgacctgacggctaagaaaatggtcttggccttgcttgaactggcgcagcaggatcacggggcactcgactgttgcgtggtcgtcattctgagtcacggctgccaggcgagtcatctgcaattcccgggagccgtttatggcactgatggttgcccagtcagtgtggaaaaaatagtgaacattttcaatggaacttcctgtccaagcctgggcggaaagcccaagttgttcttcattcaggcatgtggaggggagcagaaagatcatggattcgaggttgcctcaacatccccagaagatgagtctcccggatcgaaccccgaacccgacgcaactccatttcaggagggtcttagaacgttcgatcaacttgatgctattagcagcctgcccacccctagtgatattttcgtgagctattcaacctttccttag

SEQ ID NO: 339076 - DNA, 603 bp, Artificial Sequence
  derived and/or modified sequence
atggagccctgcggccactgcctgatcatcaacaacgtgaacttctgcagagagagcggcctgagaaccagaaccggcagcaacatcgactgcgagaagctgagaagaagattcagcagcctgcacttcatggtggaggtgaagggcgacctgaccgccaagaagatggtgctggccctgctggagctggcccagcaggaccacggcgccctggactgctgcgtggtggtgatcctgagccacggctgccaggccagccacctgcagttccccggcgccgtgtacggcaccgacggctgccccgtgagcgtggagaagatcgtgaacatcttcaacggcaccagctgccccagcctgggcggcaagcccaagctgttcttcatccaggcctgcggcggcggcttcgtgagctggagagaccccaagagcggcagctggtacgtggagaccctggacgacatcttcgagcagtgggcccacagcgaggacctgcagagcctgctgctgagagtggccaacgccgtgagcgtgaagggcatctacaagcagatgcccggctgcttcaacttcctgagaaagaagctgttcttcaagaccagctag

SEQ ID NO: 339077 - DNA, 1002 bp, Artificial Sequence
  derived and/or modified sequence
atgctggccagcttcctgagaaccaacagacaggccgccaagctgagcaagcccaccctggagaacctgacccccgtggtgctgagacccgagatcagaaagcccgaggtgctgagacccgagacccccagacccgtggacatcggcagcggcggcttcggcgacgtgggcgccctggagagcctgagaggcaacgccgacctggcctacatcctgagcatggagccctgcggccactgcctgatcatcaacaacgtgaacttctgcagagagagcggcctgagaaccagaaccggcagcaacatcgactgcgagaagctgagaagaagattcagcagcctgcacttcatggtggaggtgaagggcgacctgaccgccaagaagatggtgctggccctgctggagctggcccagcaggaccacggcgccctggactgctgcgtggtggtgatcctgagccacggctgccaggccagccacctgcagttccccggcgccgtgtacggcaccgacggctgccccgtgagcgtggagaagatcgtgaacatcttcaacggcaccagctgccccagcctgggcggcaagcccaagctgttcttcatccaggcctgcggcggcgagcagaaggaccacggcttcgaggtggccagcaccagccccgaggacgagagccccggcagcaaccccgagcccgacgccacccccttccaggagggcctgagaaccttcgaccagctggacgccatcagcagcctgcccacccccagcgacatcttcgtgagctacagcaccttccccggcttcgtgagctggagagaccccaagagcggcagctggtacgtggagaccctggacgacatcttcgagcagtgggcccacagcgaggacctgcagagcctgctgctgagagtggccaacgccgtgagcgtgaagggcatctacaagcagatgcccggctgcttcaacttcctgagaaagaagctgttcttcaagaccagctag

SEQ ID NO: 339078 - DNA, 801 bp, Artificial Sequence
  derived and/or modified sequence
atgctggccagcttcctgagaaccaacagacaggccgccaagctgagcaagcccaccctggagaacctgacccccgtggtgctgagacccgagatcagaaagcccgaggtgctgagacccgagacccccagacccgtggacatcggcagcggcggcttcggcgacgtgggcgccctggagagcctgagaggcaacgccgacctggcctacatcctgagcatggagccctgcggccactgcctgatcatcaacaacgtgaacttctgcagagagagcggcctgagaaccagaaccggcagcaacatcgactgcgagaagctgagaagaagattcagcagcctgcacttcatggtggaggtgaagggcgacctgaccgccaagaagatggtgctggccctgctggagctggcccagcaggaccacggcgccctggactgctgcgtggtggtgatcctgagccacggctgccaggccagccacctgcagttccccggcgccgtgtacggcaccgacggctgccccgtgagcgtggagaagatcgtgaacatcttcaacggcaccagctgccccagcctgggcggcaagcccaagctgttcttcatccaggcctgcggcggcgagcagaaggaccacggcttcgaggtggccagcaccagccccgaggacgagagccccggcagcaaccccgagcccgacgccacccccttccaggagggcctgagaaccttcgaccagctggacgccatcagcagcctgcccacccccagcgacatcttcgtgagctacagcaccttcccctag

SEQ ID NO: 339079 - protein, 421 aa, Artificial Sequence
  derived and/or modified sequence
MDEADRRLLRRCRLRLVEELQVDQLWDALLSRELFRPHMIEDIQRAGSGSRRDQARQLIIDLETRGSQALPLFISCLEDTGQDMLASFLRTNRQAAKLSKPTLENLTPVVLRPEIRKPEVLRPETPRPVDIGSGGFGDVGALESLRGNADLAYILSMEPCGHCLIINNVNFCRESGLRTRTGSNIDCEKLRRRFSSLHFMVEVKGDLTAKKMVLALLELAQQDHGALDCCVVVILSHGCQASHLQFPGAVYGTDGCPVSVEKIVNIFNGTSCPSLGGKPKLFFIQACGGEQKDHGFEVASTSPEDESPGSNPEPDATPFQEGLRTFDQLDAISSLPTPSDIFVSYSTFPGFVSWRDPKSGSWYVETLDDIFEQWAHSEDLQSLLLRVSAAFLCKGEGRLLRGSVSSWGWGFGVSRAGPNQG

SEQ ID NO: 339080 - DNA, 1266 bp, Artificial Sequence
  derived and/or modified sequence
atggatgaagccgaccgccgcctcttgcgcaggtgccgcctcaggttggtggaggagctacaggtcgaccagctctgggacgccctcctctcgcgtgagctcttcagaccgcatatgattgaggacattcaacgggctggcagcggcagccggagagatcaagctaggcagctgattattgacttggaaactagaggctcacaggcactccccctgttcatcagttgcctcgaagacacaggccaggatatgttagcttcctttctgcggacaaatcggcaggctgcaaagctgtcaaagccaacgttggaaaatcttacccccgtggtgctgcggccagagatcagaaagcccgaagtcctacggcccgaaacgcccaggcctgtggatattgggtccggaggatttggagatgtgggcgccctggaaagccttagaggaaacgccgacctggcatatattctttccatggagccctgcggccactgtctcattatcaacaatgtcaatttctgcagggagtctggcctacgaacaaggaccggcagtaacatcgattgtgagaaattacgccgcagattctcctcactacacttcatggtagaagtgaagggcgacctgacagcaaaaaaaatggtgctcgctctgctggaattagcacagcaagaccacggggctcttgattgctgcgtagttgtgattctgagccatggttgccaggcctctcacctgcagtttcctggagctgtttatgggactgacgggtgccctgtaagcgtagaaaagatagtgaatatcttcaacggtaccagctgtcccagccttggaggcaagcctaagcttttttttatccaggcatgtggcggtgagcagaaagaccatggattcgaagtcgccagcacttctcccgaagacgagagtcccggatcaaaccctgagcccgatgctactcctttccaggagggcttgcgaaccttcgaccaactagacgccatttcttctctacctacaccctccgacatattcgtgagctactcaactttcccaggcttcgtcagttggagggatccgaagtctggctcatggtatgtggagactctggacgatatcttcgagcagtgggcccactcggaagacctgcaatcgctgctccttcgtgtgagtgccgccttcctctgtaaaggcgaaggacgtctattaagggggtcagtctctagctggggctggggcttcggtgttagcagagccgggcccaatcagggatag

SEQ ID NO: 339081 - DNA, 1266 bp, Artificial Sequence
  derived and/or modified sequence
atggatgaggccgaccggcggctgctgcggcgctgccgcctgcggctggtggaggagctgcaggtggaccagctgtgggatgccctgctgagccgggagctgttccggccccacatgattgaggacatccagagagctggcagcggcagcagaagagaccaggcccggcagctgatcatcgacctggagacccggggcagccaggccctgcccctcttcatcagctgcctggaggacaccggccaggacatgctggccagcttcctgcggaccaaccggcaggccgccaagctgagcaagcccaccctggagaacctgacccctgtggtgctgcggcctgagatcaggaagccagaggtgctgcggcctgagacccccaggcctgtggacatcggcagcggcggctttggagatgtgggcgccctggagagcctgcggggaaatgctgacctggcctacatcctgtccatggagccctgtggccactgcctgatcatcaacaacgtgaacttctgccgggagagcggcctgcggaccaggacaggcagcaacatcgactgtgagaagctgcggcggcgcttcagcagcctgcacttcatggtggaggtgaagggggacctgacagccaagaagatggtgctggccctgctggagctggcccagcaggaccacggggccctggactgctgcgtggtggtgatcctgagccacggctgccaggccagccacctgcagtttcctggagctgtgtatggaacagatggctgccctgtgtctgtggagaagatcgtgaacatcttcaacggcaccagctgccccagcctgggcggcaagcccaagctgttcttcatccaggcctgtggcggggagcagaaggaccacggctttgaggtggccagcaccagcccagaagatgagagccctggcagcaaccctgagccagatgccacccccttccaggagggcctgcggacctttgaccagctggatgccatcagcagcctgcccacccccagcgacatctttgtgtcctacagcaccttccctggctttgtgtcctggagggaccccaagagcggctcctggtacgtggagaccctggatgacatctttgagcagtgggcccacagcgaggacctgcagagcctgctgctgcgggtgtctgctgccttcctgtgcaagggggagggccgcctgctgcggggctctgtgtcctcctggggctggggctttggagtgtcccgggccggccccaaccagggctag

SEQ ID NO: 339082 - DNA, 1266 bp, Artificial Sequence
  derived and/or modified sequence
atggacgaggccgaccggcggctgctgcggcggtgccggctgcggctggtcgaagagctgcaggtggaccaactctgggacgccctgcttagcagagaactgttccgaccacacatgatagaagacatccagagagctggatcaggctccaggcgggaccaggccagacagttgatcattgatctggagacccgcggcagccaggcgctgccattattcatttcttgtctggaggatacaggacaggatatgctggcctccttcctgcgcacgaaccgccaagccgcaaaactgtctaagcctaccctcgagaatctgacccccgttgttcttcggccggaaatccggaaacctgaagttctgcggcctgaaacacctcggccagtggatatcgggagcgggggatttggtgatgtgggggcgctggaaagcctgaggggaaacgccgacctcgcatatattttgagtatggaaccgtgcgggcactgtctgatcatcaacaatgttaacttttgcagagagtctggactaagaacgaggacagggtcaaatatcgattgcgaaaagttgcgaagaaggtttagcagtctgcattttatggtagaagtgaaaggggacctgacggccaagaaaatggtgcttgcattgctggaactcgcccaacaagatcacggcgcacttgactgctgcgtagttgtgatcctcagtcacggctgccaggcaagtcaccttcagtttcctggcgccgtgtatggaacagacggctgcccagtcagtgtagagaaaattgtgaacattttcaacgggacctcgtgcccctccctcgggggtaagccaaaactattttttattcaggcatgcgggggtgagcagaaggatcatggctttgaggtggcctcaacctcacccgaggatgagagccctggctccaacccagagcctgatgccaccccattccaggaaggtctccgaaccttcgatcagttagatgcaatttcctcactgcctactccctccgacatctttgtcagttactcgaccttccccgggtttgtctcatggcgcgaccctaagtctggaagctggtacgtagaaacactggatgacatattcgagcaatgggcacattcggaggatctccaatctctgctccttagagtgagcgctgcgtttctgtgtaaaggagagggaaggcttctgaggggctcagtgtcgtcttggggatggggttttggtgtaagccgggctggacctaatcagggctag

SEQ ID NO: 339083 - DNA, 1266 bp, Artificial Sequence
  derived and/or modified sequence
atggatgaagcagaccgaagactgcttcgcagatgtcgtttacgtctagtggaggaactgcaggtggaccagctgtgggacgctctactatctcgcgagctgtttaggccacacatgatagaggatatccagagagctgggtctggcagtaggcgagaccaggcgaggcagctcatcatcgacctcgagactcgtggatcacaggccctgccactgttcatctcttgtctggaggatactggacaggacatgctggcctcatttttaaggaccaaccggcaggccgcaaagctcagcaaaccgactctcgaaaatctgacccccgtcgtgctgcgacctgagatccgaaaaccggaggtactaaggcccgagactccccgtcccgttgatatcggatccgggggattcggcgacgttggggctctggaatctctcagaggaaacgccgatctcgcctatatacttagcatggaaccgtgcggccattgtctgattattaataacgttaatttttgccgtgaaagcgggctgcgcacccggaccgggtcgaacatcgattgcgagaaacttaggagaagattctcgtctctgcatttcatggttgaggtgaagggggatctgactgctaaaaagatggtgctggccctgctagagctggcccagcaagaccacggcgcactggattgctgtgtggtggtaatcctgtcacacggatgtcaggcctcccatctgcagtttccaggtgccgtctatggcactgatggttgtccagttagcgttgagaaaatcgtaaacatttttaacggaaccagctgtcccagcctcggcggtaaaccaaagttatttttcatacaggcatgcgggggtgaacagaaggaccatggcttcgaagttgcctctaccagcccggaagacgagagtccgggatctaaccctgaacctgatgctactccatttcaagaaggtctgaggaccttcgaccaacttgatgccatctctagtctcccaacaccttccgacatatttgtttcttatagcacattcccgggttttgtgagctggcgggatcccaagagtggatcctggtatgtggaaaccctggacgatatctttgagcagtgggcgcattctgaggatctccagtcactgttgctgagagtgtctgccgcatttctgtgtaagggtgaaggacggcttcttagaggaagcgtgagctcatggggatggggcttcggtgtgtcccgcgctggacccaaccaggggtag

SEQ ID NO: 339084 - DNA, 4463 bp, Artificial Sequence
  derived and/or modified sequence
ttggccctgggggcggggcgaggcgcagaggtgcgtcctgagggcggggcggtgacgcaagagcgactcctgggggcggggcgaggccttggagatgcgtccggaggcggtggggagcgaagactgacccggggccgtgacgcgggggcaggccctggggcgggggcgggtcctggggactggggcgggcggccgaggcccggaagcggactgaggcggcctggagtcttagttggctactcgccatggacgaagcggatcggcggctcctgcggcggtgccggctgcggctggtggaagagctgcaggtggaccagctctgggacgccctgctgagccgcgagctgttcaggccccatatgatcgaggacatccagcgggcaggctctggatctcggcgggatcaggccaggcagctgatcatagatctggagactcgagggagtcaggctcttcctttgttcatctcctgcttagaggacacaggccaggacatgctggcttcgtttctgcgaactaacaggcaagcagcaaagttgtcgaagccaaccctagaaaaccttaccccagtggtgctcagaccagagattcgcaaaccagaggttctcagaccggaaacacccagaccagtggacattggttctggaggatttggtgatgtcggtgctcttgagagtttgaggggaaatgcagatttggcttacatcctgagcatggagccctgtggccactgcctcattatcaacaatgtgaacttctgccgtgagtccgggctccgcacccgcactggctccaacatcgactgtgagaagttgcggcgtcgcttctcctcgctgcatttcatggtggaggtgaagggcgacctgactgccaagaaaatggtgctggctttgctggagctggcgcagcaggaccacggtgctctggactgctgcgtggtggtcattctctctcacggctgtcaggccagccacctgcagttcccaggggctgtctacggcacagatggatgccctgtgtcggtcgagaagattgtgaacatcttcaatgggaccagctgccccagcctgggagggaagcccaagctctttttcatccaggcctgtggtggggagcagaaagaccatgggtttgaggtggcctccacttcccctgaagacgagtcccctggcagtaaccccgagccagatgccaccccgttccaggaaggtttgaggaccttcgaccagctggacgccatatctagtttgcccacacccagtgacatctttgtgtcctactctactttcccaggttttgtttcctggagggaccccaagagtggctcctggtacgttgagaccctggacgacatctttgagcagtgggctcactctgaagacctgcagtccctcctgcttagggtgagtgctgccttcctctgcaaaggagaggggaggctgctgaggggcagcgtgtcctcctggggctggggatttggggtgagcagggcaggcccaaaccaagggtaaaaggtagtagactcctgcctctgagccttggagtcggcacttttgtgtctctttatgagaggcatcctgcctgtggtgacgtttgccctttattcaaagagttgccttccctgtctcctccaaggtccccaggttgacacctcccgctcctccactgatggagctggtcctcagtgccagcgcaggatggctctgtccagaccctgaaggcgggtcatgggcccctccctatatcctgtgggcatcatgtagtcttctactcttgaccctcaagaattgtgaacccctccttgtacatcgccttctcaggaggccccagtgaggaaacagatagggaagggtggcctgataggcccagtcctactccatagaaacccgactcagagcagttgcttcctctgagggtcctgtggccttgtggctgccttgggaggcagcatgtatgggccccagctgctctgctcaggtattcatgccacgagaaggggctgcgaggctggggccactcctggctccttgcaaatatttcagtctgatttgaactttatgaatttggaaattttgaattttgagttttttaaaggtaaagttgaggtgcgtattctttaagccctcctgctcaaagaggctgcagtttgagctgtttttaaggtgcgggttgagtggacattccccccagcccctcttgaattcttccttcagtccagagaactgaactcacagagctctccatggtcatgtcttacaggtcgctaatgctgtttcggtgaaagggatttataaacagatgcctggttgctttaatttcctccggaaaaaacttttctttaaaacatcataaggccagggcccctcaccctgccttatcttgcaccccaaagctttcctgccccaggcctgaaagaggctgaggcctggactttcctgcaactcaaggactttgcagccggcacagggtctgctctttctctgccagtgacagacaggctcttagcagcttccagattgacgacaagtgctgaacagtggaggaagagggacagatgaatgccgtggattgcacgtggcctcttgagcagtggctggtccagggctagtgacttgtgtcccatgatccctgtgttgtctctagagcagggattaacctctgcactactgacatgtggggccaggtcaccctttgctgtgaggctgtcctgtacattgtgggatgttcagcactgtcccttgcctcaatgccagtaacgcgtcttcctgagtggtgccaaacaaaaaggttctcaggtgttgccaaatatgtcctggggtataaaactttcctcgcctgacaaccactggtctgtagggatttttggctacacacaaaccagtatcgctcatagatcagcaaaccggggcctactagagtctgaacagctgtaatctatgaattctaagtgaaattttaaaaattgttaatttttcctatattgcattaattttaaaaaataaatctgaggcaaatatggactctcttttgcctatttcttccctcattttgctccaactctttcttcttccttacaaaagagacttttgcttttttcgaaacatttccccatgtttttctggggtctcgctatgttgcccaggctggtctcaaactcctgggctcaagtgaccctcccaagtagctcttactacaggcgtgcaccattgcacccagccccatttattcatgtcttatttcacttgatccttatcccatcccaggaaggcaacaagggtgagaaccctgtgctcagggaggttaggtctcttgtccaagggaaaacgattatccagagaagagacctggccagaacctgggtcccctgagtcctagccatgcttcccatgtgccttacttgctgaagcacccccggactgcagtgtgaacgtgctgtgcaatagtgacacgctgggcttccccacaaggctccaccctgaggtcttttaagctgtccttatgccagcctatttcttgttttttgggcctttttttttggagatagggtctcactctgtcgcccaggctggagtgcaatgacgcaatcttggcttattgcagtctcgacctcctgggctcaagagatccttccacctcagccacctgagtagcttggactacaggtgtgcaccacctctcccagttaatttttgtatttttagtagagacagagttatgccatgttactcaggctggtcttgaactcctggactcaagcgatcagcctgccttagcctcccaaagtgcaggggttacaggcttgagccattgcgcctgacctatttctggttcttagggccctggatgttaggatggatttctgaattaataataataataaaaccctcatcaagatgtgatttgcatagttgtcactttatataatattattttccttctgtgacctttccaagtctgaaacagtcccagggacttcttttggttagttatttgcaatcacctgcaggacacacacacaagaaaattgtcaggttcacgtaaccacagagctgtgcgtggcagtttcctgtctctgtcctcctgggctaagctactcaagtgagtcacaggcagcccacactacagtagctcctgcctgaggagttcagatgatgtttcggagaaaaagatgcaatcacagcttttcattgacctgttagggtcttcctgtaaagggggtcttagccaggagtcctgtgtgggcttcaggtcagggggccttcgaaccccctaaaaattatatgccaaatgtgcggatggcatatttttagatttcatttgtttctcatcaaaactgctgtttgcaaggcagttatgcactgtggttggggctataactgtttccagaggctgttgatcagtatctgttaaactttttttttttttttttgagacagtcttgctctgttgcccagacgagtaca

SEQ ID NO: 339085 - DNA, 1266 bp, Artificial Sequence
  derived and/or modified sequence
atggacgaggccgacagaagactgctgagaagatgcagactgagactggtggaggagctgcaggtggaccagctgtgggacgccctgctgagcagagagctgttcagaccccacatgatcgaggacatccagagagccggcagcggcagcagaagagaccaggccagacagctgatcatcgacctggagaccagaggcagccaggccctgcccctgttcatcagctgcctggaggacaccggccaggacatgctggccagcttcctgagaaccaacagacaggccgccaagctgagcaagcccaccctggagaacctgacccccgtggtgctgagacccgagatcagaaagcccgaggtgctgagacccgagacccccagacccgtggacatcggcagcggcggcttcggcgacgtgggcgccctggagagcctgagaggcaacgccgacctggcctacatcctgagcatggagccctgcggccactgcctgatcatcaacaacgtgaacttctgcagagagagcggcctgagaaccagaaccggcagcaacatcgactgcgagaagctgagaagaagattcagcagcctgcacttcatggtggaggtgaagggcgacctgaccgccaagaagatggtgctggccctgctggagctggcccagcaggaccacggcgccctggactgctgcgtggtggtgatcctgagccacggctgccaggccagccacctgcagttccccggcgccgtgtacggcaccgacggctgccccgtgagcgtggagaagatcgtgaacatcttcaacggcaccagctgccccagcctgggcggcaagcccaagctgttcttcatccaggcctgcggcggcgagcagaaggaccacggcttcgaggtggccagcaccagccccgaggacgagagccccggcagcaaccccgagcccgacgccacccccttccaggagggcctgagaaccttcgaccagctggacgccatcagcagcctgcccacccccagcgacatcttcgtgagctacagcaccttccccggcttcgtgagctggagagaccccaagagcggcagctggtacgtggagaccctggacgacatcttcgagcagtgggcccacagcgaggacctgcagagcctgctgctgagagtgagcgccgccttcctgtgcaagggcgagggcagactgctgagaggcagcgtgagcagctggggctggggcttcggcgtgagcagagccggccccaaccagggctag

SEQ ID NO: 339086 - protein, 577 aa, Artificial Sequence
  derived and/or modified sequence
MVVSAGPWSGEKAEMNILEINKKSRPQLAENKQQFRNLKQKCLVTQVAYFLANRQNNYDYEDCKDLIKSMLRDERLLTEEKLAEELGQAEELRQYKVLVHSQERELTQLREKLQEGRDASRSLNQHLQALLTPDEPDNSQGRDLREQLAEGCRLAQHLVQKLSPENDDDEDEDVKVEEAEKVQELYAPREVQKAEEKEVPEDSLEECAITCSNSHHPCESNQPYGNTRITFEEDQVDSTLIDSSSHDEWLDAVCIIPENESDHEQEEEKGPVSPRNLQESEEEEAPQESWDEGDWTLSIPPDMSASYQSDRSTFHSVEEQQVGLALDIGRHWCDQVKKEDQEATSPRLSRELLDEKEPEVLQDSLDRFYSTPFEYLELPDLCQPYRSDFYSLQEQHLGLALDLDRMKKDQEEEEDQGPPCPRLSRELPEVVEPEDLQDSLDRWYSTPFSYPELPDSCQPYGSCFYSLEEEHVGFSLDVDEIEKYQEGEEDQKPPCPRLNEVLMEAEEPEVLQDSLDRCYSTTSTYFQLHASFQQYRSAFYSFEEQDVSLALDVDNRFFTLTVIRHHLAFQMGVIFPH

SEQ ID NO: 339087 - protein, 353 aa, Artificial Sequence
  derived and/or modified sequence
MVVSAGPWSGEKAEMNILEINKKSRPQLAENKQQFRNLKQKCLVTQVAYFLANRQNNYDYEDCKDLIKSMLRDERLLTEEKLAEELGQAEELRQYKVLVHSQERELTQLREKLQEGRDASRSLNQHLQALLTPDEPDNSQGRDLREQLAEGCRLAQHLVQKLSPENDDDEDEDVKVEEAEKVQELYAPREVQKAEEKEVPEDSLEECAITCSNSHHPCESNQPYGNTRITFEEDQVDSTLIDSSSHDEWLDAVCIIPENESDHEQEEEKGPVSPRNLQESEEEEAPQESWDEGDWTLSIPPDMSASYQSDRSTFHSVEEQQVGLALDIGRHWCDQEKGGPRGHKSQAQQGAAG

SEQ ID NO: 339088 - protein, 555 aa, Artificial Sequence
  derived and/or modified sequence
MVVSAGPWSGEKAEMNILEINKKSRPQLAENKQQFRNLKQKCLVTQVAYFLANRQNNYDYEDCKDLIKSMLRDERLLTEEKLAEELGQAEELRQYKVLVHSQERELTQLREKLQEGRDASRSLNQHLQALLTPDEPDNSQGRDLREQLAEGCRLAQHLVQKLSPENDDDEDEDVKVEEAEKVQELYAPREVQKAEEKEVPEDSLEECAITCSNSHHPCESNQPYGNTRITFEEDQVDSTLIDSSSHDEWLDAVCIIPENESDHEQEEEKGPVSPRNLQESEEEEAPQESWDEGDWTLSIPPDMSASYQSDRSTFHSVEEQQVGLALDIGRHWCDQVKKEDQEATSPRLSRELLDEKEPEVLQDSLDRFYSTPFEYLELPDLCQPYRSDFYSLQEQHLGLALDLDRMKKDQEEEEDQGPPCPRLSRELPEVVEPEDLQDSLDRWYSTPFSYPELPDSCQPYGSCFYSLEEEHVGFSLDVDEIEKYQEGEEDQKPPCPRLNEVLMEAEEPEVLQDSLDRCYSTTSTYFQLHASFQQYRSAFYSFEEQDVSLALDVDN

SEQ ID NO: 339089 - DNA, 1062 bp, Artificial Sequence
  derived and/or modified sequence
atggtagtctcagcaggtccctggagtggggaaaaggcggaaatgaatattctggagatcaataagaagtcccggcctcagctggccgagaataaacagcagtttagaaatctgaagcagaagtgcttagtcactcaggtggcatacttcctggccaatcgccagaataactacgattatgaagactgtaaggatctgatcaagtccatgctgagggatgaaagactgttgaccgaggagaaattagctgaggagttgggccaggctgaggagctgcggcaatataaagttttagtccacagccaagaacgcgagctgactcagttaagggagaagctccaagaaggaagagacgcaagtcgatcattgaaccagcacctgcaagccctgctcacgcctgatgaaccagacaattcacagggacgcgacctccgagaacagctggcggagggctgcagactggctcagcacttagttcagaagctgtccccggaaaatgatgacgatgaggacgaagacgtgaaagtggaggaagccgaaaaggttcaagaattgtatgctccacgagaagtgcagaaagccgaggagaaagaggtgcctgaggactccttagaggaatgcgctataacctgcagtaactcccaccacccgtgcgagtcaaatcagccctacggcaataccagaatcacgtttgaagaggatcaggtggatagcactctgattgacagctcctctcatgacgagtggctggatgcagtgtgtattattccggagaacgagagtgatcatgagcaggaggaggaaaagggtcccgtttctcctaggaatctccaggaatcagaggaggaggaggctccccaggagagttgggatgagggcgattggactctttccatcccgcccgatatgtccgcgtcataccaatcagaccgctctactttccattctgtggaggagcagcaggtgggcctggccctggatattggaaggcactggtgtgaccaggaaaagggtggccctcggggccataagtcacaggcccagcaaggcgcggcgggatag

SEQ ID NO: 339090 - DNA, 1062 bp, Artificial Sequence
  derived and/or modified sequence
atggtggtgtctgctggcccctggagcggggagaaggccgagatgaacatcctggagatcaacaagaagagccggccccagctggccgagaacaagcagcagttcaggaacctgaagcagaagtgcctggtgacccaggtggcctacttcctggccaaccggcagaacaactatgactatgaggactgcaaggacctgatcaagtccatgctgagagatgagcggctgctgacagaggagaagctggccgaggagctgggccaggccgaggagctgcggcagtacaaggtgctggtgcacagccaggagcgggagctgacccagctgcgggagaagctgcaggagggcagagatgccagccgcagcctgaaccagcacctgcaggccctgctgaccccagatgagccagacaacagccagggccgggacctgcgggagcagctggccgagggctgccgcctggcccagcacctggtgcagaagctgagcccagaaaatgatgatgatgaagatgaagatgtgaaggtggaggaggccgagaaggtgcaggagctgtatgccccccgggaggtgcagaaggccgaggagaaggaggtgcctgaggacagcctggaggagtgtgccatcacctgcagcaacagccaccacccctgtgagagcaaccagccctacggcaacacccgcatcacctttgaggaggaccaggtggacagcaccctgattgacagcagcagccatgatgagtggctggatgctgtgtgcatcatcccagaaaatgaaagtgaccacgagcaggaggaggagaagggccctgtgagccccaggaacctgcaggagagcgaggaggaggaggccccccaggagagctgggatgaaggagactggaccctgagcatccccccagacatgtctgccagctaccagagcgacaggagcaccttccacagcgtggaggagcagcaggtgggcctggccctggacatcggccgccactggtgtgaccaggagaagggcggcccccggggccacaagagccaggcccagcagggcgccgccggctag

SEQ ID NO: 339091 - DNA, 1062 bp, Artificial Sequence
  derived and/or modified sequence
atggtggtgagcgccggcccctggagcggcgagaaggccgagatgaatattttagagattaacaagaaaagcagaccgcagcttgccgagaataagcagcagttcaggaatctcaagcagaagtgtctcgtaacccaggtagcttatttccttgccaacagacagaataattatgactatgaggactgcaaagatctgatcaaaagcatgctccgggacgagcgacttctgaccgaagagaaattagccgaagagctagggcaggctgaagagcttagacagtacaaggtgctagttcacagccaggaaagagagctgactcagctgagagaaaagctccaagagggcagggatgctagtcggagtctcaaccaacatctgcaggcacttctgaccccggatgagcctgataattctcaaggtcgcgacctgagggagcaactggcagagggctgcagattagctcagcatctggtccagaagctgtccccagaaaatgacgatgatgaagacgaagatgtcaaggtggaggaggcggagaaagtgcaagagctgtacgcgccccgggaggtgcaaaaggcagaagagaaggaagtccctgaggatagcctcgaagaatgtgccattacatgttcaaactctcatcatccatgtgagtccaaccagccttacggaaatacacggattacgttcgaggaagaccaggtcgactcaaccttaattgatagttcctcccatgatgagtggttagatgcagtatgcatcattccagagaacgaatccgaccacgagcaggaggaggagaagggccctgtcagccctcggaatctgcaagagagcgaagaggaagaggcacctcaagagagctgggatgagggcgattggaccctgagtatccccccagacatgtcggcatcttatcagtccgatagaagtaccttccattctgtcgaagaacagcaagtcggactggctctggacataggtcgacattggtgcgaccaggaaaaaggcggccctcggggccataaatcccaagcccaacaaggggctgctggctag

SEQ ID NO: 339092 - DNA, 1062 bp, Artificial Sequence
  derived and/or modified sequence
atggtcgtgtccgctgggccttggtccggtgagaaggcagaaatgaacatactagaaattaataaaaagagccggccacagctggccgaaaataagcaacaatttcgcaatcttaaacagaagtgccttgttactcaagtggcctacttcctggccaaccggcagaataattacgactatgaagattgcaaagatcttatcaagtctatgcttcgtgacgagagactgctgacggaagaaaaactcgccgaggagttgggccaggccgaggagttgcggcagtacaaagtcctggtacacagccaggaacgggaactgacacagctacgcgagaagctccaggagggaagggacgcaagcagatctctcaatcaacatcttcaagcactcctcactccggatgagcctgataatagtcaaggccgtgaccttagggagcagctagccgaaggctgtcgactagcacaacatctggtgcaaaagttgtcaccggagaatgatgacgatgaagacgaggacgttaaagtggaggaggcagagaaagtccaggagttatacgctccacgggaggtgcagaaagcagaggagaaggaggtgccggaagatagcctggaagaatgcgcgattacctgctccaattcccatcacccatgcgaatccaatcagccctacggcaacacacgtatcactttcgaggaggatcaagttgactcaaccctcatcgacagtagtagtcacgatgagtggttggatgcagtgtgtataatacccgaaaatgagtctgatcatgagcaagaagaggagaagggaccagtgtcccccagaaacctccaggaatcggaggaggaagaggcaccacaggagtcctgggacgaaggagactggactctatctattcctcctgatatgtccgctagctaccagtctgatcggagtacattccacagtgttgaagagcagcaggtgggtctggccctggacatcggccgtcactggtgcgaccaagaaaaagggggtcccaggggccataagtctcaggcccagcagggggctgcaggatag

SEQ ID NO: 339093 - DNA, 1062 bp, Artificial Sequence
  derived and/or modified sequence
atggtggtgagcgccggcccctggagcggcgagaaggccgagatgaacatcctggagatcaacaagaagagcagaccccagctggccgagaacaagcagcagttcagaaacctgaagcagaagtgcctggtgacccaggtggcctacttcctggccaacagacagaacaactacgactacgaggactgcaaggacctgatcaagagcatgctgagagacgagagactgctgaccgaggagaagctggccgaggagctgggccaggccgaggagctgagacagtacaaggtgctggtgcacagccaggagagagagctgacccagctgagagagaagctgcaggagggcagagacgccagcagaagcctgaaccagcacctgcaggccctgctgacccccgacgagcccgacaacagccagggcagagacctgagagagcagctggccgagggctgcagactggcccagcacctggtgcagaagctgagccccgagaacgacgacgacgaggacgaggacgtgaaggtggaggaggccgagaaggtgcaggagctgtacgcccccagagaggtgcagaaggccgaggagaaggaggtgcccgaggacagcctggaggagtgcgccatcacctgcagcaacagccaccacccctgcgagagcaaccagccctacggcaacaccagaatcaccttcgaggaggaccaggtggacagcaccctgatcgacagcagcagccacgacgagtggctggacgccgtgtgcatcatccccgagaacgagagcgaccacgagcaggaggaggagaagggccccgtgagccccagaaacctgcaggagagcgaggaggaggaggccccccaggagagctgggacgagggcgactggaccctgagcatcccccccgacatgagcgccagctaccagagcgacagaagcaccttccacagcgtggaggagcagcaggtgggcctggccctggacatcggcagacactggtgcgaccaggagaagggcggccccagaggccacaagagccaggcccagcagggcgccgccggctag

SEQ ID NO: 339094 - DNA, 2412 bp, Artificial Sequence
  derived and/or modified sequence
atgatacctgtaacagagttccgccagttctctgaacaacagcctgcgttcagagtgctgaagccctggtgggacgtgttcaccgactacttatctgtagctatgctgatgatcggggtgtttggctgtactctgcaagtaatgcaggataagattatttgtctgccaaaaagagttcagcccgcccaaaaccatagcagtctctcaaatgtctcccaggccgtggccagcacaactcctttgccccctccaaaaccaagcccggccaacccaatcaccgttgaaatgaagggccttaaaaccgacctcgacctgcagcaatacagcttcataaatcagatgtgttatgagcgcgctcttcattggtatgcaaaatatttcccatacctggtcctgatccacactctggtgtttatgctttgttcaaacttctggtttaaatttcccggctcgagtagcaagatcgagcactttatttccatcctcggaaagtgctttgactccccttggactaccagagcgctgagcgaggtatctggcgaagatagtgaggagaaagataatcggaagaacaacatgaacagaagcaataccatccagtccggaccagaggactccctggtaaactcacaaagcctcaagagcatccctgaaaaatttgtggtggacaaatccacagctggggcactggacaagaaggagggcgagcaggccaaggccctgtttgaaaaagtgaaaaaatttaggttgcatgtcgaggaaggcgacattctctatgccatgtacgtacggcagaccgttctcaaggtgattaaattcctaattatcatcgcgtataactctgcacttgtgagtaaagttcagttcaccgtggattgcaatgtggacatccaggatatgactggttacaagaatttttcttgcaatcacacaatggcacacctcttcagtaagctgtccttctgctacctctgctttgtctcaatctacggattaacatgtctctataccctgtattggctgttttaccggtcccttagggaatactccttcgagtatgtgagacaggagaccggaatcgacgacataccggacgtaaagaacgatttcgcgtttatgctacatatgatagaccagtatgaccctctgtattccaaaaggttcgccgtgttcctatccgaggtaagcgagaataaactcaaacagttgaatctgaataacgaatggactccagataagctgaggcaaaagcttcaaaccaacgcccataaccggctcgagttacctctcataatgctatctgggctgcctgataccgtgttcgagataaccgaacttcaaagtctgaagctggaaattattaagaacgtaatgatccccgcgactatcgcccaacttgacaatctgcaggaattaagcctgcaccagtgtagtgtgaaaattcattccgccgccctctcttttctcaaagaaaatctcaaggtgctttcagtcaaattcgatgacatgcgagagctgcccccatggatgtacgggttacgcaacctggaagagctttacctggtgggatcattgtctcacgatatctcaaggaacgtcaccctggagtctttgagagacctgaaatcattaaagatcttatcaatcaagtcgaacgtcagcaagatccctcaggcggtggtagacgtctcctcccacttgcagaaaatgtgcatccacaacgacggtaccaagctggttatgctgaacaacctgaaaaaaatgacaaacctcacagagctcgagctagtccactgtgatctcgaacgcatccctcacgctgtgtttagcctcctgagcctgcaggaactggacctgaaggagaataatctgaagagcatcgaggaaatcgtgtccttccagcatcttcgaaagctcaccgtgctgaaattgtggcataactctattacctacatacctgaacatataaagaaattgacctcccttgagcgcttatctttctcccataacaagatcgaggttttaccctctcacttattcttatgcaataagataaggtacctggatctcagttacaatgacattaggttcattccccctgaaatcggcgtgctgcaatcattacagtatttttctatcacctgcaataaagtcgaaagtctgccagatgagctatacttttgcaagaagctgaaaacgcttaagattggcaagaactctctgagtgttctctccccaaaaattggcaatttactcttcctgagctatctagacgtgaaaggcaatcacttcgagatactacccccagaattaggcgactgtcgggcacttaagcgggccgggctggtggtggaggatgcactgttcgaaacactgccatcggacgttcgtgagcaaatgaagacagaatag

SEQ ID NO: 339095 - DNA, 2412 bp, Artificial Sequence
  derived and/or modified sequence
atgatccctgtgacagagttccggcagttcagcgagcagcagcctgccttccgggtgctgaagccctggtgggatgtgttcacagactacctgtctgtggccatgctgatgattggagtgtttggctgcaccctgcaggtgatgcaggacaagatcatctgcctgcccaagagggtgcagcctgcccagaaccacagcagcctgagcaatgtgtcccaggccgtggccagcaccacccccctgcccccacccaagcccagccctgccaaccccatcaccgtggagatgaagggcctgaagacagacctggacctgcagcagtacagcttcatcaaccagatgtgctatgaaagagccctgcactggtacgccaagtacttcccctacctggtgctgatccacaccctggtgttcatgctgtgcagcaacttctggttcaagtttcctggcagcagcagcaagattgagcacttcatcagcatcctgggcaagtgctttgacagcccctggaccacccgggccctgtctgaggtgtctggagaagattctgaggagaaggacaacaggaagaacaacatgaacagaagcaacaccatccagagcggccctgaggacagcctggtgaacagccagagcctgaagagcatccctgagaagtttgtggtggacaagagcacagctggggccctggacaagaaggagggggagcaggccaaggccctgtttgagaaggtgaagaagttccggctgcacgtggaggagggggacatcctgtatgccatgtatgtgcggcagacagtgctgaaggtgatcaagttcctgatcatcatcgcctacaacagcgccctggtgtccaaggtgcagttcaccgtggactgcaatgtggacatccaggacatgacaggctacaagaacttcagctgcaaccacaccatggcccacctgttcagcaagctgtccttctgctacctgtgctttgtgtccatctacggcctgacctgcctgtacaccctgtactggctgttctaccgcagcctgcgggagtacagctttgaatatgtgcggcaggagaccggcattgatgacatcccagatgtgaagaatgactttgccttcatgctgcacatgattgaccagtatgaccccctgtacagcaagagatttgctgtgttcctgtctgaggtgtctgagaacaagctgaagcagctgaacctgaacaatgagtggaccccagacaagctgcggcagaagctgcagaccaatgcccacaaccggctggagctgcccctcatcatgctgagcggcctgcctgacacagtgtttgagatcacagagctgcagagcctgaagctggagatcatcaagaatgtgatgatcccagccaccatcgcccagctggacaacctgcaggagctgagcctgcaccagtgcagcgtgaagatccacagcgctgccctgtccttcctgaaggagaacctgaaggtgctgtctgtgaagtttgatgacatgagggagctgcccccctggatgtatggcctgaggaacctggaggagctgtacctggtgggcagcctgagccatgacatcagcagaaatgtgaccctggagagcctgcgggacctgaagagcctgaagatcctgagcatcaagagcaatgtgtccaagatcccccaggccgtggtggatgtgagcagccacctgcagaagatgtgcatccacaatgatggcaccaagctggtgatgctgaacaacctgaagaagatgaccaacctgacagagctggagctggtgcactgtgacctggagcgcatcccccatgctgtgttcagcctgctgagcctgcaggagctggacctgaaggagaacaacctgaagagcattgaggagatcgtgtccttccagcacctgaggaagctgactgtgctgaagctgtggcacaacagcatcacctacatccctgagcacatcaagaagctgaccagcctggagcggctgtccttcagccacaacaagattgaggtgctgcccagccacctgttcctgtgcaacaagatccgctacctggacctgagctacaatgacatccgcttcatccccccagaaattggagtgctgcagagcctgcagtacttcagcatcacctgcaacaaggtggagagcctgcctgatgagctgtacttctgcaagaagctgaagaccctgaagattggcaagaacagcctgtctgtgctgagccccaagattggcaacctgctcttcctgagctacctggatgtgaagggcaaccactttgagatcctgcccccagagctgggggactgccgggccctgaagagagctggcctggtggtggaggatgccctgtttgagaccctgcccagtgatgtgcgggagcagatgaagacagaatag

SEQ ID NO: 339096 - DNA, 2412 bp, Artificial Sequence
  derived and/or modified sequence
atgatccccgtgaccgagttccggcagttcagcgagcagcagcccgcctttagagtgctcaagccatggtgggacgtctttaccgactacctgtccgtggccatgctcatgatcggggtcttcgggtgcacactacaggtgatgcaggataaaatcatttgtctgccgaagagagtccagccagcccagaaccattcgtcgctgtcgaatgtgagccaagctgtcgccagtacgacacccctgcctcctcccaagccgtcaccagccaatcctatcaccgtggagatgaaaggtcttaagaccgatctggacctccagcaatattccttcatcaatcagatgtgctacgagagggccctccattggtatgcaaaatacttcccctatctcgtcctgatacataccctagtgttcatgctctgcagcaacttctggttcaagttcccaggttcttcctctaaaattgagcattttatttccattttgggaaagtgtttcgatagtccctggactaccagagctcttagcgaggttagtggagaggactcggaagaaaaggacaatcgaaagaacaatatgaataggagcaacaccatccaatccggtcccgaagatagcctggtcaacagtcagtctttgaaaagcatccccgagaaattcgtcgtggacaagagtaccgccggtgctttagataaaaaagagggcgagcaggccaaggctttattcgaaaaggtgaagaagttccgattgcatgtggaggaaggcgacattttatacgccatgtatgtccggcagaccgttctgaaggtcattaagttcctgattatcattgcttacaatagcgcattggtaagtaaggtgcagtttactgtcgactgtaatgtggatattcaagatatgacgggctacaagaacttctcctgcaaccatactatggcccacctgttctccaaacttagcttttgttatttgtgctttgtgtctatctatgggcttacatgcctgtacaccctttattggctgttctataggtcccttcgcgaatactctttcgagtatgttagacaggagaccggtatcgacgatatcccggatgttaagaacgattttgcctttatgctccacatgatagaccaatatgaccctctatattccaagcgattcgccgtgttcctgtccgaggtctctgaaaataagctcaaacagttgaatctgaataacgagtggaccccagacaaactgcgccaaaaattgcagacaaacgctcacaaccggttggagcttccactaatcatgctgtccgggttacccgataccgtcttcgagatcactgaattgcagtccctgaaactagagattattaagaacgtcatgatacctgctaccatcgcccaactggataatctccaggaactgagcctacaccagtgcagcgtgaaaatacatagtgctgcactgagctttctaaaggagaacttaaaggtgctctcagtcaaattcgatgacatgcgtgagctccctccatggatgtatggtctcagaaatcttgaagaattatatcttgtggggagtctctctcacgatataagtcggaacgtgacactcgaatccctaagggacctgaagtccctgaagattctgagcatcaaaagcaatgtctccaaaattccgcaggcggtagtcgacgtttcatcacacctacagaagatgtgcatccacaatgacggaacaaagttggtgatgttaaataatctcaagaagatgactaatttgacagagttagagctggttcactgcgatctggaaagaataccacacgccgttttcagtctactgagtcttcaggagctggatctaaaggaaaataatcttaagtcaatcgaggagatcgtatcatttcaacacctgcgcaagctgacagtcctaaagttatggcacaactccatcacctacattcctgagcacataaagaagctgacaagtcttgaacgtctgagtttttctcataacaaaatcgaggtcctgccttcccatttattcctgtgcaataagattaggtatctggacctttcctacaatgatattaggttcatcccccccgaaattggtgtactccaaagtttgcaatatttcagtatcacctgtaacaaagtagaatccctgccagatgagctttacttttgcaagaagcttaaaacactgaaaatcgggaaaaactccctaagcgtgctgtcccctaagatcgggaacttgctgttcctgtcatatctggacgtcaagggaaaccattttgaaatcctgccccctgagctgggcgactgccgagccctaaaacgcgccggattggtggtggaggatgccctgttcgagaccttgccctcggacgtaagggaacaaatgaagacagaatag

SEQ ID NO: 339097 - DNA, 2412 bp, Artificial Sequence
  derived and/or modified sequence
atgatccctgtcacggaatttaggcagtttagcgagcaacagcctgcctttcgggtgctcaagccatggtgggatgtcttcaccgactatctttctgtggccatgctgatgataggcgtctttggctgtacactgcaggtgatgcaagataagataatttgtttgcccaaacgcgtccagccggcacagaaccactcctccctctcaaacgtaagccaggctgtggcctccacaaccccactgcctcccccaaaaccatcccctgccaatcccattaccgttgagatgaagggactgaagactgatctagacctccagcagtattctttcatcaatcagatgtgctacgaaagagccctgcactggtacgctaagtattttccttacctcgtcctgatccacactctggtctttatgctatgcagcaatttctggttcaaatttcccggtagctctagtaagatcgaacattttatcagcatcttagggaagtgctttgatagcccttggacaacacgggcattgtcggaggtgtcaggggaagatagcgaggagaaggataaccggaagaacaatatgaaccgctctaacacaatccaatctggtcctgaggatagtttagtaaatagccaaagcctgaaatctatcccagaaaagtttgtggtggataaatccaccgcgggtgcattggataaaaaggagggcgaacaggcaaaggccctctttgagaaagtgaagaaattcaggctgcatgttgaagagggcgacattctgtatgcaatgtacgtccgacagactgttctcaaagtgatcaaattcctcatcatcatcgcatataatagcgctttagtctcgaaagtgcagtttactgtggactgtaatgttgacatccaagacatgacagggtacaaaaacttttcttgtaaccatactatggctcatctgttttcaaagctgtccttctgctacctgtgttttgtgagtatttacggtttgacttgtctgtacacactttattggctgttctatagaagtttgcgggaatactcctttgagtatgtgaggcaggagaccgggatcgacgacatcccagacgtcaagaacgacttcgctttcatgttgcatatgatcgatcagtatgacccactgtactccaaacgttttgcagtttttctgtctgaggtctctgaaaacaagcttaagcaactaaacctcaacaatgaatggacaccagacaagctgcgccagaaactccagacaaacgctcataacaggctggagctcccgctcataatgctctccgggctgcctgataccgtatttgagattaccgagcttcagtcccttaaacttgaaatcattaagaacgtcatgatccctgccaccatcgcccaactcgataacctgcaagaattatctttgcaccaatgctcagtgaaaatccactcagcggctttaagttttctgaaagagaatttaaaggtcctgtcagtgaagtttgatgacatgagggaactgcccccttggatgtacggtcttcggaacctcgaagagctgtacctggtgggctctttgtcacatgacattagtcgtaacgttactcttgaaagcttgcgcgaccttaagagcctcaaaatcctctcgataaagagtaatgtcagcaaaatcccgcaagctgtagtggacgtgagtagtcacctgcaaaaaatgtgtatacacaatgacggaacaaaactcgtcatgctgaataatttgaaaaagatgactaacctgactgaattggagctggtgcactgcgaccttgagagaattccacacgccgtgttttccctcctgagcctccaggaattggacctcaaagagaacaacctgaaaagcattgaggagatagtgtccttccagcatctgagaaagcttacagtgctgaaactatggcacaattccattacttacatacccgagcatatcaaaaaactgacaagccttgagagattaagcttctcccacaacaaaatcgaggtcctccctagccacttgttcctctgcaataagatcaggtacttggatctctcctacaacgatatccgattcatcccaccagaaatcggcgtacttcagtccctgcagtattttagcatcacctgtaataaggtggaatcattgccagatgagctctatttttgtaagaagcttaaaaccttgaagatcggcaagaactcccttagcgtcctgagtcctaaaattgggaatctcctcttcctgagctacctggacgtgaagggaaatcactttgaaatcctgcctcctgagctgggcgactgtagagcgctcaagcgggcaggccttgtggtggaggatgcactgtttgaaactttgccatctgacgtcagggaacaaatgaagactgagtag

SEQ ID NO: 339098 - DNA, 2412 bp, Artificial Sequence
  derived and/or modified sequence
atgatccccgtgaccgagttcagacagttcagcgagcagcagcccgccttcagagtgctgaagccctggtgggacgtgttcaccgactacctgagcgtggccatgctgatgatcggcgtgttcggctgcaccctgcaggtgatgcaggacaagatcatctgcctgcccaagagagtgcagcccgcccagaaccacagcagcctgagcaacgtgagccaggccgtggccagcaccacccccctgcccccccccaagcccagccccgccaaccccatcaccgtggagatgaagggcctgaagaccgacctggacctgcagcagtacagcttcatcaaccagatgtgctacgagagagccctgcactggtacgccaagtacttcccctacctggtgctgatccacaccctggtgttcatgctgtgcagcaacttctggttcaagttccccggcagcagcagcaagatcgagcacttcatcagcatcctgggcaagtgcttcgacagcccctggaccaccagagccctgagcgaggtgagcggcgaggacagcgaggagaaggacaacagaaagaacaacatgaacagaagcaacaccatccagagcggccccgaggacagcctggtgaacagccagagcctgaagagcatccccgagaagttcgtggtggacaagagcaccgccggcgccctggacaagaaggagggcgagcaggccaaggccctgttcgagaaggtgaagaagttcagactgcacgtggaggagggcgacatcctgtacgccatgtacgtgagacagaccgtgctgaaggtgatcaagttcctgatcatcatcgcctacaacagcgccctggtgagcaaggtgcagttcaccgtggactgcaacgtggacatccaggacatgaccggctacaagaacttcagctgcaaccacaccatggcccacctgttcagcaagctgagcttctgctacctgtgcttcgtgagcatctacggcctgacctgcctgtacaccctgtactggctgttctacagaagcctgagagagtacagcttcgagtacgtgagacaggagaccggcatcgacgacatccccgacgtgaagaacgacttcgccttcatgctgcacatgatcgaccagtacgaccccctgtacagcaagagattcgccgtgttcctgagcgaggtgagcgagaacaagctgaagcagctgaacctgaacaacgagtggacccccgacaagctgagacagaagctgcagaccaacgcccacaacagactggagctgcccctgatcatgctgagcggcctgcccgacaccgtgttcgagatcaccgagctgcagagcctgaagctggagatcatcaagaacgtgatgatccccgccaccatcgcccagctggacaacctgcaggagctgagcctgcaccagtgcagcgtgaagatccacagcgccgccctgagcttcctgaaggagaacctgaaggtgctgagcgtgaagttcgacgacatgagagagctgcccccctggatgtacggcctgagaaacctggaggagctgtacctggtgggcagcctgagccacgacatcagcagaaacgtgaccctggagagcctgagagacctgaagagcctgaagatcctgagcatcaagagcaacgtgagcaagatcccccaggccgtggtggacgtgagcagccacctgcagaagatgtgcatccacaacgacggcaccaagctggtgatgctgaacaacctgaagaagatgaccaacctgaccgagctggagctggtgcactgcgacctggagagaatcccccacgccgtgttcagcctgctgagcctgcaggagctggacctgaaggagaacaacctgaagagcatcgaggagatcgtgagcttccagcacctgagaaagctgaccgtgctgaagctgtggcacaacagcatcacctacatccccgagcacatcaagaagctgaccagcctggagagactgagcttcagccacaacaagatcgaggtgctgcccagccacctgttcctgtgcaacaagatcagatacctggacctgagctacaacgacatcagattcatcccccccgagatcggcgtgctgcagagcctgcagtacttcagcatcacctgcaacaaggtggagagcctgcccgacgagctgtacttctgcaagaagctgaagaccctgaagatcggcaagaacagcctgagcgtgctgagccccaagatcggcaacctgctgttcctgagctacctggacgtgaagggcaaccacttcgagatcctgccccccgagctgggcgactgcagagccctgaagagagccggcctggtggtggaggacgccctgttcgagaccctgcccagcgacgtgagagagcagatgaagaccgagtag

SEQ ID NO: 339099 - DNA, 369 bp, Artificial Sequence
  derived and/or modified sequence
atgaaagtggctctcctgcggttctttagccctcccaacatgtccgtgactcataaagaagcccatgagcgcaagtgtcctgaaaaacctgagctttggaaagcagggtccactgtaccgctgaccgccccggagaagaccgaccccttccctctgtgtccccccttaagcctgacctgcccacaacagcagtcatgtatccctagcagctcccaggacgtcctgaactccctatgggtgagcagccattgcttacagttaaaaattagcaagactaaaacccactgcctcccaacccagaatgtcctgccctttctgttacccacaccagtcagcattgtgtgtcggcttcccggcctggatccatag

SEQ ID NO: 339100 - DNA, 411 bp, Artificial Sequence
  derived and/or modified sequence
cggagccggaccggccccgtgagcctgcagggcgaccccaagcaggccccttggtcctctagccaatccaacagttctcggaaaacgctttttctaagcttatgcccgccttttcctactcagccccagatccatctccactttaccgaacatcgggcaagctcccaccagggcgggccctttaagctgcagatctgcctctcgtctctctattctaatctgctcctgcattgtcattacagagaagttcaccatatgtcagggcaccgaaccgagtccgccggagggcacctgttcctcccccaagatctgagatggaagagccctggactaggggtcttcgcagttcagagtgtgtacgagcttgcacgtcgccataacgtgtctcctttctacagtggccctccctag

SEQ ID NO: 339101 - protein, 143 aa, Artificial Sequence
  derived and/or modified sequence
NMLKVVALHLKKHGLTYATIDGSVNPKQRMDLVEAFNHSRGPQVMLISLLAGGVGLNLTGGNHLFLLDMHWNPSLEDQACDRIYRVGQQKDVVIHRFVCEGTVEEKILQLQEKKKDLAKQVLSGSGESVTKLTLADLRVLFGI

SEQ ID NO: 339102 - DNA, 432 bp, Artificial Sequence
  derived and/or modified sequence
aacatgctgaaggtggtggccctgcacctgaagaagcacggcctgacctacgccaccatcgacggcagcgtgaaccccaagcagagaatggacctggtggaggccttcaaccacagcagaggcccccaggtgatgctgatcagcctgctggccggcggcgtgggcctgaacctgaccggcggcaaccacctgttcctgctggacatgcactggaaccccagcctggaggaccaggcctgcgacagaatctacagagtgggccagcagaaggacgtggtgatccacagattcgtgtgcgagggcaccgtggaggagaagatcctgcagctgcaggagaagaagaaggacctggccaagcaggtgctgagcggcagcggcgagagcgtgaccaagctgaccctggccgacctgagagtgctgttcggcatctag

SEQ ID NO: 339103 - DNA, 432 bp, Artificial Sequence
  derived and/or modified sequence
aatatgttgaaggttgtcgctctgcatctgaagaagcacggcctgacgtacgcaactatagatggatcggtcaacccaaaacaaaggatggacctggttgaagcctttaaccactccaggggccctcaggttatgttgatttcattgctggcggggggagttggccttaacctcactgggggaaaccatctgtttctgttggacatgcactggaatccttcgctggaagaccaggcttgtgacaggatctatcgggtggggcagcagaaagacgttgtcattcatcgtttcgtctgcgaggggaccgtcgaggaaaagatcttgcagctgcaggaaaagaagaaagatctcgctaaacaggttctttctgggagtggagagtctgtcacaaaacttacgctcgccgaccttagagttctgttcgggatctag

SEQ ID NO: 339104 - DNA, 432 bp, Artificial Sequence
  derived and/or modified sequence
aacatgctgaaggtggtggccctgcacctgaagaagcacggcctgacctacgccaccattgatggctctgtgaaccccaagcagaggatggacctggtggaggccttcaaccacagccggggcccccaggtgatgctgatcagcctgctggccggcggcgtgggcctgaacctgactggaggcaaccacctgttcctgctggacatgcactggaaccccagcctggaggaccaggcctgtgaccgcatctacagagtgggccagcagaaggatgtggtgatccacagatttgtgtgtgagggcaccgtggaggagaagatcctgcagctgcaggagaagaagaaggacctggccaagcaggtgctgagcggcagcggggagagcgtgaccaagctgaccctggccgacctgcgggtgctgtttggcatctag

SEQ ID NO: 339105 - DNA, 432 bp, Artificial Sequence
  derived and/or modified sequence
aacatgctgaaggtggtggccctgcacctgaagaagcacggcctgacttatgccactatcgacgggagcgtgaaccccaagcagagaatggacctcgtcgaagctttcaatcacagcagaggccctcaggtgatgctcatcagtctgctggcagggggcgtggggctgaatctgacggggggcaaccacctcttcttgttggacatgcattggaacccctccctagaggaccaggcgtgtgacaggatatatcgtgttggacagcagaaagatgtggtgattcatcgttttgtctgcgaggggactgtggaggagaagatactgcaactgcaagagaagaaaaaagacctcgcaaaacaagttctgtctggttcgggcgagagtgtgactaagttgacacttgctgacctaagggttctatttggtatttag

SEQ ID NO: 339106 - DNA, 432 bp, Artificial Sequence
  derived and/or modified sequence
aacatgctgaaagttgtggccttacatctcaaaaagcacggactcacttacgcgactatcgacggctctgtgaatccaaaacagaggatggatctggtcgaagcctttaaccattcaagaggcccacaggtaatgcttatctccttgttggccggaggggtcggactgaatctgacaggtggcaatcatcttttcctgctggacatgcactggaaccctagtctcgaggatcaggcatgcgaccggatctatagagtagggcagcagaaggacgttgtcattcacagatttgtctgtgaaggaacagtggaagagaaaatcttgcagcttcaagagaaaaaaaaggatcttgctaagcaggtgctctccggaagtggggaatcagtgacaaaactcacgctagcggatcttagagttctctttggcatctag

SEQ ID NO: 339107 - DNA, 639 bp, Artificial Sequence
  derived and/or modified sequence
aacatgctgaaagttgtagcattgcacctgaagaagcatggactgacttatgccaccatcgatggctctgtcaatcccaagcagagaatggacttggtagaggcatttaaccactccagaggccctcaggtaatgctaatctctctcttggccggaggtgttggtctaaacctgactggaggaaatcacctctttcttttggacatgcactggaatccatcacttgaagatcaagcttgtgaccgaatttaccgagtagggcagcagaaagatgttgtcatacacagatttgtttgtgagggaacagtagaagaaaagatcttacagctccaagaaaaaaagaaagatttggccaaacaagttctatcagggtctggagaatctgtcaccaagctcaccttggctgacctcagagtcctttttggcatctaacctcctgtggataagggctcagaatagcaccattgctgctgatgatgggagaaccagttactaccttctctaacacaggctccatcctatctcttcatctcttcttgccagtgatgttgcacctgtaaccatctttttatgggtggagcagagagtcaatccctgcagccaccctgcagccagccatctctgcagttctctcagtgc

SEQ ID NO: 339108 - protein, 227 aa, Artificial Sequence
  derived and/or modified sequence
MLNPDGVYLGNYRCSLMGFDLNRHWLDPSPWVHPTLHGVKQLIVQMYNDPKTSLEFYIDIHAHSTMMNGFMYGNIFEDEERFQRQAIFPKLLCQNAEDFSYSSTSFNRDAVKAGTGRRFLGGLLDHTSYCYTLEVSFYSYIISGTTAAVPYTEEAYMKLGRNVARTFLDYYRLNPVVEKVAIPMPRLRKEKSPPYKHPLLRGPASNYPNSKGDKKSSVNHKDPSTPF

SEQ ID NO: 339109 - DNA, 654 bp, Artificial Sequence
  derived and/or modified sequence
atggccgagggcagccagagcgcccccgaggccggcaacgacatgggcaacgacgacgccatcggcggcaacgtgagcaagtacatcgtgctgcccaccggctactgcggccagcccaagaagggccacctgatcttcgacgcctgcttcgagagcggcaacctgggcagagtggaccaggtgagcgagttcgagtacgacctgttcatcagacccgacacctgcaaccccagattcagagtgtggttcaacttcaccgtggagaacgtgaaggagagccagagagtgatcttcaacatcgtgaacttcagcaagaccaagagcctgtacagagacggcatggcccccatggtgaagagcaccagcagacccaagtggcagagactgccccccaagaacgtgtactactacagatgccccgaccacagaaagaactacgtgatgagcttcgccttctgcttcgacagagaggaggacatctaccagttcgcctactgctacccctacacctacaccagattccagcactacctggacagcctgcagaagagaaacatggactacttcttcagagagcagctgggccagagcgtgcagcagagaaagctggacctgctgaccatcaccagccccgccggcagatggagctggtag

SEQ ID NO: 339110 - DNA, 654 bp, Artificial Sequence
  derived and/or modified sequence
atggcggaaggatcccagagcgccccagaggctggaaatgatatgggcaatgacgacgccatcggaggcaacgtaagcaaatatatcgtgctgccaacaggctactgcggtcaaccaaagaagggccaccttatatttgatgcctgcttcgagtcaggcaatttggggcgcgtggaccaggtatcagagtttgagtacgacttgtttataaggcccgatacctgtaatcccagatttcgtgtttggttcaactttacggtggagaacgtgaaagagagtcagcgcgttattttcaatatcgtgaacttcagcaaaacgaagagtctttatagggatgggatggctccaatggtgaaatccacgagtcgaccgaagtggcagcgcctacctcccaagaatgtatattactatcggtgtcccgatcacagaaaaaattatgtgatgtcttttgccttctgctttgacagggaagaggacatataccagttcgcctactgctacccttacacatacacacgtttccagcattatctagattcactgcagaaaaggaacatggactatttcttcagggagcagttgggacaatcagtgcagcagcgcaagctggacctcctgaccatcacttcgcctgctggtcgatggtcttggtag

SEQ ID NO: 339111 - DNA, 1454 bp, Artificial Sequence
  derived and/or modified sequence
gccgcgtcttcctgaggtagctcctgtcagcccactgatcccaccacccgctccctactgccccgcggtcttcgcgtgagctcggagactgagggacaacaaaaatggcggaggggagccagtcggcgcctgaggcaggcaatgatatgggaaatgatgatgccattggagggaatgtgagcaaatatatagtgcttccaactggctattgtggacagcccaagaaaggacatcttatctttgatgcttgctttgaaagtggtaacctgggccgggtggaccaggtctctgagtttgagtatgatctgttcattaggccggacacctgtaatccacgcttccgagtctggttcaactttactgttgaaaatgtgaaagaatcacagagggtcattttcaacattgttaacttcagtaaaaccaagagtctctatagagatgggatggcccctatggtgaaatctaccagcagaccaaaatggcaaaggctgccacccaaaaatgtttactactaccgctgcccggaccataggaagaactatgtgatgtcctttgccttttgttttgaccgagaagaagatatttaccagtttgcttactgctacccatatacatacactcgcttccaacattaccttgacagcctgcaaaagagaaacatggattacttctttcgggagcagctgggccagagtgtgcaacaacgaaagcttgacctcctgacgataaccagccctgctggaagatggagctggtgaaatcatttgcttctgaaggagaatggtggcctttccaaatttgactatcagatatgaatttgacctaatctcgggaatgtttccggctggaagatggagctggtgaaatcatttgcttctgaaggagaatggtggcctttccaaatttgactatcagatatgaatttgacctaatctcgggaatgtttccggtaagactgcagactctcaggtgcttaagaagtcactgaggctctggacaaacaggaacgtattagctttttgcctactgactacacagcctccaccattcacccaaaatggatctgcatctcccaggtgcatctgcaagcacacaaaaacacacactgggaaggggtatgagctgaggttagtcctaggtgctgcactttctattcctgacatatcaggatgtgtgggagggaggccaaagctgcagcaccaggctgggcttccagtcctgttgctactgtggaagctggctccagacaggtgggggcagcaaagagccagcctgtatggtcagctgggattctagttgaccaaagctgttgggagaactcaagctcatcagtgtggcaagttagacaacttgatctggacacatgcataaatggaacaggggtccagatacccacaggattaatactaataaaccattttgcttaagcagcaaaactcggtttatatattgaa

SEQ ID NO: 339112 - DNA, 654 bp, Artificial Sequence
  derived and/or modified sequence
atggccgagggcagccagagcgcccctgaggccggaaatgacatgggaaatgatgatgccatcggcggcaatgtgtccaagtacatcgtgctgcccaccggctactgcggccagcccaagaagggccacctgatctttgatgcctgctttgagagcggcaacctgggccgggtggaccaggtgtctgaatttgaatatgacctcttcatccggccagacacctgcaacccccgcttccgggtgtggttcaacttcaccgtggagaatgtgaaggagagccagagggtcatcttcaacatcgtgaacttcagcaagaccaagagcctgtacagagatggcatggcccccatggtgaagagcaccagccggcccaagtggcagaggctgccccccaagaatgtgtactactaccgctgcccagaccacaggaagaactacgtgatgagctttgccttctgctttgaccgggaggaggacatctaccagtttgcctactgctacccctacacctacacccgcttccagcactacctggacagcctgcagaagaggaacatggactacttcttccgggagcagctgggccagagcgtgcagcagaggaagctggacctgctgaccatcaccagccctgctggccgctggagctggtag

SEQ ID NO: 339113 - DNA, 654 bp, Artificial Sequence
  derived and/or modified sequence
atggccgagggcagccagagcgcccccgaggccggcaacgacatgggtaatgacgacgcaattggcggtaatgtctccaagtatatcgttctgcctaccggctactgtgggcaacccaaaaagggtcacttgatttttgatgcttgttttgagtctggaaacttggggagggtcgaccaggtcagtgagttcgagtatgacctgtttatccgcccggacacctgtaaccctcggtttcgggtttggttcaattttacagtcgaaaacgtcaaggagagccagcgggtgattttcaacatagtcaattttagtaaaaccaagtctctgtatagagatggcatggcccctatggtaaaatctaccagtaggcccaagtggcagagactcccgccaaaaaatgtctactattataggtgcccggaccacaggaagaattacgtaatgtcattcgctttttgcttcgaccgcgaagaggatatctaccagttcgcatactgctatccctacacatacacccggttccaacattacttagatagcctccaaaaacgcaatatggactactttttccgggaacaattggggcagtccgttcagcagcggaaacttgatctacttaccataacttcccccgctggtcggtggagctggtag

SEQ ID NO: 339114 - DNA, 654 bp, Artificial Sequence
  derived and/or modified sequence
atggctgaaggaagtcagagcgcaccagaggccggaaatgacatgggcaacgatgatgctattggaggcaatgtgtcgaagtatatcgtcctcccaacaggttactgcggccagcccaagaaagggcacctgatattcgacgcctgcttcgaaagtgggaatttggggagggttgaccaggtgtcggagtttgaatatgatctgttcattaggcctgatacatgcaatcctagattccgggtctggttcaactttaccgtagaaaacgtcaaggagagtcagcgagtcattttcaacattgtgaacttcagcaaaactaaatccctgtaccgcgatgggatggctcccatggttaaatccacaagtaggcccaagtggcaaagactgcctcccaagaatgtatactactaccgctgtcccgaccaccgcaaaaattacgtaatgtcatttgccttttgtttcgatcgcgaggaagatatctatcagtttgcttattgttatccatatacttacaccagatttcaacactatttggatagcctccagaaacgaaatatggattattttttcagagaacagctcggtcaaagcgtgcagcagcggaaactcgacctgctgaccatcacatcacccgctgggcgatggagttggtag

SEQ ID NO: 339115 - protein, 110 aa, Artificial Sequence
  derived and/or modified sequence
LFMLHKIVQVYNSDVIDKQSASMTSDNADDKAVIILVPVRLGGERTNTDYLEFVKGILSLEYCVGIIGGKPKQSYYFAGFQDDSLIYMDPHYCQSFVDVSIKDFPLEVIL

SEQ ID NO: 339116 - DNA, 333 bp, Artificial Sequence
  derived and/or modified sequence
ctcttcatgctccataagatcgtgcaggtgtacaactccgacgtgatcgataagcaatccgcatccatgacctcagataatgccgacgataaagcagtgattatacttgttcccgtgcgcctcggaggagagaggactaatacagactatcttgagttcgtgaagggtatccttagtctcgagtactgcgtgggaatcataggaggaaaaccaaagcaatcttactactttgctggattccaggacgactctttaatctatatggaccctcattactgccagagctttgtcgacgtgagtattaaggacttccctctagaagtcatactgtag

SEQ ID NO: 339117 - DNA, 465 bp, Artificial Sequence
  derived and/or modified sequence
ctatttatgttgcacaagattgtacaggtttacaattctgatgtaattgataaacagagtgcttccatgacttctgataatgcagatgacaaagctgttattattctagttcctgttagacttggtggagaaagaaccaacaccgactacttagaatttgtgaagggtattttaagcctggaatattgtgtgggtattattggtggcaaacctaaacagtcatattactttgctggatttcaagatgacagtttgatttacatggatcctcattactgccaatcttttgtagatgtcagcataaaggatttccctcttgaggtcattttgtgatccagtattttaattcagaaaaatttgagaatacataaatgaaacatgtaattattacatggttttgattgttttcccagttggtgcttttacagactaaagtaattttacagaataaaataacttaaatca

SEQ ID NO: 339118 - DNA, 333 bp, Artificial Sequence
  derived and/or modified sequence
ctctttatgctgcacaagatcgtacaggtctataactcagatgtgatcgacaagcagagcgccagtatgacaagcgataatgctgatgataaagctgtaataattctagtgcccgtgcgtctcgggggagaaaggactaataccgactacctagaattcgtgaagggaattttgagtcttgagtactgcgtaggaattattggggggaaacctaagcaaagttactatttcgctggctttcaggatgattccttgatctacatggacccccattattgccagtccttcgtcgacgtctctataaaggattttccattggaggttatactttag

SEQ ID NO: 339119 - DNA, 333 bp, Artificial Sequence
  derived and/or modified sequence
ctctttatgctgcacaagatcgtacaggtctataactcagatgtgatcgacaagcagagcgccagtatgacaagcgataatgctgatgataaagctgtaataattctagtgcccgtgcgtctcgggggagaaaggactaataccgactacctagaattcgtgaagggaattttgagtcttgagtactgcgtaggaattattggggggaaacctaagcaaagttactatttcgctggctttcaggatgattccttgatctacatggacccccattattgccagtccttcgtcgacgtctctatcaaagactttccccttgaagtgatactgtag

SEQ ID NO: 339120 - DNA, 333 bp, Artificial Sequence
  derived and/or modified sequence
ctgttcatgctgcacaagatcgtgcaggtgtacaacagcgacgtgatcgacaagcagagcgccagcatgaccagcgacaacgccgacgacaaggccgtgatcatcctggtgcccgtgagactgggcggcgagagaaccaacaccgactacctggagttcgtgaagggcatcctgagcctggagtactgcgtgggcatcatcggcggcaagcccaagcagagctactacttcgccggcttccaggacgacagcctgatctacatggacccccactactgccagagcttcgtggacgtgagcatcaaggacttccccctggaggtgatcctgtag

SEQ ID NO: 339121 - DNA, 333 bp, Artificial Sequence
  derived and/or modified sequence
ctcttcatgctgcacaaaattgtccaggtctacaacagtgacgtcattgacaagcagtccgcttctatgacatccgacaatgcggacgacaaggccgtgatcatccttgtcccggtgagactgggcggagaacggaccaacaccgattacctggaattcgtaaaaggtatcctatcattggaatactgcgttggaatcattggcggaaagccaaagcagtcgtattattttgcgggattccaagacgatagcttgatctacatggacccccattactgtcagtcatttgttgatgtcagcattaaggatttcccgttggaagtgatcctgtag

SEQ ID NO: 339122 - DNA, 333 bp, Artificial Sequence
  derived and/or modified sequence
ctcttcatgctgcacaagatcgtgcaggtgtacaacagtgatgtgattgacaagcagagcgcctccatgaccagtgacaatgctgatgacaaggccgtcatcatcctggtgcctgtgcggctgggcggggagaggaccaacacagactacctggagtttgtgaagggcatcctgagcctggagtactgtgtgggcatcattggaggcaagcccaagcagagctactactttgctggcttccaggatgacagcctcatctacatggacccccactactgccagagctttgtggatgtgtccatcaaggacttccccctggaggtgatcctgtag

SEQ ID NO: 339123 - DNA, 333 bp, Artificial Sequence
  derived and/or modified sequence
ctgttcatgctgcacaagatcgtgcaggtgtacaacagcgacgtgatcgataagcaatcggccagtatgacgagtgataacgctgatgacaaggcggtcataatcctggtgcctgtacggctgggaggcgaacgcaccaatacagactatctggagttcgtgaaaggcattctgtcattagagtattgtgtgggaattatcggaggaaagcctaagcagagttattattttgcaggtttccaggatgacagccttatatatatggatccccattactgtcagtcttttgtggacgtgagcatcaaggacttccctctggaggtcattctgtag

SEQ ID NO: 339124 - RNA, 333 nt, Artificial Sequence
  derived and/or modified sequence
cucuuuaugcugcacaagaucguacaggucuauaacucagaugugaucgacaagcagagcgccaguaugacaagcgauaaugcugaugauaaagcuguaauaauucuagugcccgugcgucucgggggagaaaggacuaauaccgacuaccuagaauucgugaagggaauuuugagucuugaguacugcguaggaauuauuggggggaaaccuaagcaaaguuacuauuucgcuggcuuucaggaugauuccuugaucuacauggacccccauuauugccaguccuucgucgacgucucuauaaaggauuuuccauuggagguuauacuuuag

SEQ ID NO: 339125 - RNA, 333 nt, Artificial Sequence
  derived and/or modified sequence
cucuuuaugcugcacaagaucguacaggucuauaacucagaugugaucgacaagcagagcgccaguaugacaagcgauaaugcugaugauaaagcuguaauaauucuagugcccgugcgucucgggggagaaaggacuaauaccgacuaccuagaauucgugaagggaauuuugagucuugaguacugcguaggaauuauuggggggaaaccuaagcaaaguuacuauuucgcuggcuuucaggaugauuccuugaucuacauggacccccauuauugccaguccuucgucgacgucucuaucaaagacuuuccccuugaagugauacuguag

SEQ ID NO: 339126 - DNA, 570 bp, Artificial Sequence
  derived and/or modified sequence
atggaagctacaggcacagacgaggtcgataagctgaaaactaagttcatttcagcgtggaataacatgaaatatagctgggtgctaaaaacaaaaacttacttctcccggaactcacccgtgcttcttttgggtaagtgctaccatttcaaatacgaggatgaggataaaacactcccagcagagtcaggctgcacaattgaagatcacgtgatcgcgggaaacgttgaggagttcaggaaggacttcatatcccgaatctggctgacctaccgtgaagagtttccacagatagagggcagtgccctaacaactgattgtgggtgggggtgcactttgcgcaccgggcagatgcttctggcccaggggcttatcttgcactttctgggaagagcatggacatggcccgacgccctgaacattgagaatagtgatagtgaaagctggacctctcacactgtaaaaaaattcaccgcctccttcgaagcctcactgtctggggagcgcgagtttaagacacctactatttcactcaaagaaaccattggcaagtattctgacgatcactag

SEQ ID NO: 339127 - DNA, 456 bp, Artificial Sequence
  derived and/or modified sequence
atggaggcaacaggtactgacgaagttgataagttgaaaactaagttcatttcggcctggaataacatgaaatacagctgggtgctgaaaaccaagacatacttctctcgcaattctcccgttcttctgctggggaagtgctatcattttaagtatgaagacgaagacaaaaccctaccagcagaaagcggctgtactattgaggaccacgtcattgcaggcaacgtggaagagtttagaaaggattttatttcccggatttggctgacgtatagggaagagttccctcagatcgagggaagcgcattgacaaccgactgtggatggggctgcaccctcagaacagggcagatgctgctggctcaggggttgatcttacactttttgggaagagcctggacttggccggatgctctgaacatcgaaaattcagattctgagagttggacttcttag

SEQ ID NO: 339128 - DNA, 570 bp, Artificial Sequence
  derived and/or modified sequence
atggaggccactgggacagacgaggtcgacaaactgaagacaaaatttatatccgcctggaataatatgaaatatagctgggtgctgaaaacaaagacttacttttctagaaattcaccagttcttctcttgggaaaatgctaccatttcaagtatgaggatgaggataaaactcttcccgcagagtctgggtgcaccatcgaagatcacgtcatcgccgggaatgtggaggaattccgcaaagactttataagtagaatttggctcacctacagagaggaattccctcagatcgagggtagtgctctgaccacggactgtggatggggatgcacgcttcgaaccggacaaatgctgctggcccagggactgattctgcactttcttggccgcgcttggacctggcccgacgccctgaacattgaaaattcagactctgaatcgtggacatcacacactgtcaaaaagttcacagcaagcttcgaagccagtctgtctggtgaacgcgaatttaagacgccaaccatcagccttaaggagacaatcgggaaatacagcgatgatcactag

SEQ ID NO: 339129 - DNA, 456 bp, Artificial Sequence
  derived and/or modified sequence
atggaggccaccggaaccgatgaagtagacaagttaaaaactaaatttatctccgcatggaataacatgaaatactcctgggtactcaagaccaagacatatttcagcagaaattcaccagtcctgctgttgggcaagtgctatcatttcaagtacgaggacgaggacaaaacccttccagcagaatcaggatgtaccattgaggatcacgtgattgcaggcaacgttgaggaattccggaaagatttcatctcccgaatttggctgacttatagagaagaattcccccaaatcgaagggtccgcactcaccactgactgcggatggggatgcacgttgcgaactggccaaatgcttctcgcgcagggcctaatcctgcatttcttaggcagagcatggacttggccagatgctctgaacatcgagaattcagactccgagtcctggaccagctag

SEQ ID NO: 339130 - DNA, 603 bp, Artificial Sequence
  derived and/or modified sequence
gtacctgtagctgcggcgctgaggtcggaacgtctgcgtgtgtgcgggctggttttgtggcggctgctgctagagctggagcatttgccgggttggtggctcctgcacatttttacagttctccagtccttctctttcgaatttgaatatggaggctacaggaacagatgaagttgacaagctaaaaaccaaatttatatctgcttggaacaacatgaaatatagttgggtgttgaaaacaaagacgtattttagtagaaattctcctgtattattgcttggaaaatgttaccattttaaatatgaagatgaagataaaacgttacctgcagagtcgggatgtacaatagaggatcacgtaattgcaggaaatgtagaagaatttcgtaaagatttcatttctagaatatggctgacctacagggaagaattccctcaaatagaaggctcagctttgacaacagactgtgggtggggctgcacattgagaactggccagatgctcttggctcaaggactcatactacactttcttggtagagcttggacctggcctgatgctttgaatattgaaaattcagactctgaatcatggacttccca

SEQ ID NO: 339131 - DNA, 570 bp, Artificial Sequence
  derived and/or modified sequence
atggaggctactggaaccgatgaggtcgataaattgaaaacaaaatttatttcagcgtggaacaacatgaagtattcatgggtgctcaagactaaaacttacttttccagaaactcaccggtgttactgttaggaaaatgttaccactttaagtacgaagacgaggataagacactgcctgccgagagtggctgcactatcgaggatcatgtaattgcgggaaacgtggaagagttcaggaaggatttcatcagtcgcatctggctcacctatcgggaggaattcccacagattgagggtagcgcacttaccaccgactgtgggtggggctgcaccttacgaacagggcagatgttgttggcccaagggcttattcttcatttcttaggacgagcctggacatggccggacgccctgaatatcgagaattccgactcagaaagctggacttcacacaccgtcaaaaaatttactgcgtcctttgaagcaagtctctccggggaacgagagtttaaaacacctaccatctcactgaaggaaaccatcggcaaatatagtgatgaccactag

SEQ ID NO: 339132 - DNA, 456 bp, Artificial Sequence
  derived and/or modified sequence
atggaggccaccggaacagacgaggttgataaattgaaaacgaagttcatatccgcatggaataacatgaagtatagctgggttttaaagacgaaaacttacttctccagaaacagtccagtactgctgctgggaaaatgttatcactttaaatatgaagacgaggacaaaactttacctgccgaatcaggatgcaccattgaggaccatgttattgctggaaatgttgaggagtttcggaaggactttatttctcgcatttggctgacctatcgggaagagtttccacaaatcgaagggtccgctctcacgactgattgtggatggggatgcaccctcagaactggacaaatgctcctggctcaaggcttgatactgcactttctgggtcgagcgtggacttggcctgatgccctgaatatagagaatagtgactctgagtcctggacatcttag

SEQ ID NO: 339133 - DNA, 570 bp, Artificial Sequence
  derived and/or modified sequence
atggaggccaccggcaccgacgaggtggacaagctgaagaccaagttcatcagcgcctggaacaacatgaagtacagctgggtgctgaagaccaagacctacttcagcagaaacagccccgtgctgctgctgggcaagtgctaccacttcaagtacgaggacgaggacaagaccctgcccgccgagagcggctgcaccatcgaggaccacgtgatcgccggcaacgtggaggagttcagaaaggacttcatcagcagaatctggctgacctacagagaggagttcccccagatcgagggcagcgccctgaccaccgactgcggctggggctgcaccctgagaaccggccagatgctgctggcccagggcctgatcctgcacttcctgggcagagcctggacctggcccgacgccctgaacatcgagaacagcgacagcgagagctggaccagccacaccgtgaagaagttcaccgccagcttcgaggccagcctgagcggcgagagagagttcaagacccccaccatcagcctgaaggagaccatcggcaagtacagcgacgaccactag

SEQ ID NO: 339134 - DNA, 456 bp, Artificial Sequence
  derived and/or modified sequence
atggaggccaccggcaccgacgaggtggacaagctgaagaccaagttcatcagcgcctggaacaacatgaagtacagctgggtgctgaagaccaagacctacttcagcagaaacagccccgtgctgctgctgggcaagtgctaccacttcaagtacgaggacgaggacaagaccctgcccgccgagagcggctgcaccatcgaggaccacgtgatcgccggcaacgtggaggagttcagaaaggacttcatcagcagaatctggctgacctacagagaggagttcccccagatcgagggcagcgccctgaccaccgactgcggctggggctgcaccctgagaaccggccagatgctgctggcccagggcctgatcctgcacttcctgggcagagcctggacctggcccgacgccctgaacatcgagaacagcgacagcgagagctggaccagctag

SEQ ID NO: 339135 - DNA, 570 bp, Artificial Sequence
  derived and/or modified sequence
atggaggccacgggtacagatgaagtcgacaaactgaagacaaaattcatttctgcttggaataatatgaaatatagctgggtactgaaaaccaaaacctacttttcacgcaactccccggtcctgctgttgggcaagtgttatcacttcaagtacgaggatgaggataaaaccctgcccgccgagtcaggctgcactatagaagaccacgtgattgcaggaaacgtcgaggaatttaggaaggactttatcagcagaatctggctgacataccgagaagaatttccacagatcgagggctccgccctgaccaccgactgtggctgggggtgcaccctccggacaggccagatgttgcttgctcagggtctgatccttcactttctgggacgagcgtggacatggccagacgcgctgaatatagaaaattctgattcggagtcatggactagccacactgttaaaaagtttacagcgtcctttgaggcaagcttgtcaggggagagggagttcaaaacacccacaataagcctaaaggagaccatcggcaagtactcggatgatcattag

SEQ ID NO: 339136 - DNA, 456 bp, Artificial Sequence
  derived and/or modified sequence
atggaggccacagggacagatgaggtggataaactgaagaccaagtttatctcggcctggaacaacatgaaatattcctgggtgctcaaaacgaagacatatttcagccgcaatagccccgtactgcttctgggcaagtgctaccactttaaatatgaagacgaggataagactcttccagctgagtccggatgtactattgaagaccatgtgatcgccggaaatgttgaggagtttagaaaggactttataagtaggatatggctaacataccgggaagagtttccccagatcgagggttccgcattgacgaccgattgtggctggggatgtaccctgagaaccggacagatgctgctggctcagggattgatactccattttctgggtagagcctggacctggcccgacgcgcttaacatcgaaaattctgattcggaaagctggacttcgtag

SEQ ID NO: 339137 - DNA, 570 bp, Artificial Sequence
  derived and/or modified sequence
atggaggccaccggcacagatgaggtggacaagctgaagaccaagttcatcagcgcctggaacaacatgaagtacagctgggtgctgaagaccaagacctacttcagcaggaacagccctgtgctgctgctgggcaagtgctaccacttcaagtatgaagatgaggacaagaccctgcctgctgagagcggctgcaccatcgaggaccacgtgattgctggaaatgtggaggagttcaggaaggacttcatcagccgcatctggctgacctaccgggaggagttcccccagatcgagggcagcgccctgaccacagactgtggctggggctgcaccctgaggacaggccagatgctgctggcccagggcctcatcctgcacttcctgggccgggcctggacctggccagatgccctgaacatcgagaacagcgacagcgagagctggaccagccacacagtgaagaagttcaccgccagctttgaggccagcctgagcggggagcgggagttcaagacccccaccatcagcctgaaggagaccatcggcaagtacagtgatgaccactag

SEQ ID NO: 339138 - DNA, 665 bp, Artificial Sequence
  derived and/or modified sequence
cccagagggagtggaaaggctttgaaagtcagtataaaagattaaactctacagaagaatgcaatcaagtgatggcttttcctttagaatttgaatatggaggctacaggaacagatgaagttgacaagctaaaaaccaaatttatatctgcttggaacaacatgaaatatagttgggtgttgaaaacaaagacgtattttagtagaaattctcctgtattattgcttggaaaatgttaccattttaaatatgaagatgaagataaaacgttacctgcagagtcgggatgtacaatagaggatcacgtaattgcaggaaatgtagaagaatttcgtaaagatttcatttctagaatatggctgacctacagggaagaattccctcaaatagaaggctcagctttgacaacagactgtgggtggggctgcacattgagaactggccagatgctcttggctcaaggactcatactacactttcttggtagagcttggacctggcctgatgctttgaatattgaaaattcagactctgaatcatggacttcccacactgtcaaaaaatttactgcatcatttgaagcatcactttcaggggaaagagaattcaaaaccccaacaatttctctgaaggaaacaattgggaaatattctgatgatcatga

SEQ ID NO: 339139 - DNA, 456 bp, Artificial Sequence
  derived and/or modified sequence
atggaggccaccggcacagatgaggtggacaagctgaagaccaagttcatcagcgcctggaacaacatgaagtacagctgggtgctgaagaccaagacctacttcagcaggaacagccctgtgctgctgctgggcaagtgctaccacttcaagtatgaagatgaggacaagaccctgcctgctgagagcggctgcaccatcgaggaccacgtgattgctggaaatgtggaggagttcaggaaggacttcatcagccgcatctggctgacctaccgggaggagttcccccagatcgagggcagcgccctgaccacagactgtggctggggctgcaccctgaggacaggccagatgctgctggcccagggcctcatcctgcacttcctgggccgggcctggacctggccagatgccctgaacatcgagaacagcgacagcgagagctggaccagctag

SEQ ID NO: 339140 - DNA, 570 bp, Artificial Sequence
  derived and/or modified sequence
atggaggccaccggcaccgacgaggtggacaagctgaagaccaagttcatctctgcatggaataatatgaaatatagctgggtgctcaagactaaaacatacttcagtcgtaatagtcccgtgctactgttgggaaaatgttaccacttcaaatatgaggacgaggacaagactctccctgctgagtcaggctgcacgatcgaggaccacgtaattgccggcaacgtcgaggaatttcgaaaagactttatctctaggatatggctcacctatcgggaagagtttcctcagatcgaagggagtgcactgactacggactgcgggtggggatgtacgttgcgtactggacaaatgctcctcgcccaggggctgatactgcattttctgggccgcgcctggacctggcccgatgcactgaatatagagaactctgattccgagtcttggacatcccacaccgtgaaaaaattcacagcaagtttcgaggcttcgcttagcggagaacgggaattcaaaacacccaccatctcattgaaagagaccatcggtaagtatagtgatgaccactag

SEQ ID NO: 339141 - DNA, 456 bp, Artificial Sequence
  derived and/or modified sequence
atggaggccaccggcaccgacgaggtggacaagctgaagaccaagttcattagcgcatggaataacatgaagtactcctgggtcttaaaaacaaaaacgtactttagtaggaattccccagtgctattgttgggcaagtgctatcacttcaagtatgaggacgaagataaaaccctccccgctgagtccggttgcaccattgaggatcatgtgattgcaggtaatgttgaggaattcagaaaagatttcattagccggatctggctcacttacagggaggagtttcctcagattgaagggtcagcacttaccactgactgcggctggggttgcaccttacgcacgggtcagatgctcctggcccagggactcatcctccactttctcgggagggcctggacatggccagacgcacttaatattgaaaactctgattctgaaagctggactagctag

SEQ ID NO: 339142 - RNA, 570 nt, Artificial Sequence
  derived and/or modified sequence
auggaggccacugggacagacgaggucgacaaacugaagacaaaauuuauauccgccuggaauaauaugaaauauagcugggugcugaaaacaaagacuuacuuuucuagaaauucaccaguucuucucuugggaaaaugcuaccauuucaaguaugaggaugaggauaaaacucuucccgcagagucugggugcaccaucgaagaucacgucaucgccgggaauguggaggaauuccgcaaagacuuuauaaguagaauuuggcucaccuacagagaggaauucccucagaucgaggguagugcucugaccacggacuguggauggggaugcacgcuucgaaccggacaaaugcugcuggcccagggacugauucugcacuuucuuggccgcgcuuggaccuggcccgacgcccugaacauugaaaauucagacucugaaucguggacaucacacacugucaaaaaguucacagcaagcuucgaagccagucugucuggugaacgcgaauuuaagacgccaaccaucagccuuaaggagacaaucgggaaauacagcgaugaucacuag

SEQ ID NO: 339143 - RNA, 456 nt, Artificial Sequence
  derived and/or modified sequence
auggaggccaccggaaccgaugaaguagacaaguuaaaaacuaaauuuaucuccgcauggaauaacaugaaauacuccuggguacucaagaccaagacauauuucagcagaaauucaccaguccugcuguugggcaagugcuaucauuucaaguacgaggacgaggacaaaacccuuccagcagaaucaggauguaccauugaggaucacgugauugcaggcaacguugaggaauuccggaaagauuucaucucccgaauuuggcugacuuauagagaagaauucccccaaaucgaaggguccgcacucaccacugacugcggauggggaugcacguugcgaacuggccaaaugcuucucgcgcagggccuaauccugcauuucuuaggcagagcauggacuuggccagaugcucugaacaucgagaauucagacuccgaguccuggaccagcuag

SEQ ID NO: 339144 - RNA, 570 nt, Artificial Sequence
  derived and/or modified sequence
auggaggcuacuggaaccgaugaggucgauaaauugaaaacaaaauuuauuucagcguggaacaacaugaaguauucaugggugcucaagacuaaaacuuacuuuuccagaaacucaccgguguuacuguuaggaaaauguuaccacuuuaaguacgaagacgaggauaagacacugccugccgagaguggcugcacuaucgaggaucauguaauugcgggaaacguggaagaguucaggaaggauuucaucagucgcaucuggcucaccuaucgggaggaauucccacagauugaggguagcgcacuuaccaccgacuguggguggggcugcaccuuacgaacagggcagauguuguuggcccaagggcuuauucuucauuucuuaggacgagccuggacauggccggacgcccugaauaucgagaauuccgacucagaaagcuggacuucacacaccgucaaaaaauuuacugcguccuuugaagcaagucucuccggggaacgagaguuuaaaacaccuaccaucucacugaaggaaaccaucggcaaauauagugaugaccacuag

SEQ ID NO: 339145 - RNA, 456 nt, Artificial Sequence
  derived and/or modified sequence
auggaggccaccggaacagacgagguugauaaauugaaaacgaaguucauauccgcauggaauaacaugaaguauagcuggguuuuaaagacgaaaacuuacuucuccagaaacaguccaguacugcugcugggaaaauguuaucacuuuaaauaugaagacgaggacaaaacuuuaccugccgaaucaggaugcaccauugaggaccauguuauugcuggaaauguugaggaguuucggaaggacuuuauuucucgcauuuggcugaccuaucgggaagaguuuccacaaaucgaaggguccgcucucacgacugauuguggauggggaugcacccucagaacuggacaaaugcuccuggcucaaggcuugauacugcacuuucugggucgagcguggacuuggccugaugcccugaauauagagaauagugacucugaguccuggacaucuuag

SEQ ID NO: 339146 - protein, 201 aa, Artificial Sequence
  derived and/or modified sequence
MGTTALLGGVRLSETIPVKRLARGLARVRDGGWGSPQAGEKALGGPLLTSGSHLPSYVKSYLLPDKQSKRKTAVKKRNLNPVFNETLRYSVPQAELQGRVLSLSVWHRESLGRNIFLGEVEVPLDTWDWGSEPTWLPLQPRVPPSPDDLPSRGLLALSLKYVPAGSEGAGLPPSGELHFWVKEARDLLPLRAGSLDTYVQW

SEQ ID NO: 339147 - DNA, 606 bp, Artificial Sequence
  derived and/or modified sequence
atgggcaccaccgccctgctgggcggcgtgagactgagcgagaccatccccgtgaagagactggccagaggcctggccagagtgagagacggcggctggggcagcccccaggccggcgagaaggccctgggcggccccctgctgaccagcggcagccacctgcccagctacgtgaagagctacctgctgcccgacaagcagagcaagagaaagaccgccgtgaagaagagaaacctgaaccccgtgttcaacgagaccctgagatacagcgtgccccaggccgagctgcagggcagagtgctgagcctgagcgtgtggcacagagagagcctgggcagaaacatcttcctgggcgaggtggaggtgcccctggacacctgggactggggcagcgagcccacctggctgcccctgcagcccagagtgccccccagccccgacgacctgcccagcagaggcctgctggccctgagcctgaagtacgtgcccgccggcagcgagggcgccggcctgccccccagcggcgagctgcacttctgggtgaaggaggccagagacctgctgcccctgagagccggcagcctggacacctacgtgcagtggtag

SEQ ID NO: 339148 - DNA, 606 bp, Artificial Sequence
  derived and/or modified sequence
atgggaaccacagcattgcttggaggggtgcggctctccgagaccatcccggtcaagcgacttgcaagaggcttggctagggtcagggacggcggctggggctcaccgcaggccggagagaaggcactcggagggccattgctgacctccggatcacatctgccttcctacgtgaagagctatttgttgcccgataaacagagcaaacggaaaacagctgttaaaaagagaaacctgaatcctgtctttaatgaaactctgaggtatagtgtgccccaagccgagctgcagggtagggtactgagtctgagtgtctggcatagggaaagcttgggccggaacattttccttggagaggtggaagtacctctcgacacttgggattggggcagcgaacccacctggctgcctttgcagcccagagtgccaccatcccccgacgacctgccttcaagaggtctgttagcattgtctcttaagtacgtgcccgctggatccgagggcgcgggcctccctccatctggagagctccatttttgggtcaaggaggcgcgtgaccttcttcccctacgtgcaggctctctcgatacatacgtacagtggtag

SEQ ID NO: 339149 - DNA, 606 bp, Artificial Sequence
  derived and/or modified sequence
atgggcaccacagccctgctgggcggcgtgcggctgtctgagaccatccctgtgaagaggctggcccggggcctggcccgggtgagagatggcggctggggcagcccccaggccggggagaaggccctgggcggccccctgctgaccagcggcagccacctgcccagctatgtgaagagctacctgctgcctgacaagcagagcaagaggaagacagctgtgaagaagaggaacctgaaccctgtgttcaatgagaccctgcgctacagcgtgccccaggccgagctgcagggccgggtgctgagcctgtctgtgtggcaccgggagagcctgggcaggaacatcttcctgggggaggtggaggtgcccctggacacctgggactggggcagcgagcccacctggctgcccctgcagccccgggtgccccccagcccagatgacctgcccagccggggcctgctggccctgagcctgaagtatgtgcctgctggcagcgagggcgccggcctgccccccagcggggagctgcacttctgggtgaaggaggcccgggacctgctgcccctgcgggccggcagcctggacacctacgtgcagtggtag

SEQ ID NO: 339150 - DNA, 606 bp, Artificial Sequence
  derived and/or modified sequence
atgggcaccaccgccctgctgggcggcgtgcggctgagcgagaccattccggttaagagactggcgcgcggcctggccagagtcagggacggagggtggggctccccccaggctggcgagaaggctctcggaggcccgttgttaactagtgggagtcacctcccctcatacgtgaaaagttacctgctcccagacaaacagtctaaacggaaaacggccgtcaaaaagaggaaccttaacccagtgtttaatgagactctgcgatactcggtcccccaagcagagttgcagggacgggtgctctcactctctgtgtggcatagagaatcactgggccggaacatatttctgggagaggtggaagtccccctggacacctgggattggggctccgaaccaacatggcttcctttgcaaccaagagtgccaccctcaccagatgatctgccctccagaggtctcttggccttatcgctgaagtatgtaccagcaggctccgaaggcgccggactgcccccctccggcgaactccatttctgggtgaaggaggcacgcgacctgctacccctcagggccgggtccctggacacatatgtccagtggtag

SEQ ID NO: 339151 - DNA, 606 bp, Artificial Sequence
  derived and/or modified sequence
atgggcaccacagccctgctgggcggagtccggttgtccgagacaatccctgtgaagaggctggccagggggctcgccagagtgcgagacggagggtggggctccccacaggcaggggaaaaagccctgggtgggcctctgctcaccagtgggtcacacctgccaagctatgtgaagtcctacttgctgcctgataagcagtccaaaagaaaaaccgccgtgaaaaagcgcaacctgaatcctgtcttcaatgaaacattgagatattcagtccctcaggccgagcttcaaggacgcgtcctctcccttagcgtttggcaccgtgagagccttggcaggaacatatttctgggcgaggtggaagtgccgttggacacctgggactggggaagcgaacctacttggctgccactccaacctcgcgtacccccaagccctgacgatctcccttccaggggcctcctcgccctgtctcttaaatacgtgcctgcaggttcggagggagctgggctccccccttccggcgagttacacttctgggtcaaggaggcacgcgacctgctgcccttgcgcgcagggtcactggatacctatgtccaatggtag

SEQ ID NO: 339152 - DNA, 895 bp, Artificial Sequence
  derived and/or modified sequence
cagccttaactcctccacgctgagcggcagccagatgagcctgtcaggcgacgcggaggcggtgcaggtccgcggctccgtgcacttcgcgctgcactacgagccgggcgccgccgagctgcgcgtgcacgtgatccagtgccagggcctggccgccgcccggcgccgccgctcggacccgtgagtgccccgccggccaagcggggcgcggctgtcacagcccagcccaccattcacagggtctcggcctcctcgtcctcatcttcaaaatgggaacaacagcgttattgggaggcgtgcgattaagcgagacaatccctgtaaagcgcttagcacgaggcctggcacgtgttcgggatggtggctgggggagcccacaggcaggggagaaggctctgggagggcccctcctcacctcgggttctcacctccccagctacgtcaaaagctacctcctcccggataagcagagcaagcgcaagacggcggtgaagaaacggaatctgaatccggttttcaacgagactctccggtactccgtcccgcaggccgagcttcagggccgcgtgctgagcctgtctgtgtggcaccgcgaaagcctgggtcgcaacatctttctgggcgaagttgaagtgcccctggacacgtgggactggggctctgagcccacctggctccccctgcagccccgggtcccaccctctcccgacgaccttccgagccgcgggttactcgccctgtccctcaagtacgtccccgccggctccgagggcgcaggactgcccccgagcggggagctgcacttctgggtgaaggaggctcgggacctcctgccgctgcgggcaggatccctggacacttacgtacaatggtgaggagtgctggccctccgggc

SEQ ID NO: 339153 - protein, 300 aa, Artificial Sequence
  derived and/or modified sequence
MAEQLMTLAYDNGINLFDTAEVYAAGKAEVVLGNIIKKKGWRRSSLVITTKIFWGGKAETERGLSRKHIIEGLKASLERLQLEYVDVVFANRPDPNTPMEETVRAMTHVINQGMAMYWGTSRWSSMEIMEAYSVARQFNLTPPICEQAEYHMFQREKVEVQLPELFHKIGVGAMTWSPLACGIVSGKYDSGIPPYSRASLKGYQWLKDKILSEEGRRQQAKLKELQAIAERLGCTLPQLAIAWCLRNEGVSSVLLGASNADQLMENIGAIQVLPKLSSSIIHEIDSILGNKPYSKKDYRS

SEQ ID NO: 339154 - DNA, 522 bp, Artificial Sequence
  derived and/or modified sequence
atgtaccccgaaagtactacaggaagccctgcacggctgtcattgcgacagaccggctcccccggcatgatctactcaacacgctacggcagccccaagcggcagcttcaattttacagaaatctagggaagtctggacttagagtgtcatgtctgggtctcggaacctgggtgactttcggtggccagattacagacgaaatggctgaacagttgatgactctggcctacgacaacggcatcaacctcttcgacaccgcggaggtgtatgccgcaggaaaagccgaggtggtactgggcaacatcatcaagaaaaaaggttggtcccagcagggagaacgggccgggcaggcaagagtcaccccgccatgctctttgggccgtcgagctagagatgcttccaagagtgccggcgctggatgccacctgcaggcacaagcatgtgttccctcctcaacacaggccctgcaaacgactcgcggcagagcccctctgaagccacccccaccactggcctcgtag

SEQ ID NO: 339155 - DNA, 522 bp, Artificial Sequence
  derived and/or modified sequence
atgtacccggagtccacaacaggctccccagctcgcttatccctgagacaaactggctctccgggaatgatctatagcactaggtacgggagtccgaaacgccagctgcaattttaccgcaacttaggcaaatcagggctgagggtaagctgcctggggctgggaacgtgggtcacatttggtggacaaattaccgatgagatggcggagcagctgatgaccctggcctatgataatggcatcaacttattcgatactgctgaagtgtacgcagctggtaaggctgaggttgtccttggtaatataattaagaaaaaagggtggcgccaaaggggggagagggcaggccaggcccgcgtgacccccccatgttctctaggtagacgtgccagagacgcaagcaagtctgctggagccggatgtcacctgcaggctcaggcttgtgttccttctagcacccaggccctccagaccactcgggggcgggcgccgctgaagccgcccccacccctggcatcctag

SEQ ID NO: 339156 - DNA, 159 bp, Artificial Sequence
  derived and/or modified sequence
atgtaccctgaatccactacagggagccctgcgcgcctgtccctaaggcagactggatctccaggcatgatctacagcacacggtatggcagtcctaaaaggcagctgcaattctatagaaacctcggaaagtctgggctgcgggtctcttgtctttag

SEQ ID NO: 339157 - DNA, 522 bp, Artificial Sequence
  derived and/or modified sequence
atgtacccagagagcaccaccggcagccctgcccggctgagcctgcggcagacaggcagccctggcatgatctacagcaccaggtatggcagccccaagaggcagctgcagttctacagaaacctgggcaagagcggcctgcgggtgtcctgcctgggcctgggcacctgggtgaccttcggcggccagatcacagatgagatggccgagcagctgatgaccctggcctatgacaatggcatcaacctgtttgacacagctgaggtgtatgctgctgggaaggccgaggtggtgctgggcaacatcatcaagaagaagggctggagccagcagggcgagagagctggccaggcccgggtgaccccaccctgcagcctgggccggcgggccagagatgccagcaagtctgctggagctggctgccacctgcaggcccaggcctgtgtgcccagcagcacccaggccctgcagaccacccggggccgggcccccctgaagcccccaccacccctggccagctag

SEQ ID NO: 339158 - DNA, 522 bp, Artificial Sequence
  derived and/or modified sequence
atgtacccagagagcaccaccggcagccctgcccggctgagcctgcggcagacaggcagccctggcatgatctacagcaccaggtatggcagccccaagaggcagctgcagttctacagaaacctgggcaagagcggcctgcgggtgtcctgcctgggcctgggcacctgggtgaccttcggcggccagatcacagatgagatggccgagcagctgatgaccctggcctatgacaatggcatcaacctgtttgacacagctgaggtgtatgctgctgggaaggccgaggtggtgctgggcaacatcatcaagaagaagggctggaggcagagaggagagagagctggccaggcccgggtgaccccaccctgcagcctgggccggcgggccagagatgccagcaagtctgctggagctggctgccacctgcaggcccaggcctgtgtgcccagcagcacccaggccctgcagaccacccggggccgggcccccctgaagcccccaccacccctggccagctag

SEQ ID NO: 339159 - DNA, 159 bp, Artificial Sequence
  derived and/or modified sequence
atgtacccagagagcaccaccggcagccctgcccggctgagcctgcggcagacaggcagccctggcatgatctacagcaccaggtatggcagccccaagaggcagctgcagttctacagaaacctgggcaagagcggcctgcgggtgtcctgcctgtag

SEQ ID NO: 339160 - DNA, 522 bp, Artificial Sequence
  derived and/or modified sequence
atgtaccccgagagcaccaccggcagccccgcccggctgagcctgcgccaaaccggtagccctgggatgatctactcaacgcgttacgggtctccaaaacggcagttacagttctacagaaacctcggtaaatctggactcagagtcagctgtctgggcctgggtacatgggtcaccttcggagggcagattaccgacgagatggctgaacagctgatgactctcgcatacgacaacgggataaatctcttcgatactgccgaagtctacgcagctgggaaggccgaggtcgtgctggggaacattattaagaagaaaggctggtctcagcagggcgaaagagccggacaggcgagggtgaccccaccatgttcactgggacgtcgcgcacgggatgcgtcaaaatctgccggtgcgggctgccacctacaggctcaggcttgcgtgcccagctccacacaggcgctccagacaacgcggggaagggcccccctgaaaccacctcctccacttgcatcatag

SEQ ID NO: 339161 - DNA, 522 bp, Artificial Sequence
  derived and/or modified sequence
atgtaccccgagagcaccaccggcagccccgcccggctgagcctgcgccagacaggctctcctggaatgatctatagcactcgttatgggtcacccaaacgacagctgcagttctatagaaacttggggaaatcaggactcagggtatcctgcttaggcctcgggacctgggtgactttcggaggacagatcactgacgaaatggccgaacagctaatgacactggcgtacgacaatgggatcaacctgttcgataccgcagaagtctatgcagcaggcaaagctgaagtagttcttgggaatattatcaaaaaaaagggctggcggcagaggggggagcgagctgggcaggcaagagttactccaccctgcagcctgggccgcagagccagagacgcaagtaagtccgctggagccggatgccacctccaggcccaggcctgcgttcctagcagtacccaggccctgcagacaacccgagggcgcgctcctctgaaacctccaccccctttggcgtcctag

SEQ ID NO: 339162 - DNA, 159 bp, Artificial Sequence
  derived and/or modified sequence
atgtaccccgagagcaccaccggcagccccgcccggctgagcctgcgtcagacagggtcaccaggcatgatttactcaaccagatacggatcccccaaacggcagttgcaattttacagaaacttgggcaagagtggcctcagagttagctgtttatag

SEQ ID NO: 339163 - DNA, 700 bp, Artificial Sequence
  derived and/or modified sequence
gctgcaccaacttcctgttgggtgctgtggtcccaaggcgcgtgctttgcagcagatgtgtgacctggcgttcccctgagtgctcggaaaatggccttgtctccggtcgttcccgttcaggagcagaattttcccactgtaaaaaaccgagcaagtctggataagtgaggctggctccatgtatccagaatcaacgacgggctccccggctcggctctcgctgcggcagacgggctcccccgggatgatctacagtactcggtatgggagtcccaaaagacagctccagttttacaggaacctgggcaagtctggcctgcgggtctcctgcctgggacttggaacatgggtgaccttcggaggccagatcaccgatgagatggcagagcagctcatgaccttggcctatgataatggcatcaacctcttcgatacagcagaagtctacgcagccggcaaggctgaagtggtactgggaaacatcattaagaagaaaggatggagccagcagggagagagggcaggacaggccagagtgacgcccccgtgcagcttgggccggagggcaagggatgccagtaagtctgcaggtgcggggtgccacctacaggcccaggcctgtgtcccaagcagtacccaggctttgcagaccacgcggggcagggctccactgaagccacccccacccctcgccagctag

SEQ ID NO: 339164 - DNA, 822 bp, Artificial Sequence
  derived and/or modified sequence
agacgtccaccaaagccacacatcgcgacacacggaggcagaaagcagcggtctcctaagaagttagacacgaggaatctcgggcagcgagaattttcccactgtaaaaaaccgagcaagtctggataagtgaggctggctccatgtatccagaatcaacgacgggctccccggctcggctctcgctgcggcagacgggctcccccgggatgatctacagtactcggtatgggagtcccaaaagacagctccagttttacaggaacctgggcaagtctggcctgcgggtctcctgcctgggacttggaacatgggtgaccttcggaggccagatcaccgatgagatggcagagcagctcatgaccttggcctatgataatggcatcaacctcttcgatacagcagaagtctacgcagccggcaaggctgaagtggtactgggaaacatcattaagaagaaaggatggaggcagaggggagagagggcaggacaggccagagtgacgcccccgtgcagcttgggccggagggcaagggatgccagtaagtctgcaggtgcggggtgccacctacaggcccaggcctgtgtcccaagcagtacccaggctttgcagaccacgcggggcagggctccactgaagccacccccacccctcgccagctagctccatagggaagcctgtgtctcctgcccccagggcgcaccctcagtgcaggcacctctgttcccgctttgcccctggaggagccactattccagaaggctccaccctgccgtcctgcgggagcctgctgtccagtcctggccgggccaaggcctgg

SEQ ID NO: 339165 - DNA, 486 bp, Artificial Sequence
  derived and/or modified sequence
gggggcgctaaagtcgcaggggcagggcgggaaggaagatccggcgcggggcacaggatccggagctggagcccccagaggcctcacgacaggactagtgccttggtaagaagaggaaaaggccagagctccctccctaccctgtgtggacccagcaggaaggaattctgtctgcaagagagagccctcacctggaaccaaatcagccaggaccctgatgttggatttaccagcctccagcaccgtgagacagaaacgtctgctgtttcagccacccagaattttcccactgtaaaaaaccgagcaagtctggataagtgaggctggctccatgtatccagaatcaacgacgggctccccggctcggctctcgctgcggcagacgggctcccccgggatgatctacagtactcggtatgggagtcccaaaagacagctccagttttacaggaacctgggcaagtctggcctgcgggtctcctgcct

SEQ ID NO: 339166 - DNA, 522 bp, Artificial Sequence
  derived and/or modified sequence
atgtatccggagagtaccactggcagccccgctcgcttgtccctccggcagaccggatcaccaggtatgatttattctaccagatacgggtcaccaaagcgtcagctgcagttttatcgaaatctggggaaatccgggttacgtgttagctgtctcggcctgggcacctgggtgaccttcggcggacaaattactgacgagatggccgagcagctgatgacacttgcctatgacaatgggatcaacctgttcgacaccgcagaagtgtatgcagctgggaaggcggaggtcgtactgggtaacatcattaagaaaaagggctggtcccagcaaggagagagagccggacaagccagagttacccccccttgtagtcttggaaggcgggctagggatgcatctaagagcgcgggagctggctgtcatctccaggcacaggcttgcgtgccaagttccacccaggccctgcaaaccacacgcggtagggcacccctgaaaccccctccacccctggcaagttag

SEQ ID NO: 339167 - DNA, 522 bp, Artificial Sequence
  derived and/or modified sequence
atgtaccccgagtctacaacaggctctcccgctaggctttctctaagacagacaggatctcccggaatgatatacagtactaggtatggctcacccaagaggcagctacaattctacaggaatttagggaagagcggcctgcgcgtgtcttgcctcggcctcggtacttgggttacctttggaggccagataaccgatgagatggccgagcagctgatgacgctggcttacgataatggcataaatcttttcgacaccgcggaggtctatgctgccggtaaggctgaagtagtcttggggaatatcatcaagaagaaaggttggaggcagcggggagagcgagctggccaggccagagtgacgcccccttgttctctggggaggcgcgctagagacgcctcaaaatcagcaggggctggatgccacctccaagcgcaagcctgcgtgccttcatccacacaagccctccagacaaccagaggacgtgccccactgaaacctccaccgcctcttgcgtcttag

SEQ ID NO: 339168 - DNA, 159 bp, Artificial Sequence
  derived and/or modified sequence
atgtacccagagtccactaccgggagccccgctcgactgtcacttcgccaaactggctctcccggtatgatctactcaacaaggtatgggtctcctaaaagacagcttcagttttacaggaatctaggcaaaagtgggctccgcgtgagttgcctgtag

SEQ ID NO: 339169 - DNA, 522 bp, Artificial Sequence
  derived and/or modified sequence
atgtaccccgagagcaccaccggcagccccgccagactgagcctgagacagaccggcagccccggcatgatctacagcaccagatacggcagccccaagagacagctgcagttctacagaaacctgggcaagagcggcctgagagtgagctgcctgggcctgggcacctgggtgaccttcggcggccagatcaccgacgagatggccgagcagctgatgaccctggcctacgacaacggcatcaacctgttcgacaccgccgaggtgtacgccgccggcaaggccgaggtggtgctgggcaacatcatcaagaagaagggctggagccagcagggcgagagagccggccaggccagagtgacccccccctgcagcctgggcagaagagccagagacgccagcaagagcgccggcgccggctgccacctgcaggcccaggcctgcgtgcccagcagcacccaggccctgcagaccaccagaggcagagcccccctgaagccccccccccccctggccagctag

SEQ ID NO: 339170 - DNA, 522 bp, Artificial Sequence
  derived and/or modified sequence
atgtaccccgagagcaccaccggcagccccgccagactgagcctgagacagaccggcagccccggcatgatctacagcaccagatacggcagccccaagagacagctgcagttctacagaaacctgggcaagagcggcctgagagtgagctgcctgggcctgggcacctgggtgaccttcggcggccagatcaccgacgagatggccgagcagctgatgaccctggcctacgacaacggcatcaacctgttcgacaccgccgaggtgtacgccgccggcaaggccgaggtggtgctgggcaacatcatcaagaagaagggctggagacagagaggcgagagagccggccaggccagagtgacccccccctgcagcctgggcagaagagccagagacgccagcaagagcgccggcgccggctgccacctgcaggcccaggcctgcgtgcccagcagcacccaggccctgcagaccaccagaggcagagcccccctgaagccccccccccccctggccagctag

SEQ ID NO: 339171 - DNA, 159 bp, Artificial Sequence
  derived and/or modified sequence
atgtaccccgagagcaccaccggcagccccgccagactgagcctgagacagaccggcagccccggcatgatctacagcaccagatacggcagccccaagagacagctgcagttctacagaaacctgggcaagagcggcctgagagtgagctgcctgtag

SEQ ID NO: 339172 - protein, 2140 aa, Artificial Sequence
  derived and/or modified sequence
MAERRAFAQKISRTVAAEVRKQISGQYSGSPQLLKNLNIVGNISHHTTVPLTEAVDPVDLEDYLITHPLAVDSGPLRDLIEFPPDDIEVVYSPRDCRTLVSAVPEESEMDPHVRDCIRSYTEDWAIVIRKYHKLGTGFNPNTLDKQKERQKGLPKQVFESDEAPDGNSYQDDQDDLKRRSMSIDDTPRGSWACSIFDLKNSLPDALLPNLLDRTPNEEIDRQNDDQRKSNRHKELFALHPSPDEEEPIERLSVPDIPKEHFGQRLLVKCLSLKFEIEIEPIFASLALYDVKEKKKISENFYFDLNSEQMKGLLRPHVPPAAITTLARSAIFSITYPSQDVFLVIKLEKVLQQGDIGECAEPYMIFKEADATKNKEKLEKLKSQADQFCQRLGKYRMPFAWTAIHLMNIVSSAGSLERDSTEVEISTGERKGSWSERRNSSIVGRRSLERTTSGDDACNLTSFRPATLTVTNFFKQEGDRLSDEDLYKFLADMRRPSSVLRRLRPITAQLKIDISPAPENPHYCLTPELLQVKLYPDSRVRPTREILEFPARDVYVPNTTYRNLLYIYPQSLNFANRQGSARNITVKVQFMYGEDPSNAMPVIFGKSSCSEFSKEAYTAVVYHNRSPDFHEEIKVKLPATLTDHHHLLFTFYHVSCQQKQNTPLETPVGYTWIPMLQNGRLKTGQFCLPVSLEKPPQAYSVLSPEVPLPGMKWVDNHKGVFNVEVVAVSSIHTQDPYLDKFFALVNALDEHLFPVRIGDMRIMENNLENELKSSISALNSSQLEPVVRFLHLLLDKLILLVIRPPVIAGQIVNLGQASFEAMASIINRLHKNLEGNHDQHGRNSLLASYIHYVFRLPNTYPNSSSPGPGGLGGSVHYATMARSAVRPASLNLNRSRSLSNSNPDISGTPTSPDDEVRSIIGSKGLDRSNSWVNTGGPKAAPWGSNPSPSAESTQAMDRSCNRMSSHTETSSFLQTLTGRLPTKKLFHEELALQWVVCSGSVRESALQQAWFFFELMVKSMVHHLYFNDKLEAPRKSRFPERFMDDIAALVSTIASDIVSRFQKDTEMVERLNTSLAFFLNDLLSVMDRGFVFSLIKSCYKQVSSKLYSLPNPSVLVSLRLDFLRIICSHEHYVTLNLPCSLLTPPASPSPSVSSATSQSSGFSTNVQDQKIANMFELSVPFRQQHYLAGLVLTELAVILDPDAEGLFGLHKKVINMVHNLLSSHDSDPRYSDPQIKARVAMLYLPLIGIIMETVPQLYDFTETHNQRGRPICIATDDYESESGSMISQTVAMAIAGTSVPQLTRPGSFLLTSTSGRQHTTFSAESSRSLLICLLWVLKNADETVLQKWFTDLSVLQLNRLLDLLYLCVSCFEYKGKKVFERMNSLTFKKSKDMRAKLEEAILGSIGARQEMVRRSRGQLGTYTIASPPERSPSGSAFGSQENLRWRKDMTHWRQNTEKLDKSRAEIEHEALIDGNLATEANLIILDTLEIVVQTVSVTESKESILGGVLKVLLHSMACNQSAVYLQHCFATQRALVSKFPELLFEEETEQCADLCLRLLRHCSSSIGTIRSHASASLYLLMRQNFEIGNNFARVKMQVTMSLSSLVGTSQNFNEEFLRRSLKTILTYAEEDLELRETTFPDQVQDLVFNLHMILSDTVKMKEHQEDPEMLIDLMYRIAKGYQTSPDLRLTWLQNMAGKHSERSNHAEAAQCLVHSAALVAEYLSMLEDRKYLPVGCVTFQNISSNVLEESAVSDDVVSPDEEGICSGKYFTESGLVGLLEQAAASFSMAGMYEAVNEVYKVLIPIHEANRDAKKLSTIHGKLQEAFSKIVHQTTIWKRMFGTYFRVGFYGTKFGDLDEQEFVYKEPAITKLAEISHRLEGFYGERFGEDVVEVIKDSNPVDKCKLDPNKAYIQITYVEPYFDTYEMKDRITYFDKNYNLRRFMYCTPFTLDGRAHGELHEQFKRKTILTTSHAFPYIKTRVNVTHKEEIILTPIEVAIEDMQKKTQELAFATHQDPADPKMLQMVLQGSVGTTVNQGPLEVAQVFLSEIPSDPKLFRHHNKLRLCFKDFTKRCEDALRKNKSLIGPDQKEYQRELERNYHRLKEALQPLINRKIPQLYKAVLPVTCHRDSFSRMSLRKMDL

SEQ ID NO: 339173 - DNA, 6423 bp, Artificial Sequence
  derived and/or modified sequence
atggccgagagaagagccttcgcccagaagatcagcagaaccgtggccgccgaggtgagaaagcagatcagcggccagtacagcggcagcccccagctgctgaagaacctgaacatcgtgggcaacatcagccaccacaccaccgtgcccctgaccgaggccgtggaccccgtggacctggaggactacctgatcacccaccccctggccgtggacagcggccccctgagagacctgatcgagttcccccccgacgacatcgaggtggtgtacagccccagagactgcagaaccctggtgagcgccgtgcccgaggagagcgagatggacccccacgtgagagactgcatcagaagctacaccgaggactgggccatcgtgatcagaaagtaccacaagctgggcaccggcttcaaccccaacaccctggacaagcagaaggagagacagaagggcctgcccaagcaggtgttcgagagcgacgaggcccccgacggcaacagctaccaggacgaccaggacgacctgaagagaagaagcatgagcatcgacgacacccccagaggcagctgggcctgcagcatcttcgacctgaagaacagcctgcccgacgccctgctgcccaacctgctggacagaacccccaacgaggagatcgacagacagaacgacgaccagagaaagagcaacagacacaaggagctgttcgccctgcaccccagccccgacgaggaggagcccatcgagagactgagcgtgcccgacatccccaaggagcacttcggccagagactgctggtgaagtgcctgagcctgaagttcgagatcgagatcgagcccatcttcgccagcctggccctgtacgacgtgaaggagaagaagaagatcagcgagaacttctacttcgacctgaacagcgagcagatgaagggcctgctgagaccccacgtgccccccgccgccatcaccaccctggccagaagcgccatcttcagcatcacctaccccagccaggacgtgttcctggtgatcaagctggagaaggtgctgcagcagggcgacatcggcgagtgcgccgagccctacatgatcttcaaggaggccgacgccaccaagaacaaggagaagctggagaagctgaagagccaggccgaccagttctgccagagactgggcaagtacagaatgcccttcgcctggaccgccatccacctgatgaacatcgtgagcagcgccggcagcctggagagagacagcaccgaggtggagatcagcaccggcgagagaaagggcagctggagcgagagaagaaacagcagcatcgtgggcagaagaagcctggagagaaccaccagcggcgacgacgcctgcaacctgaccagcttcagacccgccaccctgaccgtgaccaacttcttcaagcaggagggcgacagactgagcgacgaggacctgtacaagttcctggccgacatgagaagacccagcagcgtgctgagaagactgagacccatcaccgcccagctgaagatcgacatcagccccgcccccgagaacccccactactgcctgacccccgagctgctgcaggtgaagctgtaccccgacagcagagtgagacccaccagagagatcctggagttccccgccagagacgtgtacgtgcccaacaccacctacagaaacctgctgtacatctacccccagagcctgaacttcgccaacagacagggcagcgccagaaacatcaccgtgaaggtgcagttcatgtacggcgaggaccccagcaacgccatgcccgtgatcttcggcaagagcagctgcagcgagttcagcaaggaggcctacaccgccgtggtgtaccacaacagaagccccgacttccacgaggagatcaaggtgaagctgcccgccaccctgaccgaccaccaccacctgctgttcaccttctaccacgtgagctgccagcagaagcagaacacccccctggagacccccgtgggctacacctggatccccatgctgcagaacggcagactgaagaccggccagttctgcctgcccgtgagcctggagaagcccccccaggcctacagcgtgctgagccccgaggtgcccctgcccggcatgaagtgggtggacaaccacaagggcgtgttcaacgtggaggtggtggccgtgagcagcatccacacccaggacccctacctggacaagttcttcgccctggtgaacgccctggacgagcacctgttccccgtgagaatcggcgacatgagaatcatggagaacaacctggagaacgagctgaagagcagcatcagcgccctgaacagcagccagctggagcccgtggtgagattcctgcacctgctgctggacaagctgatcctgctggtgatcagaccccccgtgatcgccggccagatcgtgaacctgggccaggccagcttcgaggccatggccagcatcatcaacagactgcacaagaacctggagggcaaccacgaccagcacggcagaaacagcctgctggccagctacatccactacgtgttcagactgcccaacacctaccccaacagcagcagccccggccccggcggcctgggcggcagcgtgcactacgccaccatggccagaagcgccgtgagacccgccagcctgaacctgaacagaagcagaagcctgagcaacagcaaccccgacatcagcggcacccccaccagccccgacgacgaggtgagaagcatcatcggcagcaagggcctggacagaagcaacagctgggtgaacaccggcggccccaaggccgccccctggggcagcaaccccagccccagcgccgagagcacccaggccatggacagaagctgcaacagaatgagcagccacaccgagaccagcagcttcctgcagaccctgaccggcagactgcccaccaagaagctgttccacgaggagctggccctgcagtgggtggtgtgcagcggcagcgtgagagagagcgccctgcagcaggcctggttcttcttcgagctgatggtgaagagcatggtgcaccacctgtacttcaacgacaagctggaggcccccagaaagagcagattccccgagagattcatggacgacatcgccgccctggtgagcaccatcgccagcgacatcgtgagcagattccagaaggacaccgagatggtggagagactgaacaccagcctggccttcttcctgaacgacctgctgagcgtgatggacagaggcttcgtgttcagcctgatcaagagctgctacaagcaggtgagcagcaagctgtacagcctgcccaaccccagcgtgctggtgagcctgagactggacttcctgagaatcatctgcagccacgagcactacgtgaccctgaacctgccctgcagcctgctgaccccccccgccagccccagccccagcgtgagcagcgccaccagccagagcagcggcttcagcaccaacgtgcaggaccagaagatcgccaacatgttcgagctgagcgtgcccttcagacagcagcactacctggccggcctggtgctgaccgagctggccgtgatcctggaccccgacgccgagggcctgttcggcctgcacaagaaggtgatcaacatggtgcacaacctgctgagcagccacgacagcgaccccagatacagcgacccccagatcaaggccagagtggccatgctgtacctgcccctgatcggcatcatcatggagaccgtgccccagctgtacgacttcaccgagacccacaaccagagaggcagacccatctgcatcgccaccgacgactacgagagcgagagcggcagcatgatcagccagaccgtggccatggccatcgccggcaccagcgtgccccagctgaccagacccggcagcttcctgctgaccagcaccagcggcagacagcacaccaccttcagcgccgagagcagcagaagcctgctgatctgcctgctgtgggtgctgaagaacgccgacgagaccgtgctgcagaagtggttcaccgacctgagcgtgctgcagctgaacagactgctggacctgctgtacctgtgcgtgagctgcttcgagtacaagggcaagaaggtgttcgagagaatgaacagcctgaccttcaagaagagcaaggacatgagagccaagctggaggaggccatcctgggcagcatcggcgccagacaggagatggtgagaagaagcagaggccagctgggcacctacaccatcgccagcccccccgagagaagccccagcggcagcgccttcggcagccaggagaacctgagatggagaaaggacatgacccactggagacagaacaccgagaagctggacaagagcagagccgagatcgagcacgaggccctgatcgacggcaacctggccaccgaggccaacctgatcatcctggacaccctggagatcgtggtgcagaccgtgagcgtgaccgagagcaaggagagcatcctgggcggcgtgctgaaggtgctgctgcacagcatggcctgcaaccagagcgccgtgtacctgcagcactgcttcgccacccagagagccctggtgagcaagttccccgagctgctgttcgaggaggagaccgagcagtgcgccgacctgtgcctgagactgctgagacactgcagcagcagcatcggcaccatcagaagccacgccagcgccagcctgtacctgctgatgagacagaacttcgagatcggcaacaacttcgccagagtgaagatgcaggtgaccatgagcctgagcagcctggtgggcaccagccagaacttcaacgaggagttcctgagaagaagcctgaagaccatcctgacctacgccgaggaggacctggagctgagagagaccaccttccccgaccaggtgcaggacctggtgttcaacctgcacatgatcctgagcgacaccgtgaagatgaaggagcaccaggaggaccccgagatgctgatcgacctgatgtacagaatcgccaagggctaccagaccagccccgacctgagactgacctggctgcagaacatggccggcaagcacagcgagagaagcaaccacgccgaggccgcccagtgcctggtgcacagcgccgccctggtggccgagtacctgagcatgctggaggacagaaagtacctgcccgtgggctgcgtgaccttccagaacatcagcagcaacgtgctggaggagagcgccgtgagcgacgacgtggtgagccccgacgaggagggcatctgcagcggcaagtacttcaccgagagcggcctggtgggcctgctggagcaggccgccgccagcttcagcatggccggcatgtacgaggccgtgaacgaggtgtacaaggtgctgatccccatccacgaggccaacagagacgccaagaagctgagcaccatccacggcaagctgcaggaggccttcagcaagatcgtgcaccagaccaccatctggaagagaatgttcggcacctacttcagagtgggcttctacggcaccaagttcggcgacctggacgagcaggagttcgtgtacaaggagcccgccatcaccaagctggccgagatcagccacagactggagggcttctacggcgagagattcggcgaggacgtggtggaggtgatcaaggacagcaaccccgtggacaagtgcaagctggaccccaacaaggcctacatccagatcacctacgtggagccctacttcgacacctacgagatgaaggacagaatcacctacttcgacaagaactacaacctgagaagattcatgtactgcacccccttcaccctggacggcagagcccacggcgagctgcacgagcagttcaagagaaagaccatcctgaccaccagccacgccttcccctacatcaagaccagagtgaacgtgacccacaaggaggagatcatcctgacccccatcgaggtggccatcgaggacatgcagaagaagacccaggagctggccttcgccacccaccaggaccccgccgaccccaagatgctgcagatggtgctgcagggcagcgtgggcaccaccgtgaaccagggccccctggaggtggcccaggtgttcctgagcgagatccccagcgaccccaagctgttcagacaccacaacaagctgagactgtgcttcaaggacttcaccaagagatgcgaggacgccctgagaaagaacaagagcctgatcggccccgaccagaaggagtaccagagagagctggagagaaactaccacagactgaaggaggccctgcagcccctgatcaacagaaagatcccccagctgtacaaggccgtgctgcccgtgacctgccacagagacagcttcagcagaatgagcctgagaaagatggacctgtag

SEQ ID NO: 339174 - DNA, 7143 bp, Artificial Sequence
  derived and/or modified sequence
agccgccgccgccgtcgccgtcgccgcagcagccatggccgagcgccgcgccttcgcccagaagatcagcagaacggtggcagccgaagttaggaagcagatctccggacaatatagtggttctccccaactgctcaaaaaccttaatattgttggcaatatatcccatcacaccacagtgccccttaccgaagcagtagatccagtggatttggaagattacctcattactcatcctttggctgtggattctgggcctttacgggatttgattgaatttcctccagatgatattgaagttgtttatagtcctcgggactgcagaactcttgtttcagctgtacctgaagaaagtgaaatggatccacatgttagagactgtataagaagttatacagaagactgggcaattgtcatcagaaaatatcataaattgggaacaggatttaatcccaatacattagataaacagaaagaaaggcaaaaaggtttgccaaaacaagtttttgaatctgatgaagctccagatggcaacagctaccaggatgatcaagatgaccttaaaagacgttcaatgtcaatagatgataccccaaggggtagctgggcctgtagtatctttgacttgaaaaattcacttcctgatgctttgcttcccaatttacttgatcgaactccaaatgaagaaatagaccgtcagaatgatgaccaaaggaaatcaaaccgtcacaaagaactttttgctttgcatccatcaccagatgaggaagaaccaatagaacggcttagtgttcctgatatacccaaagaacattttggtcaaagacttcttgtaaaatgcttatcactcaagtttgaaattgaaattgaacccatttttgcaagtttggctttatatgatgtcaaggaaaagaaaaagatttcagaaaacttttattttgaccttaattctgagcagatgaaagggttgttacgtccacatgtaccacctgctgccattactaccctggcaagatcagcaattttttctatcacttatccttcccaagatgtttttcttgtaataaagctagaaaaagtcctacagcaaggagacattggagagtgtgcagaaccatatatgattttcaaagaagcagatgccaccaagaataaagaaaaactggagaaactgaagagtcaagcagatcagttttgccaaagacttgggaaatatcgcatgccttttgcttggactgcaatccatttaatgaatattgttagcagtgctgggagtttggaaagagattctacagaagtagaaatcagtactggagaacgaaaagggtcttggtcagagaggaggaattctagtattgttggcagacgatcacttgaaaggacaacaagtggagatgatgcttgtaacttgacgagctttcgaccagctactctcacagtgacaaatttttttaagcaggaaggagaccgcttaagtgatgaagatctctacaaattccttgctgatatgagaaggccatcttctgtcttacggcgactaagacctattacagctcagctcaagatagacatttctcccgcacctgaaaatccccattattgcctaactccggagctgcttcaagtgaagctttaccctgacagtagagttagacctaccagagaaatcttagagtttcccgcaagggatgtttatgttccaaacactacttacagaaatcttctctacatataccctcagagtcttaattttgccaatcgtcaaggttctgctagaaatataacagtgaaagtccagtttatgtatggagaggatccaagcaatgccatgccggtaatctttggtaaatctagctgttcagaattttcaaaggaagcctatacagccgtagtatatcataacaggtctcctgattttcatgaagaaatcaaggttaagcttcctgctactttaactgaccatcatcacttgctttttactttttatcatgttagttgtcaacaaaaacaaaatactcctcttgaaacaccagttggatatacatggataccaatgcttcagaatggacggttgaagactggccagttttgcttgccagtctcattggaaaaaccaccacaggcttattctgtactgtctcctgaggttcctctacctggcatgaaatgggtagataatcacaaaggtgtttttaatgttgaagttgttgctgtttcgtctatccatacacaagatccttatcttgacaaattttttgctctggtcaatgctctggatgaacacctgttcccagtccgaattggggacatgcgaatcatggaaaataacttagaaaatgaattgaagagcagtatttcagcactgaattcatcccagctggaaccagtggtccgatttcttcatcttctgctagataaactgatacttttagttattagacctcctgtcattgctggccaaatagttaacctaggtcaagcatcttttgaagccatggcatcaattataaatcgacttcacaaaaacttggaaggaaatcatgaccagcatggcagaaacagccttcttgcatcatatattcattatgttttccgcctaccaaatacttaccctaattcatcatcaccaggtcctgggggtttgggaggatcagtgcattatgccacaatggctagatctgcggtgagacctgcaagccttaatttaaatcgttctcgaagccttagtaatagcaatccagatatatctgggactcccacgtcaccagatgatgaagttcgatcaatcatcgggagtaagggtttagatcgctccaattcctgggttaacactggtggtccaaaagctgccccatggggatccaaccccagtccaagtgcagaatcaacacaggctatggatcgaagttgtaatcgtatgtcttcgcacacagagacgtcaagtttcttacaaacattaacgggacgcttaccaactaaaaagctttttcacgaggagctggctttgcagtgggttgtttgcagtggcagcgttcgggaatcagctttgcaacaagcctggttcttttttgaattaatggtaaagagcatggtgcaccatttatactttaatgataaacttgaggctccaaggaaaagtcgttttccagaacgtttcatggatgacattgcagctcttgtcagcacgattgctagtgatatagtttcacgatttcagaaggacacagaaatggttgagagactcaatacaagccttgcattctttctcaatgatctgttgtctgttatggacagaggatttgtttttagccttataaagtcctgctataaacaggtgtcttcaaagctttactcattaccgaatcccagtgttctggtgtccttgaggctggattttctacgaatcatctgcagtcatgagcactatgttacattaaacttaccctgcagcttacttactccacctgcatctccatcaccttctgtttcttctgcaacatctcagagttctggattttctacgaatgtacaagaccaaaagattgcaaatatgtttgaattatccgtgcctttccgccaacagcattatttggcaggacttgtgttaacagagctggctgtcattttagaccctgatgctgaaggactgtttggattgcataagaaagtcatcaatatggtacacaatttactctccagtcacgactcagacccgcggtactctgaccctcagataaaggctcgagtggccatgttgtatctacctctgattggtattatcatggaaactgtacctcagctgtatgattttacagaaactcacaatcaacgaggaagaccaatttgtatagccactgatgattatgaaagtgagagcggaagtatgataagccagaccgttgccatggcaatcgcagggacatcggtccctcaactaacaaggcctggcagtttcctcctcacgtcaacgagtggcaggcaacacactaccttttcagcagaatcaagtcgaagccttttgatctgtctactttgggttctcaaaaatgcagatgaaacagttctacagaagtggtttacagatctctcagtcttgcagctaaaccggctattagatctgctttatctctgtgtgtcttgctttgagtataaagggaaaaaagtgtttgaacgaatgaatagcttgacctttaagaaatcaaaagacatgagagcaaagcttgaagaagctattcttgggagcataggtgccaggcaagaaatggtacggcgaagccgaggacagctcggtacgtacacaatagcttctcctcctgagagaagcccatctggaagtgcctttggaagtcaagaaaatttgaggtggaggaaagatatgactcactggcgtcaaaacacagagaagcttgacaaatcaagagcagagattgaacacgaagcactgattgatggaaacctggctacagaagcaaacctaatcattttagatacattagagattgttgttcagaccgtttctgtaacggaatccaaagagagcattcttggtggagtgctaaaagtgctactacacagcatggcctgtaaccaaagtgcagtttatctacaacactgttttgctacacagagagccttggtttcaaagtttcctgaactcttatttgaagaagagacagagcagtgtgctgatttatgcctcaggcttctccgacactgtagcagtagcatcggtacaatacggtcacacgccagtgcctccctttacctactaatgaggcaaaactttgagattgggaataactttgccagggttaaaatgcaggtaacaatgtcactatcctccttggtgggcacatctcagaattttaatgaagaattcttaagacgttctctaaagactatattgacatatgctgaagaagatctggaattgagggaaacaacatttcctgatcaggtccaggatctggttttcaatctccatatgattctttctgatactgtgaaaatgaaggaacaccaggaggatcctgaaatgttgattgatctaatgtacagaattgccaagggttaccagacctctccagatctgcgattgacctggttgcagaacatggcaggcaagcactcagaacgaagcaatcatgctgaagctgcacagtgtctagtccactcagcagcacttgttgctgaatatttgagcatgctggaggaccggaaatatcttcctgtgggatgtgtaacatttcagaatatttcatctaatgttttagaagaatctgcggtctcagatgatgtggtatctccagatgaagaaggtatctgctctggaaaatactttactgagtcaggacttgtgggattactggaacaagcagctgcttccttctctatggctggcatgtatgaagcagttaatgaagtttacaaagtacttattcctattcatgaagctaatcgggatgcaaagaaactatccacaattcatggtaaacttcaagaagcattcagcaaaattgttcatcagactacaatctggaagcggatgtttggcacctattttcgtgttggtttttatggaaccaagttcggggatttggatgaacaagaatttgtttacaaggagcctgcaataaccaaacttgcagagatatctcacagattggagggattttacggagaaagatttggagaggatgtggttgaagtaatcaaagactctaatcctgtagacaagtgtaaattagatcctaacaaggcatatattcagattacctatgtggagccatactttgacacatatgagatgaaggacagaatcacctatttcgacaaaaattacaatcttcgtcgattcatgtactgtacaccctttactttagatggccgtgcccatggggaacttcatgaacaattcaaaaggaagaccattctgactacgtctcatgcctttccttatattaaaacaagggtcaatgtcactcataaagaagagatcatcttaacaccaattgaagttgctattgaggacatgcagaaaaagacacaggagttggcatttgcaacacatcaggatcccgcagaccccaaaatgcttcagatggtactccagggatctgtaggcaccacagtgaatcaggggcctttggaagttgcccaggtttttctgtctgaaatacctagtgacccaaagctcttcagacatcataataaactgcgactctgctttaaagattttactaaaaggtgtgaagatgccttaagaaaaaataagagcttaattgggccggatcaaaaggagtatcaaagggaactggagagaaactatcatcgccttaaagaggccctacagccactgatcaacagaaagatccctcagttatacaaggcagtattgcctgtcacctgccacagagattccttcagtcgaatgagccttcgcaaaatggatctctaaactgaatgcacttgttttattcatctgcaaagagccatgtattcaacatcgagtgtgaaaagatctattggaaaacaacatggaatggaattctggaaattattattcattgaagaatgcagtggccaagaaaatatcaaatgtagattgttaacgcttgagaatcatggctatggtttctaatgttctggtaacaagctgttatcttttaagacattttaatgactcaaaggtacactatacatttaccattatttataccatagctaaggttaaaaatttattcactttaagttcgtattttttaatttatattaccatttatagattcattttggaaccattttaaatgtagtaatgcttattttaaaggtactattaaatatgtgaatgtttacactaattttaccgagtgggacttcaaaatttttattattgacaatggcagagaacaattaaagggttgactcaagaactagttccaaacctagcagaataaaaatcatagatagccccaaattaatgagtttggtaactgtttcaaagttattttccatttacatacccaaaacaggaatttagaattgcagaactttacttagtaaaacctttgtgtaaaataatttaaatacggggataactaataccagtgacaacaccttaacttgattaaatcttattacacc

SEQ ID NO: 339175 - DNA, 6423 bp, Artificial Sequence
  derived and/or modified sequence
atggctgagcggagagcgtttgcacagaaaatttctaggacagtcgccgccgaagttaggaagcagatcagcggccaatactccggttcgccccagctgctcaagaatcttaacatcgttggtaacatttcccaccataccaccgtgccgctgaccgaggcagtcgacccagtggatctggaagactacctgatcacacatccactggccgtggactcagggccactgagggatctaatcgaatttccccctgatgatattgaggtcgtgtactcaccacgggattgcagaacgctggtgtcggccgtacccgaagaatccgagatggatccccacgtacgtgattgtatccgatcctataccgaagactgggccatcgtgatccgaaaataccataagctaggcactggcttcaacccaaacacactcgacaagcagaaggaacggcagaaaggcttgccgaagcaggtgtttgagtcagacgaagctccagacggtaatagctaccaggatgatcaggacgacctgaagagacgctctatgagtatcgacgacaccccaagaggaagttgggcatgttccatcttcgacctgaaaaacagccttcctgacgccttgctgcctaaccttctagatcgtacccccaatgaggagattgatcgccagaatgacgaccagcggaaatcaaaccgccataaggaattgttcgcactgcatcctagcccggatgaagaagaaccgatagaaagactgtccgtacctgatatacccaaagaacatttcgggcaaaggctgctggtcaaatgcctgagcctcaagtttgagatagagatcgagcccatcttcgcgtccctggcactctatgatgttaaagagaagaaaaaaatcagtgaaaatttctacttcgatctgaactctgaacagatgaaaggcttgctgagacctcacgttccgccagctgccatcacgacccttgctaggtccgcaatcttttccattacttacccctcacaggacgtcttcctcgtgattaagttagaaaaggtgctgcagcaaggagatataggtgagtgcgccgagccctatatgatatttaaggaggcagatgcaaccaaaaacaaagagaagttggagaaactgaaatctcaggcggatcagttctgtcagagactgggaaagtatcgcatgccattcgcctggacagcgatccaccttatgaatatcgtaagttctgctggatcattagaacgagactctactgaagtggaaatcagcacaggggaaaggaagggctcctggtccgagcggcggaacagctctatcgtgggtcgcaggagcctcgagagaactacatccggggatgatgcttgcaacctaacctcgtttagacctgctacattgaccgtgacgaatttctttaagcaggagggtgaccggctaagcgacgaagatctgtacaagttcctggccgatatgcgaaggccttcttccgtgctgaggcggttgcgtcctatcaccgcccaactgaaaattgatatcagccctgcaccagagaatccacattactgtctcacccccgaactcttgcaagtgaaattataccccgattctcgggtgaggcctacccgtgagatactggaattccccgcacgcgacgtgtatgtgcctaatactacgtaccgcaacctcctatatatttatcctcaatcactcaactttgctaaccgacagggatccgcccggaacatcaccgtgaaggtacaatttatgtacggagaggacccctcgaatgctatgcctgtgatcttcggcaagtcgagttgctctgaattttctaaagaagcctacacagctgtcgtgtaccacaatcggtctcccgattttcacgaggaaatcaaagtcaaactccctgctaccctgaccgaccaccatcaccttcttttcacattctatcatgtgtcatgccagcagaaacagaatacaccactggaaacccctgttggctatacgtggataccgatgttacagaacggcaggctcaaaaccgggcagttttgtctgccagtttccttggagaaaccaccccaagcctacagcgtactgagtcctgaagtgcccctccctggtatgaagtgggtagacaatcataagggagtgttcaacgttgaagtggtggcggtgagctctatccacacccaggacccatacctggataaatttttcgccctggtcaacgcactcgatgaacacctgttccctgtccgaattggtgacatgcgcattatggaaaacaacctggagaacgagctgaaatcttccatttcagcactgaactcaagccagctcgagcccgtggtccgctttctccacctgctgctagataagcttatcctgctggtgatcagaccaccggtgatcgcaggccagatcgtaaacctggggcaggcttccttcgaggccatggcaagcattatcaatcgcctgcataaaaacctggaagggaatcacgatcagcatggacggaacagcctgcttgctagttatattcattatgtttttagactgcctaatacctatcccaactccagctcacccgggcccggtggcctgggagggtccgtacactacgccactatggcacggtcagccgtgagacctgcgtccctgaatctcaaccgcagccgctcgctaagtaactcaaaccctgacatctctggtactcccacaagtcccgacgacgaggtgcgaagcatcattggctcaaaaggtctggaccggagcaactcctgggtgaacacaggggggcctaaggccgccccttgggggtcaaacccatcccctagcgccgagtctacccaggccatggaccgcagttgtaatcgtatgagctctcatactgaaaccagtagtttcctgcaaactttgactggccgcctgccgacgaagaaactcttccacgaagagctcgcactgcagtgggtcgtctgcagtggatctgttagggagtctgctctccagcaggcgtggttcttttttgagctgatggtcaagtctatggtgcaccacttgtactttaacgataagctggaagcacctaggaagagcagattccccgagagattcatggatgacatcgcagctctggtgagcactatcgcatcagatatcgtgtcaaggttccagaaagatacagagatggttgagcggctgaacacatccctcgcatttttcctaaacgacctgctaagcgtcatggacaggggctttgtgtttagtttgatcaaatcatgttacaaacaggtgtcaagtaagttatactccctgcctaacccaagcgtgcttgtttctttgcggctggattttctacggataatatgctctcatgaacattacgtcacactaaacctgccctgcagcctcctgactccaccagcttccccaagtccttccgtctcaagtgcaacgtcccaaagcagtgggttctcaacgaatgtgcaggaccagaagatcgcaaacatgttcgaactcagcgttcccttccgccagcagcattacctggctggacttgtccttacagaattagccgtcattctggatcccgatgctgaggggctttttggcctgcataagaaggtgattaacatggtccataaccttctctctagccacgattcagacccccgttactctgacccccagatcaaagcgagagttgcgatgctgtacctgccattgatcggtataatcatggagaccgtcccacagctctacgacttcaccgagacccacaaccaacgcggcaggccaatatgcatcgcgacagatgactacgagagcgagagcgggtctatgatcagccaaaccgttgcgatggcaattgcaggcactagcgttccccaactcacccggcctgggtccttcctactgacctctacatcagggcgtcagcatactactttctcagctgaatcatcccgatcactgctcatctgtctactctgggtcttaaagaacgcagatgagacagtgctgcagaaatggttcaccgatctgagtgtgttacagctgaatcggttattggatctcctgtacctctgcgtgtcatgtttcgaatataaggggaagaaggtgttcgagcgaatgaactccctaacatttaagaaatccaaggatatgcgtgccaaactcgaggaagccattttagggagtattggtgctaggcaagaaatggtacgcagatctagaggtcagctcgggacttacacaatcgccagtcctcccgagagatccccaagcgggtctgctttcggtagccaggaaaatttaaggtggcggaaggatatgacacactggcgtcagaataccgaaaaactggacaagagcagggctgaaatcgaacacgaagctctgatcgatggcaacctagcaacagaagccaacctcatcatcctagacaccctcgaaatcgtggttcagaccgtgtcagtgacagaaagcaaagaaagcatcctgggaggcgttttaaaggtgctgctgcattcaatggcctgcaaccagagcgccgtatacctccaacactgtttcgccacccagcgggccctggtgtcgaaatttccggaactccttttcgaagaagagaccgaacagtgtgcagacctgtgcctgagattgctgaggcattgcagtagttctatcggaaccatacggtcacatgcatctgcctctctgtacttactgatgagacagaacttcgaaattggaaacaactttgctagggtgaaaatgcaggtgactatgtcactgtcctcactcgtaggaacaagccagaattttaacgaggagtttcttagaagatctttgaagacaatcctgacctacgctgaagaagacctcgaacttagagaaacaactttcccagaccaggttcaggacttggtcttcaacttgcatatgatcctgtccgacacggttaaaatgaaggaacatcaggaggaccctgaaatgttgattgatttaatgtatcggatcgccaagggctaccagaccagccctgacctgcggctgacatggctgcaaaatatggccggcaagcatagcgaaagatcaaaccatgctgaggccgcccagtgcctggtccacagcgctgcattggtagcagaatatctcagcatgctagaagatcgtaagtatcttccagtgggttgtgtcacttttcagaacatcagcagtaatgtcctggaggaaagtgccgtgagcgatgatgtggtctcgccggacgaagagggcatttgctcaggtaaatattttacagaatcaggactggtaggacttctggagcaggccgcggcttcctttagcatggctggcatgtatgaggccgtgaatgaggtgtataaagtacttattcctattcatgaggcgaaccgagatgccaagaaactcagcacaattcatggcaaattacaagaggctttttccaaaattgtccaccagaccaccatatggaaaagaatgttcggcacttacttcagagtcggcttctacggaaccaaattcggggatctggacgagcaagagtttgtttacaaggaacccgccatcacgaaattggccgagatcagtcaccggctggaaggcttttatggagagcggtttggagaggatgtggttgaggtgatcaaggactctaatcctgtggataaatgcaagctcgaccccaacaaggcatacattcagatcacatatgtggagccctacttcgacacctatgaaatgaaggaccgaatcacgtactttgacaaaaattataatttaaggcggttcatgtattgtacaccttttaccctcgatggccgggcacacggggagctgcacgaacagttcaaacggaagactatcctgacaacctctcacgcattcccttatattaaaactagggtaaatgtaacccataaagaggaaatcatattgactccgatcgaggtggccatcgaggacatgcagaagaagacccaggagctggcttttgccacacaccaagacccggcagatcctaaaatgctgcagatggtcctccagggttccgtggggaccacggtcaatcaagggccgcttgaggtagcccaggtgttcctgagcgagattccttctgacccaaagctcttccgccaccacaataagctgagactgtgtttcaaggatttcacaaagagatgtgaagacgccctgcgcaagaataaatcattgataggtcctgatcagaaggagtaccagcgagagctcgagcgtaactatcaccgacttaaggaagcattacagcctctcattaacaggaagattcctcaactctataaggctgtcctgcccgttacatgccaccgtgactcatttagcaggatgtcactccgcaagatggacctctag

SEQ ID NO: 339176 - DNA, 6423 bp, Artificial Sequence
  derived and/or modified sequence
atggccgagcggcgggcctttgcccagaagatcagcaggacagtggccgctgaggtgaggaagcagatcagcggccagtacagcggcagcccccagctgctgaagaacctgaacatcgtgggcaacatcagccaccacaccaccgtgcccctgacagaggccgtggaccctgtggacctggaggactacctgatcacccaccccctggccgtggacagcggccccctgcgggacctgattgagttccccccagatgacatcgaggtggtgtacagcccccgggactgcaggaccctggtgtctgctgtgcctgaggagagcgagatggacccccacgtgcgggactgcatccgcagctacacagaggactgggccatcgtcatcaggaagtaccacaagctgggcaccggcttcaaccccaacaccctggacaagcagaaggagcggcagaagggcctgcccaagcaggtgtttgaaagtgatgaggccccagatggcaacagctaccaggatgaccaggatgacctgaagaggaggtccatgagcattgatgacaccccccggggctcctgggcctgcagcatctttgacctgaagaacagcctgcctgatgccctgctgcccaacctgctggacaggaccccaaatgaggagattgaccggcagaatgatgaccagaggaagagcaacagacacaaggagctgtttgccctgcaccccagcccagatgaggaggagcccatcgagcggctgtctgtgcctgacatccccaaggagcacttcggccagaggctgctggtgaagtgcctgagcctgaagtttgaaattgaaattgagcccatctttgccagcctggccctgtatgatgtgaaggagaagaagaagatcagcgagaacttctactttgacctgaacagcgagcagatgaagggcctgctgcggccccacgtgcccccagctgccatcaccaccctggcccggagcgccatcttcagcatcacctaccccagccaggatgtgttcctggtgatcaagctggagaaggtgctgcagcagggcgacattggagaatgtgccgagccctacatgatcttcaaggaggctgatgccaccaagaacaaggagaagctggagaagctgaagagccaggccgaccagttctgccagaggctgggcaagtacaggatgccctttgcctggacagccatccacctgatgaacatcgtgtcctctgctggcagcctggagcgggacagcacagaggtggagatcagcactggagagaggaagggctcctggagcgagaggaggaacagcagcatcgtgggccgccgcagcctggagaggaccaccagcggagatgatgcctgcaacctgaccagcttccggcctgccaccctgactgtgaccaacttcttcaagcaggagggggaccggctgagtgatgaagatctctacaagttcctggccgacatgagaagacccagctctgtgctgcggcggctgcggcccatcacagcccagctgaagattgacatcagccctgcccctgagaacccccactactgcctgaccccagagctgctgcaggtgaagctgtacccagacagccgggtgcggcccacccgggagatcctggagttccctgccagagatgtgtatgtgcccaacaccacctacagaaacctgctgtacatctacccccagagcctgaactttgccaaccggcagggcagcgccaggaacatcaccgtgaaggtgcagttcatgtatggagaggaccccagcaatgccatgcctgtgatctttgggaagagcagctgcagcgagttcagcaaggaggcctacacagctgtggtgtaccacaacagaagcccagacttccacgaggagatcaaggtgaagctgcctgccaccctgacagaccaccaccacctgctcttcaccttctaccacgtgtcctgccagcagaagcagaacacccccctggagacccctgtgggctacacctggatccccatgctgcagaatggccgcctgaagacaggccagttctgcctgcctgtgtccctggagaagccaccccaggcctacagcgtgctgagccctgaggtgcccctgcccggcatgaagtgggtggacaaccacaagggcgtcttcaacgtggaggtggtggccgtgagcagcatccacacccaggacccctacctggacaagttctttgccctggtgaatgccctggatgagcacctgtttcctgtgcgcatcggggacatgaggatcatggagaacaacctggagaatgagctgaagagcagcatcagcgccctgaacagcagccagctggagcctgtggtgcgcttcctgcacctgctgctggacaagctgatcctgctggtgatccggccccctgtgattgctggccagatcgtgaacctgggccaggccagctttgaggccatggccagcatcatcaaccggctgcacaagaacctggagggcaaccacgaccagcacggcaggaacagcctgctggccagctacatccactacgtgttccggctgcccaacacctaccccaacagcagcagccctggccctgggggcctgggcggctctgtgcactacgccaccatggcccggtctgctgtgcggcctgccagcctgaacctgaacagaagccgcagcctgagcaacagcaacccagacatcagcggcacccccaccagcccagatgatgaggtgcgcagcatcatcggcagcaagggcctggacaggagcaacagctgggtgaacacaggaggccccaaggccgccccctggggcagcaaccccagccccagcgctgagagcacccaggccatggacaggagctgcaacaggatgagcagccacacagagaccagcagcttcctgcagaccctgaccggccgcctgcccaccaagaagctgttccacgaggagctggccctgcagtgggtggtgtgcagcggctctgtgcgggagagcgccctgcagcaggcctggttcttctttgagctgatggtgaagtccatggtgcaccacctgtacttcaatgacaagctggaggcccccaggaagagccgcttccctgagcgcttcatggatgacattgctgccctggtgtccaccatcgccagtgacatcgtgagccgcttccagaaggacacagagatggtggagcggctgaacaccagcctggccttcttcctgaatgacctgctgtctgtgatggaccggggctttgtgttcagcctcatcaagagctgctacaagcaggtgagcagcaagctgtacagcctgcccaaccccagcgtgctggtgtccctgcggctggacttcctgcgcatcatctgcagccatgagcactacgtgaccctgaacctgccctgcagcctgctgaccccaccagccagccccagccccagcgtgtcctctgccaccagccagagcagcggcttcagcaccaacgtgcaggaccagaagatcgccaacatgtttgagctgtctgtgcccttccggcagcagcactacctggccggcctggtgctgacagagctggccgtcatcctggaccctgatgctgagggcctgtttggcctgcacaagaaggtgatcaacatggtgcacaacctgctgagcagccatgacagcgacccccgctacagcgacccccagatcaaggcccgggtggccatgctgtacctgcccctcatcggcatcatcatggagaccgtgccccagctgtatgacttcacagagacccacaaccagaggggccggcccatctgcatcgccacagatgattatgaaagtgaaagtggctccatgatcagccagacagtggccatggccatcgccggcacctctgtgccccagctgacccggcccggcagcttcctgctgaccagcaccagcggccggcagcacaccaccttctctgctgagagcagccgcagcctgctgatctgcctgctgtgggtgctgaagaatgctgatgagaccgtgctgcagaagtggttcacagacctgtctgtgctgcagctgaaccggctgctggacctgctgtacctgtgtgtgtcctgctttgagtacaagggcaagaaggtgtttgagaggatgaacagcctgaccttcaagaagagcaaggacatgagggccaagctggaggaggccatcctgggcagcatcggggcccggcaggagatggtgcggcgcagccggggccagctgggcacctacaccatcgccagccccccagagaggagccccagcggcagcgccttcggcagccaggagaacctgcgctggaggaaggacatgacccactggaggcagaacacagagaagctggacaagagcagagctgagattgaacatgaggccctgattgatggcaacctggccacagaggccaacctgatcatcctggacaccctggagatcgtggtgcagacagtgtctgtgacagagagcaaggagagcatcctgggcggcgtgctgaaggtgctgctgcacagcatggcctgcaaccagagcgctgtgtacctgcagcactgctttgccacccagagggccctggtgtccaagtttcctgagctgctgtttgaggaggagacagagcagtgtgccgacctgtgcctgcggctgctgcggcactgcagcagcagcatcggcaccatccgcagccacgccagcgccagcctgtacctgctgatgaggcagaactttgagatcggcaacaactttgcccgggtgaagatgcaggtgaccatgagcctgagcagcctggtgggcaccagccagaacttcaatgaggagttcctgcggcgcagcctgaagaccatcctgacctatgcagaggaggacctggagctgcgggagaccaccttcccagaccaggtgcaggacctggtgttcaacctgcacatgatcctgagtgacacagtgaagatgaaggagcaccaggaggaccctgagatgctgattgacctgatgtaccgcatcgccaagggctaccagaccagcccagacctgcggctgacctggctgcagaacatggccggcaagcacagcgagaggagcaaccacgccgaggccgcccagtgcctggtgcacagcgctgccctggtggccgagtacctgtccatgctggaggacaggaagtacctgcctgtgggctgtgtgaccttccagaacatcagcagcaatgtgctggaggagagcgctgtgtctgatgatgtggtgtccccagatgaggagggcatctgcagcggcaagtacttcacagagagcggcctggtgggcctgctggagcaggccgccgccagcttctccatggccggcatgtatgaagctgtgaatgaggtgtacaaggtgctgatccccatccacgaggccaacagagatgccaagaagctgagcaccatccacggcaagctgcaggaggccttcagcaagatcgtgcaccagaccaccatctggaagaggatgtttggcacctacttccgggtgggcttctacggcaccaagtttggagacctggatgagcaggagtttgtgtacaaggagcccgccatcaccaagctggccgagatcagccaccggctggagggcttctatggagagagatttggagaagatgtggtggaggtgatcaaggacagcaaccctgtggacaagtgcaagctggaccccaacaaggcctacatccagatcacctacgtggagccctactttgacacctatgagatgaaggaccgcatcacctactttgacaagaactacaacctgcggcgcttcatgtactgcacccccttcaccctggatggccgggcccacggggagctgcacgagcagttcaagaggaagaccatcctgaccaccagccacgccttcccctacatcaagaccagggtgaatgtgacccacaaggaggagatcatcctgacccccatcgaggtggccatcgaggacatgcagaagaagacccaggagctggcctttgccacccaccaggaccctgctgaccccaagatgctgcagatggtgctgcagggctctgtgggcaccaccgtgaaccagggccccctggaggtggcccaggtgttcctgtctgagatccccagcgaccccaagctgttccgccaccacaacaagctgcggctgtgcttcaaggacttcaccaagagatgtgaagatgccctgaggaagaacaagagcctgattggaccagaccagaaggagtaccagcgggagctggagaggaactaccaccggctgaaggaggccctgcagcccctcatcaacaggaagatcccccagctgtacaaggctgtgctgcctgtgacctgccaccgggacagcttcagcaggatgagcctgaggaagatggacctgtag

SEQ ID NO: 339177 - DNA, 6423 bp, Artificial Sequence
  derived and/or modified sequence
atggccgagcggcgggccttcgcccagaagatcagccggaccgtggccgccgaggtgcggaagcagatttctggccagtattctgggtctccccagcttctgaaaaatctgaatatcgtaggcaatattagtcatcatacaaccgtccctctcacagaggccgtcgacccagtagatttagaggactacctcatcacacatcctctggctgtcgattctggcccactgagagatcttattgagttcccgccagacgatatcgaggtagtatactcacctagggactgcaggactcttgtgtccgccgtgcccgaagagtcggagatggaccctcacgtacgggattgcatcagatcttacacagaggattgggccatcgtgatcagaaagtatcacaaactcggtacaggatttaatccaaacactctagataaacagaaggaacggcagaagggactgccgaagcaggtatttgagagcgacgaagctccagacgggaactcataccaggatgatcaggacgatctgaaaaggaggagtatgtctatcgatgatactcctagaggatcttgggcgtgctcaatctttgacctcaaaaactcactccctgacgcccttcttcccaatcttcttgaccggaccccaaatgaagaaatcgacagacagaatgatgatcagcggaagagcaaccgtcacaaggagctctttgccctccatcctagccctgatgaggaagagccaatcgaaagactatcagtccctgacatccctaaggaacacttcgggcaacgcctgctggtaaaatgtttgagtctgaagttcgagatcgagatagagccgatctttgctagtcttgcattgtatgacgtgaaagaaaagaagaagatctcagagaacttttactttgatcttaacagcgagcagatgaaggggttactcaggccacacgtgccccccgctgcgatcaccaccctagcgcgcagcgcaatattctccatcacctacccatctcaggatgtgtttctggtgattaaactcgaaaaggtcttgcagcagggggacattggggaatgcgctgaaccttatatgatttttaaagaggcagatgccaccaaaaataaagaaaaactagaaaaactgaaatctcaggccgatcagttttgccaacgcctggggaagtacagaatgccatttgcctggactgccattcacttaatgaatattgtgtcttccgctggctcgttggaaagagattccactgaggtagaaatttcaacaggtgaaagaaaagggagctggtcagagcgaagaaattccagtatagtggggcggagatctctcgaaaggacgaccagcggagacgacgcttgcaacctaacatcattccgtcctgccactctaacagtaaccaattttttcaaacaggagggagatagactgagcgacgaggacttgtacaagttcctggctgatatgaggagaccatcctcggtgttacgacgtctgagaccaatcaccgcccagctgaaaattgacatctctccggcgcccgaaaaccctcactactgcttgacacctgaattgctgcaagtgaagttatatcccgattccagggtgcggcctacccgagagatattggagttccctgcaagagatgtatatgttccaaataccacctacagaaacctcctgtacatctacccgcagagcctgaatttcgccaatcgccaggggagcgcccgcaatatcaccgtgaaggtgcagttcatgtatggcgaggacccttctaacgctatgccagtgatcttcgggaagtcttcttgcagtgagttctctaaggaggcttatacagcggtagtgtatcacaaccggtctcccgatttccacgaagaaatcaaggtaaagttgccagctacactgacagatcaccatcatctccttttcactttctaccatgtgagctgtcagcagaaacaaaatactcctctagaaactcctgtaggatacacatggatcccaatgcttcagaatggtcggctaaaaacaggccagttctgcctgccagtctccctcgaaaagccacctcaagcatactctgtcctgagcccggaggtccctctcccaggcatgaagtgggtggataatcacaaaggcgtctttaatgtggaagtggtagcagtgagctccatacatactcaggatccatatcttgataaattctttgcactggtgaacgctctggatgagcatttgttccctgtcagaatcggcgatatgcgaatcatggagaataatctcgagaatgagctcaagagttctatctccgccctgaactccagccaactggagcccgtggtgaggttcctgcacctgctgcttgataaactgattctgctggtaatccgccctcccgtgattgcagggcagatcgtgaatttgggacaggcatcctttgaggctatggcatcaattatcaaccggttacacaaaaacctggagggaaaccatgatcagcacgggaggaactccctgttggcatcttatatccattacgtttttcggctgcccaatacctaccctaattctagtagccccgggcccggcggattgggaggttctgtccactacgctacaatggcccgctcggccgtgcgaccagccagcttgaacctgaaccggtcccgttcactctctaactcgaatcctgatatctctggaactcctaccagccctgatgacgaggtaagatctataattggatccaaaggcctggatcggagcaactcatgggtgaatactggcggccccaaagccgcgccctgggggagtaaccccagccccagtgccgaaagcacacaggccatggataggagctgcaacaggatgagcagtcatacagaaactagctctttcctccagacacttactgggcgtctccccacaaagaaactgttccacgaagagttagcactgcaatgggtagtttgctcaggtagcgttagggagtccgctctccagcaggcctggttctttttcgaacttatggtgaagagcatggtgcaccatctttacttcaacgataaactggaggccccacgtaaaagcaggtttccagaacgcttcatggacgatatcgccgcccttgtctcaaccatcgcttccgacattgtgtccagatttcagaaggacaccgaaatggtagaaaggttgaatacctcactggccttcttcctcaatgacctgctaagtgttatggacagggggttcgtgttttccctgattaagagctgctacaagcaggtttcgtctaaactttacagcctaccaaacccatcagtcctcgtctccctaagactggatttcttgcgtatcatctgttcccacgaacactacgtaaccctgaacctcccatgctcccttctcactccgccagccagtcccagtccatctgtctcctcggctacctcacagagttccggcttctcaacaaatgtccaggaccagaagatagccaacatgttcgaactgagtgttccctttaggcaacaacattacttagcagggttagttctaactgagttggcagtcatcctggacccggacgctgaagggctgttcggtttgcacaaaaaggtcatcaacatggtacacaacttgctctcaagtcatgattcagacccgaggtattcagaccctcaaatcaaggccagggtggctatgctctatctacccttaattgggattattatggagacggtgcctcagttgtatgatttcactgagacacacaaccaacgcggcaggcctatctgcattgcaaccgatgattatgagtctgagagcggcagtatgatctctcagacagtggccatggctatagcaggaaccagcgtcccgcagttgacgcggccgggctcattcctgctaacttcaaccagtgggaggcaacatacaaccttcagcgccgagtccagcagaagtctcctgatatgcttattgtgggttttgaaaaatgccgacgagacagtactgcagaaatggtttacagatctcagtgtgcttcagctgaacagactgttggatttgttgtacctgtgcgtgtcatgttttgagtacaaagggaagaaggtattcgagcgaatgaactcactgactttcaaaaaatcaaaggatatgagggccaaactggaggaggccatcctggggtctattggtgctagacaggagatggttcgacggtcgcgtgggcagctgggtacatacactatcgccagcccgcccgaacgcagcccatctgggagtgctttcggctcacaggagaatttgcgttggcgaaaagacatgacccattggaggcaaaacacagaaaagctggataagtcccgagcagaaatcgaacatgaggcccttattgacgggaatctggcaacggaggccaatctgatcatcttggatactctcgaaatagtggtgcagactgtgtctgtcactgaaagcaaggagagtatactggggggggttctgaaagtgctcctgcattcaatggcttgtaaccaaagcgccgtgtacctccagcattgcttcgcgacccagagggcccttgtttcaaagttccctgagcttttatttgaggaggaaaccgagcagtgtgccgacctgtgtctgagactgctgcggcactgttcgtccagcatcggaacgattcggtcccatgccagcgcatccctgtacctccttatgcgccagaattttgagatcggtaataattttgctcgggtaaagatgcaagtgacaatgtccttgtcgagcctggtggggacatctcagaacttcaacgaagaatttctcaggcgctctttgaaaacaatccttacctacgcagaagaggacctcgagctacgcgaaacaaccttccccgatcaggttcaggatctggtctttaacctgcatatgatcctcagtgacaccgtcaagatgaaggagcaccaggaggatcccgagatgctgatagacctcatgtacagaatcgcaaaagggtatcagacatctcctgatttaagactaacatggttgcagaatatggctggcaagcacagtgagagatccaatcacgccgaggcggcccaatgtttagttcactcggcagctctggttgccgaatacctgtctatgcttgaggacagaaaatatctccccgtcggctgcgtgactttccagaatatatcatcaaatgtgctcgaggaaagcgctgtgtccgacgacgtcgtttctcctgacgaagaaggaatctgtagcggcaagtacttcaccgaaagtgggctggtgggcctcctagaacaggctgccgcctccttctcaatggccgggatgtatgaggccgtgaacgaagtgtacaaagtactcatcccaatccacgaagcgaacagggacgccaaaaagttaagtacgattcacggtaaactccaggaggccttttcaaagatcgtccaccagacaaccatctggaagcggatgtttggtacttatttcagagtgggattctacggcaccaagttcggtgacctggacgaacaagaattcgtgtataaggagcctgctatcactaagctggcggagatctctcaccgactcgagggcttctacggcgagcggtttggtgaggacgttgtggaggtgatcaaggattctaaccctgtggacaagtgcaaacttgacccaaacaaggcatacatccagatcacctacgtggagccttacttcgatacctatgagatgaaggatcgcatcacttattttgataaaaactacaacctgaggcgatttatgtattgtacgccatttacactcgacgggagggcccacggggaactccatgagcagtttaagcgaaaaaccatcctgaccacttcgcacgcttttccctatatcaagactagggttaacgttacccacaaagaagagataatcctgacgccgattgaggtggcaattgaagacatgcagaagaagacccaggaattggcttttgctactcatcaggatcctgcggacccgaaaatgctgcaaatggttctgcaaggcagtgtcggtaccaccgttaatcagggcccattggaagtggcacaggtcttcctgagtgagatccccagcgaccctaaacttttcagacaccataataagctacggctctgcttcaaggactttactaagcgatgcgaagacgcgctgcggaaaaacaagtctctgattggcccagaccagaaagagtaccagagagagttagaacgcaattaccaccgcttgaaggaggccttgcagcccttgattaaccgaaagattccacagctttacaaggccgtgctaccagttacctgtcacagggattctttctcacggatgtccctcagaaagatggacctctag

SEQ ID NO: 339178 - DNA, 6422 bp, Artificial Sequence
  derived and/or modified sequence
atggccgaaaggcgggcattcgcccaaaagattagcaggaccgtggccgctgaggttcgtaagcagattagcggacagtatagtggatcaccacaactactgaaaaacttgaacatcgtgggcaacatctcccaccacacaactgtaccgcttaccgaagcagtggatcctgtagatttggaggattacctaatcactcacccactcgccgtggacagtggacctttgagggatctgattgaattcccccctgacgatatcgaagtcgtttattctcccagggattgcaggactctggtttccgccgtaccggaggaatccgaaatggaccctcatgtaagagactgtatccgatcgtatacggaagattgggctatagttatccggaagtaccacaagctgggcactggttttaaccctaatacccttgacaagcagaaggagagacagaaaggcttgcccaagcaggtgtttgaatcagacgaagcacctgatggaaactcctaccaggacgaccaggatgatttaaagcggaggtccatgagcattgacgatactcctagggggagctgggcatgcagtatcttcgacctcaagaactccctgccagacgcgctcttacccaacctgctggatcgcactccgaatgaggaaatcgaccggcagaacgatgaccaacgaaagtccaacaggcacaaagaactgtttgctcttcatcccagcccagatgaggaagagcctatagagcgcctgagtgtgcccgacattccaaaagaacattttggacaacggttattggtcaagtgccttagcctcaaattcgagattgagattgagcccatctttgccagtctagctctctatgatgtgaaagaaaaaaagaaaatttctgaaaatttctatttcgatctcaattccgaacagatgaaaggcctgctgcgaccccatgtccccccagcggcaattaccaccctggctagatcagccatcttcagcattacgtacccctcccaggatgtgtttctggtaataaagctggagaaagtcctacagcagggggatatcggcgagtgtgctgaaccttacatgatattcaaggaagcggacgccaccaaaaataaagaaaaacttgagaaactgaaaagtcaggccgaccaattttgtcagaggctcgggaagtaccgcatgccattcgcatggacagcaattcaccttatgaacatcgtctcttcggcgggtagcctcgaacgagatagcacagaggtggagatttccacgggggagcgtaaaggcagttggagcgagagaagaaatagcagcatcgtagggaggcgtagtctggagagaacaactagcggcgatgatgcctgtaacctgaccagcttccggccagcgactctcaccgtgaccaattttttcaagcaagaaggtgaccggctatcagatgaagacctgtataagtttctggctgatatgcgtcggcctagttcagtgctacggcgactccgcccaatcacagcccaactgaagatcgatatctctcctgcccctgagaaccctcattattgtctgacccccgaattgctccaggtgaagctttaccctgatagccgtgtgaggcctaccagagaaattctggagtttcccgcaagagatgtctacgtgcccaatacaacctataggaacctgttatacatttatcctcagtctctgaatttcgctaatcggcaaggtagtgccagaaacatcaccgtcaaggttcaatttatgtatggggaagatcccagcaacgctatgcctgtgatcttcggcaaaagctcctgcagtgaatttagcaaggaggcatataccgcagtggtttaccacaaccgctccccggactttcacgaagagattaaggtcaagctgcctgctaccttgactgaccatcatcacctgctctttacattttatcacgtcagctgccagcagaagcagaacacccccttagaaacacccgtgggatacacatggatcccgatgctgcagaacgggagactgaaaaccggccagttttgtctgcctgtgtcccttgagaagccccctcaggcctactccgtgctaagcccggaagttccattgcccggaatgaagtgggtggacaatcacaaaggcgtcttcaacgtggaagtggtggctgtctcaagcatccacactcaggatccttatttagacaagttcttcgctcttgtcaatgcactcgatgagcacttgttccccgtgcgaatcggcgacatgcgcatcatggagaacaatcttgagaatgagctcaaatccagcatttctgccttgaactctagtcagctggaaccggtggtgagattcctgcacctgctactggataaactgatcctcctggtaattcggccaccggtgattgctggtcagattgtgaaccttgggcaggcttcgtttgaggctatggcaagcatcatcaatagattacacaaaaacctggaaggaaaccacgaccagcatggcagaaactcactgctagctagctatatccactacgtgttccggctgccgaacacttatccaaattcatcctcccccggacctggcggactggggggaagcgtgcactatgctactatggccaggtccgctgtgcgccctgcatcactgaacctgaaccgctcccggtccctgagcaacagcaacccggacatcagtggcactcccacatcacctgatgacgaggtgcggtccataatcgggagcaaagggcttgatagaagtaatagctgggttaacaccgggggtcctaaggcagccccttgggggtccaatccatctccctcagctgagagcacccaggccatggacagatcttgcaatcgaatgagcagtcataccgaaactagctcattcctgcagaccttgaccgggagattgccgactaaaaagctgtttcatgaggagctagccctgcagtgggtcgtgtgtagcggctctgtgcgagagagtgcactgcagcaggcctggtttttttttgagctaatggtgaagtctatggtccatcatctatactttaatgataaattggaggcccctcgtaagagtcgattccccgagaggttcatggacgatatcgcagctctcgtgagcacaatcgcctcagatatagtctctaggtttcagaaggacaccgagatggttgagaggctgaacaccagtctggctttttttctgaacgatctgctttcggtgatggacaggggattcgtcttctctctgataaaatcgtgttacaagcaggtgtcaagcaagctttattctctgccaaacccctctgttctagtgtcccttcgtttggacttcctcagaatcatctgcagccatgaacactatgtgacactgaatttgccgtgcagcctgctgacccctcctgcctcaccgtccccctctgtgagttcagctacctctcagtcttccgggttctccaccaacgttcaggatcagaaaatcgccaacatgtttgagcttagcgtgccgttcagacagcagcattatttggcagggttagtgcttacagaactggccgtaattctagaccccgatgccgaagggctgtttggcctgcacaaaaaagtaattaacatggttcacaatttacttagctctcacgactcggatcccagatactcagatccacagataaaggcgcgtgtagcgatgctgtacctgccactcataggaattataatggagacggtacctcagctgtatgatttcactgagacacacaatcagcgcggaaggccaatttgtatagcaaccgacgattatgagagtgaatcagggagcatgataagccagactgtggctatggccatcgccggaaccagtgtgcctcagctgacccgcccaggatctttcttgctgacctccacgagcggccgtcagcacacaactttctccgcagagtcatcaaggagcttgcttatctgtctcctctgggtattgaagaatgcggacgagactgtcctgcagaagtggttcacggatctgagcgtattgcagctgaacaggctactggacctgctatacctgtgtgtttcatgcttcgagtataaggggaaaaaggtcttcgagaggatgaacagtcttacttttaagaagtcaaaggatatgcgcgcaaagctcgaggaagccatcctaggatccattggggcacgacaggagatggtacggcgtagcagaggtcagctgggtacctacactattgctagccccccagagcgcagcccttctggcagtgctttcgggagccaggagaacctgcgatggaggaaggacatgacacactggcgtcagaataccgaaaagcttgataaaagtagagcggaaattgagcacgaagcactgatcgacggaaacttagcaaccgaagcaaacctcatcatccttgataccctagagattgtggtgcagacagtgtcagtcaccgagtcgaaggaatctattctaggtggagtgctaaaggtgctgctacatagcatggcctgtaaccagtccgctgtatatctccagcactgcttcgctactcaacgggcattagtttccaaattccctgaactccttttcgaagaggaaaccgaacagtgtgcggacttgtgtctgcgtctcctccggcattgctcatcgtccatcggaaccatccgaagccatgcctcggcatccctttacctgctgatgcgccagaacttcgagataggaaacaattttgctagggttaagatgcaggtgactatgtccctatcaagcctagtgggtacgtcccagaactttaacgaggaattcctgcgacggtctcttaaaaccatcctgacttacgctgaggaggacctcgaattacgggagactaccttcccagaccaagtgcaggacctggtctttaaccttcatatgattctgtccgatactgtcaagatgaaagagcatcaggaagatcccgaaatgctcatagatctgatgtaccgcattgccaaaggatatcaaacctctcccgacctgagactaacctggttgcaaaacatggccggtaagcatagcgaaagaagtaatcacgctgaggctgcccagtgcctggtccattctgccgcactggtggccgagtacttatctatgctggaggaccggaaatatctgccagttggttgcgtgacatttcagaacatctcctctaatgtgctagaggaatccgccgtgtctgacgatgtggtcagtcccgatgaagaaggtatctgttctggtaagtattttacagagtcgggtttggttgggctgctggagcaagccgctgcatcattcagcatggccggaatgtacgaggcagtgaacgaagtatataaggtgttgattcccatccacgaagccaatcgggatgccaaaaagttgtctaccatccacggcaaattgcaggaagcctttagtaaaattgtgcaccagaccaccatctggaagagaatgttcggcacctattttagagtgggattctatgggaccaagttcggagacttagatgaacaggagttcgtctataaagagcctgccattacaaagttggctgagatctcacaccggttggagggcttctacggggagcgatttggggaggatgttgtcgaggtcattaaggattccaatcccgtcgacaaatgcaaactggacccaaataaagcgtatatccagattacatacgtcgagccctattttgacacgtacgaaatgaaggatcgcattacctatttcgataagaattacaacctacgaagattcatgtattgtactcccttcacattggacggtcgcgcacatggcgagctccacgaacagtttaagcgaaagactatcttgacgacaagtcatgcattcccatatatcaagacgagggtcaacgtgacccataaagaggagattattctcacgcccatcgaagtggccattgaggacatgcagaagaaaacccaggagctagctttcgccacacaccaagatccggcagatccaaagatgctacaaatggtgctgcagggcagcgtaggaaccacagtgaatcagggccctctcgaagttgcccaggtgtttctgtcggagatcccatccgatcctaagttattcagacatcacaataagctgaggctctgtttcaaagattttacgaaaaggtgcgaagatgctctccggaagaacaaatccctgatcggcccagatcagaaagagtaccaacgggaactggagcgcaattaccaccggctcaaggaggcactccagcctctgattaaccgcaaaatcccccagctttataaggcagtcttgcccgtaacttgtcaccgggatagctttagccgtatgtccctgcggaagatggacttgta

SEQ ID NO: 339179 - DNA, 552 bp, Artificial Sequence
  derived and/or modified sequence
accccaccctaatcttgttatgcaaataggcttcccacttggcaggggccgtcttgtccactcgtttctgtaaacatgggtggcaaaaagagaagatggagctgccatttagaacatgcctaatcccagcttcatcttgctgagcaaaaatgaaggagcctggacccaactttgttactgtgagaaagggtcttcattcattcaagatggcatttgttaagcacctacttctctttctgtcacctaggctggagtgcagtggttcaatcacggatcactgcagcctccacctcccagttcaagaaattctcatgtctcagcctcctgagcagctaggattacagacaaaccttggaaatcaagaaagttctggaatgatgaagctgttcatgccaagaccgaaagtgctggcccagtatgagtccattcagttcatgccgtgacaattttcttggaactcctttttattgttagttctcacttgtttccatatttagtgaatgtacatttaattgcaaagctgtcattaataaaaattcttatagtacctca

SEQ ID NO: 339180 - DNA, 534 bp, Artificial Sequence
  derived and/or modified sequence
accccaccctaatcttgttatgcaaataggcttcccacttggcaggggccgtcttgtccactcgtttctgtaaacatgggtggcaaaaagagaagatggagctgccatttagaacatgcctaatcccagcttcatcttgctgagcaaaaatgaaggagcctggacccaactttgttactgtgagaaagggtcttcattcattcaagatggcatttgttaagcacctactgctggagtgcagtggttcaatcacggatcactgcagcctccacctcccagttcaagaaattctcatgtctcagcctcctgagcagctaggattacagacaaaccttggaaatcaagaaagttctggaatgatgaagctgttcatgccaagaccgaaagtgctggcccagtatgagtccattcagttcatgccgtgacaattttcttggaactcctttttattgttagttctcacttgtttccatatttagtgaatgtacatttaattgcaaagctgtcattaataaaaattcttatagtacctca

SEQ ID NO: 339181 - protein, 610 aa, Artificial Sequence
  derived and/or modified sequence
MAAESGELIGACEFMKDRLYFATLRNRPKSTVNTHYFSIDEELVYENFYADFGPLNLAMVYRYCCKLNKKLKSYSLSRKKIVHYTCFDQRKRANAAFLIGAYAVIYLKKTPEEAYRALLSGSNPPYLPFRDASFGNCTYNLTILDCLQGIRKGLQHGFFDFETFDVDEYEHYERVENGDFNWIVPGKFLAFSGPHPKSKIENGYPLHAPEAYFPYFKKHNVTAVVRLNKKIYEAKRFTDAGFEHYDLFFIDGSTPSDNIVRRFLNICENTEGAIAVHCKAGLGRTGTLIACYVMKHYRFTHAEIIAWIRICRPGSIIGPQQHFLEEKQASLWVQGDIFRSKLKNRPSSEGSINKILSGLDDMSIGGNLSKTQNMERFGEDNLEDDDVEMKNGITQGDKLRALKSQRQPRTSPSCAFRSDDTKGHPRAVSQPFRLSSSLQGSAVTLKTSKMALSPSATAKRINRTSLSSGATVRSFSINSRLASSLGNLNAATDDPENKKTSSSSKAGFTASPFTNLLNGSSQPTTRNYPELNNNQYNRSSNSNGGNLNSPPGPHSAKTEEHTTILRPSYTGLSSSSARFLSRSIPCSCLLLVFRKPFLGSPLLSLPISHL

SEQ ID NO: 339182 - DNA, 1833 bp, Artificial Sequence
  derived and/or modified sequence
atggcggccgagtctggggagttgatcggcgcgtgtgagtttatgaaagatagactctacttcgcaacgctgcgaaaccgcccgaaaagcacagtaaacacacactatttttctatcgacgaggagctcgtgtacgagaatttctacgccgatttcggtcccctgaacctggctatggtgtaccgctattgttgcaaactgaacaaaaagttgaagtcgtactctttatcccgcaaaaagatagtgcactatacatgttttgaccagcggaagagagcaaacgccgccttcttgattggcgcttacgccgtaatctatctcaaaaaaactcccgaagaagcttatcgggctctcctgtccggttccaaccccccttacctgccgttcagggacgcgagcttcggtaattgcacttataacctcactatcctcgactgcttacagggaattagaaaaggcctccagcatgggttcttcgacttcgaaaccttcgacgtggacgagtatgagcactatgaaagggttgaaaacggtgatttcaactggatcgtcccagggaaatttctggccttcagtggcccgcatcccaaatccaaaattgagaacggatacccactgcatgcgcccgaagcctattttccatatttcaaaaaacacaatgtgacagctgttgttcgcctcaataaaaagatttacgaggccaagcggttcacagacgccggattcgagcactatgatttgttctttattgacggctcaacccccagtgataacattgtgagaagatttcttaacatttgcgagaatactgagggcgctatcgcagtgcattgcaaggcggggctcggacgtactgggacactgatcgcctgctatgtaatgaaacactaccggtttactcacgccgaaataatcgcctggattcgcatatgtcggcctggatcaatcatcggtcctcagcagcattttcttgaagagaaacaggcgagcctgtgggtgcagggcgatatttttcggtccaaactgaaaaataggccatctagtgagggttcgatcaataagattctgagtggcttagatgatatgagtatcgggggaaatctgtcaaaaacgcagaatatggagagatttggcgaggataatctggaagacgatgatgtggagatgaagaacgggatcactcagggcgacaagctgagagcactcaaatcacagcgacagccccgcaccagtccaagttgcgcttttagatcggacgacacaaaaggacatccaagagcagttagccagcccttccgattatcttccagtttgcaaggatccgccgtaaccttaaagacatctaagatggcactgagccccagcgccaccgcaaaaaggatcaatcggacctctctctctagcggagctacggtgaggagctttagcatcaatagtcgcttggcaagttctctgggcaacttgaacgcagcgaccgatgacccggaaaacaagaagacctcctcatccagcaaggctggtttcactgcgtctccctttacaaaccttttgaacggctcgagtcaacctaccacgagaaattaccccgaactgaataacaaccagtataacagaagcagcaacagcaatggaggaaacttaaattctccccccggaccgcactccgccaagactgaggaacacactacgatcctgcgcccctcctacaccggtctctcatcttcttccgctcgttttctgagtcgttccattccatgttcatgtctgcttctggtgtttaggaagccttttctcggatcccctcttctgagcctgccaatcagccacctatag

SEQ ID NO: 339183 - DNA, 1833 bp, Artificial Sequence
  derived and/or modified sequence
atggctgctgagagcggggagctgattggagcctgtgagttcatgaaggaccggctgtactttgccaccctgaggaaccggcccaagagcacagtgaacacccactacttcagcattgatgaggagctggtgtatgagaacttctacgccgactttggccccctgaacctggccatggtgtaccgctactgctgcaagctgaacaagaagctgaagagctacagcctgagcaggaagaagatcgtgcactacacctgctttgaccagaggaagagggccaatgctgccttcctgattggagcctatgctgtgatctacctgaagaagaccccagaggaggcctaccgggccctgctgagcggcagcaaccccccctacctgcccttcagagatgccagctttggaaactgcacctacaacctgaccatcctggactgcctgcagggcatcaggaagggcctgcagcacggcttctttgattttgagacctttgatgtggatgaatatgagcactatgaaagagtggagaatggagacttcaactggatcgtgcctgggaagttcctggccttcagcggcccccaccccaagagcaagattgaaaatggctaccccctgcacgcccctgaggcctacttcccctacttcaagaagcacaacgtgacagctgtggtgcggctgaacaagaagatctatgaggccaagcgcttcacagatgctggctttgagcactatgacctcttcttcattgatggcagcacccccagcgacaacatcgtgcggcgcttcctgaacatctgtgagaacacagagggcgccatcgctgtgcactgcaaggccggcctgggccgcacaggcaccctgattgcctgctacgtgatgaagcactaccgcttcacccacgccgagatcatcgcctggatccgcatctgcaggcctggcagcatcatcggcccccagcagcacttcctggaggagaagcaggccagcctgtgggtgcagggcgacatcttccgcagcaagctgaagaaccggcccagcagcgagggcagcatcaacaagatcctgagcggcctggatgacatgagcatcggcggcaacctgagcaagacccagaacatggagagatttggagaggacaacctggaggatgatgatgtggagatgaagaatggcatcacccagggcgacaagctgcgggccctgaagagccagaggcagcccaggaccagccccagctgtgccttcagaagtgatgacaccaagggccaccccagggctgtgtcccagcccttccggctgagcagcagcctgcagggcagcgctgtgaccctgaagaccagcaagatggccctgagccccagcgccacagccaagaggatcaacagaaccagcctgagcagcggggccaccgtgcgctccttcagcatcaacagccggctggccagcagcctgggcaacctgaatgctgccacagatgatcctgagaacaagaagaccagcagcagcagcaaggccggcttcaccgccagccccttcaccaacctgctgaatggcagcagccagcccaccaccaggaactacccagagctgaacaacaaccagtacaacagaagcagcaacagcaatggaggcaacctgaacagccccccaggcccccacagcgccaagacagaggagcacaccaccatcctgcggcccagctacacaggcctgagcagcagcagcgcccgcttcctgagccgcagcatcccctgcagctgcctgctgctggtgttcaggaagcccttcctgggcagccccctgctgagcctgcccatcagccacctgtag

SEQ ID NO: 339184 - DNA, 1833 bp, Artificial Sequence
  derived and/or modified sequence
atggccgccgagagcggcgagctgatcggcgcctgcgagttcatgaaggaccggctttatttcgctaccctccgtaaccggcctaagagtactgtgaacactcattatttctctattgatgaggagctcgtctacgagaacttctacgctgacttcgggccgctgaacctggcgatggtttacagatactgttgcaaattgaacaagaagctaaagagctatagcctgtcaagaaagaagatcgttcactatacttgcttcgaccagcgaaagcgcgcaaatgccgcgtttctgatcggagcatacgcagtcatctacctgaaaaaaacaccagaagaggcgtatagggccctcttatcaggatcaaaccccccctatctccccttccgtgacgcaagctttggcaactgtacctacaaccttaccatactggactgcctccagggcatcaggaaaggtctgcaacacgggttctttgacttcgagaccttcgatgtggatgagtacgagcactacgaaagagtggaaaacggagattttaactggattgtacctggtaagttcctagcgttctctggaccgcaccctaagtctaagatcgaaaatggctatccactgcatgcacccgaggcctattttccgtatttcaagaagcacaacgtgaccgccgtcgtgaggctgaacaaaaaaatatacgaggctaaaaggttcactgacgccggcttcgaacactacgatctgttctttatcgatggctcaacgccatcagacaatatagtgcggcgcttcctgaatatttgtgagaacactgaaggtgctatcgccgttcactgcaaggctgggttggggaggaccgggaccctcatcgcctgttatgttatgaagcattaccgcttcacccatgccgaaataatcgcttggatccgcatctgccggcctggttctatcatcggacctcagcaacactttctcgaagaaaagcaggcttccctctgggttcagggagatatatttcggtccaaactgaaaaaccgacctagctccgagggctccattaataaaatcttatcagggcttgatgatatgagcattggcgggaatctgtcaaagacgcagaacatggaacggtttggagaagataacctcgaggatgatgacgtggaaatgaagaatggcattactcagggagacaagctaagagcactgaagagccagagacagccacggaccagcccaagttgcgcctttcgttcagacgatacaaagggacacccacgagccgtaagccagcctttccgcttgtccagcagtttacagggatctgctgtgaccttaaagacttctaagatggccttgagtcccagcgctacggccaagcgcattaatcgcacgagcctgtcctcaggcgccactgtccgcagcttcagtatcaactccagacttgccagctccctgggcaacctgaacgctgccactgacgacccagaaaataaaaagaccagctctagttctaaagctggcttcaccgcctctcccttcactaacctgctcaacgggagctctcagcctaccactaggaattacccggaactgaacaacaatcagtacaatcgatcttcaaactcaaatggaggtaatctgaacagtccccccggacctcatagtgcaaaaaccgaagaacacacaaccatcctcagaccaagctacaccggtctcagcagttctagtgccaggtttctgagccggagtataccatgctcgtgtctacttctcgtgtttaggaagccattcctgggcagcccccttctcagcctccccatatctcacctgtag

SEQ ID NO: 339185 - DNA, 1833 bp, Artificial Sequence
  derived and/or modified sequence
atggctgccgagtctggcgaactgatcggtgcttgcgagttcatgaaggacaggttatacttcgcgacactgcgtaacaggcctaaaagcacagttaacacgcattacttctctatcgacgaggaactagtgtatgaaaacttttacgctgactttggcccactcaatctggcaatggtgtacaggtattgttgcaagttaaacaagaagctcaagagctattccctgtcccggaagaaaatcgtgcactacacttgtttcgaccagcgcaagcgagccaacgccgcttttctgatcggcgcttatgctgtaatttatcttaaaaaaacaccagaagaggcgtatagggctctgctgtcaggaagtaaccctccttatctcccttttcgagacgcaagttttggaaattgtacctataatctgacaatccttgactgcttacagggcatccgtaaaggactacagcatggctttttcgattttgagacattcgatgtggacgagtatgagcattacgagagggttgagaacggtgacttcaactggattgtgccagggaaattcctggcttttagcggtccccatcccaaaagtaagatcgagaatgggtaccccctgcatgcaccagaagcctacttcccctacttcaaaaaacataacgttaccgccgttgtgcggcttaacaaaaaaatttacgaagccaagcgctttacagacgccggatttgagcattatgacctgtttttcatcgatggatcaaccccttccgataatatcgtaaggcgatttctgaatatatgcgaaaacacagagggcgcaattgcggtgcactgtaaagccggtctggggagaacagggactctgatagcatgctacgttatgaaacactatcgcttcacccatgccgagatcattgcttggatccgaatctgtcgcccaggatccatcatcggtccgcagcagcactttctggaggagaagcaggcctctctctgggtgcaaggcgacatttttcgttcgaagctgaagaacaggccctcttccgaaggctcgattaacaaaattctcagcggtctcgacgacatgagcatcggagggaatttgtctaagacgcagaacatggagcgttttggggaggataatctcgaggacgatgacgtggaaatgaaaaacggcattactcagggtgataagttgcgggcactgaagtcccagcggcagcctagaacctctccgtcctgcgcctttcggagtgacgacacaaaaggtcacccacgcgcagtatcacagccgttcagactctccagttccttacaggggtcagccgtgacactgaaaacgtcaaagatggccctgtcacctagcgcaaccgcaaagcgaattaatcggacaagcttgtcttccggtgccacggtcaggtcctttagcatcaattcccggctggcctcttcacttggcaacttgaatgcggctactgacgatcctgaaaacaaaaagaccagttcatcatccaaagcaggatttactgcgtcgccgttcacgaatctgctcaatggatcctcacagcctaccaccaggaattaccccgaactgaacaataatcagtacaatcgttcttccaatagtaacggaggtaatctgaattcaccaccagggcctcattcggctaagaccgaagaacacaccaccatcctccggccttcttacacaggtctcagctcttcctcagctcggttcctgtcacgcagcatcccatgttcctgccttctcctggtcttcagaaagccatttctcggttccccccttctcagtctaccgataagtcacctgtag

SEQ ID NO: 339186 - DNA, 1928 bp, Artificial Sequence
  derived and/or modified sequence
cttaagatggcagcggagtcaggggaactaatcggggcttgtgagttcatgaaagatcggttatattttgctactttaaggaatagaccaaaaagcacagtaaatacccactatttctccatcgatgaggagctggtctatgaaaatttctatgcagattttggaccgctgaacttggcaatggtgtacagatattgctgcaaactaaacaagaaactaaaatcatacagtttgtcaagaaagaaaatagtgcactacacctgttttgaccaacggaaaagagcaaatgcagcatttttgataggtgcctatgcagtaatctatttaaagaagacaccagaagaagcctacagagcactcctgtctggctcaaaccccccctatcttccattcagggatgcttcctttggaaattgcacttacaatctcaccattctcgactgtttgcagggaatcagaaagggattacaacatggattttttgactttgagacatttgatgtggatgaatatgaacattatgagcgagttgaaaatggtgacttcaactggattgttccaggaaaatttttagcatttagtggaccacatcctaaaagcaaaattgagaatggttatcctcttcacgcccctgaagcctactttccttatttcaaaaagcataatgtgactgcagttgtgaggctaaacaaaaagatttatgaggcaaagcgcttcacagacgctggcttcgagcactatgacctcttcttcatagatggcagcacacccagtgacaacatcgtgcgaaggttcctgaacatctgtgagaacaccgaaggggccatcgccgttcactgcaaagctggtcttggaagaacagggacattgatagcctgttatgtaatgaaacactacaggtttacacatgctgaaataattgcttggattagaatatgccggccaggctctattataggaccccagcagcacttcctggaagaaaaacaagcatcgttgtgggtccaaggagacattttccgatccaaactgaaaaatcgaccatccagtgaaggaagtattaataaaattctttctggcctagatgatatgtctattggtggaaatctttcaaaaacacaaaacatggaacgatttggagaggataacttagaagatgatgatgtggaaatgaaaaatggtataacccagggagacaaactacgtgccttaaaaagtcagagacagccacgtacctcaccatcctgtgcatttaggtcagatgatacaaaaggacatccaagagcagtgtcccagcctttcagattaagttcatccctgcaaggatctgcagttactttgaagacatcaaaaatggcactgtccccttcagcaacggccaagaggatcaacagaacttctttgtcttcgggtgccactgtaagaagcttttccataaactcccggctagccagttctctagggaacttgaatgctgcaacagatgatccagagaacaaaaagacctcctcatcctctaaggcaggcttcacagccagcccgtttaccaacctcttgaatggcagctcccagccaactaccagaaattaccctgagctcaacaataatcagtacaacagaagcagcaacagcaacgggggcaacctgaacagccccccaggcccccacagcgccaagacagaggagcacaccaccatcctccgaccctcctacaccgggctttcttcttcttcagcgagattcctgagccgttctatcccttgttcatgcctactgctagtctttaggaagccctttcttggaagccccctgctctccttaccaatttctcatctttaaataaagacatatattacctcccatgtcttctgtgaagctctccccatcccttcagtctgaatatgttcattactaaggccttgccactc

SEQ ID NO: 339187 - DNA, 1833 bp, Artificial Sequence
  derived and/or modified sequence
atggccgccgagagcggcgagctgatcggcgcctgcgagttcatgaaggacagactgtacttcgccaccctgagaaacagacccaagagcaccgtgaacacccactacttcagcatcgacgaggagctggtgtacgagaacttctacgccgacttcggccccctgaacctggccatggtgtacagatactgctgcaagctgaacaagaagctgaagagctacagcctgagcagaaagaagatcgtgcactacacctgcttcgaccagagaaagagagccaacgccgccttcctgatcggcgcctacgccgtgatctacctgaagaagacccccgaggaggcctacagagccctgctgagcggcagcaaccccccctacctgcccttcagagacgccagcttcggcaactgcacctacaacctgaccatcctggactgcctgcagggcatcagaaagggcctgcagcacggcttcttcgacttcgagaccttcgacgtggacgagtacgagcactacgagagagtggagaacggcgacttcaactggatcgtgcccggcaagttcctggccttcagcggcccccaccccaagagcaagatcgagaacggctaccccctgcacgcccccgaggcctacttcccctacttcaagaagcacaacgtgaccgccgtggtgagactgaacaagaagatctacgaggccaagagattcaccgacgccggcttcgagcactacgacctgttcttcatcgacggcagcacccccagcgacaacatcgtgagaagattcctgaacatctgcgagaacaccgagggcgccatcgccgtgcactgcaaggccggcctgggcagaaccggcaccctgatcgcctgctacgtgatgaagcactacagattcacccacgccgagatcatcgcctggatcagaatctgcagacccggcagcatcatcggcccccagcagcacttcctggaggagaagcaggccagcctgtgggtgcagggcgacatcttcagaagcaagctgaagaacagacccagcagcgagggcagcatcaacaagatcctgagcggcctggacgacatgagcatcggcggcaacctgagcaagacccagaacatggagagattcggcgaggacaacctggaggacgacgacgtggagatgaagaacggcatcacccagggcgacaagctgagagccctgaagagccagagacagcccagaaccagccccagctgcgccttcagaagcgacgacaccaagggccaccccagagccgtgagccagcccttcagactgagcagcagcctgcagggcagcgccgtgaccctgaagaccagcaagatggccctgagccccagcgccaccgccaagagaatcaacagaaccagcctgagcagcggcgccaccgtgagaagcttcagcatcaacagcagactggccagcagcctgggcaacctgaacgccgccaccgacgaccccgagaacaagaagaccagcagcagcagcaaggccggcttcaccgccagccccttcaccaacctgctgaacggcagcagccagcccaccaccagaaactaccccgagctgaacaacaaccagtacaacagaagcagcaacagcaacggcggcaacctgaacagcccccccggcccccacagcgccaagaccgaggagcacaccaccatcctgagacccagctacaccggcctgagcagcagcagcgccagattcctgagcagaagcatcccctgcagctgcctgctgctggtgttcagaaagcccttcctgggcagccccctgctgagcctgcccatcagccacctgtag

SEQ ID NO: 339188 - DNA, 1698 bp, Artificial Sequence
  derived and/or modified sequence
atggtctacaggtattgctgcaaactgaacaagaaactgaagtcctactcactgtctagaaaaaagatcgtccattatacatgctttgatcagcggaagagggcaaatgcagcctttctgatcggagcgtacgcggtgatatacctcaaaaaaacacccgaggaagcatatcgggctttgctatcaggcagcaatcctccgtacctgccctttagagatgccagcttcggaaattgtacctataacctgacaattctcgactgtctgcagggtattagaaagggactgcaacatggcttcttcgacttcgaaaccttcgacgtggatgaatacgagcattatgaaagggtagagaatggcgactttaactggatcgtgccgggcaaattcctcgccttcagtggcccacaccccaagagtaagattgagaatggctatccgcttcacgccccggaagcgtacttcccctattttaagaagcacaatgttacagcagtcgtcaggctaaataaaaagatttacgaggcgaagaggtttacagacgctggatttgagcattatgacctgttcttcatcgacggaagcacgccgtctgacaatatcgttagaaggtttctcaacatctgcgagaacaccgagggggccattgccgtacactgcaaggccggcctcggccggactgggactttgattgcctgctacgtgatgaagcactatagatttacacatgccgagatcatcgcgtggattaggatctgccggcctggttctatcatcggtccacaacaacactttttggaggagaaacaagcgtcgctctgggtgcagggggatatttttcgcagtaagttaaaaaatcggccctcatcagagggatccatcaacaaaatcctctccggactggacgacatgtcaatcggcggcaatttgtcgaaaacacaaaacatggagcggttcggagaggacaacctagaagatgatgacgtagaaatgaaaaatggaatcacgcaaggcgacaagctccgagccctcaagagtcagcggcagccccgcacctctccaagttgcgcatttagatcagacgacaccaaaggacaccctcgtgccgtcagccagccattccgcttatcctcctctctgcagggatcagccgtgaccctcaaaacttctaaaatggctcttagcccctcagctacagccaagaggataaatcggacgtccctttccagcggggctacagttcggtccttctcaattaactcccgccttgcaagtagtctgggaaatttgaatgctgccaccgacgatcctgaaaacaaaaagacctcgagttcttccaaggctggctttaccgcctctccatttacaaatcttctgaacgggtcatcccagcctaccaccagaaattacccagaactgaacaataaccagtacaacagatcctccaacagtaatgggggaaacttgaattccccacctggacctcatagtgccaagacagaagaacataccacgatactgcgcccaagttacacaggtttatctagctcaagcgctaggttcctctcacgctcaatcccagtctccgcacagaccccaccgcctggccctcagaatccagagtgcaacttttgtgccctgcccagtcaaccccggctaccccccaagaagttcaacagcgccaaggaggcgttctag

SEQ ID NO: 339189 - DNA, 1698 bp, Artificial Sequence
  derived and/or modified sequence
atggtgtaccgctactgctgcaagctgaacaagaagctgaagagctacagcctgagcaggaagaagatcgtgcactacacctgctttgaccagaggaagagggccaatgctgccttcctgattggagcctatgctgtgatctacctgaagaagaccccagaggaggcctaccgggccctgctgagcggcagcaaccccccctacctgcccttcagagatgccagctttggaaactgcacctacaacctgaccatcctggactgcctgcagggcatcaggaagggcctgcagcacggcttctttgattttgagacctttgatgtggatgaatatgagcactatgaaagagtggagaatggagacttcaactggatcgtgcctgggaagttcctggccttcagcggcccccaccccaagagcaagattgaaaatggctaccccctgcacgcccctgaggcctacttcccctacttcaagaagcacaacgtgacagctgtggtgcggctgaacaagaagatctatgaggccaagcgcttcacagatgctggctttgagcactatgacctcttcttcattgatggcagcacccccagcgacaacatcgtgcggcgcttcctgaacatctgtgagaacacagagggcgccatcgctgtgcactgcaaggccggcctgggccgcacaggcaccctgattgcctgctacgtgatgaagcactaccgcttcacccacgccgagatcatcgcctggatccgcatctgcaggcctggcagcatcatcggcccccagcagcacttcctggaggagaagcaggccagcctgtgggtgcagggcgacatcttccgcagcaagctgaagaaccggcccagcagcgagggcagcatcaacaagatcctgagcggcctggatgacatgagcatcggcggcaacctgagcaagacccagaacatggagagatttggagaggacaacctggaggatgatgatgtggagatgaagaatggcatcacccagggcgacaagctgcgggccctgaagagccagaggcagcccaggaccagccccagctgtgccttcagaagtgatgacaccaagggccaccccagggctgtgtcccagcccttccggctgagcagcagcctgcagggcagcgctgtgaccctgaagaccagcaagatggccctgagccccagcgccacagccaagaggatcaacagaaccagcctgagcagcggggccaccgtgcgctccttcagcatcaacagccggctggccagcagcctgggcaacctgaatgctgccacagatgatcctgagaacaagaagaccagcagcagcagcaaggccggcttcaccgccagccccttcaccaacctgctgaatggcagcagccagcccaccaccaggaactacccagagctgaacaacaaccagtacaacagaagcagcaacagcaatggaggcaacctgaacagccccccaggcccccacagcgccaagacagaggagcacaccaccatcctgcggcccagctacacaggcctgagcagcagcagcgcccgcttcctgagccgcagcatccctgtgtctgcccagaccccacctcctggcccccagaaccctgagtgcaacttctgtgccctgcccagccagccccggctgccccccaagaagttcaacagcgccaaggaggccttctag

SEQ ID NO: 339190 - DNA, 1698 bp, Artificial Sequence
  derived and/or modified sequence
atggtgtaccggtactgctgcaagctgaacaagaagctgaagagctacagccttagccgcaaaaaaatcgtacactatacctgctttgatcagcggaagcgggcaaacgccgccttcctgattggagcctatgccgtgatttacctcaaaaagactcccgaagaggcctacagagctctgttgagcggatctaaccctccataccttccattcagggacgcctcctttggcaattgtacttataatctgaccattctcgactgcttgcagggaatacggaagggcctccagcatggattttttgacttcgagacttttgatgtggatgagtatgagcattatgagagagtggagaacggggatttcaactggatcgtgcctggaaagttcttagcattctcagggcctcacccaaaatccaaaatcgaaaacggctatccattgcacgccccagaagcctattttccatacttcaaaaaacacaacgtcacagcagtggttcggttaaataaaaaaatctacgaagccaaacgctttactgacgctggatttgaacattatgacctctttttcatcgacgggagcaccccctcagataacatcgtgcgacgtttcctaaacatctgtgaaaatacagaaggcgcgatcgcagtgcattgcaaggccgggttaggacgaacaggaacactcattgcttgctatgtgatgaagcactatcgcttcactcacgctgaaataatcgcctggattcggatttgcaggcctggaagcatcatcggtccacaacagcacttcctagaggaaaagcaggcgagcctctgggtccaaggcgatattttccggtctaagctgaaaaatcggccaagtagcgagggtagtatcaacaagatcctgagcgggcttgatgatatgtccattggtggtaatctatcaaagacacaaaatatggaaaggttcggagaggacaatctggaggacgatgacgtggagatgaaaaatggtataacccaaggagacaagcttcgggcgctaaagtcgcagcgccaaccaagaaccagcccttcttgcgcattcaggagtgacgatacaaaggggcatccacgggcagtgtctcaacccttccgcctgtcctcttcactgcaaggcagcgcggtgactctgaagaccagcaaaatggccctcagtccaagtgccaccgcaaagaggataaacaggacaagtctgtcttccggcgctacagtgcgctcgttttccattaacagtcgcctggcctcctcactgggcaatctgaatgcggcaacagatgatcctgagaacaagaagacctcctccagctccaaagccggctttaccgctagcccatttactaacctgctcaacggttcctcccagccgaccacccgcaactacccagagttgaacaacaaccagtacaatcggagctccaactctaatggcgggaatctcaatagcccacccggaccgcattcagcaaagaccgaggagcacacaacaatcctcaggccgtcctacaccggcctgtcgtcttccagtgcaaggttcctttccaggtcaatccccgtgtccgcacagacacctcctccaggtccccagaatccagaatgtaatttttgcgctctgccgagtcagccaagactgcctccgaagaagttcaactccgccaaagaggcattttag

SEQ ID NO: 339191 - DNA, 1698 bp, Artificial Sequence
  derived and/or modified sequence
atggtgtaccgctactgctgtaaattaaataagaaactgaaatcgtattccttatcacgaaagaagatcgttcattatacctgtttcgatcaaagaaaacgcgcaaatgccgcattcctgataggtgcttacgctgtgatctaccttaagaagactcccgaagaggcctatcgggctttgttaagtggctcgaatcccccttacttaccttttcgcgacgcgtcctttgggaattgtacatacaatttaaccattcttgattgtctgcagggtataaggaaaggactgcagcacggcttctttgactttgagaccttcgacgttgatgaatacgagcattacgaacgcgtggagaacggagactttaactggatcgtcccaggcaaattccttgctttcagcgggcctcacccaaagagtaagattgagaacggatatcctttgcatgctccggaggcctattttccctacttcaagaagcacaacgtgacagctgtggttcgcctcaataagaaaatttacgaggccaagcggttcacagatgccggatttgagcactacgatttgttctttattgacggttctacacccagcgataatatcgtacggcgtttcctgaacatctgcgagaacaccgagggtgccatagctgtgcactgcaaagccggtctcggaaggacagggacgctcattgcttgctacgtcatgaagcactataggtttacccatgccgaaatcatcgcctggattagaatctgccgaccgggttccatcattggtccacagcagcacttcctcgaagaaaagcaggcttccctttgggtgcagggggacattttccgatctaagctgaaaaatcggccatcatccgaaggttccattaataagatcctgtctgggctggatgacatgtctataggtggcaacctgagcaaaacccagaatatggagagatttggagaggacaatctggaggacgatgacgtggagatgaagaatggcattactcagggcgataaactgagagccctgaagtctcaaaggcaaccaaggacaagccctagctgtgctttccgctccgatgataccaagggacacccaagggcagtgtcacaaccattcaggctgtcttcctctctgcaaggctccgcggtgacgctaaagacctccaaaatggcactaagtccatccgctactgctaaaaggatcaacaggacttctctttcttccggcgcaacagtccgctccttctcaatcaattctcgactagcttcctccctgggaaatctgaatgccgcaactgacgacccagaaaacaaaaaaacgagcagctcaagcaaagctggctttaccgcctctccctttaccaacctgctgaacggctctagccagcctacaactcgcaattaccccgaactgaacaacaaccagtataataggtcttctaacagcaacgggggaaacctgaactccccaccagggccacattccgcgaaaacagaggagcatacaacaatcctacggccatcctataccggcctgtcatccagttcagctagattccttagcaggagcatccctgtttcagcccaaactccccctcctggtccccagaaccccgaatgtaacttctgcgccctcccgtctcagccgaggctgccaccaaaaaaatttaattctgccaaggaagccttttag

SEQ ID NO: 339192 - DNA, 1698 bp, Artificial Sequence
  derived and/or modified sequence
atggtgtacagatactgctgcaagctgaacaagaagctgaagagctacagcctgagcagaaagaagatcgtgcactacacctgcttcgaccagagaaagagagccaacgccgccttcctgatcggcgcctacgccgtgatctacctgaagaagacccccgaggaggcctacagagccctgctgagcggcagcaaccccccctacctgcccttcagagacgccagcttcggcaactgcacctacaacctgaccatcctggactgcctgcagggcatcagaaagggcctgcagcacggcttcttcgacttcgagaccttcgacgtggacgagtacgagcactacgagagagtggagaacggcgacttcaactggatcgtgcccggcaagttcctggccttcagcggcccccaccccaagagcaagatcgagaacggctaccccctgcacgcccccgaggcctacttcccctacttcaagaagcacaacgtgaccgccgtggtgagactgaacaagaagatctacgaggccaagagattcaccgacgccggcttcgagcactacgacctgttcttcatcgacggcagcacccccagcgacaacatcgtgagaagattcctgaacatctgcgagaacaccgagggcgccatcgccgtgcactgcaaggccggcctgggcagaaccggcaccctgatcgcctgctacgtgatgaagcactacagattcacccacgccgagatcatcgcctggatcagaatctgcagacccggcagcatcatcggcccccagcagcacttcctggaggagaagcaggccagcctgtgggtgcagggcgacatcttcagaagcaagctgaagaacagacccagcagcgagggcagcatcaacaagatcctgagcggcctggacgacatgagcatcggcggcaacctgagcaagacccagaacatggagagattcggcgaggacaacctggaggacgacgacgtggagatgaagaacggcatcacccagggcgacaagctgagagccctgaagagccagagacagcccagaaccagccccagctgcgccttcagaagcgacgacaccaagggccaccccagagccgtgagccagcccttcagactgagcagcagcctgcagggcagcgccgtgaccctgaagaccagcaagatggccctgagccccagcgccaccgccaagagaatcaacagaaccagcctgagcagcggcgccaccgtgagaagcttcagcatcaacagcagactggccagcagcctgggcaacctgaacgccgccaccgacgaccccgagaacaagaagaccagcagcagcagcaaggccggcttcaccgccagccccttcaccaacctgctgaacggcagcagccagcccaccaccagaaactaccccgagctgaacaacaaccagtacaacagaagcagcaacagcaacggcggcaacctgaacagcccccccggcccccacagcgccaagaccgaggagcacaccaccatcctgagacccagctacaccggcctgagcagcagcagcgccagattcctgagcagaagcatccccgtgagcgcccagacccccccccccggcccccagaaccccgagtgcaacttctgcgccctgcccagccagcccagactgccccccaagaagttcaacagcgccaaggaggccttctag

SEQ ID NO: 339193 - DNA, 822 bp, Artificial Sequence
  derived and/or modified sequence
atgggcaattttctgagccgcgaaaacaaagtgcaggtgatttcggagtcagaccgactatactttgcaaccttacgcaaccgccccaagagcacagttaacacccactatttctcaatcgatgaggaactggtttacgagaatttctacgcagatttcgggccgctgaacctggccatggtgtataggtactgttgcaaattgaacaagaagctgaagtcatatagcttgtctcgtaagaagatcgtacattacacgtgttttgaccagagaaaaagagcaaatgccgcttttctcataggagcttacgccgtgatctacttaaaaaagacacccgaggaggcctaccgcgcgttgctcagcggctccaatccgccctacctgccatttcgggacgcatccttcggcaattgtacatacaacctcacaattctagattgcttgcagggtatccgcaaggggctgcagcacggctttttcgactttgaaactttcgacgtggacgaatacgagcactacgaacgagtcgagaatggagactttaactggattgtgcctggtaagttcttagcattcagcggccctcaccccaaatccaagatagaaaatggctatccccttcacgcgccagaagcctacttcccttacttcaaaaagcacaacgtgactgctgttgtgcgtttaaataagaagatttatgaagccaagcggtttactgacgctgggttcgagcactacgacctttttttcattgatgggtctaccccatctgataacatagtaaggcgctttctcaatatttgcgagaacaccgaaggctag

SEQ ID NO: 339194 - DNA, 822 bp, Artificial Sequence
  derived and/or modified sequence
atgggcaacttcctgagccgggagaacaaggtgcaggtgatcagcgagagtgaccggctgtactttgccaccctgaggaaccggcccaagagcacagtgaacacccactacttcagcattgatgaggagctggtgtatgagaacttctatgctgactttggccccctgaacctggccatggtgtaccgctactgctgcaagctgaacaagaagctgaagagctacagcctgagcaggaagaagatcgtgcactacacctgctttgaccagaggaagagggccaatgctgccttcctgattggagcctatgctgtgatctacctgaagaagaccccagaggaggcctaccgggccctgctgagcggcagcaaccccccctacctgcccttcagagatgccagctttggaaactgcacctacaacctgaccatcctggactgcctgcagggcatcaggaagggcctgcagcacggcttctttgattttgagacctttgatgtggatgaatatgagcactatgagcgggtggagaatggagacttcaactggatcgtgcctgggaagttcctggccttcagcggcccccaccccaagagcaagattgaaaatggctaccccctgcacgcccctgaggcctacttcccctacttcaagaagcacaacgtgacagctgtggtgcggctgaacaagaagatctatgaggccaagcgcttcacagatgctggctttgagcactatgacctcttcttcattgatggcagcacccccagcgacaacatcgtgcggcgcttcctgaacatctgtgaaaatacagagggctag

SEQ ID NO: 339195 - DNA, 822 bp, Artificial Sequence
  derived and/or modified sequence
atgggcaacttcctgagccgggagaacaaggtgcaggtgatcagcgaaagcgatcggctgtattttgcaacgcttcggaataggccaaaatctacagtcaacacacattacttctccatcgacgaggagcttgtctatgaaaatttctatgccgactttggacctctcaatcttgctatggtctacaggtactgctgtaagctgaataaaaagctgaagagctactccttatccagaaagaagatcgtgcactatacatgcttcgatcagcggaaacgggcgaatgccgcctttttgatcggggcatatgccgtcatctatttgaaaaaaacacccgaagaagcatacagggctcttctgtcaggaagcaacccgccatatctgccctttcgagatgcttcgttcggcaactgtacatataatctaaccattctagactgcctgcaaggtatccgcaagggccttcagcatggcttctttgatttcgagactttcgacgtcgatgagtatgagcactatgaacgggttgaaaacggagatttcaactggattgtgcccggcaaatttctggcattctctggaccacacccaaagtctaaaatcgaaaacggctaccctctgcacgcacctgaagcatacttcccctactttaagaaacataatgtcaccgccgtggtcagactgaacaaaaagatatatgaggctaagaggttcacagacgccggatttgaacattatgatctgtttttcatagacggctctacacctagtgacaatatcgtgaggcgctttctgaatatctgcgagaacactgaagggtag

SEQ ID NO: 339196 - DNA, 822 bp, Artificial Sequence
  derived and/or modified sequence
atggggaattttctgagcagagaaaacaaagttcaggtcatttctgagtcagatcgactgtactttgccacactaagaaaccggcctaagtccaccgtgaacacacactacttttccattgacgaggaattggtttacgagaacttctatgctgatttcggaccccttaatctggccatggtataccgctactgttgcaagttgaataagaagctcaagtcttattccctgagccgaaagaagattgtccattacacctgttttgatcagcggaaacgcgctaatgctgccttcctgattggtgcctatgcagtgatatatctgaagaaaacccccgaggaggcctaccgagctctgcttagtggcagtaaccccccatacctcccattcagagacgcttcttttggaaactgtacatataatctgactattcttgattgcctccaggggatccgtaaggggttgcagcacgggttcttcgacttcgagaccttcgacgtggatgaatatgagcactacgaaagagtggaaaacggagacttcaattggatcgtgcctggaaaattcctagcattcagcggacctcacccaaagtcaaagatcgagaacgggtatcccctgcatgcccctgaggcctactttccgtacttcaagaagcataacgtcacagccgtggtgcgactgaataaaaaaatatatgaagctaagcgttttacagatgccggatttgaacactacgacctattcttcatagacggctccactccgtcagacaatatcgtgcgccgattcctcaacatttgcgagaataccgaggggtag

SEQ ID NO: 339197 - DNA, 841 bp, Artificial Sequence
  derived and/or modified sequence
gatgagagggcgtggagaaccagatgggaaactttttgtcccgtgagaacaaagtacaagttatatcagagtctgatcggttatattttgctactttaaggaatagaccaaaaagcacagtaaatacccactatttctccatcgatgaggagctggtctatgaaaatttctatgcagattttggaccgctgaacttggcaatggtgtacagatattgctgcaaactaaacaagaaactaaaatcatacagtttgtcaagaaagaaaatagtgcactacacctgttttgaccaacggaaaagagcaaatgcagcatttttgataggtgcctatgcagtaatctatttaaagaagacaccagaagaagcctacagagcactcctgtctggctcaaaccccccctatcttccattcagggatgcttcctttggaaattgcacttacaatctcaccattctcgactgtttgcagggaatcagaaagggattacaacatggattttttgactttgagacatttgatgtggatgaatatgaacattatgagcgagttgaaaatggtgacttcaactggattgttccaggaaaatttttagcatttagtggaccacatcctaaaagcaaaattgagaatggttatcctcttcacgcccctgaagcctactttccttatttcaaaaagcataatgtgactgcagttgtgaggctaaacaaaaagatttatgaggcaaagcgcttcacagacgctggcttcgagcactatgacctcttcttcatagatggcagcacacccagtgacaacatcgtgcgaaggttcctgaacatctgtgagaacaccgaagg

SEQ ID NO: 339198 - DNA, 822 bp, Artificial Sequence
  derived and/or modified sequence
atgggcaacttcctgagcagagagaacaaggtgcaggtgatcagcgagagcgacagactgtacttcgccaccctgagaaacagacccaagagcaccgtgaacacccactacttcagcatcgacgaggagctggtgtacgagaacttctacgccgacttcggccccctgaacctggccatggtgtacagatactgctgcaagctgaacaagaagctgaagagctacagcctgagcagaaagaagatcgtgcactacacctgcttcgaccagagaaagagagccaacgccgccttcctgatcggcgcctacgccgtgatctacctgaagaagacccccgaggaggcctacagagccctgctgagcggcagcaaccccccctacctgcccttcagagacgccagcttcggcaactgcacctacaacctgaccatcctggactgcctgcagggcatcagaaagggcctgcagcacggcttcttcgacttcgagaccttcgacgtggacgagtacgagcactacgagagagtggagaacggcgacttcaactggatcgtgcccggcaagttcctggccttcagcggcccccaccccaagagcaagatcgagaacggctaccccctgcacgcccccgaggcctacttcccctacttcaagaagcacaacgtgaccgccgtggtgagactgaacaagaagatctacgaggccaagagattcaccgacgccggcttcgagcactacgacctgttcttcatcgacggcagcacccccagcgacaacatcgtgagaagattcctgaacatctgcgagaacaccgagggctag

SEQ ID NO: 339199 - protein, 329 aa, Artificial Sequence
  derived and/or modified sequence
MAKSMPSKSSRNKQGTVGVGCFERWRRCISVRETSSILAHIQKQKHFNEREASRVVRDVAAALDFLHTKGIAHRDLKPENILCESPEKVSPVKICDFDLGSGMKLNNSCTPITTPELTTPCGSAEYMAPEVVEVFTDQATFYDKRCDLWSLGVVLYIMLSGYPPFVGHCGADCGWDRGEVCRVCQNKLFESIQEGKYEFPDKDWAHISSEAKDLISKLLVRDAKQRLSAAQVLQHPWVQGQAPEKGLPTPQVLQRNSSTMDLTLFAAEAIALNRQLSQHEENELAEEPEALADGLCSMKLSPPCKSRLARRRALAQAGRGEDRSPPTAL

SEQ ID NO: 339200 - DNA, 990 bp, Artificial Sequence
  derived and/or modified sequence
atggcaaaaagcatgcctagcaaatccagccgcaacaagcagggaacagttggcgtgggatgcttcgaaagatggaggcggtgtatctcagttcgcgaaacttcctctatcctcgcccacatccagaaacaaaaacacttcaacgaacgcgaggcttccagggtggtgcgagacgtcgcagcagccctggactttttgcacaccaagggaatcgcccacagagacctcaaacctgagaacatcctctgcgagtcacccgaaaaggtcagcccagtaaaaatatgtgattttgatctgggttccggtatgaagttgaataatagctgtactcccattaccacccccgaattaacaacaccgtgcggcagcgccgaatacatggcccccgaggtcgtcgaggtgttcactgaccaggcgacattttatgacaagcgatgcgacctgtggtcactgggcgtggtcttatacattatgttgagcggataccccccgtttgtgggtcactgtggcgccgactgtggctgggatcgaggcgaagtgtgtcgcgtgtgtcagaataagctgtttgaatccatccaggaaggcaagtacgaatttcctgataaagattgggcccacatcagcagcgaagccaaggatttgatcagcaagttgctggtgagagacgccaaacaacgcctaagcgcagcgcaagtgttacagcacccctgggtccagggacaggccccggagaagggattgccgacaccacaagtccttcagagaaatagctccactatggatttgactctgttcgctgctgaggcaatcgcccttaatcgtcagttgagtcagcacgaagagaacgagctggcggaagagccagaggccctggctgatggcctgtgttccatgaagttgagcccgccctgtaaaagtcggttggctagaaggagggccctggctcaggccggtcggggtgaagaccgttctcctccgactgccctgtag

SEQ ID NO: 339201 - DNA, 990 bp, Artificial Sequence
  derived and/or modified sequence
atggccaagtccatgcccagcaagagcagcaggaacaagcagggcaccgtgggcgtgggctgctttgagcgctggaggcgctgcatctctgtgcgggagaccagcagcatcctggcccacatccagaagcagaagcacttcaatgaaagagaggccagccgggtggtgagagatgtggccgccgccctggacttcctgcacaccaagggcatcgcccaccgggacctgaagccagagaacatcctgtgtgagagccctgagaaggtgtcccctgtgaagatctgtgactttgacctgggcagcggcatgaagctgaacaacagctgcacccccatcaccaccccagagctgaccaccccctgtggcagcgctgagtacatggcccctgaggtggtggaggtgttcacagaccaggccaccttctatgacaagagatgtgacctgtggagcctgggcgtggtgctgtacatcatgctgagcggctaccccccatttgtgggccactgtggggctgactgtggctgggacagaggagaggtgtgccgggtgtgccagaacaagctgtttgagagcatccaggagggcaagtatgagttcccagacaaggactgggcccacatcagcagcgaggccaaggacctgatcagcaagctgctggtgagagatgccaagcagaggctgtctgctgcccaggtgctgcagcacccctgggtgcagggccaggcccctgagaagggcctgcccaccccccaggtgctgcagaggaacagcagcaccatggacctgaccctgtttgctgctgaggccatcgccctgaaccggcagctgagccagcatgaagaaaatgagctggccgaggagcctgaggccctggctgatggcctgtgcagcatgaagctgagccccccctgcaagagccggctggccaggagaagagccctggcccaggccggcagaggagaagatagaagccccccaacagccctgtag

SEQ ID NO: 339202 - DNA, 2421 bp, Artificial Sequence
  derived and/or modified sequence
cagaaacaactctccaagttccatttccaaggaaagtcttaaccatttgtcccttctggcgtaccctctttcattgaaatccatgcagaatataccagagatgggcagtagcgaaccccttcccatcgcagatggtgacaggaggaggaagaagaagcggaggggccgggccactgactccttgccaggaaagtttgaagatatgtacaagctgacctctgaattgcttggagagggagcctatgccaaagttcaaggtgccgtgagcctacagaatggcaaagagtatgccgtcaaaatcatcgagaaacaagcagggcacagtcggagtagggtgtttcgagaggtggagacgctgtatcagtgtcagggaaacaagttccatcttagcccacatccagaagcaaaagcacttcaatgagcgagaagccagccgagtggtgcgggacgttgctgctgcccttgacttcctgcataccaaaggcattgctcatcgtgatctgaaaccagaaaatatattgtgtgaatctccagaaaaggtgtctccagtgaaaatctgtgactttgacttgggcagtgggatgaaactgaacaactcctgtacccccataaccacaccagagctgaccaccccatgtggctctgcagaatacatggcccctgaggtagtggaggtcttcacggaccaggccacattctacgacaagcgctgtgacctgtggagcctgggcgtggtcctctacatcatgctgagtggctacccacccttcgtgggtcactgcggggccgactgtggctgggaccggggcgaggtctgcagggtgtgccagaacaagctgtttgaaagcatccaggaaggcaagtatgagtttcctgacaaggactgggcacacatctccagtgaagccaaagacctcatctccaagctcctggtgcgagatgcaaagcagagacttagcgccgcccaagttctgcagcacccatgggtgcaggggcaagctccagaaaagggactccccacgccgcaagtcctccagaggaacagcagcacaatggacctgacgctcttcgcagctgaggccatcgcccttaaccgccagctatctcagcacgaagagaacgaactagcagaggagccagaggcactagctgatggcctctgctccatgaagctttcccctccctgcaagtcacgcctggcccggagacgggccctggcccaggcaggccgtggtgaagacaggagcccgcccacagcactctgaaatgctccagtcacaccttataggccctaggcctggccaggcattgtcccctggaaacctgtgtggctaaagtctgctgagcaggcagcagcctctgctctgtggctccattcaggctttttcatctacgaaggccctgaggttcccatcaacccccatttccctagggtcctggaggaaaaagctttttccaaaggggttgtctttgaaaaggaaagcaatcacttctcactttgcataattgcctgcagcaggaacatctcttcactgggctccacctgctcacccgcctgcagatctgggatccagcctgctctcaccgctgtagctgtggcggctggggctgcagcctgcagggagaagcaagaagcatcagttgacagaggctgccgacacgtgcctcttccctctcttctctgtcaccctcctctggcggtccttccaccttcctctgtcctccggatgtcctctttgcccgtcttctcccttggctgagcaaagccatcccctcaattcagggaagggcaaggagccttcctcattcaggaaatcaaatcagtcttccggtctgcagcacggaaaagcacataatctttctttgctgtgactgaaatgtatccctcgtttatcatcccctttgtttgtgattgctgctaaagtcagtagtatcgtttttttaaaaaaaaagtttggtgtttttaaccatgctgttccagcaaagatgataccttaaactcccactgcaagcccatgaacttcccagagagtggaacggcttgctcttctttctagaatgtccatgcacttgggttttaatcagcagttccctattattctgattttaagctgttcctgtgatgaacttagagacagcatcggtgtctgctgctgtgtccccaggtcttgtgtgggtggcacagatctgggcagttagatagtgctctgtgcctaaggtgaagccacactagggtgaagcctcacttccctgtttgagcaatgcagtgcctgctgcccgtgtgcatgaaggtacagccattcagataagtggaactattgagttacataaagaaaatagatttgcatttgtcaggcagacgtttatacaacaccacggtgcttttatacattgtgcttattttaataaaactgaaattct

SEQ ID NO: 339203 - DNA, 990 bp, Artificial Sequence
  derived and/or modified sequence
atggccaagagcatgcccagcaagagcagccggaacaagcagggcactgtgggggttggttgtttcgaacgatggcggcgttgcatcagtgtgcgagaaacctctagtatcctcgcacacattcaaaaacagaaacactttaacgaaagagaagcctcccgcgttgttcgggacgtggccgccgctctggactttctgcatactaaaggcatcgctcaccgcgatttaaagcctgaaaacatcctctgtgaatctcctgaaaaggtgagcccagttaaaatttgtgatttcgatttggggtcagggatgaaactcaacaactcctgtaccccaatcactacgccagagttgaccacaccttgcggcagcgcagaatatatggctcccgaggttgtcgaggtgttcaccgaccaggccaccttctatgataaacgatgtgacctgtggtcattgggcgtcgtcctgtacatcatgctttcgggatatcctccatttgtcggccattgcggggccgattgcggctgggaccgcggcgaagtgtgtagggtgtgccaaaataagctctttgagtccattcaagagggaaagtacgagtttcccgacaaggattgggcccacatcagcagtgaagctaaagacctcatctccaagcttctagtgcgcgacgctaaacagaggttgtcagctgcccaggtgctccaacacccttgggtgcaagggcaggcaccagagaagggactgcccacacctcaagtactgcaaaggaactcatccaccatggacctgactctgtttgctgctgaagccatcgccttaaacaggcagctgtcccaacatgaggagaatgaactggcagaggagcccgaagcactcgctgacgggctttgtagtatgaagttatcccctccatgcaagagcaggctagctagaaggcgcgcccttgcccaggctgggagaggggaagataggagcccaccgaccgcgttgtag

SEQ ID NO: 339204 - DNA, 990 bp, Artificial Sequence
  derived and/or modified sequence
atggcgaaatcaatgccatctaaatccagcagaaacaagcagggcaccgttggagtaggatgctttgagagatggcgccgatgcatctccgtgagagaaacctcctctatcctggcccatattcagaagcaaaagcacttcaacgaacgcgaggcctctagggtcgttcgggatgtcgccgctgccctagatttccttcatacaaaagggatagctcatcgggacctcaagccagagaacatcctttgtgagtcccctgagaaagtatctccagtgaaaatatgtgactttgatctgggcagcggcatgaaactcaacaactcttgtacccctatcactacccccgaactaaccaccccctgtgggtccgccgagtacatggccccagaggtagttgaagtgttcactgaccaggctacattttatgacaaacggtgcgacctatggtctctgggggtggtgctctacatcatgttgagcggatatccccctttcgtgggacattgcggcgctgactgtggatgggaccgcggtgaggtgtgtcgggtgtgtcaaaataaactgtttgaatccatacaagagggcaaatatgaatttcctgataaagactgggctcacatcagctccgaggcaaaagacctcataagcaagctccttgtacgcgacgccaagcagcgactaagcgccgcacaggttctgcagcacccgtgggtccaggggcaggccccagagaagggactgcccaccccacaggttctgcaaaggaactctagcacaatggaccttacactgtttgcagcagaggcaatcgctctgaaccgtcaattgtctcagcatgaggagaatgagcttgcagaagagcccgaggccttggcagatggtctatgctctatgaagctatccccaccttgcaaatccaggttggccagacggagagctctggcacaggccggtaggggtgaggacaggtcccccccaactgcactgtag

SEQ ID NO: 339205 - DNA, 990 bp, Artificial Sequence
  derived and/or modified sequence
atggccaagagcatgcccagcaagagcagcagaaacaagcagggcaccgtgggcgtgggctgcttcgagagatggagaagatgcatcagcgtgagagagaccagcagcatcctggcccacatccagaagcagaagcacttcaacgagagagaggccagcagagtggtgagagacgtggccgccgccctggacttcctgcacaccaagggcatcgcccacagagacctgaagcccgagaacatcctgtgcgagagccccgagaaggtgagccccgtgaagatctgcgacttcgacctgggcagcggcatgaagctgaacaacagctgcacccccatcaccacccccgagctgaccaccccctgcggcagcgccgagtacatggcccccgaggtggtggaggtgttcaccgaccaggccaccttctacgacaagagatgcgacctgtggagcctgggcgtggtgctgtacatcatgctgagcggctacccccccttcgtgggccactgcggcgccgactgcggctgggacagaggcgaggtgtgcagagtgtgccagaacaagctgttcgagagcatccaggagggcaagtacgagttccccgacaaggactgggcccacatcagcagcgaggccaaggacctgatcagcaagctgctggtgagagacgccaagcagagactgagcgccgcccaggtgctgcagcacccctgggtgcagggccaggcccccgagaagggcctgcccaccccccaggtgctgcagagaaacagcagcaccatggacctgaccctgttcgccgccgaggccatcgccctgaacagacagctgagccagcacgaggagaacgagctggccgaggagcccgaggccctggccgacggcctgtgcagcatgaagctgagccccccctgcaagagcagactggccagaagaagagccctggcccaggccggcagaggcgaggacagaagcccccccaccgccctgtag

SEQ ID NO: 339206 - protein, 362 aa, Artificial Sequence
  derived and/or modified sequence
MRIPVDPSTSRRFTPPSPAFPCGGGGGKMGENSGALSAQAAVGPGGRARPEVRSMVDVLADHAGELVRTDSPNFLCSVLPSHWRCNKTLPVAFKVVALGDVPDGTVVTVMAGNDENYSAELRNASAVMKNQVARFNDLRFVGRSGRGKSFTLTITVFTNPTQVATYHRAIKVTVDGPREPRRTSELNPFSDPRQFDRSFPTLPTLTESRFPDPRMHYPGAMSAAFPYSATPSGTSISSLSVAGMPATSRFHHTYLPPPYPGAPQNQSGPFQANPSPYHLYYGTSSGSYQFSMVAGSSSGGDRSPTRMLASCTSSAASVAAGNLMNPSLGGQSDGVEADGSHSNSPTALSTPGRMDEAVWRPY

SEQ ID NO: 339207 - DNA, 1089 bp, Artificial Sequence
  derived and/or modified sequence
atgagaatccccgtggaccccagcaccagcagaagattcaccccccccagccccgccttcccctgcggcggcggcggcggcaagatgggcgagaacagcggcgccctgagcgcccaggccgccgtgggccccggcggcagagccagacccgaggtgagaagcatggtggacgtgctggccgaccacgccggcgagctggtgagaaccgacagccccaacttcctgtgcagcgtgctgcccagccactggagatgcaacaagaccctgcccgtggccttcaaggtggtggccctgggcgacgtgcccgacggcaccgtggtgaccgtgatggccggcaacgacgagaactacagcgccgagctgagaaacgccagcgccgtgatgaagaaccaggtggccagattcaacgacctgagattcgtgggcagaagcggcagaggcaagagcttcaccctgaccatcaccgtgttcaccaaccccacccaggtggccacctaccacagagccatcaaggtgaccgtggacggccccagagagcccagaagaaccagcgagctgaaccccttcagcgaccccagacagttcgacagaagcttccccaccctgcccaccctgaccgagagcagattccccgaccccagaatgcactaccccggcgccatgagcgccgccttcccctacagcgccacccccagcggcaccagcatcagcagcctgagcgtggccggcatgcccgccaccagcagattccaccacacctacctgccccccccctaccccggcgccccccagaaccagagcggccccttccaggccaaccccagcccctaccacctgtactacggcaccagcagcggcagctaccagttcagcatggtggccggcagcagcagcggcggcgacagaagccccaccagaatgctggccagctgcaccagcagcgccgccagcgtggccgccggcaacctgatgaaccccagcctgggcggccagagcgacggcgtggaggccgacggcagccacagcaacagccccaccgccctgagcacccccggcagaatggacgaggccgtgtggagaccctactag

SEQ ID NO: 339208 - DNA, 1089 bp, Artificial Sequence
  derived and/or modified sequence
atgagaataccagtggatccttccaccagtaggaggtttactcctccctcacccgcctttccctgtggaggcggcggtggaaagatgggcgagaactcaggggccctctctgcacaggccgcggtgggacctgggggtcgggctaggcctgaggtccgctctatggttgacgtgctcgccgatcacgccggagagcttgtccgtacagacagccctaatttcctgtgttcagtccttccttcccattggagatgtaacaaaacactcccagtggccttcaaggtggtcgctttaggtgacgtacccgacggaacggtcgtgacagtaatggccgggaatgatgagaactactcagcagagctccgtaacgcctcggctgtgatgaaaaaccaagttgctcgcttcaacgacctgaggttcgtcggccgatctgggagaggaaaatcgtttacactgacaataactgtcttcacaaaccccacccaggtggctacgtaccaccgggctatcaaggtcaccgtggacgggcctagagagcctcgccgaacatctgaactgaatcccttttccgacccgcgccaatttgacagaagcttcccaactctccccaccctaaccgagagccgattccctgacccgagaatgcactaccctggggctatgtccgccgcattcccatacagcgccacaccctctggaacttctatatcttctttgagcgtcgctggcatgcctgcgacttcaagattccaccatacctaccttccgcctccttatcccggagccccgcagaatcagagtggaccgtttcaggccaacccttctccctatcatctctattacggaacaagctcaggttcctatcaattctccatggtggccggttccagttccggtggcgaccgtagccctacgagaatgctggcatcttgcacatctagtgccgccagcgtggcagctgggaatctgatgaatccgagccttggcggtcagtcagatggcgtggaggccgatggcagtcactccaactcacccacagcactctcgactcctggaagaatggacgaggcggtgtggcgaccatactag

SEQ ID NO: 339209 - DNA, 1089 bp, Artificial Sequence
  derived and/or modified sequence
atgagaattcctgtggaccccagcaccagccgccgcttcaccccacccagccctgccttcccctgtggcggcggcggcggcaagatgggagaaaattctggggccctgagcgcccaggccgctgtgggccctgggggccgggcccggcctgaggtgcgctccatggtggatgtgctggccgaccatgctggggagctggtgaggacagacagccccaacttcctgtgcagcgtgctgcccagccactggcgctgcaacaagaccctgcctgtggccttcaaggtggtggccctgggagatgtgcctgatggcaccgtggtgacagtgatggctggaaatgatgagaactacagcgctgagctgagaaatgccagcgctgtgatgaagaaccaggtggcccgcttcaatgacctgcgctttgtgggccgcagcggccggggcaagagcttcaccctgaccatcaccgtcttcaccaaccccacccaggtggccacctaccaccgggccatcaaggtgacagtggatggcccccgggagcccaggaggaccagcgagctgaaccccttcagtgacccccggcagtttgacaggagcttccccaccctgcccaccctgacagagagccgcttcccagaccccaggatgcactacccaggggccatgtctgctgccttcccctacagcgccacccccagcggcaccagcatcagcagcctgtctgtggccggcatgcctgccaccagccgcttccaccacacctacctgcccccaccctacccaggggccccccagaaccagagcggccccttccaggccaaccccagcccctaccacctgtactacggcaccagcagcggcagctaccagttctccatggtggccggcagcagcagcggcggggacaggagccccaccaggatgctggccagctgcaccagcagcgctgcctctgtggccgccggcaacctgatgaaccccagcctgggcggccagagtgatggagtggaggctgatggcagccacagcaacagccccacagccctgagcaccccaggccgcatggatgaagctgtgtggaggccctactag

SEQ ID NO: 339210 - DNA, 1089 bp, Artificial Sequence
  derived and/or modified sequence
atgcggatccccgtggaccccagcaccagccggcggttcacccccccttcccccgccttcccatgtggaggcggcggtggtaagatgggggagaattccggtgccctcagcgcgcaagcagctgttggtcctgggggaagagctcgtccagaagtcaggtctatggttgacgtgctggccgaccacgcaggcgaattggtgcgcactgactctcccaacttcctgtgctcagtgctgccatcacactggagatgcaataagacactgcctgtggcgtttaaggtggtcgcgctcggggatgtgccggatggtactgtcgtgacggtaatggctggtaacgacgaaaactactctgccgaactgaggaatgcgtctgctgtgatgaagaatcaagtggcccgcttcaatgatcttagattcgtgggacgatctggcagaggaaaatcttttaccctgacaatcactgtgtttacgaaccctacgcaggtagccacttaccatagagccatcaaggtgacggtggatggcccacgggaacctcgccgaacatcagagctcaaccccttcagcgacccccggcagttcgataggtcttttcccaccctgccgacactgaccgagtcccggtttccagacccccgcatgcactaccctggcgccatgtctgctgccttcccatactcagctaccccgagcggaacctctatttcttctttaagtgtggcgggaatgccagcgacgtctcgcttccaccacacgtatttgccacccccctatcctggcgccccacagaaccagtccggacccttccaggctaatccttcgccctaccacctgtactacggtacttcctcaggatcttaccaatttagtatggtggccggatcttcctcaggcggcgatcgttctcctacaaggatgcttgcaagctgcacgagtagtgccgcatctgttgcagccgggaatttaatgaatccctcactgggtggccaatcggacggagtggaggcagatggatcgcacagcaacagtcccacggccctgtccaccccagggagaatggacgaggctgtctggcgtccatactag

SEQ ID NO: 339211 - DNA, 1089 bp, Artificial Sequence
  derived and/or modified sequence
atgagaattcctgtggatccatccacttcccgtagattcacccccccttccccagctttcccatgtggagggggtggagggaaaatgggtgaaaatagcggagccttgtccgcgcaggctgccgtaggcccaggaggccgagcacggcctgaagtgaggagcatggtggatgttcttgcggatcacgccggtgagctggttcgcaccgactctccaaatttcctgtgctctgtgttgcccagccattggcggtgtaacaaaaccttgcccgtagccttcaaggtcgttgccctgggtgatgtgcccgatggcacagtggtaacagtaatggccggtaatgacgagaactactcagcggagctgcgcaatgcctcagctgttatgaagaaccaagtggcgcgattcaatgacttgagatttgtgggacggtcgggcagaggcaagtcattcaccttgactatcacagtcttcaccaatccaacgcaggtggccacgtatcaccgagctatcaaggtgactgtagacggcccaagagaacctcggagaacttctgagctgaatccattctccgacccacgacagttcgacagaagctttcccacgctccccacgttgactgaaagtcgcttccccgatcccaggatgcattaccctggggcaatgagcgccgcttttccctattcggccacgccttccgggacctccattagttcactgtcagtcgccggaatgccggctacttctaggtttcatcacacttatctgccgcctccatatcctggcgctccacagaaccagtctggaccattccaggccaacccaagtccatatcatctgtactatggcaccagctcgggatcttatcagttctccatggtcgcaggctctagttccgggggtgatcgcagccccacaagaatgctagcttcctgtacctcttcagcagctagcgtggcagccggaaacctcatgaatcctagcttggggggacagtcagacggcgtagaggctgatggcagccactccaattcccccacagctttgtctacgcccggacgtatggacgaagccgtgtggcgaccatattag

SEQ ID NO: 339212 - DNA, 1338 bp, Artificial Sequence
  derived and/or modified sequence
ctggaggatttgttctggggctgcggccgcccccgggggaagccgcgccgtctccgcctgcccggcgccctgacggccgctgttatgcgtattcccgtagacccaagcaccagccgccgcttcacacctccctccccggccttcccctgcggcggcggcggcggcaagatgggcgagaacagcggcgcgctgagcgcgcaggcggccgtggggcccggagggcgcgcccggcccgaggtgcgctcgatggtggacgtgctggcggaccacgcaggcgagctcgtgcgcaccgacagccccaacttcctctgctccgtgctgccctcgcactggcgctgcaacaagacgctgcccgtcgccttcaaggtggtggcattgggggacgtgccggatggtacggtggtgactgtgatggcaggcaatgacgagaactactccgctgagctgcgcaatgcctcggccgtcatgaagaaccaggtggccaggttcaacgaccttcgcttcgtgggccgcagtgggcgagggaagagtttcaccctgaccatcactgtgttcaccaaccccacccaagtggcgacctaccaccgagccatcaaggtgaccgtggacggaccccgggagcccagacgcacctcggaactgaacccattctccgacccccgccagtttgaccgctccttccccacgctgccaaccctcacggagagccgcttcccagaccccaggatgcattatcccggggccatgtcagctgccttcccctacagcgccacgccctcgggcacgagcatcagcagcctcagcgtggcgggcatgccggccaccagccgcttccaccatacctacctcccgccaccctacccgggggccccgcagaaccagagcgggcccttccaggccaacccgtccccctaccacctctactacgggacatcctctggctcctaccagttctccatggtggccggcagcagcagtgggggcgaccgctcacctacccgcatgctggcctcttgcaccagcagcgctgcctctgtcgccgccggcaacctcatgaaccccagcctgggcggccagagtgatggcgtggaggccgacggcagccacagcaactcacccacggccctgagcacgccaggccgcatggatgaggccgtgtggcggccctactgaccgccctggtggactcctcccgctggaggcggggaccctaacaaccttcaagaccagtgatgggccggctccgaggctccgggcgggaatgggacctgcgctccagggtggtctcggtcccagggtggtcccagctggtgggagcctctggctgcatctgtgcag

SEQ ID NO: 339213 - protein, 512 aa, Artificial Sequence
  derived and/or modified sequence
MLLPAPALRRALLSRPWTGAGLRWKHTSSLKVANEPVLAFTQGSPERDALQKALKDLKGRMEAIPCVVGDEEVWTSDVQYQVSPFNHGHKVAKFCYADKSLLNKAIEAALAARKEWDLKPIADRAQIFLKAADMLSGPRRAEILAKTMVGQGKTVIQAEIDAAAELIDFFRFNAKYAVELEGQQPISVPPSTNSTVYRGLEGFVAAISPFNFTAIGGNLAGAPALMGNVVLWKPSDTAMLASYAVYRILREAGLPPNIIQFVPADGPLFGDTVTSSEHLCGINFTGSVPTFKHLWKQVAQNLDRFHTFPRLAGECGGKNFHFVHRSADVESVVSGTLRSAFEYGGQKCSACSRLYVPHSLWPQIKGRLLEEHSRIKVGDPAEDFGTFFSAVIDAKEIFGPVLSVYVYPDDKYKETLQLVDSTTSYGLTGAVFSQDKDVVQEATKVLRNAAGNFYINDKSTGSIVGQQPFGGARASGTNDKPGGPHYILRWTSPQVIKETHKPLGDWSYAYMQ

SEQ ID NO: 339214 - DNA, 1539 bp, Artificial Sequence
  derived and/or modified sequence
atgctgttgccagcccccgccctgcgcagggctctgctcagcagaccgtggaccggagccggtttgcggtggaaacacacttcctccttgaaagtggctaacgagcccgtcctcgcgtttacccaggggagccccgaacgcgacgccttgcaaaaagccctgaaggacctcaaagggcgcatggaagccataccttgcgttgtgggcgacgaggaagtgtggacttcggacgtgcagtatcaggtaagcccgttcaaccacgggcataaggtcgccaaattctgctacgccgacaaaagcttactgaacaaagccattgaagcggctctggcagcgcgcaaggagtgggacttgaagcccatagctgacagggcccagatttttctgaaagcagccgacatgctgtcaggaccgcggcgcgccgagatcctcgcgaagacaatggtgggccaaggtaagactgtgatccaggctgagatagacgctgccgccgagctgatcgacttcttccgatttaacgctaaatacgccgtggagctggagggccaacagcctataagtgtgcctccgtctactaacagcacagtgtacaggggattggagggttttgtcgcagccataagtccttttaacttcaccgcaatcggcgggaacctagctggagcccccgcgctgatgggtaatgtggtgctttggaagccctcggacactgctatgctggccagctacgccgtgtaccgcatcttaagggaggccgggctacctccgaatataattcaatttgtgccagcagacggccccctgtttggggatactgtgactagctctgaacacctatgtggcatcaacttcaccgggtcagtgccaaccttcaaacacctgtggaaacaggtggctcagaacctggataggttccatacctttccgcgcctggcaggtgagtgcggcggaaagaatttccattttgtccatagaagtgcagacgttgagagcgtcgtcagcggcactctgcgctccgccttcgagtacggaggtcagaagtgctcggcttgttccaggctctacgtaccccactcgctctggcctcagattaagggacggctcctagaagagcatagtcgcatcaaggtcggagaccccgcagaggactttggtactttcttttccgccgtgattgatgcaaaggaaatttttggacccgtgctctcagtgtatgtttacccagacgacaaatacaaagagaccctccagttggtcgatagcacaacgtcatacggactgaccggagccgtattttcccaggacaaagacgttgtgcaagaagcaacaaaggtcttgcggaatgcagccgggaatttctacataaacgacaaatcaaccggcagcattgtgggtcagcagccctttgggggggcccgggcgtcaggaactaacgacaagccaggcgggccccactacatcttgcgatggaccagtccccaggtcatcaaagagacacataaacccctgggcgactggagctacgcttatatgcagtag

SEQ ID NO: 339215 - DNA, 1539 bp, Artificial Sequence
  derived and/or modified sequence
atgctgctgcctgccccagccctgcggcgggccctgctgagccggccctggacaggagctggcctgcgctggaagcacaccagcagcctgaaggtggccaatgaacctgtgctggccttcacccagggcagccctgagagagatgccctgcagaaggccctgaaggacctgaagggccgcatggaggccatcccctgtgtggtgggagatgaggaggtgtggaccagtgatgtgcagtaccaggtgagccccttcaaccacggccacaaggtggccaagttctgctatgctgacaagagcctgctgaacaaggccatcgaggccgccctggccgccaggaaggagtgggacctgaagcccatcgctgaccgggcccagatcttcctgaaggctgctgacatgctgagcggccccaggagagctgagatcctggccaagaccatggtgggccagggcaagacagtcatccaggccgagattgatgctgctgctgagctgattgacttcttccgcttcaatgccaagtatgctgtggagctggagggccagcagcccatctctgtgccccccagcaccaacagcacagtgtaccggggcctggagggctttgtggccgccatcagccccttcaacttcaccgccatcggcggcaacctggccggggccccagccctgatgggaaatgtggtgctgtggaagcccagcgacacagccatgctggccagctatgctgtgtaccgcatcctgcgggaggccggcctgccccccaacatcatccagtttgtgcctgcagatggccccctgtttggagacacagtgaccagcagcgagcacctgtgtggcatcaacttcaccggctctgtgcccaccttcaagcacctgtggaagcaggtggcccagaacctggaccgcttccacaccttcccccggctggccggggagtgtggcggcaagaacttccactttgtgcacaggtctgcagatgtggagagcgtggtgtctggcaccctgcggagcgcctttgaatatggaggccagaagtgcagcgcctgcagccggctgtatgtgccccacagcctgtggccccagatcaagggccgcctgctggaggagcacagccgcatcaaggtgggggaccctgctgaggactttggcaccttcttctctgctgtgattgatgccaaggagatcttcggccctgtgctgtctgtgtatgtgtacccagatgacaagtacaaggagaccctgcagctggtggacagcaccaccagctatggcctgaccggggctgtgttcagccaggacaaggatgtggtgcaggaggccaccaaggtgctgagaaatgctgctggcaacttctacatcaatgacaagagcacaggcagcatcgtgggccagcagccctttggaggagcccgggccagcggcaccaatgacaagccaggcggcccccactacatcctgcgctggaccagcccccaggtgatcaaggagacccacaagcccctgggggactggagctatgcctacatgcagtag

SEQ ID NO: 339216 - DNA, 2957 bp, Artificial Sequence
  derived and/or modified sequence
ccgagatgctgctgccggcgcccgcgctccgccgcgccctgctgtcccgcccctggaccggggccggcctgcggtggaagcacacctcctccctgaaggtggccaacgagcccgtcttagccttcacgcagggcagccctgagcgagatgccctgcaaaaggccttgaaggacctgaagggccggatggaagccatcccatgcgtggtgggggatgaggaggtgtggacgtcggacgtgcagtaccaagtgtcgccttttaaccatggacataaggtggccaagttctgttatgcagacaagagcctgctcaacaaagccattgaggctgccctggctgcccggaaagagtgggacctgaagcctattgcagaccgggcccagatcttcctgaaggcggcagacatgctgagtgggccgcgcagggctgagatcctcgccaagaccatggtgggacagggtaagaccgtgatccaagcggagattgacgctgcagcggaactcatcgacttcttccggttcaatgccaagtatgcggtggagctggaggggcagcagcccatcagcgtgcccccgagcaccaacagcacggtgtaccggggtctggagggcttcgtggcggccatctcgccctttaacttcactgcaatcggcggcaacctggcgggggcaccggccctgatgggcaacgtggtcctatggaagcccagtgacactgccatgctggccagctatgctgtctaccgcatccttcgggaggctggcctgccccccaacatcatccagtttgtgccagctgatgggcccctatttggggacactgtcaccagctcagagcacctctgtggcatcaacttcacaggcagtgtgcccaccttcaaacacctgtggaagcaggtggcccagaacctggaccggttccacaccttcccacgcctggctggagagtgcggcggaaagaacttccacttcgtgcaccgctcggccgacgtggagagcgtggtgagcgggaccctccgctcagccttcgagtacggtggccagaagtgttccgcgtgctcgcgtctctacgtgccgcactcgctgtggccgcagatcaaagggcggctgctggaggagcacagtcggatcaaagtgggcgaccctgcagaggattttgggaccttcttctctgcagtgattgatgccaaggagatcttcgggcctgtactgtctgtgtacgtctacccggatgacaagtacaaggagacgctgcagctggttgacagcaccaccagctatggcctcacgggggcagtgttctcccaggataaggacgtcgtgcaggaggccacaaaggtgctgaggaatgctgccggcaacttctacatcaacgacaagtccactggctcgatagtgggccagcagccctttgggggggcccgagcctctggaaccaatgacaagccagggggcccacactacatcctgcgctggacgtcgccgcaggtcatcaaggagacacataagcccctgggggactggagctacgcgtacatgcagtgagcccctctcgggctccaccgtccagctgtctgtccgtccaggtggccgacctcactgcacagaccccactccagcccctccaccccttcttcatgcacagctgcctttctataatccgggcttgactcccttcttaccactgtattctggcctctcccatgcctcaggctctggtttgagatcgtgctggggaggaacatggccactaccccttatcccatcggccatgtgggaggtatgaccctggtgcctggcaggttctccctctgccctccactgggcccagtggctcagggacctggggaaaggagatggagcagctcttgggatcctttggggaaaaggaggccattctgggccccttggcaaacctcaccactcacagaggctcctggccttgatccctgcccctccaggtgtccagggtaaagtgtaactcagactgacctgtggggcacagggggcaccagctggccttgccctctctggtctgggctgtctaccttcctcactgtatctttgcccagacccacctgggccagtaggcccctgtccccagccacacaccttagatgctggcatgccttactccaggtgcctgtgtttggccgaggcctgtgtgattcccggtctgcaccacatggcggggttggggggccgctggaggccacctgccaaggcgtgggatgggatggtcctgccggtttaggccgtgattctggaaaaccttggatgggccttcgtcctatgtcagccttccctttgatcctcaggccctacctgtagagacctccactcctagagccagtctcagggtctgggatttccctgcaggagctcagccaccactgtgccatggtgacacaggccaaggcagacattggccctcccttctcccagcccccagaggcctggccttgggttcgtcagcatgggccgaggacgttgcctgtagaatcctcctctgcctgggagtggctctgtgtggaccagtccctcactggcccattctttttttgacgcagccaatctgtgaccacgattcctcccacagatgcctcctgcttggattctgagtggtcagagatctgtaaagcatgactttcaaggatggttcttaggggactgtgaaagtgttgggtcttcctccaggatgcctgcatgggaccccacccggagctggtgtggccattccccaagtgccactggcccatggatgggggtgggtgctggtgccagctgggctgggtgtgggttctgtgtccttccaggatatgtgtcatttcccatgaggggccggggcaggtggctgggtgggggcacaggctggagtattcttagttctactggttctacactgtgaggtggcaatgggatttgctcagatgccacccaataaaatgcctgttactt

SEQ ID NO: 339217 - DNA, 1539 bp, Artificial Sequence
  derived and/or modified sequence
atgctgctgcccgcccccgccctgcggcgggccctgctgagccggccctggacaggcgcggggctgcgttggaaacacacctcaagccttaaagttgctaacgagcctgtgttggccttcacacagggatcgcccgagagagacgccctgcagaaagcactcaaggatcttaagggccggatggaggccataccgtgcgtggtgggggatgaggaagtctggaccagtgacgtgcagtaccaggtgtcaccctttaaccacggacataaggtcgctaagttctgctacgcggataagagcttgctcaataaggccattgaggctgcactggcagctaggaaggaatgggacctgaaaccaatcgccgatcgagcccagatctttctcaaagccgcagacatgctctccgggccaagaagagcagagattctggccaagaccatggtcggtcaagggaagacagttatccaagctgagattgacgcggccgcagagttgatcgatttctttagatttaatgccaagtatgccgtagagctggaaggtcagcagccaatcagcgtgcccccctccacgaatagcaccgtgtaccgcggactagaggggttcgtcgccgcgatttcaccatttaactttaccgccatcggaggcaatcttgccggtgccccagcccttatggggaatgttgtcctttggaaaccctccgacactgccatgctcgcctcatacgcggtttaccgaatactgagagaagccggtttgccaccaaatatcatacagttcgtgcccgccgacgggccactgtttggagacaccgtgacgagctcagagcacctgtgcggcatcaactttacagggagtgtgcctacatttaagcatctgtggaaacaagtagcccaaaatctggaccgcttccatactttcccccgtcttgcaggggagtgcggggggaagaattttcatttcgtgcatcgatcggccgacgtggagtcagtagtttccggtacactgcgaagtgccttcgagtatggcggccaaaaatgctccgcttgcagcagactgtatgtcccgcacagtctgtggccccagattaagggccgtcttttggaggaacactcacgtataaaagtcggagaccccgccgaagatttcggaactttcttcagcgctgtcattgacgccaaggaaatctttggtccagtcttgtccgtgtacgtgtatccagacgataaatacaaagagacgctacagttggtggattctacaacgagctatgggctgacaggtgccgtcttttcacaggataaggacgtggtccaggaggccaccaaggtattgcgaaatgcagccggtaacttttatatcaacgacaagtcgaccggctccatagtaggacaacagccatttggtggcgcccgcgcctcaggcactaatgacaaaccaggaggcccccactatattctgagatggacatctccccaggtgataaaagaaacccacaaacctttaggcgattggtcttacgcctatatgcaatag

SEQ ID NO: 339218 - DNA, 1539 bp, Artificial Sequence
  derived and/or modified sequence
atgctcttacctgctccggctctgcgaagggctcttctgtccaggccttggacaggggctggcttgcggtggaagcatacgtcatctctaaaagtggcaaatgagccagtcctagcctttacacaaggtagccctgaaagagacgctctgcagaaagccttgaaagacctcaaaggcaggatggaggccatcccatgtgtcgtgggcgacgaggaggtgtggacctcggatgtacagtaccaggtgtccccattcaaccacgggcataaagttgcaaaattttgttatgcagacaagagtttattgaataaagcaatagaggctgcgttggccgctagaaaggaatgggatttaaaacccattgcggatcgggcacagatctttctcaaggcggcagacatgctctcggggcctcgaagggctgagatcctagctaagaccatggtgggtcaagggaaaactgtaatacaggcagagatcgacgctgccgcagaactaatcgattttttccggtttaatgccaaatatgcagtagaactggaaggccagcagccaatcagcgtgcctccgagtacaaattccaccgtgtatagaggactggagggattcgtagccgctatctctccattcaactttacggccatagggggaaacttagctggagccccagctctaatgggaaatgtcgtcctttggaagcccagcgacaccgccatgttggctagttacgctgtatacaggattcttagggaggccggactacccccaaacataattcagtttgtgcctgctgatgggcctcttttcggtgatacagtgaccagctctgagcacctttgcggaattaattttactggcagcgtgcccacatttaagcatttgtggaagcaggtggctcagaatttagatcgatttcacacattccccaggctggccggagagtgcggcggaaagaactttcacttcgtgcaccgaagtgcagatgtcgagagtgtcgtgtcaggaactttgcggagcgcgtttgaatacggcggtcagaagtgtagtgcctgttcacggctgtacgtgccacactccctgtggcctcaaattaagggacggctgttggaggaacatagccgaattaaggtgggggaccctgctgaggatttcggcacgttcttcagtgccgtcattgacgccaaggaaatttttggtccagttctttcggtgtatgtgtaccctgatgacaagtacaaagaaactctgcagttggtggattcaactacctcctatgggcttaccggcgcagtttttagccaagacaaggacgtggtacaagaggccaccaaagttctgcgaaatgccgctggcaacttttacataaacgataagtctactggatccattgtcggccaacagccttttggcggtgccagagccagtggtaccaacgacaagcctggtggacctcattacattctcaggtggacctcaccgcaagtgataaaggagactcacaaaccgctcggagactggtcatatgcttatatgcagtag

SEQ ID NO: 339219 - DNA, 1539 bp, Artificial Sequence
  derived and/or modified sequence
atgctgctgcccgcccccgccctgagaagagccctgctgagcagaccctggaccggcgccggcctgagatggaagcacaccagcagcctgaaggtggccaacgagcccgtgctggccttcacccagggcagccccgagagagacgccctgcagaaggccctgaaggacctgaagggcagaatggaggccatcccctgcgtggtgggcgacgaggaggtgtggaccagcgacgtgcagtaccaggtgagccccttcaaccacggccacaaggtggccaagttctgctacgccgacaagagcctgctgaacaaggccatcgaggccgccctggccgccagaaaggagtgggacctgaagcccatcgccgacagagcccagatcttcctgaaggccgccgacatgctgagcggccccagaagagccgagatcctggccaagaccatggtgggccagggcaagaccgtgatccaggccgagatcgacgccgccgccgagctgatcgacttcttcagattcaacgccaagtacgccgtggagctggagggccagcagcccatcagcgtgccccccagcaccaacagcaccgtgtacagaggcctggagggcttcgtggccgccatcagccccttcaacttcaccgccatcggcggcaacctggccggcgcccccgccctgatgggcaacgtggtgctgtggaagcccagcgacaccgccatgctggccagctacgccgtgtacagaatcctgagagaggccggcctgccccccaacatcatccagttcgtgcccgccgacggccccctgttcggcgacaccgtgaccagcagcgagcacctgtgcggcatcaacttcaccggcagcgtgcccaccttcaagcacctgtggaagcaggtggcccagaacctggacagattccacaccttccccagactggccggcgagtgcggcggcaagaacttccacttcgtgcacagaagcgccgacgtggagagcgtggtgagcggcaccctgagaagcgccttcgagtacggcggccagaagtgcagcgcctgcagcagactgtacgtgccccacagcctgtggccccagatcaagggcagactgctggaggagcacagcagaatcaaggtgggcgaccccgccgaggacttcggcaccttcttcagcgccgtgatcgacgccaaggagatcttcggccccgtgctgagcgtgtacgtgtaccccgacgacaagtacaaggagaccctgcagctggtggacagcaccaccagctacggcctgaccggcgccgtgttcagccaggacaaggacgtggtgcaggaggccaccaaggtgctgagaaacgccgccggcaacttctacatcaacgacaagagcaccggcagcatcgtgggccagcagcccttcggcggcgccagagccagcggcaccaacgacaagcccggcggcccccactacatcctgagatggaccagcccccaggtgatcaaggagacccacaagcccctgggcgactggagctacgcctacatgcagtag

SEQ ID NO: 339220 - protein, 195 aa, Artificial Sequence
  derived and/or modified sequence
MEAIPCVVGDEEVWTSDVQYQVSPFNHGHKVAKFCYADKSLLNKAIEAALAARKEWDLKPIADRAQIFLKAADMLSGPRRAEILAKTMVGQGKTVIQAEIDAAAELIDFFRFNAKYAVELEGQQPISVPPSTNSTVYRGLEGFVAAISPFNFTAIGGNLAGAPALMLREGVVTLPLCQMTKLRHTAVTYLARLSD

SEQ ID NO: 339221 - DNA, 588 bp, Artificial Sequence
  derived and/or modified sequence
atggaggctataccgtgcgtggttggagacgaagaggtttggacgagtgatgtacagtaccaggtcagccccttcaatcatggccacaaggtggctaaattctgttacgccgataagtcactcctgaataaggcgatcgaagctgccctggcggctcgtaaggagtgggacctgaagcccattgccgatcgtgcccagatttttctaaaagccgctgacatgctctccggtcctcgccgggcagagatacttgccaaaactatggtgggtcagggcaagaccgtcatacaggctgagattgatgcggccgcagaattaatcgatttctttcgcttcaacgctaaatatgccgtggagctggaaggacagcagccaatcagtgtgcccccttcaaccaacagcactgtttataggggccttgagggattcgtggccgctattagcccattcaattttaccgctattggtggtaacctggccggggctccagcccttatgctgcgtgagggggtggtgacactgcctttatgccagatgacaaaattgaggcacaccgctgtgacatatcttgcaagactctccgactag

SEQ ID NO: 339222 - DNA, 633 bp, Artificial Sequence
  derived and/or modified sequence
atgttgctgccagcacctgccctacgcagagcacttctgtctaggccatggaccggggccggtcttcgctggaagcacacctcatccctcaaagtagccaacgaaccggttctggcctttacccaggggtcgcccgagcgagatgcgctgcagaaggctttgaaggatctcaaaggaaggatggaggcgatcccttgcgtcgtcggggatgaagaagtgtggacaagcgatgtgcaataccaagtgtcatcccttttgaataaggcaattgaggcggccctagccgcccgcaaggaatgggaccttaagccaatagcagacagagcgcagatatttctgaaggctgcagacatgctgagcggacctcgccgcgccgaaatcctcgccaagaccatggtgggacaggggaaaacagtgatccaagcagaaatcgacgccgcagctgaattgatcgacttctttcggtttaatgcaaagtacgccgtggaattagagggacaacagccaattagtgtgccaccaagcaccaacagtacagtgtacagaggtcttgagggtttcgtagcggcaatatctccattcaacttcactgccatcggcggtaacctcgccggggcaccagcgctgatgtag

SEQ ID NO: 339223 - DNA, 645 bp, Artificial Sequence
  derived and/or modified sequence
atgcttcttccggctcctgctcttcgccgcgctctgctttccagaccctggaccggagcaggcttaagatggaagcacacaagctcacttaaggtggccaatgagccggtgctagcattcactcagggaagccccgagagggacgcgctccagaaggctctgaaggatcttaaaggaagaatggaggccatcccgtgcgtggtgggcgatgaagaggtctggacatcagacgtgcagtaccaggtgtctagcctcctgaacaaggctattgaggccgccctcgctgcgaggaaggaatgggacctgaaacccattgccgaccgcgcccagatctttctcaaggccgcagatatgctgagcgggcctcggagagcagaaattctcgccaagacaatggtcggacaaggtaaaacggtcatccaggctgagattgacgctgctgcggaactcatcgatttcttccgtttcaatgccaaatacgcagtggaactcgaaggccagcagccgatctccgtcccaccctctacaaattcgacagtctacagggggttggaaggcttcgtggctgccatatccccttttaactttactgccattggaggaaatctcgcaggtgcccccgcactcatggttcggtgtgggtag

SEQ ID NO: 339224 - DNA, 462 bp, Artificial Sequence
  derived and/or modified sequence
aacaaggcaattgaggcggccctagcggcccgaaaagagtgggacttgaaaccaatcgctgatcgggcgcaaatcttcttaaaggcagctgacatgttgagtggacccaggcgcgcggagattctggccaaaacaatggtcggccaaggtaagacggtgattcaggcggaaatagacgctgctgctgaacttatcgacttcttccggtttaatgcaaagtacgcagtggagcttgaggggcagcagcctatttccgttccaccttccacgaattcaacagtttaccgggggcttgagggcttcgttgccgcaatatcaccctttaacttcacagccatcggcggaaacttggccggcgctccagccctgatgctccgcgaaggagttgtcaccttgcctctgtgccaaatgactaagttacggcacaccgccgttacatatctcgcacgcctgtcagattag

SEQ ID NO: 339225 - DNA, 588 bp, Artificial Sequence
  derived and/or modified sequence
atggaggccatcccctgtgtggtgggagatgaggaggtgtggaccagtgatgtgcagtaccaggtgagccccttcaaccacggccacaaggtggccaagttctgctatgctgacaagagcctgctgaacaaggccatcgaggccgccctggccgccaggaaggagtgggacctgaagcccatcgctgaccgggcccagatcttcctgaaggctgctgacatgctgagcggccccaggagagctgagatcctggccaagaccatggtgggccagggcaagacagtcatccaggccgagattgatgctgctgctgagctgattgacttcttccgcttcaatgccaagtatgctgtggagctggagggccagcagcccatctctgtgccccccagcaccaacagcacagtgtaccggggcctggagggctttgtggccgccatcagccccttcaacttcaccgccatcggcggcaacctggccggggccccagccctgatgctgcgggagggcgtggtgaccctgcccctgtgccagatgaccaagctgcggcacacagctgtgacctacctggcccggctgagtgactag

SEQ ID NO: 339226 - DNA, 633 bp, Artificial Sequence
  derived and/or modified sequence
atgctgctgcctgccccagccctgcggcgggccctgctgagccggccctggacaggagctggcctgcgctggaagcacaccagcagcctgaaggtggccaatgaacctgtgctggccttcacccagggcagccctgagagagatgccctgcagaaggccctgaaggacctgaagggccgcatggaggccatcccctgtgtggtgggagatgaggaggtgtggaccagtgatgtgcagtaccaggtgagcagcctgctgaacaaggccatcgaggccgccctggccgccaggaaggagtgggacctgaagcccatcgctgaccgggcccagatcttcctgaaggctgctgacatgctgagcggccccaggagagctgagatcctggccaagaccatggtgggccagggcaagacagtcatccaggccgagattgatgctgctgctgagctgattgacttcttccgcttcaatgccaagtatgctgtggagctggagggccagcagcccatctctgtgccccccagcaccaacagcacagtgtaccggggcctggagggctttgtggccgccatcagccccttcaacttcaccgccatcggcggcaacctggccggggccccagccctgatgtag

SEQ ID NO: 339227 - DNA, 645 bp, Artificial Sequence
  derived and/or modified sequence
atgctgctgcctgccccagccctgcggcgggccctgctgagccggccctggacaggagctggcctgcgctggaagcacaccagcagcctgaaggtggccaatgaacctgtgctggccttcacccagggcagccctgagagagatgccctgcagaaggccctgaaggacctgaagggccgcatggaggccatcccctgtgtggtgggagatgaggaggtgtggaccagtgatgtgcagtaccaggtgagcagcctgctgaacaaggccatcgaggccgccctggccgccaggaaggagtgggacctgaagcccatcgctgaccgggcccagatcttcctgaaggctgctgacatgctgagcggccccaggagagctgagatcctggccaagaccatggtgggccagggcaagacagtcatccaggccgagattgatgctgctgctgagctgattgacttcttccgcttcaatgccaagtatgctgtggagctggagggccagcagcccatctctgtgccccccagcaccaacagcacagtgtaccggggcctggagggctttgtggccgccatcagccccttcaacttcaccgccatcggcggcaacctggccggggccccagccctgatggtgcgctgtggctag

SEQ ID NO: 339228 - DNA, 462 bp, Artificial Sequence
  derived and/or modified sequence
aacaaggccatcgaggccgccctggccgccaggaaggagtgggacctgaagcccatcgctgaccgggcccagatcttcctgaaggctgctgacatgctgagcggccccaggagagctgagatcctggccaagaccatggtgggccagggcaagacagtcatccaggccgagattgatgctgctgctgagctgattgacttcttccgcttcaatgccaagtatgctgtggagctggagggccagcagcccatctctgtgccccccagcaccaacagcacagtgtaccggggcctggagggctttgtggccgccatcagccccttcaacttcaccgccatcggcggcaacctggccggggccccagccctgatgctgcgggagggcgtggtgaccctgcccctgtgccagatgaccaagctgcggcacacagctgtgacctacctggcccggctgagtgactag

SEQ ID NO: 339229 - DNA, 785 bp, Artificial Sequence
  derived and/or modified sequence
cccgcttctaacccgagatgctgctgccggcgcccgcgctccgccgcgccctgctgtcccgcccctggaccggggccggcctgcggtggaagcacacctcctccctgaaggtggccaacgagcccgtcttagccttcacgcagggcagccctgagcgagatgccctgcaaaaggccttgaaggacctgaagggccggatggaagccatcccatgcgtggtgggggatgaggaggtgtggacgtcggacgtgcagtaccaagtgtcgccttttaaccatggacataaggtggccaagttctgttatgcagacaagagcctgctcaacaaagccattgaggctgccctggctgcccggaaagagtgggacctgaagcctattgcagaccgggcccagatcttcctgaaggcggcagacatgctgagtgggccgcgcagggctgagatcctcgccaagaccatggtgggacagggtaagaccgtgatccaagcggagattgacgctgcagcggaactcatcgacttcttccggttcaatgccaagtatgcggtggagctggaggggcagcagcccatcagcgtgcccccgagcaccaacagcacggtgtaccggggtctggagggcttcgtggcggccatctcgccctttaacttcactgcaatcggcggcaacctggcgggggcaccggccctgatgcttcgagagggagttgtgactctgcctctttgccagatgacaaaactgagacacacagccgtgacttacttggcaagactgagtgactag

SEQ ID NO: 339230 - DNA, 844 bp, Artificial Sequence
  derived and/or modified sequence
aatgcccccgttatggcactagaaatattttttattagccgaagctaaatatagtgggactttggctgatcccgagctcggaggacagccggggtgatccgtttccccccgaggatcgaggtggtgcgctctggacggggttgtgcattctcgccgcgcccgggcggacgatccagcgaacagccccgcttctaacccgagatgctgctgccggcgcccgcgctccgccgcgccctgctgtcccgcccctggaccggggccggcctgcggtggaagcacacctcctccctgaaggtggccaacgagcccgtcttagccttcacgcagggcagccctgagcgagatgccctgcaaaaggccttgaaggacctgaagggccggatggaagccatcccatgcgtggtgggggatgaggaggtgtggacgtcggacgtgcagtaccaagtgtcgagcctgctcaacaaagccattgaggctgccctggctgcccggaaagagtgggacctgaagcctattgcagaccgggcccagatcttcctgaaggcggcagacatgctgagtgggccgcgcagggctgagatcctcgccaagaccatggtgggacagggtaagaccgtgatccaagcggagattgacgctgcagcggaactcatcgacttcttccggttcaatgccaagtatgcggtggagctggaggggcagcagcccatcagcgtgcccccgagcaccaacagcacggtgtaccggggtctggagggcttcgtggcggccatctcgccctttaacttcactgcaatcggcggcaacctggcgggggcaccggccctgatggtgagatgtgggc

SEQ ID NO: 339231 - DNA, 485 bp, Artificial Sequence
  derived and/or modified sequence
aacaaagccattgaggctgccctggctgcccggaaagagtgggacctgaagcctattgcagaccgggcccagatcttcctgaaggcggcagacatgctgagtgggccgcgcagggctgagatcctcgccaagaccatggtgggacagggtaagaccgtgatccaagcggagattgacgctgcagcggaactcatcgacttcttccggttcaatgccaagtatgcggtggagctggaggggcagcagcccatcagcgtgcccccgagcaccaacagcacggtgtaccggggtctggagggcttcgtggcggccatctcgccctttaacttcactgcaatcggcggcaacctggcgggggcaccggccctgatgcttcgagagggagttgtgactctgcctctttgccagatgacaaaactgagacacacagccgtgacttacttggcaagactgagtgactagtaaataaatgatggagcagagaa

SEQ ID NO: 339232 - DNA, 588 bp, Artificial Sequence
  derived and/or modified sequence
atggaggccatcccctgcgtggtgggcgacgaggaggtgtggacctctgacgtgcagtatcaggtatccccctttaatcacggccataaagtagctaaattctgctacgccgataaaagtctcttgaataaggccattgaggcggctctcgccgccagaaaagaatgggatttgaagcctatcgccgatagagcacagatctttctaaaagccgccgacatgttgtccggcccgcggagggctgagattcttgccaaaacaatggtaggacaaggcaagaccgttattcaggccgagatcgatgctgccgccgaactaatcgactttttccgttttaacgcaaaatatgctgtagagctggagggacagcagccaatttccgtcccgccttccaccaacagcacagtctatagaggcctcgagggttttgtggccgccattagcccgttcaacttcaccgccatcggaggcaacctcgcaggtgcgcctgccttaatgctcagggaaggggtggtgactcttccattatgccaaatgaccaagctcaggcacacggccgtcacgtatcttgcgcgactgtcagattag

SEQ ID NO: 339233 - DNA, 633 bp, Artificial Sequence
  derived and/or modified sequence
atgctgctgcccgcccccgccctgcggcgggccctgctgagccggccctggacgggcgctggactgcgctggaagcatactagctccctgaaggtggctaacgagcccgtgctggcgttcacgcaggggtctccagagagagatgcgcttcagaaggcactgaaggaccttaaaggcagaatggaagccattccctgtgtggttggtgacgaagaagtgtggacctccgacgtccagtatcaggtgagttcgctgctgaataaggcgatcgaagctgctctagccgcccgtaaagagtgggacctgaaacccatcgctgaccgcgcccagattttcttgaaagcagcagatatgctcagcggcccccggcgtgctgagattctcgcaaagaccatggtggggcaggggaagacagtaatccaagctgagattgatgccgccgccgagcttatagatttctttaggtttaatgcgaagtatgccgtcgaactagaaggccagcagccaatttctgttcctccgagtaccaatagcactgtgtataggggcctggagggttttgtggccgcaattagcccatttaatttcacagctatcggaggaaacttagcgggcgctcccgcgctcatgtag

SEQ ID NO: 339234 - DNA, 645 bp, Artificial Sequence
  derived and/or modified sequence
atgctgctgcccgcccccgccctgcggcgggccctgctgagccggccttggactggtgccggccttcggtggaaacacacaagctcgttaaaagtcgcaaatgagcctgttctcgccttcactcaggggtcgcccgaaagagacgccctgcagaaggcacttaaggacctgaaaggcaggatggaggctataccctgcgtggttggagacgaggaagtgtggacctccgacgtgcagtatcaggtctccagcctcctgaataaggcgattgaggctgctttggctgccagaaaggaatgggacttgaaacctattgccgatcgcgcccagatatttcttaaggcagccgatatgttaagtggacctcgcagggctgagatactcgcaaaaactatggtaggtcaaggaaagactgttattcaggcggagatcgacgccgctgccgaactcattgattttttccgctttaacgcaaaatatgccgtcgaactcgagggtcagcagccaatctctgtcccgccgtccaccaacagtacagtgtatcgagggctggaagggtttgtggccgccatttcaccctttaacttcacagccatcggcggcaacttggcaggagcccccgcactgatggttaggtgtggatag

SEQ ID NO: 339235 - DNA, 462 bp, Artificial Sequence
  derived and/or modified sequence
aacaaggccatcgaggccgccctggccgcccggaaggagtgggacctaaaaccaattgcagaccgggctcagattttcctgaaagctgccgacatgctctctggcccccgaagggccgagatcctggctaagactatggtgggtcaaggaaaaacagtaatacaggctgagatcgacgctgccgctgaattaatcgatttttttagatttaacgcgaaatacgccgttgagctcgaggggcagcagcctatttctgtgcctccctcaactaatagcacagtgtatcggggtttggagggtttcgtggcggcaatttcgcccttcaacttcaccgctattggcgggaatcttgccggggccccagccttgatgctccgcgagggcgtggtgaccttgccactgtgccagatgacaaaacttcgccacactgccgtgacgtacctcgccagactctccgattag

SEQ ID NO: 339236 - DNA, 588 bp, Artificial Sequence
  derived and/or modified sequence
atggaggcaatcccttgcgtcgttggagacgaggaggtttggacatccgacgtacagtaccaggtatccccatttaatcatgggcacaaggtggccaagttctgctacgctgacaagagcttgttaaacaaagcgatcgaagccgctctggcggctcgaaaagagtgggacctcaagcctatcgccgacagggcccagatattcctcaaggctgctgacatgctgtcgggtcccaggcgcgctgaaattttagccaagactatggtgggccagggcaagactgtgatacaggctgagattgacgctgccgctgagctgatcgactttttccggttcaacgccaaatacgccgtagaacttgaaggccaacagccgatctctgtccctccaagcaccaactcaaccgtgtatcgaggccttgaaggtttcgtcgccgcaatctcccctttcaactttactgctatcggcggtaacctagcgggagctccggctttgatgctgcgcgaaggcgtggtgaccctcccactatgtcaaatgactaagctgagacataccgctgtaacctatctcgctaggttgagcgattag

SEQ ID NO: 339237 - DNA, 633 bp, Artificial Sequence
  derived and/or modified sequence
atgttactgcccgcacccgctctcaggagggcactgctatccagaccctggactggtgccggacttagatggaaacacaccagttccttgaaggtggcgaacgaaccagtgctggctttcacgcaggggtcaccagagagggatgccctgcagaaggctctgaaagacctgaagggaagaatggaggcgataccttgcgttgttggcgatgaggaagtttggacaagtgacgtgcagtatcaagtatcttctctgttgaacaaagccatcgaggcagctttagcggcacgcaaagagtgggacctaaagccaattgctgatagagctcagatctttctcaaggctgccgacatgctgagtggtccccgacgcgctgagattttggccaaaaccatggtcggacaggggaagaccgtgatccaggcagaaattgacgccgcagcagagctgattgacttctttcgcttcaacgctaagtatgcagtggagctggaaggacagcagcctattagtgtccctcccagtactaattcgaccgtgtatcggggtcttgagggctttgtggccgctatctcaccctttaactttacggctatcggcggaaatctggcgggtgcgccagcgctgatgtag

SEQ ID NO: 339238 - DNA, 645 bp, Artificial Sequence
  derived and/or modified sequence
atgctcctgccggctcctgcactacgcagagcgttattgtccaggccttggacgggcgctggcctccggtggaagcatactagttccctgaaagtcgctaatgagcccgttctggccttcactcagggctcccccgagcgggacgctctgcagaaggctttaaaagaccttaaggggaggatggaggccataccgtgtgtagtgggagacgaggaggtctggacatccgacgtgcagtatcaggtgtcaagtctgctgaataaagctatagaagctgctttggccgcaagaaaagaatgggacttgaaacccatcgccgatagggcccaaattttcctgaaggctgctgacatgctgtccggaccgagaagggccgaaatattggcaaagactatggttggccagggcaagaccgtgattcaggctgagatcgacgcagccgcagagctcatcgacttttttagattcaatgccaaatacgcagttgaactcgagggacagcaacctatctctgtcccaccatcgacaaactccacagtgtaccgcggtctcgagggttttgttgcagcaattagtccgttcaacttcacagctattggcggaaatctggctggcgcaccagccttgatggtccgatgcggctag

SEQ ID NO: 339239 - DNA, 462 bp, Artificial Sequence
  derived and/or modified sequence
aataaagccatcgaggcagcattggctgccaggaaagagtgggacctgaaaccaatcgcggatcgagcccagatcttcttgaaagctgccgacatgctgtcaggccctcgcagagcagaaattcttgccaaaactatggtgggacaggggaagactgtaattcaggctgaaattgacgccgcagctgaactcatcgatttctttcgttttaacgctaaatacgcagtcgaactagaggggcagcaacctatcagcgtccctccatcaactaactcaaccgtgtatagggggctcgaggggtttgtggctgctatcagcccatttaattttactgccatcggaggcaatttagctggcgcaccggctcttatgctgcgggagggtgtggtaaccctgcctctgtgccagatgactaaactacggcacaccgccgtgacttatctggctcggctgagtgattag

SEQ ID NO: 339240 - DNA, 588 bp, Artificial Sequence
  derived and/or modified sequence
atggaggccatcccctgcgtggtgggcgacgaggaggtgtggaccagcgacgtgcagtaccaggtgagccccttcaaccacggccacaaggtggccaagttctgctacgccgacaagagcctgctgaacaaggccatcgaggccgccctggccgccagaaaggagtgggacctgaagcccatcgccgacagagcccagatcttcctgaaggccgccgacatgctgagcggccccagaagagccgagatcctggccaagaccatggtgggccagggcaagaccgtgatccaggccgagatcgacgccgccgccgagctgatcgacttcttcagattcaacgccaagtacgccgtggagctggagggccagcagcccatcagcgtgccccccagcaccaacagcaccgtgtacagaggcctggagggcttcgtggccgccatcagccccttcaacttcaccgccatcggcggcaacctggccggcgcccccgccctgatgctgagagagggcgtggtgaccctgcccctgtgccagatgaccaagctgagacacaccgccgtgacctacctggccagactgagcgactag

SEQ ID NO: 339241 - DNA, 633 bp, Artificial Sequence
  derived and/or modified sequence
atgctgctgcccgcccccgccctgagaagagccctgctgagcagaccctggaccggcgccggcctgagatggaagcacaccagcagcctgaaggtggccaacgagcccgtgctggccttcacccagggcagccccgagagagacgccctgcagaaggccctgaaggacctgaagggcagaatggaggccatcccctgcgtggtgggcgacgaggaggtgtggaccagcgacgtgcagtaccaggtgagcagcctgctgaacaaggccatcgaggccgccctggccgccagaaaggagtgggacctgaagcccatcgccgacagagcccagatcttcctgaaggccgccgacatgctgagcggccccagaagagccgagatcctggccaagaccatggtgggccagggcaagaccgtgatccaggccgagatcgacgccgccgccgagctgatcgacttcttcagattcaacgccaagtacgccgtggagctggagggccagcagcccatcagcgtgccccccagcaccaacagcaccgtgtacagaggcctggagggcttcgtggccgccatcagccccttcaacttcaccgccatcggcggcaacctggccggcgcccccgccctgatgtag

SEQ ID NO: 339242 - DNA, 645 bp, Artificial Sequence
  derived and/or modified sequence
atgctgctgcccgcccccgccctgagaagagccctgctgagcagaccctggaccggcgccggcctgagatggaagcacaccagcagcctgaaggtggccaacgagcccgtgctggccttcacccagggcagccccgagagagacgccctgcagaaggccctgaaggacctgaagggcagaatggaggccatcccctgcgtggtgggcgacgaggaggtgtggaccagcgacgtgcagtaccaggtgagcagcctgctgaacaaggccatcgaggccgccctggccgccagaaaggagtgggacctgaagcccatcgccgacagagcccagatcttcctgaaggccgccgacatgctgagcggccccagaagagccgagatcctggccaagaccatggtgggccagggcaagaccgtgatccaggccgagatcgacgccgccgccgagctgatcgacttcttcagattcaacgccaagtacgccgtggagctggagggccagcagcccatcagcgtgccccccagcaccaacagcaccgtgtacagaggcctggagggcttcgtggccgccatcagccccttcaacttcaccgccatcggcggcaacctggccggcgcccccgccctgatggtgagatgcggctag

SEQ ID NO: 339243 - DNA, 462 bp, Artificial Sequence
  derived and/or modified sequence
aacaaggccatcgaggccgccctggccgccagaaaggagtgggacctgaagcccatcgccgacagagcccagatcttcctgaaggccgccgacatgctgagcggccccagaagagccgagatcctggccaagaccatggtgggccagggcaagaccgtgatccaggccgagatcgacgccgccgccgagctgatcgacttcttcagattcaacgccaagtacgccgtggagctggagggccagcagcccatcagcgtgccccccagcaccaacagcaccgtgtacagaggcctggagggcttcgtggccgccatcagccccttcaacttcaccgccatcggcggcaacctggccggcgcccccgccctgatgctgagagagggcgtggtgaccctgcccctgtgccagatgaccaagctgagacacaccgccgtgacctacctggccagactgagcgactag

SEQ ID NO: 339244 - protein, 665 aa, Artificial Sequence
  derived and/or modified sequence
MADYSTVPPPSSGSAGGGGGGGGGGGVNDAFKDALQRARQIAAKIGGDAGTSLNSNDYGYGGQKRPLEDGDGSWTSPSSTTHWEGMPSPFKDQPDAKKVAPQNDSFGTQLPPMHQQQSRSVMTEEYKVPDGMVGFIIGRGGEQISRIQQESGCKIQIAPDSGGLPERSCMLTGTPESVQSAKRLLDQIVEKGRPAPGFHHGDGPGNAVQEIMIPASKAGLVIGKGGETIKQLQERAGVKMVMIQDGPQNTGADKPLRITGDPYKVQQAKEMVLELIRDQGGFREVRNEYGSRIGGNEGIDVPIPRFAVGIVIGRNGEMIKKIQNDAGVRIQFKPDDGTTPERIAQITGPPDRCQHAAEIITDLLRSVQAGNPGGPGPGGRGRGRGQGNWNMGPPGGLQEFNFIVPTGKTGLIIGKGGETIKSISQQSGARIELQRNPPPNADPNMKLFTIRGTPQQIDYARQLIEEKIGGPVNPLGPPVPHGPHGVPGPHGPPGPPGPGTPMGPYNPAPYNPGPPGPAPHGPPAPYAPQGWGNAYPHWQQQAPPDPAKAGTDPNSAAWAAYYAHYYQQQAQPPPAAPAGAPTTTQTNGQGDQQNPAPAGQVDYTKAWEEYYKKMGQAVPAPTGAPPGGQPDYSAAWAEYYRQQAAYYAQTSPQGMPQHPPAPQGQ

SEQ ID NO: 339245 - protein, 232 aa, Artificial Sequence
  derived and/or modified sequence
MADYSTVPPPSSGSAGGGGGGGGGGGVNDAFKDALQRARQIAAKIGGDAGTSLNSNDYGYGGQKRPLEDGDGSWTSPSSTTHWEGMPSPFKDQPDAKKVAPQNDSFGTQLPPMHQQQRSVMTEEYKVPDGMVGFIIGRGGEQISRIQQESGCKIQIAPDSGGLPERSCMLTGTPESVQSAKRLLDQIVEKGRPAPGFHHGDGPGNAVQEIMIPASKAGLVIGKGGETIKQLQ

SEQ ID NO: 339246 - DNA, 802 bp, Artificial Sequence
  derived and/or modified sequence
gcgcaagaatgtaatagagcttcgacggccgccattttctttctttcttagctgttagctgagaggaagtctctgaacaggcggcagcggctcttatagtgcaaccatggcagactattcaacagtgcctcccccctcttctggctcagctggtggcggtggtggcggcggtggtggtggaggagttaacgacgctttcaaagatgcactgcagagagcccggcagattgcagcaaaaattggaggtgatgcagggacatcactgaattcaaatgactatggttatgggggacaaaaaagacctttagaagatggagatggctcttggacaagtccgagcagtacaacacactgggagggaatgccctctccttttaaagatcaaccagatgctaagaaagttgctcctcaaaatgactcttttggaacacagttaccaccgatgcatcagcagcaaagatctgtaatgacagaagaatacaaagttccagatggaatggttggattcataattggcagaggaggtgaacagatctcacgcatacaacaggaatctggatgcaaaatacagatagctcctgacagtggtggccttccagaaaggtcctgtatgttaactggaacacctgaatctgtccagtcagcaaaacggttactggaccagattgttgaaaaaggaagaccagctcctggcttccatcatggcgatggaccgggaaatgcagttcaagaaatcatgattccagctagcaaggcaggattagtcattggaaaagggggagaaactattaaacagcttcag

SEQ ID NO: 339247 - DNA, 699 bp, Artificial Sequence
  derived and/or modified sequence
atggcggattattcaaccgtccctccccccagctctggctctgctgggggcggtggcggaggtggtggcgggggcggcgtgaacgacgctttcaaggacgcactgcaaagggcacgacaaatcgccgcaaagattggtggagacgctggaactagcctgaactccaacgactacggttatggcggacaaaagcggcccctggaagacggggatggcagctggaccagtccttcttccacaacacattgggaggggatgccctccccattcaaagatcaacctgacgccaaaaaggtggccccccaaaacgatagctttggcacccaattgccccctatgcatcaacagcagcggtccgtgatgaccgaagagtataaagtgcccgatgggatggtgggcttcattattgggaggggcggcgagcagattagtcggatccaacaggagtcaggatgtaagatccagattgccccagattcgggtggcctgccggaacgctcatgcatgttgaccggcacccctgaatctgtgcagagtgccaaaaggctgttggatcaaatcgtcgaaaagggtagacctgcccctggtttccatcacggagacggccccgggaatgccgtccaagaaatcatgattcctgcctcaaaagcaggccttgtgattggaaaagggggggaaaccataaaacagttacagtag

SEQ ID NO: 339248 - DNA, 699 bp, Artificial Sequence
  derived and/or modified sequence
atggctgactacagcacagtgcccccacccagcagcggcagcgctgggggcggcggcggcggcggcggcggcggcggcgtgaatgatgccttcaaggatgccctgcagagggcccggcagattgctgccaagattggaggagatgctggcaccagcctgaacagcaatgactatggctacggcggccagaagaggcccctggaggatggagatggctcctggaccagccccagcagcaccacccactgggagggcatgcccagccccttcaaggaccagccagatgccaagaaggtggccccccagaatgacagctttggcacccagctgccccccatgcaccagcagcagaggtctgtgatgacagaggagtacaaggtgcctgatggcatggtgggcttcatcatcggccggggcggggagcagatcagccgcatccagcaggagagcggctgcaagatccagatcgccccagacagcggcggcctgcctgagaggagctgcatgctgaccggcaccccagagagcgtgcagagcgccaagaggctgctggaccagatcgtggagaagggccgcccagcccctggcttccaccacggagatggccctggaaatgctgtgcaggagatcatgatcccagccagcaaggccggcctggtgattggaaaaggaggagagaccatcaagcagctgcagtag

SEQ ID NO: 339249 - DNA, 699 bp, Artificial Sequence
  derived and/or modified sequence
atggccgactacagcaccgtgcccccccccagcagcggcagcgccgggggaggggggggcgggggaggtggcggcggtgtgaatgatgccttcaaggacgctctacagagggccagacagatcgccgctaagatcggaggggacgcaggtacctctctgaacagtaatgactacggatacgggggccagaagagacccctagaagacggggatgggtcttggactagtccaagcagcacaactcattgggagggcatgccaagtcctttcaaggatcaaccggatgccaaaaaggttgctccccagaatgatagtttcggaacacaactgcctccaatgcatcaacagcagaggtctgtgatgaccgaagaatataaggtgcctgacggcatggttggatttatcataggccggggaggcgagcaaatctctagaatacagcaggaaagcgggtgtaaaattcagatcgcgcctgatagcggaggcttacccgagcggtcctgtatgctgactggaacaccggaatccgtgcagagtgccaagaggctgctggatcaaatagtcgagaagggtaggcccgctccagggttccatcatggggacggccctggcaatgctgtgcaggaaatcatgatccctgcaagcaaggcagggttggtgattggcaaaggaggagagacaatcaagcaactgcagtag

SEQ ID NO: 339250 - DNA, 699 bp, Artificial Sequence
  derived and/or modified sequence
atggcagattatagtacagtccccccacctagcagtgggtccgcaggaggcggaggcggaggaggtggtggaggtggtgtaaacgatgcatttaaggatgccttacagcgggcaagacaaattgcagccaagatagggggagatgctggaacgagcctcaattccaatgattacggttatggtggccagaaacgaccattagaagatggcgacggcagctggacgagccccagtagcactactcactgggaaggcatgccatccccattcaaagatcagcctgatgccaaaaaagtggccccacaaaacgacagctttggaacacagctccccccaatgcaccagcagcagaggagtgtgatgaccgaagaatacaaggtgcccgatggaatggtaggattcattatcggacggggtggggagcagatcagccgcatccaacaggagagtggatgtaaaatccagattgcacctgacagcggaggcctgcccgaacgctcttgcatgctgacgggaaccccagagtctgtgcagtccgcaaaacgcctgttggaccaaatcgtcgaaaagggtagaccagctcctgggtttcaccatggagatggccctggcaacgcggtgcaagagatcatgattccagccagcaaagcaggcctggtgattggtaaggggggtgagaccatcaaacagctacagtag

SEQ ID NO: 339251 - DNA, 699 bp, Artificial Sequence
  derived and/or modified sequence
atggccgactacagcaccgtgcccccccccagcagcggcagcgccggcggcggcggcggcggcggcggcggcggcggcgtgaacgacgccttcaaggacgccctgcagagagccagacagatcgccgccaagatcggcggcgacgccggcaccagcctgaacagcaacgactacggctacggcggccagaagagacccctggaggacggcgacggcagctggaccagccccagcagcaccacccactgggagggcatgcccagccccttcaaggaccagcccgacgccaagaaggtggccccccagaacgacagcttcggcacccagctgccccccatgcaccagcagcagagaagcgtgatgaccgaggagtacaaggtgcccgacggcatggtgggcttcatcatcggcagaggcggcgagcagatcagcagaatccagcaggagagcggctgcaagatccagatcgcccccgacagcggcggcctgcccgagagaagctgcatgctgaccggcacccccgagagcgtgcagagcgccaagagactgctggaccagatcgtggagaagggcagacccgcccccggcttccaccacggcgacggccccggcaacgccgtgcaggagatcatgatccccgccagcaaggccggcctggtgatcggcaagggcggcgagaccatcaagcagctgcagtag

SEQ ID NO: 339252 - protein, 655 aa, Artificial Sequence
  derived and/or modified sequence
MADYSTVPPPSSGSAGGGGGGGGGGGVNDAFKDALQRARQIAAKIGGDAGTSLNSNDYGYGGQKRPLEDGDQPDAKKVAPQNDSFGTQLPPMHQQQSRSVMTEEYKVPDGMVGFIIGRGGEQISRIQQESGCKIQIAPDSGGLPERSCMLTGTPESVQSAKRLLDQIVEKGRPAPGFHHGDGPGNAVQEIMIPASKAGLVIGKGGETIKQLQERAGVKMVMIQDGPQNTGADKPLRITGDPYKVQQAKEMVLELIRDQGGFREVRNEYGSRIGGNEGIDVPIPRFAVGIVIGRNGEMIKKIQNDAGVRIQFKPDDGTTPERIAQITGPPDRCQHAAEIITDLLRSVQAGNPGGPGPGGRGRGRGQGNWNMGPPGGLQEFNFIVPTGKTGLIIGKGGETIKSISQQSGARIELQRNPPPNADPNMKLFTIRGTPQQIDYARQLIEEKIGGPVNPLGPPVPHGPHGVPGPHGPPGPPGPGTPMGPYNPAPYNPGPPGPAPHGPPAPYAPQGWGNAYPHWQQQAPPDPAKAGTDPNSAAWAAYYAHYYQQQAQPPPAAPAGAPTTTQTNGQGDQQNPAPAGQVDYTKAWEEYYKKMGQAVPAPTGAPPGGQPDYSAAWAEYYRQQAAYYAQTSPQGMPQHPPAPQGFANHARSHHHLY

SEQ ID NO: 339253 - protein, 644 aa, Artificial Sequence
  derived and/or modified sequence
MADYSTVPPPSSGSAGGGGGGGGGGGVNDAFKDALQRARQIAAKIGGDAGTSLNSNDYGYGGQKRPLEDGDQPDAKKVAPQNDSFGTQLPPMHQQQSRSVMTEEYKVPDGMVGFIIGRGGEQISRIQQESGCKIQIAPDSGGLPERSCMLTGTPESVQSAKRLLDQIVEKGRPAPGFHHGDGPGNAVQEIMIPASKAGLVIGKGGETIKQLQERAGVKMVMIQDGPQNTGADKPLRITGDPYKVQQAKEMVLELIRDQGGFREVRNEYGSRIGGNEGIDVPIPRFAVGIVIGRNGEMIKKIQNDAGVRIQFKPDDGTTPERIAQITGPPDRCQHAAEIITDLLRSVQAGNPGGPGPGGRGRGRGQGNWNMGPPGGLQEFNFIVPTGKTGLIIGKGGETIKSISQQSGARIELQRNPPPNADPNMKLFTIRGTPQQIDYARQLIEEKIGGPVNPLGPPVPHGPHGVPGPHGPPGPPGPGTPMGPYNPAPYNPGPPGPAPHGPPAPYAPQGWGNAYPHWQQQAPPDPAKAGTDPNSAAWAAYYAHYYQQQAQPPPAAPAGAPTTTQTNGQGDQQNPAPAGQVDYTKAWEEYYKKMGQAVPAPTGAPPGGQPDYSAAWAEYYRQQAAYYAQTSPQGMPQHPPAPQGQ

SEQ ID NO: 339254 - protein, 654 aa, Artificial Sequence
  derived and/or modified sequence
MADYSTVPPPSSGSAGGGGGGGGGGGVNDAFKDALQRARQIAAKIGGDAGTSLNSNDYGYGGQKRPLEDGDQPDAKKVAPQNDSFGTQLPPMHQQQRSVMTEEYKVPDGMVGFIIGRGGEQISRIQQESGCKIQIAPDSGGLPERSCMLTGTPESVQSAKRLLDQIVEKGRPAPGFHHGDGPGNAVQEIMIPASKAGLVIGKGGETIKQLQERAGVKMVMIQDGPQNTGADKPLRITGDPYKVQQAKEMVLELIRDQGGFREVRNEYGSRIGGNEGIDVPIPRFAVGIVIGRNGEMIKKIQNDAGVRIQFKPDDGTTPERIAQITGPPDRCQHAAEIITDLLRSVQAGNPGGPGPGGRGRGRGQGNWNMGPPGGLQEFNFIVPTGKTGLIIGKGGETIKSISQQSGARIELQRNPPPNADPNMKLFTIRGTPQQIDYARQLIEEKIGGPVNPLGPPVPHGPHGVPGPHGPPGPPGPGTPMGPYNPAPYNPGPPGPAPHGPPAPYAPQGWGNAYPHWQQQAPPDPAKAGTDPNSAAWAAYYAHYYQQQAQPPPAAPAGAPTTTQTNGQEGDQQNPAPAGQVDYTKAWEEYYKKMGQAVPAPTGAPPGGQPDYSAAWAEYYRQQAAYYAQTSPQGMPQHPPAPQCRFDPASIELAL

SEQ ID NO: 339255 - protein, 629 aa, Artificial Sequence
  derived and/or modified sequence
MADYSTVPPPSSGSAGGGGGGGGGGGVNDAFKDALQRARQIAAKIGGDAGTSLNSNDYGYGGQKRPLEDGDQPDAKKVAPQNDSFGTQLPPMHQQQRSVMTEEYKVPDGMVGFIIGRGGEQISRIQQESGCKIQIAPDSGGLPERSCMLTGTPESVQSAKRLLDQIVEKGRPAPGFHHGDGPGNAVQEIMIPASKAGLVIGKGGETIKQLQERAGVKMVMIQDGPQNTGADKPLRITGDPYKVQQAKEMVLELIRDQGGFREVRNEYGSRIGGNEGIDVPIPRFAVGIVIGRNGEMIKKIQNDAGVRIQFKPDDGTTPERIAQITGPPDRCQHAAEIITDLLRSVQAGNPGGPGPGGRGRGRGQGNWNMGPPGGLQEFNFIVPTGKTGLIIGKGGETIKSISQQSGARIELQRNPPPNADPNMKLFTIRGTPQQIDYARQLIEEKIGGPVNPLGPPVPHGPPGTPMGPYNPAPYNPGPPGPAPHGPPAPYAPQGWGNAYPHWQQQAPPDPAKAGTDPNSAAWAAYYAHYYQQQAQPPPAAPAGAPTTTQTNGQGDQQNPAPAGQVDYTKAWEEYYKKMGQAVPAPTGAPPGGQPDYSAAWAEYYRQQAAYYAQTSPQGMPQHPPAPQGQ

SEQ ID NO: 339256 - DNA, 2033 bp, Artificial Sequence
  derived and/or modified sequence
ctttctttcttagctgttagctgagaggaagtctctgaacaggcggcagcggctcttatagtgcaaccatggcagactattcaacagtgcctcccccctcttctggctcagctggtggcggtggtggcggcggtggtggtggaggagttaacgacgctttcaaagatgcactgcagagagcccggcagattgcagcaaaaattggaggtgatgcagggacatcactgaattcaaatgactatggttatgggggacaaaaaagacctttagaagatggagatcaaccagatgctaagaaagttgctcctcaaaatgactcttttggaacacagttaccaccgatgcatcagcagcaaagatctgtaatgacagaagaatacaaagttccagatggaatggttggattcataattggcagaggaggtgaacagatctcacgcatacaacaggaatctggatgcaaaatacagatagctcctgacagtggtggccttccagaaaggtcctgtatgttaactggaacacctgaatctgtccagtcagcaaaacggttactggaccagattgttgaaaaaggaagaccagctcctggcttccatcatggcgatggaccgggaaatgcagttcaagaaatcatgattccagctagcaaggcaggattagtcattggaaaagggggagaaactattaaacagcttcaggaacgggctggagttaaaatggttatgattcaagacgggccgcagaacactggtgctgacaaacctcttaggattacaggagacccatataaagttcaacaagccaaggaaatggtgttagagttaattcgtgatcaaggcggtttcagagaagttcggaatgagtatgggtcaagaataggaggaaatgaagggatagatgtccccattccaagatttgctgttggcattgtaataggaagaaatggagagatgatcaaaaaaatacaaaatgatgctggtgttcgcattcagtttaagccagatgatgggacaacacccgaaaggatagcacaaataacaggacctccagaccgatgtcaacatgctgcagaaattattacagaccttcttcgaagtgttcaggctggtaatcctggtggacctggacctggtggtcgaggaagaggtagaggtcaaggcaactggaacatgggaccacctggtggactacaggaatttaattttattgtgccaactgggaaaactggattaataataggaaaaggaggtgaaaccataaaaagcataagccagcagtctggtgcaagaatagaacttcagagaaatcctccaccaaatgcagatcctaatatgaagttatttacaattcgtggcactccacaacagatagactatgctcggcaactcatagaagaaaagattggtggcccagtaaatcctttagggccacctgtaccccatgggccccatggtgtcccaggcccccatggacctcctgggcctccagggcctggaactccaatgggaccatacaaccctgcaccttataatcctggaccaccaggcccggctcctcatggtcctccagccccatatgctccccagggatggggaaatgcatatccacactggcagcagcaggctcctcctgatccagctaaggcaggaacggatccaaattcagcagcttgggctgcttattacgctcactattatcaacagcaagcacagccaccaccagcagcccctgcaggtgcaccaactacaactcaaactaatggacaagaaggagatcagcagaatccagccccagctggacaggttgattataccaaggcttgggaagagtactacaagaaaatgggtcaggcagttcctgctccgactggggctcctccaggtggtcagccagattatagtgcagcctgggctgagtattatagacaacaagcagcctattatgcccagacaagtccccagggaatgccacagcatcctccagcacctcagtgcaggtttgatccagccagtatagaactagctctgtag

SEQ ID NO: 339257 - DNA, 2312 bp, Artificial Sequence
  derived and/or modified sequence
ctttctttcttagctgttagctgagaggaagtctctgaacaggcggcagcggctcttatagtgcaaccatggcagactattcaacagtgcctcccccctcttctggctcagctggtggcggtggtggcggcggtggtggtggaggagttaacgacgctttcaaagatgcactgcagagagcccggcagattgcagcaaaaattggaggtgatgcagggacatcactgaattcaaatgactatggttatgggggacaaaaaagacctttagaagatggagatcaaccagatgctaagaaagttgctcctcaaaatgactcttttggaacacagttaccaccgatgcatcagcagcaaagatctgtaatgacagaagaatacaaagttccagatggaatggttggattcataattggcagaggaggtgaacagatctcacgcatacaacaggaatctggatgcaaaatacagatagctcctgacagtggtggccttccagaaaggtcctgtatgttaactggaacacctgaatctgtccagtcagcaaaacggttactggaccagattgttgaaaaaggaagaccagctcctggcttccatcatggcgatggaccgggaaatgcagttcaagaaatcatgattccagctagcaaggcaggattagtcattggaaaagggggagaaactattaaacagcttcaggaacgggctggagttaaaatggttatgattcaagacgggccgcagaacactggtgctgacaaacctcttaggattacaggagacccatataaagttcaacaagccaaggaaatggtgttagagttaattcgtgatcaaggcggtttcagagaagttcggaatgagtatgggtcaagaataggaggaaatgaagggatagatgtccccattccaagatttgctgttggcattgtaataggaagaaatggagagatgatcaaaaaaatacaaaatgatgctggtgttcgcattcagtttaagccagatgatgggacaacacccgaaaggatagcacaaataacaggacctccagaccgatgtcaacatgctgcagaaattattacagaccttcttcgaagtgttcaggctggtaatcctggtggacctggacctggtggtcgaggaagaggtagaggtcaaggcaactggaacatgggaccacctggtggactacaggaatttaattttattgtgccaactgggaaaactggattaataataggaaaaggaggtgaaaccataaaaagcataagccagcagtctggtgcaagaatagaacttcagagaaatcctccaccaaatgcagatcctaatatgaagttatttacaattcgtggcactccacaacagatagactatgctcggcaactcatagaagaaaagattggtggcccagtaaatcctttagggccacctgtaccccatgggccgcctggaactccaatgggaccatacaaccctgcaccttataatcctggaccaccaggcccggctcctcatggtcctccagccccatatgctccccagggatggggaaatgcatatccacactggcagcagcaggctcctcctgatccagctaaggcaggaacggatccaaattcagcagcttgggctgcttattacgctcactattatcaacagcaagcacagccaccaccagcagcccctgcaggtgcaccaactacaactcaaactaatggacaaggagatcagcagaatccagccccagctggacaggttgattataccaaggcttgggaagagtactacaagaaaatgggtcaggcagttcctgctccgactggggctcctccaggtggtcagccagattatagtgcagcctgggctgagtattatagacaacaagcagcctattatgcccagacaagtccccagggaatgccacagcatcctccagcacctcagggccaataataagaagtggacaatacagtatttgcttcattgtgtgggggaaaaaaacctttgttaaatatatggatgcagacgacttgatgaagatcttaattttgtttttggtttaaaatagtgtttccttttttttttttttttttgaaaatgtacaaaatatctatcactactgataggaggttaatatttctgtgtagaaatgaaaattggtttgtttttagtatttagtgtagatgtacacattccagcaaatgtatttgcaattatgtggttgatgctttgtgatataaatgtactttttcaatgtatactttcacttttaaaatgcctgttttgtgctttacaataaatgatatg

SEQ ID NO: 339258 - DNA, 1965 bp, Artificial Sequence
  derived and/or modified sequence
atggcggattacagcaccgtgccaccaccatccagtggaagcgctggcggcggtggggggggagggggaggagggggagtgaatgacgctttcaaagacgccctccagcgcgcccgacagattgccgccaagatcggaggcgatgccggcacatctcttaatagtaatgattacggatatgggggacagaaaaggccattggaggatggtgatcagcctgacgcaaaaaaggtggcccctcagaatgactcattcggtacccaattgccgccaatgcatcagcagcagcgtagcgtaatgacggaagagtataaggtaccagatggcatggtgggattcattataggacgcggcggagaacagatttctagaatacaacaggagagtggctgtaagattcagatcgcaccagactctgggggactgcccgaacggtcttgtatgctaactggaacaccagaatcagtgcagtcagccaagagactgctggaccagattgtcgagaaaggaagacctgctcccggatttcatcatggtgatgggccgggaaacgcggtgcaagagatcatgatccccgctagtaaggccggacttgtcatcggcaaggggggcgagactatcaagcagctgcaggagcgcgcaggggtgaagatggtgatgatccaggacggccctcagaacaccggcgccgataaaccacttcggattacaggagacccatacaaagtgcagcaagcgaaggagatggttctagagctcattagagaccagggaggattcagggaggtgagaaacgaatatggaagtcgcatcggaggaaacgagggaattgatgttccaattccccgctttgctgtgggcatcgtgatcggaagaaacggagagatgatcaagaaaatacagaatgatgccggagtccgaatccagtttaagcctgacgatggaacaacgccggagcggatcgcccagataactggcccccctgaccggtgtcagcacgccgccgagatcatcacagatctgctgcggtccgtccaggctggtaacccaggcggtcccggtcctggggggagggggcgcgggagagggcagggcaattggaatatgggtccacccggaggtttacaggagtttaactttatcgtcccgaccggcaagaccgggttgatcattggtaaagggggtgagaccatcaagtccatctcccagcaatcgggggcccgtatcgaactccagaggaacccgccaccaaacgcagaccccaatatgaagctttttacaatcaggggcacacctcagcagatagattatgctaggcagcttattgaagagaagattgggggtcccgtgaatcctctcggcccacctgtccctcacggaccacacggcgtgccggggccacatggccctcccgggcccccgggacctggaactcctatgggaccttataaccccgcgccatataaccctgggccacccggtcctgctccacatggtccgcctgccccatatgccccccagggctgggggaacgcctatccgcattggcagcaacaagcccctccagatcctgcgaaagccggtaccgatcctaactcagccgcttgggctgcgtactacgcccactactatcagcagcaggcccagccccccccagctgctcctgctggcgccccaaccactactcagacgaacggccaagagggtgatcagcagaatcctgcccccgctgggcaagttgattacacaaaagcatgggaggaatactacaaaaagatggggcaggcagtccccgctccaaccggcgctccacccggggggcagcccgactactcagccgcctgggctgaatactatagacagcaggcagcatattatgctcaaactagtccccagggaatgccccagcacccacccgcgccacagtgtcgatttgatcccgccagcattgagcttgccctgtag

SEQ ID NO: 339259 - DNA, 1890 bp, Artificial Sequence
  derived and/or modified sequence
atggcagactactctacggtgccccccccatcatcagggtctgctggaggcggaggaggaggaggggggggcggaggcgtaaatgatgcatttaaggatgcgcttcaacgcgccagacagatcgccgccaagattggcggcgacgcgggcacatctctgaatagcaacgattacggatacggtggtcagaagcggcccctggaggatggcgatcaacccgacgctaaaaaagtggcaccccagaacgattcctttggaacccagcttccacccatgcaccaacagcagaggtcagtgatgactgaagagtacaaagttcccgacggcatggtgggatttataatcggaagggggggcgagcagattagccgaatacagcaggagagcggctgcaaaattcagatcgcgcctgacagcggggggctgccagagcgttcctgcatgctaacaggcaccccggaatccgtacagtccgcaaagcgcctcttggatcagatcgtcgagaagggacgcccagcaccgggatttcatcacggtgacgggcccggcaatgccgtgcaggaaattatgatcccagctagcaaggcgggactggttataggtaagggcggagaaacgataaagcaactgcaggagcgggctggggtgaaaatggtgatgattcaggatgggccacaaaacaccggcgcggacaaacctttacgaataaccggagacccttacaaagttcagcaagccaaagaaatggtgttagaattgatcagagatcaggggggattccgggaggtcagaaacgaatatgggtcccggatcggtggcaatgaagggatcgacgtgcccatcccccgctttgctgtcgggatcgtgataggtcggaatggcgagatgattaagaagattcaaaacgacgcaggtgtccgtattcagtttaaacctgacgatggaactaccccggagcgcatcgcccaaattactggaccacccgaccgctgccagcacgcagccgagattattactgaccttctgcggtctgtgcaggcgggcaatcccgggggccccgggccagggggtagaggccgggggagagggcagggcaactggaatatggggccgcctggaggattgcaggagttcaatttcatagttccaactggcaagacgggactcattatcggtaagggtggggagacaatcaaatcaatctctcagcagagcggcgctaggattgaattgcaaagaaatcctccgccaaacgcagacccaaatatgaagttgttcacgatcaggggcacccctcagcagatagactacgctaggcagcttatcgaggaaaaaatcgggggacccgttaatccgctgggtcctccggtcccccacggtccaccagggacacctatgggaccctacaacccagcgccctataatcctggtcctccgggtcccgcccctcacggccctcctgcaccctatgctccccagggttggggaaatgcctatcctcactggcagcagcaggcccccccggaccctgcgaaagccgggacagacccgaatagcgccgcctgggccgcgtattatgctcattactaccaacagcaggcccagccgccccctgctgcaccagccggagcccctacgaccacacaaactaatggccagggggaccagcagaacccagctccagcgggccaagtggactacaccaaggcctgggaggagtactataagaaaatgggccaagcggtccctgcacccacgggtgctccacctggaggccagcctgattactctgccgcttgggcagaatactatcgacagcaggcagcctactatgctcaaaccagcccccagggcatgccacaacatccccctgccccgcagggacagtag

SEQ ID NO: 339260 - DNA, 1965 bp, Artificial Sequence
  derived and/or modified sequence
atggctgactacagcacagtgcccccacccagcagcggcagcgctgggggcggcggcggcggcggcggcggcggcggcgtgaatgatgccttcaaggatgccctgcagagggcccggcagattgctgccaagattggaggagatgctggcaccagcctgaacagcaatgactatggctacggcggccagaagaggcccctggaggatggagaccagccagatgccaagaaggtggccccccagaatgacagctttggcacccagctgccccccatgcaccagcagcagaggtctgtgatgacagaggagtacaaggtgcctgatggcatggtgggcttcatcatcggccggggcggggagcagatcagccgcatccagcaggagagcggctgcaagatccagatcgccccagattctgggggcctgcctgagaggagctgcatgctgaccggcaccccagagagcgtgcagagcgccaagaggctgctggaccagatcgtggagaagggccggcctgcccctggcttccaccacggagatggccctggaaatgctgtgcaggagatcatgatcccagccagcaaggccggcctggtgattggcaagggcggggagaccatcaagcagctgcaggagcgggccggcgtgaagatggtgatgatccaggacggcccccagaacacaggagctgacaagcccctgcgcatcactggagacccctacaaggtgcagcaggccaaggagatggtgctggagctgatccgggaccagggcggcttccgggaggtgagaaatgaatatggcagcagaattggaggaaatgaaggaattgatgtgcccatccccaggtttgctgtgggcatcgtcatcggcagaaatggagagatgatcaagaagatccagaatgatgctggggtgcgcatccagttcaagccagatgatggcaccaccccagagagaattgcccagatcactggacctccagaccgctgccagcacgccgctgagatcatcacagacctgctgcggtctgtgcaggccggcaaccctgggggccctggccctgggggccggggccggggccggggccagggcaactggaacatgggccccccaggcggcctgcaggagttcaacttcatcgtgcccaccgggaagacaggcctcatcattggaaaaggaggagagaccatcaagagcatcagccagcagagcggggccagaattgagctgcagagaaatcctcctccaaatgctgaccccaacatgaagctgttcaccatccggggcaccccccagcagattgattatgcccggcagctgattgaggagaagattggaggccctgtgaaccccctgggcccccctgtgccccacggcccccacggcgtgcccggcccccacggccccccaggccccccaggccctggcacccccatgggcccctacaacccagccccctacaaccctggccccccaggccctgccccccacggccccccagccccctatgccccccagggctggggcaatgcctacccccactggcagcagcaggcccccccagaccctgccaaggccggcacagaccccaacagcgctgcctgggccgcctactatgcccactactaccagcagcaggcccagcccccacctgctgccccagctggggcccccaccaccacccagaccaacggccaggagggggaccagcagaacccagccccagctggccaggtggactacaccaaggcctgggaggagtactacaagaagatgggccaggccgtgcctgcccccactggagcccctcctgggggccagcctgactacagcgctgcctgggccgagtactaccggcagcaggccgcctactatgcccagaccagcccccagggcatgccccagcaccccccagccccccagtgccgctttgatcctgccagcattgagctggccctgtag

SEQ ID NO: 339261 - DNA, 1890 bp, Artificial Sequence
  derived and/or modified sequence
atggctgactacagcacagtgcccccacccagcagcggcagcgctgggggcggcggcggcggcggcggcggcggcggcgtgaatgatgccttcaaggatgccctgcagagggcccggcagattgctgccaagattggaggagatgctggcaccagcctgaacagcaatgactatggctacggcggccagaagaggcccctggaggatggagaccagccagatgccaagaaggtggccccccagaatgacagctttggcacccagctgccccccatgcaccagcagcagaggtctgtgatgacagaggagtacaaggtgcctgatggcatggtgggcttcatcatcggccggggcggggagcagatcagccgcatccagcaggagagcggctgcaagatccagatcgccccagattctgggggcctgcctgagaggagctgcatgctgaccggcaccccagagagcgtgcagagcgccaagaggctgctggaccagatcgtggagaagggccggcctgcccctggcttccaccacggagatggccctggaaatgctgtgcaggagatcatgatcccagccagcaaggccggcctggtgattggcaagggcggggagaccatcaagcagctgcaggagcgggccggcgtgaagatggtgatgatccaggacggcccccagaacacaggagctgacaagcccctgcgcatcactggagacccctacaaggtgcagcaggccaaggagatggtgctggagctgatccgggaccagggcggcttccgggaggtgagaaatgaatatggcagcagaattggaggaaatgaaggaattgatgtgcccatccccaggtttgctgtgggcatcgtcatcggcagaaatggagagatgatcaagaagatccagaatgatgctggggtgcgcatccagttcaagccagatgatggcaccaccccagagagaattgcccagatcactggacctccagaccgctgccagcacgccgctgagatcatcacagacctgctgcggtctgtgcaggccggcaaccctgggggccctggccctgggggccggggccggggccggggccagggcaactggaacatgggccccccaggcggcctgcaggagttcaacttcatcgtgcccaccgggaagacaggcctcatcattggaaaaggaggagagaccatcaagagcatcagccagcagagcggggccagaattgagctgcagagaaatcctcctccaaatgctgaccccaacatgaagctgttcaccatccggggcaccccccagcagattgattatgcccggcagctgattgaggagaagattggaggccctgtgaaccccctgggcccccctgtgccccacggccccccaggcacccccatgggcccctacaacccagccccctacaaccctggccccccaggccctgccccccacggccccccagccccctatgccccccagggctggggcaatgcctacccccactggcagcagcaggcccccccagaccctgccaaggccggcacagaccccaacagcgctgcctgggccgcctactatgcccactactaccagcagcaggcccagcccccacctgctgccccagctggggcccccaccaccacccagaccaacggccagggcgaccagcagaacccagccccagctggccaggtggactacaccaaggcctgggaggagtactacaagaagatgggccaggccgtgcctgcccccaccggggcccctcctgggggccagcctgactacagcgctgcctgggccgagtactaccggcagcaggccgcctactatgcccagaccagcccccagggcatgccccagcaccccccagccccccagggccagtag

SEQ ID NO: 339262 - DNA, 1965 bp, Artificial Sequence
  derived and/or modified sequence
atggccgactacagcaccgtgcccccccccagcagcggcagcgccggcggaggagggggagggggcggagggggcggggtgaacgacgcattcaaggatgccctgcaacgggcccgtcaaattgccgccaagatcggcggggacgccggcacttctctgaactctaacgactacggatatgggggccagaagcgtccactggaagacggggaccagccggatgccaagaaggtggccccacagaacgattcttttggaacacagctccctcccatgcaccaacagcagagaagcgtcatgactgaggaatacaaagttcctgacgggatggttgggtttataattgggcgggggggggaacagatcagcaggatacagcaggagtccggttgcaagatacagattgcacccgattctggtggcctgccagaacgctcatgcatgctgacgggaactcccgagagtgtgcagagcgctaagcgtctgttagaccagatcgtcgagaaaggtcgtcccgctcccggcttccatcatggcgacgggccaggcaatgctgttcaggagatcatgatccccgcatctaaagccggactggtcatcgggaagggtggcgagaccatcaaacaacttcaggaacgggccggagttaagatggtcatgatccaggatggaccccagaacacaggggccgataagcccctgcgcatcacgggagatccatataaggtgcaacaggcaaaggaaatggtactggagcttatcagggaccagggcgggtttcgcgaagttcggaatgaatatggttcccgcattggcggaaatgagggcattgatgtacctattccccgttttgccgtaggaatcgtgatcgggaggaacggagaaatgatcaaaaagattcagaacgacgcgggcgtgcgtattcagttcaaacccgacgacggtactactccggagaggattgcacagattacaggcccacctgaccgctgccaacatgccgctgaaatcatcacagatctcctccggtcagtacaggccgggaatcccggaggcccaggacctggaggaaggggcagagggagaggtcagggcaactggaatatgggcccccctggagggctgcaagagttcaacttcatcgtgcccaccgggaaaacagggctcataatcggtaagggcggagagaccatcaagtctatttcccagcagagtggggcacgaatcgagctgcagcggaacccccctcctaatgcagacccaaatatgaaattgtttactatccggggcaccccgcaacagatagactatgccagacagctaatcgaggaaaaaatcggcggtccggtgaatccgctaggtccccccgtcccccacgggccacatggggtgcctggtccacacgggcctcccgggccgccaggtccgggaacccctatgggaccttacaatccggcaccctacaaccccggaccacccgggccagcacctcatggaccgcctgccccctatgcgccccaggggtggggaaatgcatatccccattggcaacagcaagccccccctgacccagctaaggccggcacagacccaaactccgcagcttgggctgcttactacgctcattattaccagcagcaagcccaaccaccacctgctgcccccgccggcgcgcctacgacaacccagacaaatggacaggagggggaccaacaaaatccagctcctgccggccaggtggactacaccaaggcctgggaggaatactacaagaaaatgggccaggctgtccccgccccaacaggagctcccccagggggacagcccgactacagtgccgcttgggcagagtactacagacagcaggctgcttactacgcgcagacatccccccagggtatgccacagcaccctcccgctcctcaatgtcggtttgaccccgcatccattgaactggcgttgtag

SEQ ID NO: 339263 - DNA, 1890 bp, Artificial Sequence
  derived and/or modified sequence
atggccgactacagcaccgtgcccccccccagcagcggcagcgccggcggaggaggaggcggcgggggcggtggcggcgtgaacgacgcctttaaagacgccttgcagagggcaaggcaaatcgccgccaagatcggtggcgatgctggaacaagcctgaactcgaatgactacggatatggggggcaaaagcggcccctggaagacggtgatcagccagacgcgaagaaggtcgctccccaaaacgactccttcgggactcaattacccccaatgcaccagcagcagcggagtgtcatgacagaagagtacaaagttccagatggtatggtcggcttcatcatcggacgcggaggtgagcagatcagtcggattcagcaggagagcgggtgtaaaatccaaatagctccagacagcggtgggctacccgaaagatcctgcatgctgaccggcactccagagagcgtccaatcggccaagaggctgctggaccagattgtcgagaagggccgcccggcccccgggtttcaccacggcgacggaccagggaatgcggttcaggagattatgattcccgcctcgaaggccggcctagtcattggaaagggtggggaaactataaagcagcttcaagagcgggcaggagtgaagatggtcatgattcaggatggcccccagaatacgggcgctgacaagcctctcaggatcactggagacccctataaggtgcaacaggcgaaagaaatggtgctggagctgattcgggatcagggcggattccgcgaagtccgcaacgagtacggcagcagaatcgggggtaacgaggggattgatgtgccaattcccagatttgctgttgggatagtgattggaagaaatggcgagatgatcaagaagattcaaaacgacgccggggtgcgcattcagtttaaacccgatgatgggaccacccccgaacgaatcgcacagataacgggcccccccgacaggtgtcaacatgcagccgaaatcatcacggacctgttgaggtccgtccaggcaggcaacccaggcggacccggaccaggaggcaggggacggggtagaggccagggcaactggaatatggggcctcctgggggcttacaggaattcaactttatcgtgcccaccggcaagactggactaatcatcggcaagggaggcgagacgataaaaagcattagtcaacaaagcggggcacgaattgagctgcagcgtaatcccccccctaacgctgatcccaacatgaagctgttcaccatcagagggacaccacagcagattgattatgccagacagctgattgaggaaaaaattgggggccccgtaaacccactcggcccaccggtgccccatggaccgccagggactcctatgggaccttacaaccctgccccatacaatccaggacctccaggaccagcaccccatggacctcccgccccctacgctccccagggttggggtaatgcgtatccccattggcagcagcaggctccgccagaccctgccaaagctggaactgatccaaattcagcagcatgggcggcgtactatgcccattattaccaacagcaggcccagccgcctcccgctgcgcctgccggtgcgcctaccactacccagaccaacggccagggcgaccaacagaatcctgctccagctgggcaggttgattatacaaaggcctgggaggaatattataaaaaaatggggcaggctgtgccagcccctactggagcaccccccggcgggcagccggattacagtgccgcttgggcagaatactatcgccaacaggcggcctactacgctcaaacgagcccccaggggatgcctcagcacccgcctgctcctcagggacaatag

SEQ ID NO: 339264 - DNA, 1965 bp, Artificial Sequence
  derived and/or modified sequence
atggctgactacagcaccgtgccaccaccttcctcaggcagtgcaggcggagggggaggcggtggcggaggaggtggggtaaacgacgccttcaaagacgcactacagcgggctagacagattgcggctaaaataggtggggacgcaggaaccagccttaatagcaacgattatgggtatggcggacagaaaagaccgctggaggacggcgaccagcccgatgcaaagaaagtggcccctcagaatgacagcttcggtactcagttaccccctatgcatcagcaacaaagatccgttatgacggaggaatataaggtgcccgacggcatggtgggtttcattatcggcagaggaggagagcaaatatccaggattcagcaggagagcggttgtaaaattcagatcgcccctgattctggaggcctaccggagaggtcctgcatgctcactggaacgcccgaatcggtacagtccgctaaacggctgttagaccagattgttgaaaagggacgccctgcacctggatttcatcacggcgacgggccagggaacgccgtccaggagatcatgattccggcatcaaaagccggtctcgtgatagggaagggcggtgaaacaattaaacagctgcaagaacgggcaggggttaaaatggtgatgatccaagatgggccacagaacacaggtgccgacaaaccgctgcggatcaccggtgatccctataaagttcaacaggctaaggaaatggtgttagaattgatcagggatcagggagggttccgcgaggtgcgaaatgaatatggcagtcgaatcggaggaaatgaaggaattgacgtgcccatcccgcgatttgcagtgggaatcgtcattggccgtaatggagagatgatcaaaaagattcagaatgacgctggcgtgcgtatccagttcaaacctgacgacgggaccacccctgagagaatagcccagataaccggacctccggaccgatgtcaacacgcggctgaaataattaccgatttactgagatccgttcaggctggtaacccagggggtcccggtcctggcggacgcggaagaggacgtgggcagggaaattggaatatgggtcccccaggcggactccaagaattcaatttcattgttccgaccggaaaaaccggcctaatcattggtaagggcggagaaaccatcaaatcaatctcccagcagtctggagccaggattgagctccagagaaatccaccccctaacgcagaccccaacatgaaactgtttacaattcgtggcacaccacaacaaattgattacgctcgccaactgattgaggagaagatcgggggaccggtgaacccactgggtccccctgtcccccacggaccccacggggtccctggccctcacggtcccccaggaccgccagggccaggaaccccaatgggaccctataacccagccccttacaaccctggacccccaggcccagcccctcacggtccgcctgctccctatgcacctcaaggttggggtaacgcctatcctcattggcaacagcaagcacccccagaccctgccaaagctggaacagaccctaactctgccgcatgggctgcatactacgcccattattatcagcagcaagcgcagccgcctccagctgctccagcaggggctcccacaacgacccagacgaacgggcaagaaggcgaccagcagaatcccgcacctgctggacaagtcgactatactaaggcttgggaggagtactacaagaagatggggcaggctgtgccagctcccacgggtgctccaccgggagggcagcctgactactccgctgcctgggcagagtactatagacagcaggccgcatactatgcacagacgagcccccagggaatgccacaacaccctcccgcaccccagtgccgtttcgaccccgcttccatagagctggcgctgtag

SEQ ID NO: 339265 - DNA, 1890 bp, Artificial Sequence
  derived and/or modified sequence
atggccgattacagcaccgttccccctccatcctccgggtccgccggagggggaggcggaggcggtggaggaggtggcgtcaatgacgcgttcaaggacgctctgcagagggccagacagattgcggctaagataggcggagacgcaggaacttccctgaatagtaacgactatgggtacggaggtcagaagagacctctcgaggatggcgaccagcctgacgctaagaaagtggcccctcaaaacgactctttcggtacccagctcccaccaatgcatcaacagcagcggtcggttatgaccgaagaatacaaagtgcctgacggcatggtcggctttataatcgggagaggaggagagcaaattagcaggattcagcaggaaagcggatgtaagatacagatcgccccagactccggaggtttgccagagaggtcatgtatgttaacgggcaccccagagtctgtacagagtgccaagagattgctggaccaaatcgtagagaaaggcagacctgctcccggatttcaccacggtgatgggcctgggaacgccgtccaggaaatcatgataccggcatccaaagcgggtctggtgattggcaaagggggagagactattaagcagctacaggagagggcaggtgtgaagatggtaatgatccaggacggcccacagaatacgggcgctgataaacctctccgtattaccggggacccctataaagtccagcaggccaaggagatggtcctggagctgattcgtgatcagggtggattcagagaggttagaaacgagtatgggagccgcattggcggtaacgagggaattgacgtcccgatacctcgctttgccgtaggtatcgtgatcgggaggaatggcgagatgattaagaaaattcagaatgacgctggggtgagaatacagtttaaacctgatgatgggaccaccccagaacgcattgcccagatcaccggacctccggaccgttgccagcacgctgcagagattataactgacctgctgcgctccgtgcaggccggtaacccaggcggaccaggcccaggcggaaggggacgtggcagggggcaggggaactggaacatggggccacctggcggattacaggagttcaactttattgtgccaactggaaagacaggcctgatcattggcaaaggcggtgaaactataaagtccatttcacagcagtctggggctcgaattgaacttcaaaggaacccgccacccaatgccgacccaaacatgaaattgtttaccattcggggaacacctcagcagattgactacgccagacagctgattgaagagaagattggtggaccagtgaatccgcttggtccacctgttccacatggcccaccaggcactccgatgggcccatataatcccgctccctataacccagggcctccgggtccagccccacatgggcctcccgctccatatgctccacagggctggggcaatgcttacccacactggcaacagcaagctcctcccgaccccgctaaggctggcacagacccaaattctgctgcatgggcggcatattatgcccattactaccagcagcaagcccaaccccctcctgctgctcccgctggcgcaccaactacaacacagaccaacggacagggtgaccagcagaatcccgctcccgctgggcaggtcgactacactaaagcttgggaggaatattataagaaaatgggccaggcggtcccagcacctaccggcgcaccacctggtgggcaaccggactactcagcagcctgggcagagtattatagacagcaagcagcttactacgcccaaaccagtccacagggcatgccacagcacccaccggcaccacagggacaatag

SEQ ID NO: 339266 - DNA, 1965 bp, Artificial Sequence
  derived and/or modified sequence
atggccgactacagcaccgtgcccccccccagcagcggcagcgccggcggcggcggcggcggcggcggcggcggcggcgtgaacgacgccttcaaggacgccctgcagagagccagacagatcgccgccaagatcggcggcgacgccggcaccagcctgaacagcaacgactacggctacggcggccagaagagacccctggaggacggcgaccagcccgacgccaagaaggtggccccccagaacgacagcttcggcacccagctgccccccatgcaccagcagcagagaagcgtgatgaccgaggagtacaaggtgcccgacggcatggtgggcttcatcatcggcagaggcggcgagcagatcagcagaatccagcaggagagcggctgcaagatccagatcgcccccgacagcggcggcctgcccgagagaagctgcatgctgaccggcacccccgagagcgtgcagagcgccaagagactgctggaccagatcgtggagaagggcagacccgcccccggcttccaccacggcgacggccccggcaacgccgtgcaggagatcatgatccccgccagcaaggccggcctggtgatcggcaagggcggcgagaccatcaagcagctgcaggagagagccggcgtgaagatggtgatgatccaggacggcccccagaacaccggcgccgacaagcccctgagaatcaccggcgacccctacaaggtgcagcaggccaaggagatggtgctggagctgatcagagaccagggcggcttcagagaggtgagaaacgagtacggcagcagaatcggcggcaacgagggcatcgacgtgcccatccccagattcgccgtgggcatcgtgatcggcagaaacggcgagatgatcaagaagatccagaacgacgccggcgtgagaatccagttcaagcccgacgacggcaccacccccgagagaatcgcccagatcaccggcccccccgacagatgccagcacgccgccgagatcatcaccgacctgctgagaagcgtgcaggccggcaaccccggcggccccggccccggcggcagaggcagaggcagaggccagggcaactggaacatgggcccccccggcggcctgcaggagttcaacttcatcgtgcccaccggcaagaccggcctgatcatcggcaagggcggcgagaccatcaagagcatcagccagcagagcggcgccagaatcgagctgcagagaaaccccccccccaacgccgaccccaacatgaagctgttcaccatcagaggcaccccccagcagatcgactacgccagacagctgatcgaggagaagatcggcggccccgtgaaccccctgggcccccccgtgccccacggcccccacggcgtgcccggcccccacggcccccccggcccccccggccccggcacccccatgggcccctacaaccccgccccctacaaccccggcccccccggccccgccccccacggcccccccgccccctacgccccccagggctggggcaacgcctacccccactggcagcagcaggccccccccgaccccgccaaggccggcaccgaccccaacagcgccgcctgggccgcctactacgcccactactaccagcagcaggcccagcccccccccgccgcccccgccggcgcccccaccaccacccagaccaacggccaggagggcgaccagcagaaccccgcccccgccggccaggtggactacaccaaggcctgggaggagtactacaagaagatgggccaggccgtgcccgcccccaccggcgccccccccggcggccagcccgactacagcgccgcctgggccgagtactacagacagcaggccgcctactacgcccagaccagcccccagggcatgccccagcacccccccgccccccagtgcagattcgaccccgccagcatcgagctggccctgtag

SEQ ID NO: 339267 - DNA, 1890 bp, Artificial Sequence
  derived and/or modified sequence
atggccgactacagcaccgtgcccccccccagcagcggcagcgccggcggcggcggcggcggcggcggcggcggcggcgtgaacgacgccttcaaggacgccctgcagagagccagacagatcgccgccaagatcggcggcgacgccggcaccagcctgaacagcaacgactacggctacggcggccagaagagacccctggaggacggcgaccagcccgacgccaagaaggtggccccccagaacgacagcttcggcacccagctgccccccatgcaccagcagcagagaagcgtgatgaccgaggagtacaaggtgcccgacggcatggtgggcttcatcatcggcagaggcggcgagcagatcagcagaatccagcaggagagcggctgcaagatccagatcgcccccgacagcggcggcctgcccgagagaagctgcatgctgaccggcacccccgagagcgtgcagagcgccaagagactgctggaccagatcgtggagaagggcagacccgcccccggcttccaccacggcgacggccccggcaacgccgtgcaggagatcatgatccccgccagcaaggccggcctggtgatcggcaagggcggcgagaccatcaagcagctgcaggagagagccggcgtgaagatggtgatgatccaggacggcccccagaacaccggcgccgacaagcccctgagaatcaccggcgacccctacaaggtgcagcaggccaaggagatggtgctggagctgatcagagaccagggcggcttcagagaggtgagaaacgagtacggcagcagaatcggcggcaacgagggcatcgacgtgcccatccccagattcgccgtgggcatcgtgatcggcagaaacggcgagatgatcaagaagatccagaacgacgccggcgtgagaatccagttcaagcccgacgacggcaccacccccgagagaatcgcccagatcaccggcccccccgacagatgccagcacgccgccgagatcatcaccgacctgctgagaagcgtgcaggccggcaaccccggcggccccggccccggcggcagaggcagaggcagaggccagggcaactggaacatgggcccccccggcggcctgcaggagttcaacttcatcgtgcccaccggcaagaccggcctgatcatcggcaagggcggcgagaccatcaagagcatcagccagcagagcggcgccagaatcgagctgcagagaaaccccccccccaacgccgaccccaacatgaagctgttcaccatcagaggcaccccccagcagatcgactacgccagacagctgatcgaggagaagatcggcggccccgtgaaccccctgggcccccccgtgccccacggcccccccggcacccccatgggcccctacaaccccgccccctacaaccccggcccccccggccccgccccccacggcccccccgccccctacgccccccagggctggggcaacgcctacccccactggcagcagcaggccccccccgaccccgccaaggccggcaccgaccccaacagcgccgcctgggccgcctactacgcccactactaccagcagcaggcccagcccccccccgccgcccccgccggcgcccccaccaccacccagaccaacggccagggcgaccagcagaaccccgcccccgccggccaggtggactacaccaaggcctgggaggagtactacaagaagatgggccaggccgtgcccgcccccaccggcgccccccccggcggccagcccgactacagcgccgcctgggccgagtactacagacagcaggccgcctactacgcccagaccagcccccagggcatgccccagcacccccccgccccccagggccagtag

SEQ ID NO: 339268 - DNA, 2138 bp, Artificial Sequence
  derived and/or modified sequence
agctgttagctgagaggaagtctctgaacaggcggcagcggctcttatagtgcaaccatggcagactattcaacagtgcctcccccctcttctggctcagctggtggcggtggtggcggcggtggtggtggaggagttaacgacgctttcaaagatgcactgcagagagcccggcagattgcagcaaaaattggaggtgatgcagggacatcactgaattcaaatgactatggttatgggggacaaaaaagacctttagaagatggagatggctcttggacaagtccgagcagtacaacacactgggagggaatgccctctccttttaaagatcaaccagatgctaagaaagttgctcctcaaaatgactcttttggaacacagttaccaccgatgcatcagcagcaaagcagatctgtaatgacagaagaatacaaagttccagatggaatggttggattcataattggcagaggaggtgaacagatctcacgcatacaacaggaatctggatgcaaaatacagatagctcctgacagtggtggccttccagaaaggtcctgtatgttaactggaacacctgaatctgtccagtcagcaaaacggttactggaccagattgttgaaaaaggaagaccagctcctggcttccatcatggcgatggaccgggaaatgcagttcaagaaatcatgattccagctagcaaggcaggattagtcattggaaaagggggagaaactattaaacagcttcaggaacgggctggagttaaaatggttatgattcaagacgggccgcagaacactggtgctgacaaacctcttaggattacaggagacccatataaagttcaacaagccaaggaaatggtgttagagttaattcgtgatcaaggcggtttcagagaagttcggaatgagtatgggtcaagaataggaggaaatgaagggatagatgtccccattccaagatttgctgttggcattgtaataggaagaaatggagagatgatcaaaaaaatacaaaatgatgctggtgttcgcattcagtttaagccagatgatgggacaacacccgaaaggatagcacaaataacaggacctccagaccgatgtcaacatgctgcagaaattattacagaccttcttcgaagtgttcaggctggtaatcctggtggacctggacctggtggtcgaggaagaggtagaggtcaaggcaactggaacatgggaccacctggtggactacaggaatttaattttattgtgccaactgggaaaactggattaataataggaaaaggaggtgaaaccataaaaagcataagccagcagtctggtgcaagaatagaacttcagagaaatcctccaccaaatgcagatcctaatatgaagttatttacaattcgtggcactccacaacagatagactatgctcggcaactcatagaagaaaagattggtggcccagtaaatcctttagggccacctgtaccccatgggccccatggtgtcccaggcccccatggacctcctgggcctccagggcctggaactccaatgggaccatacaaccctgcaccttataatcctggaccaccaggcccggctcctcatggtcctccagccccatatgctccccagggatggggaaatgcatatccacactggcagcagcaggctcctcctgatccagctaaggcaggaacggatccaaattcagcagcttgggctgcttattacgctcactattatcaacagcaagcacagccaccaccagcagcccctgcaggtgcaccaactacaactcaaactaatggacaaggagatcagcagaatccagccccagctggacaggttgattataccaaggcttgggaagagtactacaagaaaatgggtcaggcagttcctgctccgactggggctcctccaggtggtcagccagattatagtgcagcctgggctgagtattatagacaacaagcagcctattatgcccagacaagtccccagggaatgccacagcatcctccagcacctcagggccaataataagaagtggacaatacagtatttgcttcattgtgtgggggaaaaaaacctttgttaaatatatggatgcagacgacttgatg

SEQ ID NO: 339269 - protein, 197 aa, Artificial Sequence
  derived and/or modified sequence
MEFQAVVMAVGGGSRMTDLTSSIPKPLLPVGNKPLIWYPLNLLERVGFEEVIVVTTRDVQKALCAEFKMKMKPDIVCIPDDADMGTADSLRYIYPKLKTDVLVLSCDLITDVALHEVVDLFRAYDASLAMLMRKGQDSIEPVPGQKGKKKADGDSLCCQAGVQWHHLGSLQSPPPGFKHFTCLSLPSSWDYMHMPPH

SEQ ID NO: 339270 - DNA, 414 bp, Artificial Sequence
  derived and/or modified sequence
atggctgcgctctcaagagctctcggaccccttcggacgcctgctcctcccctgtggatcggcctctttctggtcgcaaccggatcccagcagtctctagcacaaccactccccggaaacacaaccgaagccaccccccgctcgttacgcgcctccggctctctgtgcggtccacatgcgaaggcgccttacctgtgtgaagccacacacgaacccgccgccgcccgaattcgagcacaggtaccagatactcgctggtctcgcgtgggtggacaaagattttactctcgcgttctctctcccttgcacaggggcccgagtggccacaccgaggcctcagcccaacgtagccacatgggaaagcttaaggaacctcagcctcaggaccacaagcccggattgggggccagttag

SEQ ID NO: 339271 - DNA, 414 bp, Artificial Sequence
  derived and/or modified sequence
atggctgcgctctcaagagctctcggaccccttcggacgcctgctcctcccctgtggatcggcctctttctggtcgcaaccggatcccagcagtctctagcacaaccactccccggaaacacaaccgaagccaccccccgctcgttacgcgcctccggctctctgtgcggtccacatgcgaaggcgccttacctgtgtgaagccacacacgaacccgccgccgcccgaattcgagcacaggtaccagatactcgctggtctcgcgtgggtggacaaagattttactctcgcgttctctctcccctgcacagaggtcccagcggccatacagaggcatcagcgcagaggtcacacatgggcaaattgaaggagccacaaccccaggatcataaacccggcttaggagcatcctag

SEQ ID NO: 339272 - RNA, 414 nt, Artificial Sequence
  derived and/or modified sequence
auggcugcgcucucaagagcucucggaccccuucggacgccugcuccuccccuguggaucggccucuuucuggucgcaaccggaucccagcagucucuagcacaaccacuccccggaaacacaaccgaagccaccccccgcucguuacgcgccuccggcucucugugcgguccacaugcgaaggcgccuuaccugugugaagccacacacgaacccgccgccgcccgaauucgagcacagguaccagauacucgcuggucucgcguggguggacaaagauuuuacucucgcguucucucucccuugcacaggggcccgaguggccacaccgaggccucagcccaacguagccacaugggaaagcuuaaggaaccucagccucaggaccacaagcccggauugggggccaguuag

SEQ ID NO: 339273 - RNA, 414 nt, Artificial Sequence
  derived and/or modified sequence
auggcugcgcucucaagagcucucggaccccuucggacgccugcuccuccccuguggaucggccucuuucuggucgcaaccggaucccagcagucucuagcacaaccacuccccggaaacacaaccgaagccaccccccgcucguuacgcgccuccggcucucugugcgguccacaugcgaaggcgccuuaccugugugaagccacacacgaacccgccgccgcccgaauucgagcacagguaccagauacucgcuggucucgcguggguggacaaagauuuuacucucgcguucucucuccccugcacagaggucccagcggccauacagaggcaucagcgcagaggucacacaugggcaaauugaaggagccacaaccccaggaucauaaacccggcuuaggagcauccuag

SEQ ID NO: 339274 - protein, 104 aa, Artificial Sequence
  derived and/or modified sequence
MVQLSLLRAETDRLREILAGKEREYQALVQRALQRLNEEARTYVLAPEPPTALSTDQGLVQWLQELNVDSGTIQMGRDGMPHLEGHLGTASRIHTSHLWTLRAE

SEQ ID NO: 339275 - protein, 82 aa, Artificial Sequence
  derived and/or modified sequence
  misc_feature (1)..(1): Xaa can be any naturally occurring amino acid
XEYQALVQRALQRLNEEARTYVLAPEPPTALSTDQGLVQWLQELNVDSGTIQMGRDGMPHLEGHLGTASRIHTSHLWTLRAE

SEQ ID NO: 339276 - DNA, 315 bp, Artificial Sequence
  derived and/or modified sequence
atggttcagctgtcactcctgagagctgagaccgataggttacgagagattctggcaggcaaagagcgcgaatatcaggccttggtacagcgagcactccaacgcctgaacgaggaagcacgcacctatgtgttggcccctgagccgcccaccgctctgtctaccgatcaggggctggtgcaatggctgcaagaacttaatgtggacagcgggaccatccagatgggtcgcgacggcatgccacatctcgagggccacttgggcacagcatccagaatacatactagtcacctgtggactttgcgggccgagtag

SEQ ID NO: 339277 - DNA, 249 bp, Artificial Sequence
  derived and/or modified sequence
taagaatatcaggccttggtacaacgagccctccagcggctgaatgaagaggcccggacctacgttctagcgcctgagccccccactgcgctgagcaccgatcagggtttagtccaatggctacaagagctcaatgtggactcgggtaccatacagatgggccgcgacggcatgcctcacctcgaagggcacctgggcaccgcctcccggatccacacgtcccacctgtggacactgcgtgcagaatag

SEQ ID NO: 339278 - DNA, 315 bp, Artificial Sequence
  derived and/or modified sequence
atggtgcagctgagcctgctgcgggcagagacagaccggctgcgggagatcctggccggcaaggagcgggagtaccaggccctggtgcagagggccctgcagaggctgaatgaggaggcccggacctacgtgctggcccctgagcccccaacagccctgagcacagaccagggcctggtgcagtggctgcaggagctgaatgtggacagcggcaccatccagatgggcagagatggcatgccccacctggagggccacctgggcacagccagccgcatccacaccagccacctgtggaccctgcgggcagagtag

SEQ ID NO: 339279 - DNA, 249 bp, Artificial Sequence
  derived and/or modified sequence
tgagaataccaggccctggtgcagagggccctgcagaggctgaatgaggaggcccggacctacgtgctggcccctgagcccccaacagccctgagcacagaccagggcctggtgcagtggctgcaggagctgaatgtggacagcggcaccatccagatgggcagagatggcatgccccacctggagggccacctgggcacagccagccgcatccacaccagccacctgtggaccctgcgggcagagtag

SEQ ID NO: 339280 - DNA, 1496 bp, Artificial Sequence
  derived and/or modified sequence
cgggtatgggaaagcagctgacatctggtcactgggctgcactgtcattgagatggccacaggtcgcccccccttccacgagctcgggagcccacaggctgccatgtttcaggtgggtatgtacaaggtccatccgccaatgcccagctctctgtcggccgaggcccaagcctttctcctccgaacttttgagccagacccccgcctccgagccagcgcccagacactgctgggggaccccttcctgcagcctgggaaaaggagccgcagccccagctccccacgacatgctccacggccctcagatgccccttctgccagtcccactccttcagccaactcaaccacccagtctcagacattcccgtgccctcaggcaccctctcagcacccacccagccccccgaagcgctgcctcagttatgggggcaccagccagctccgggtgcccgaggagcctgcggccgaggagcctgcgtctccggaggagagttcggggctgagcctgctgcaccaggagagcaagcgtcgggccatgctggccgcagtattggagcaggagctgccagcgctggcggagaatctgcaccaggagcagaagcaagagcagggggcccgtctgggcagaaaccatgtggaagagctgctgcgctgcctcggggcacacatccacactcccaaccgccggcagctcgcccaggagctgcgggcgctgcaaggacggctgagggcccagggccttgggcctgcgcttctgcacagaccgctgtttgccttcccggatgcggtgaagcagatcctccgcaagcgccagatccgtccacactggatgttcgttctggactcactgctcagccgtgctgtgcgggcagccctgggtgtgctaggaccggaggtggagaaggaggcggtctcaccgaggtcagaggagctgagtaatgaaggggactcccagcagagcccaggccagcagagcccgcttccggtggagcccgagcagggccccgctcctctgatggtgcagctgagcctcttgagggcagagactgatcggctgcgcgaaatcctggcggggaaggaacgggagtaccaggccctggtgcagcgggctctacagcggctgaatgaggaagcccggacctatgtcctggccccagagcctccaactgctctttcaacggaccagggcctggtgcagtggctacaggaactgaatgtggattcaggcaccatccaaatggggagggatggtatgccgcatctggagggccatcttggcacagcgagcaggatccacaccagtcacctctggaccctgagagctgaatgagggcatcataggccagacaggcccaaggatggatgaatggagaggacaaaggcagcttctgacacaccagccccaggacctggggcgactggaggaagccaggcgagtggggcccaggactggttccagtgagagaaaccaaccacaggcacccaagcactaccag

SEQ ID NO: 339281 - DNA, 444 bp, Artificial Sequence
  derived and/or modified sequence
gggagtaccaggccctggtgcagcgggctctacagcggctgaatgaggaagcccggacctatgtcctggccccagagcctccaactgctctttcaacggaccagggcctggtgcagtggctacaggaactgaatgtggattcaggcaccatccaaatggggagggatggtatgccgcatctggagggccatcttggcacagcgagcaggatccacaccagtcacctctggaccctgagagctgaatgagggcatcataggccagacaggcccaaggatggatgaatggagaggacaaaggcagcttctgacacaccagccccaggacctggggcgactggaggaagccaggcgagtggggcccaggactggttccagtgagagaaaccaaccacaggcacccaagcactaccagacaaagcgtattaaacagaacacttttgaa

SEQ ID NO: 339282 - DNA, 315 bp, Artificial Sequence
  derived and/or modified sequence
atggtgcagctgagcctgctgcgggccgagaccgaccggctgcgggagatcctggcaggcaaagagagggagtatcaggctctggttcagcgagctcttcagcgactgaacgaggaagcaagaacatatgtgttggcacctgaacctcccactgccttatcgactgatcagggtctggttcagtggttgcaggagttgaatgtggactctggcacgatccagatggggagagacggcatgccccatttggaagggcacctcggtaccgccagccgcatacacacaagccacctgtggaccctgagggctgaatag

SEQ ID NO: 339283 - DNA, 249 bp, Artificial Sequence
  derived and/or modified sequence
tgagagtaccaggccctggtgcagcgggccctgcagcggctgaacgaggaagcccgaacatatgtactcgcccccgagccgcctaccgccctttccacggatcaaggcttggtccagtggctgcaggagttaaatgtggactctggtaccatccagatgggaagagacggaatgcctcacctggaaggtcacctgggcactgcttccaggatccacacttcccacttatggactctgcgggccgaatag

SEQ ID NO: 339284 - DNA, 315 bp, Artificial Sequence
  derived and/or modified sequence
atggtccagctctccctgctgcgtgcggagaccgaccggctcagagagatcttagcaggcaaagagcgagaataccaagccctggtccagagggctctgcagcggctgaatgaagaagccaggacttacgtcctagcccctgagccaccaacagctttatcgaccgaccagggactggtgcagtggctgcaggagttgaatgttgacagtggtacaatccagatggggagggatggcatgccccatcttgaaggacacctcggtacagcaagccggattcatacctcccatctttggacgctgcgcgcagaatag

SEQ ID NO: 339285 - DNA, 249 bp, Artificial Sequence
  derived and/or modified sequence
taggagtaccaggccctcgtgcagcgggcattgcaaaggctgaacgaggaggctcgcacgtacgttctcgcccctgagccacccacagctctctcaactgaccaggggctggtgcagtggctacaagagctgaatgtcgactccggaactatccaaatgggcagagatggcatgccccacctggaggggcacctggggacagctagcagaattcacacttcacacctgtggaccctcagagccgaatag

SEQ ID NO: 339286 - DNA, 315 bp, Artificial Sequence
  derived and/or modified sequence
atggtgcagctgagcctgctgagagccgagaccgacagactgagagagatcctggccggcaaggagagagagtaccaggccctggtgcagagagccctgcagagactgaacgaggaggccagaacctacgtgctggcccccgagccccccaccgccctgagcaccgaccagggcctggtgcagtggctgcaggagctgaacgtggacagcggcaccatccagatgggcagagacggcatgccccacctggagggccacctgggcaccgccagcagaatccacaccagccacctgtggaccctgagagccgagtag

SEQ ID NO: 339287 - DNA, 249 bp, Artificial Sequence
  derived and/or modified sequence
tgagagtaccaggccctggtgcagagagccctgcagagactgaacgaggaggccagaacctacgtgctggcccccgagccccccaccgccctgagcaccgaccagggcctggtgcagtggctgcaggagctgaacgtggacagcggcaccatccagatgggcagagacggcatgccccacctggagggccacctgggcaccgccagcagaatccacaccagccacctgtggaccctgagagccgagtag

SEQ ID NO: 339288 - protein, 98 aa, Artificial Sequence
  derived and/or modified sequence
MDTEMSEDIDHNLTPTLDSMSYGMPNQTGSENSLLDEDDYFLNSGDLAGIPVVGSDNEDEQDFSSKDNLVSSIHTDDSLEVERRVTQHESDNENEIQI

SEQ ID NO: 339289 - protein, 1207 aa, Artificial Sequence
  derived and/or modified sequence
  misc_feature (1)..(1): Xaa can be any naturally occurring amino acid
XPLDDEYDKAMAPQQGLLDKIKDEPDNAQEYSHGQQQKTQEGELKISAVFSVSGSPLAPQLTTGFQPSLASSGMNKMLPSVPATAVRVSCSGCKKILQKGQTAYQRKGSTQLFCSTLCLTGYTVPPARPPPPLTKKTCSSCSKDILNPKDVISAQFENTTTSKDFCSQSCLSTYELKKKPIVTINTNSISTKCSMCQKNAVIRHEVNYQNVVHKLCSDACFSKFRSANNLTMNCCENCGGYCYSGSGQCHMLQIEGQSKKFCSSSCITAYKQNLFNKPTGMNSSVVPLSQGQVIVSIPTGSTVSAGGGSTSAVSPTSISSSAAAGLQRLAAQSQHVGFARSVVKLKCQHCNRLFATKPELLDYKGKMFQFCGKNCSDEYKKINNVMAMCEYCKIEKIVKETVRFSGADKSFCSEGCKLLYKHDLAKRWGNHCKMCSYCLQTSPKLVQNNLGGKVEEFCCEECMSKYTVLFYQMAKCDACKRQGKLSESLKWRGEMKHFCNLLCILMFCNQQSVCDPPSQNNAANISMVQAASAGPPSLRKDSTPVIANVVSLASAPAAQPTVNSNSVLQGAVPTVTAKIIGDASTQTDALKLPPSQPPRLLKNKALLCKPITQTKATSCKPHTQNKECQTDTPSQPQIIVVPVPVPVFVPIPLHLYTQYAPVPFGIPVPMPVPMLIPSSMDSEDKVTESIEDIKEKLPTHPFEADLLEMAEMIAEDEEKKTLSQGESQTSEHELFLDTKIFEKDQGSTYSGDLESEAVSTPHSWEEELNHYALKSNAVQEADSELKQFSKGETEQDLEADFPSDSFDPLNKGQGIQARSRTRRRHRDGFPQPRRRGRKKSIVAVEPRSLIQGAFQGCSVSGMTLKYMYGVNAWKNWVQWKNAKEEQGDLKCGGVEQASSSPRSDPLGSTQDHALSQESSEPGCRVRSIKLKEDILSCTFAELSLGLCQFIQEVRRPNGEKYDPDSILYLCLGIQQYLFENGRIDNIFTEPYSRFMIELTKLLKIWEPTILPNGYMFSRIEEEHLWECKQLGAYSPIVLLNTLLFFNTKYFQLKNVTEHLKLSFAHVMRRTRTLKYSTKMTYLRFFPPLQKQESEPDKLTVGKRKRNEDDEVPVGVEMAENTDNPLRCPVRLYEFYLSKCSESVKQRNDVFYLQPERSCVPNSPMWYSTFPIDPGTLDTMLTRILMVREVHEELAKAKSEDSDVELSD

SEQ ID NO: 339290 - protein, 424 aa, Artificial Sequence
  derived and/or modified sequence
MINNHRNQALYFSEHKYFQQTQVVYQGDIFWVFLCVFCLRKECVLMQGCFSAGVIPDEAKALSLLAPANAVAGLLPGGGLLPTPNPLTQIGAVPLAALGAPTLDPALAALGLPGANLNSQSLAADQLLKLMSTVDPKLNHVAAGLVSPSLKSDTSSKEIEEAMKRVREAQSLISAAIEPDKKEEKRRHSRSRSRSRRRRTPSSSRHRRSRSRSRRRSHSKSRSRRRSKSPRRRRSHSRERGRRSRSTSKTRDKKKEDKEKKRSKTPPKSYSTARRSRSASRERRRRRSRSGTRSPKKPRSPKRKLSRSPSPRRHKKEKKKDKDKERSRDERERSTSKKKKSKDKEKDRERKSESDKDVKQVTRDYDEEEQGYDSEKEKKEEKKPIETGSPKTKECSVEKGTGDSLRESKVNGDDHHEEDMDMSD

SEQ ID NO: 339291 - protein, 484 aa, Artificial Sequence
  derived and/or modified sequence
MSNTTVVPSTAGPGPSGGPGGGGGGGGGGGGTEVIQVTNVSPSASSEQMRTLFGFLGKIDELRLFPPDDSPLPVSSRVCFVKFHDPDSAVVAQHLTNTVFVDRALIVVPYAEGVIPDEAKALSLLAPANAVAGLLPGGGLLPTPNPLTQIGAVPLAALGAPTLDPALAALGLPGANLNSQSLAADQLLKLMSTVDPKLNHVAAGLVSPSLKSDTSSKEIEEAMKRVREAQSLISAAIEPDKKEEKRRHSRSRSRSRRRRTPSSSRHRRSRSRSRRRSHSKSRSRRRSKSPRRRRSHSRERGRRSRSTSKTRDKKKEDKEKKRSKTPPKSYSTARRSRSASRERRRRRSRSGTRSPKKPRSPKRKLSRSPSPRRHKKEKKKDKDKERSRDERERSTSKKKKSKDKEKDRERKSESDKDVKQVTRDYDEEEQGYDSEKEKKEEKKPIETGSPKTKECSVEKGTGDSLRESKVNGDDHHEEDMDMSD

SEQ ID NO: 339292 - DNA, 1275 bp, Artificial Sequence
  derived and/or modified sequence
atgatcaataatcaccgcaatcaggcactctacttttcagaacataaatactttcaacagacccaggtcgtctatcagggtgacattttttgggtgttcctatgcgtgttttgcttgcggaaagagtgcgtgctcatgcaggggtgcttctctgctggcgtgatccctgatgaggctaaagctttgagtttgctggcacccgccaatgctgtggccggcttactgccagggggcgggttactacctacccccaacccactcacccagataggcgcagttcccctggctgctctgggcgctcccaccttggaccccgcactcgctgcactgggactaccaggagccaacctgaatagccagtctctggccgcggatcagctcttgaaattaatgtccaccgtggatcccaagcttaaccacgtcgcagcagggctggtgtctcctagcctgaaaagcgacactagtagcaaagagattgaggaggcaatgaagagggtacgcgaggcccaatccttaatatctgcagcaattgagcctgacaaaaaagaagaaaagagaaggcattcccggagccgtagccgctctagacgcagacgtaccccatcatccagccgccatcggagatcacggtctcgctctaggcgacggagccactccaagtcccgatcccgcagaagaagcaagtcccctcgtcggaggcgtagtcacagcagggagagaggacgtcggtccaggtctacatccaagacccgagataagaaaaaggaagataaagagaagaaacgatccaagaccccacccaagtcttactcaactgcaagacgctcaaggtcagctagtagagaaaggaggcgacggcgatctaggtctggcacacggtcacctaaaaagccgaggagccccaaaagaaagctttcgcggtccccttcccctcgacgacacaagaaagaaaagaaaaaggataaggataaagaaagaagcagagacgagcgggagagatcaaccagtaaaaagaagaaatcgaaggataaagagaaagacagggaaaggaagtctgaatcagataaggacgtaaagcaagtgactcgggattatgacgaggaagagcaggggtacgattcagaaaaagaaaaaaaggaggagaaaaagcccatcgagaccggttcaccgaagaccaaggaatgttctgtggaaaaaggtacgggagactcactgcgggaaagcaaggtgaacggagacgaccatcatgaggaggatatggacatgtccgattag

SEQ ID NO: 339293 - DNA, 1275 bp, Artificial Sequence
  derived and/or modified sequence
atgatcaacaaccacaggaaccaggccctgtacttcagcgagcacaagtacttccagcagacccaggtggtgtaccagggcgacatcttctgggtgttcctgtgtgtgttctgcctgaggaaagaatgtgtgctgatgcagggctgcttctctgctggggtcatcccagatgaggccaaggccctgagcctgctggccccagccaatgctgtggccggcctgctgcccggcggcggcctgctgcccacccccaaccccctgacccagatcggggctgtgcccctggccgccctgggcgcccccaccctggaccctgccctggccgccctgggcctgcccggggccaacctgaacagccagagcctggccgctgaccagctgctgaagctgatgagcacagtggaccccaagctgaaccacgtggccgccggcctggtgagccccagcctgaagagtgacaccagcagcaaggagattgaggaggccatgaagagggtgcgggaggcccagagcctcatctctgctgccattgaaccagacaagaaggaggagaagaggaggcacagccgcagccgcagccgcagcagaagaagaaggacccccagcagcagccgccacagaagaagccgcagccgcagcagaagaagaagccacagcaagagccgcagcagaagaagaagcaagagccccaggagaagaagaagccacagccgggagcggggccgccgcagccgcagcaccagcaagacccgggacaagaagaaggaggacaaggagaagaagaggagcaagaccccacccaagagctacagcacagcccggcgcagccgcagcgccagccgggagaggagaagaagaagaagccgcagcggcaccaggagccccaagaagcccaggagccccaagaggaagctgagccgcagccccagcccccggcggcacaagaaggagaagaagaaggacaaggacaaggagaggagcagagatgagcgggagaggagcaccagcaagaagaagaagagcaaggacaaggagaaggaccgggagaggaagtctgagagtgacaaggatgtgaagcaggtgacccgggactatgatgaggaggagcagggctatgacagcgagaaggagaagaaggaggagaagaagcccattgaaacaggcagccccaagaccaaggagtgcagcgtggagaagggcactggagacagcctgcgggagagcaaggtgaatggagatgaccaccacgaggaggacatggacatgtctgactag

SEQ ID NO: 339294 - DNA, 1275 bp, Artificial Sequence
  derived and/or modified sequence
atgatcaacaaccaccggaaccaggccctgtacttcagcgagcacaagtattttcagcagactcaggtggtttatcagggcgacatcttctgggtattcctttgcgtcttttgcctccggaaggagtgcgtcctcatgcaagggtgcttctcagccggcgttatccccgacgaggctaaagctttgagtctgttggcccctgcaaacgcggtggcagggctgctgccaggcggaggtctcctgccgacccccaacccactcactcagataggtgccgttcccctggcagctctaggagcccctactctggatcctgctctggccgccctggggctgcccggagcaaatcttaatagccagtctcttgccgctgaccagttgctcaaattgatgtctaccgtggacccgaagcttaaccatgttgcagccggcctcgtgtcccccagcttgaaatcagatacctcctctaaggaaatcgaggaggctatgaaaagggtaagggaggcccagagcctgatcagcgccgcaattgagccggataaaaaagaggaaaagagacgccactcaaggtctagaagccgcagcaggcgccggaggaccccaagcagctccagacacagaaggtccagaagccggagccggcgacggagccacagcaagagccggtccagacggcggtctaaatccccgcggcggagaagatcacacagccgcgagaggggtagaagaagccgctcaaccagcaagacccgagacaaaaaaaaggaagataaagaaaaaaagaggtcaaagaccccacctaagtcatattcgaccgcgcgcagatctcgtagcgccagtagagaacgacggcggagacggagtcgctctggcacccgctcccctaagaagccccgctcgccgaagcgcaagctaagccggagcccatccccccgccggcataagaaggagaaaaaaaaagacaaagacaaggaacggtctcgcgacgaaagggaacggagcacctctaagaagaagaaatcaaaagacaaagagaaggaccgcgagcggaagtctgaatcagacaaagatgtgaagcaggttaccagggactatgacgaggaggagcaaggatacgatagtgagaaagagaagaaggaagaaaagaagccaatcgagaccggatcccccaagacaaaggaatgcagcgtcgagaaaggcaccggcgactcccttcgggaaagtaaggtgaatggggacgaccatcatgaagaagacatggatatgtctgactag

SEQ ID NO: 339295 - DNA, 1275 bp, Artificial Sequence
  derived and/or modified sequence
atgatcaacaaccatcgcaatcaggccctgtacttctctgagcacaagtactttcagcaaacgcaggttgtctaccaaggcgacatattctgggtgtttctgtgtgtattctgcctgaggaaagagtgcgttttgatgcagggctgtttttctgcaggtgtcatccctgacgaggctaaggccctgagcctgctggcgccagcgaatgccgtggccggactgttgcctggtggaggcctgttgccaaccccaaacccactgacccaaatcggagctgtgcctctagctgcactcggagcacccacattggaccccgctctggccgctctcggccttcctggcgctaacctgaatagtcagagtcttgctgcagaccagctgcttaaactgatgagtactgtggaccccaagcttaatcatgtggcagccggacttgtaagcccgtctctgaaaagcgatacgtcatctaaggaaatcgaggaagccatgaaaagagtgcgagaggcacaatccctgattagtgccgcaatcgaaccagataaaaaggaggaaaaaagaagacacagccgtagcaggagccgctcccgacgtcggaggacgccttcctcctctcgacaccgccgttcaaggtccagatcacgtcgaaggtcacactccaaatcacgctctagaaggaggtcaaagtcccctcggcgaagaaggtcccacagcagggagaggggtcgaaggtccaggtctacctccaagactcgggataagaaaaaagaggataaagagaagaagcgcagtaaaactccccctaagtcatacagtactgctagaaggtcccgctcagccagtagggagagaaggaggcgcagaagtcggtctggcacgcggagtcccaaaaaaccgaggtcgccaaagagaaagctaagcagatctccttcacctaggaggcacaaaaaggagaaaaagaaggataaagacaaagaacgatcgagggatgagcgagaaagaagtaccagcaagaagaaaaagtccaaggataaggagaaggacagggagcgcaagagcgagtctgataaagatgtaaaacaggtgacccgggattatgacgaggaggagcagggatacgactccgaaaaggaaaagaaagaagaaaaaaaacccattgaaaccggtagtcctaagactaaagaatgctcagtcgagaaggggactggggactccctgcgggagagtaaggtaaatggcgacgaccaccatgaagaggatatggacatgagcgactag

SEQ ID NO: 339296 - DNA, 3034 bp, Artificial Sequence
  derived and/or modified sequence
aaagcattttactgtacaggtaaggaatgtgccatgttgttttacctatctctctttctctctcactcccatgcacacatcctgtgtgtattcagagaccttcagaaacattcatattcattttcatgagtcagcaaaagccctacgcttgattccaacagaatatttcctttacatactttcttctcttaatttttacaaaatttgtatggtaggtgtaaaagaaaatcatagtaactgtaccatattattaacccctaaatcaaactttttttgtcttgtgtatcttgatttttctgtgtgctttatagtgaagcagccgacacgagtcgttgttcataaaacagcttttgaaagttgagagcacacccctggagaaccgactgtgcttgcttacgtttggttcatgacttaaaaatcgagtacaggtgatgaaatcttggcagtgttaacaaaaaagtagtgtgtattgtgctatttttttttactctagaaacttaaccatttgtagagaaaaaggaaacaaattttcacacattgaagttcattctgacataaaattaatgataaataatcatagaaatcaagctttgtattttagcgaacataagtactttcaacaaactcaggtggtgtatcagggagacattttctgggtgtttttgtgtgttttctgtcttagaaaagaatgtgttctaatgcaaggatgtttctctgcaggagttattcctgatgaagctaaagctttgtctctgttggcaccagctaatgcagtggcaggtcttctgcctggtggtggactcctgcctactcctaacccacttacccagattggcgctgttccactggctgctttgggggctcctactcttgatcctgcccttgctgcacttgggcttcctggagcaaacttgaactctcagtctcttgctgcagatcagttgctgaagcttatgagtactgttgatcccaagttgaatcatgtagctgctggtctcgtttcaccaagtctgaaatcggatacctctagtaaagaaatagaggaagctatgaaaagagtacgagaagcacagtccctaatttctgctgctatagaaccagataagaaagaagaaaaaagaaggcattcaagatcaagatcacgttctaggaggaggaggactccctcatcttctagacacaggcggtcaagaagcagatcgagacggcggtcacattctaagtctaggagtcggcgacgatccaaaagcccaaggcggagaagatctcattccagagaaagaggtagaaggtcaaggagcacatcaaaaacaagagacaaaaagaaagaagacaaagaaaagaaacgttctaaaacaccaccaaaaagttacagcacagccagacgttctagaagtgcaagcagagagagacgacgacgaagaagcaggagtggcacaagatctcctaaaaagcctcggtctcctaaaagaaaattgtcccgctcaccatcccctaggagacataaaaaggagaagaagaaagataaagacaaagaaagaagtagggatgaaagagaacgatcaacaagcaagaagaagaagagtaaagataaggaaaaggaccgggaaagaaaatcagagagtgataaagatgtaaaacaggttacacgggattatgatgaagaggaacaggggtatgacagtgagaaagagaaaaaagaagagaagaaaccaatagaaacaggttcccctaaaacaaaggaatgttctgtggaaaagggaactggtgattcactaagagaatccaaagtgaatggggatgatcatcatgaagaagacatggatatgagtgactgaatattgcctctgagggagtccaactgtatacctgcatcagtgtcattcctttgtgtgatttcttaatgctgtatttgttcatctcaaacctagatgtatacagctctgagttataaatggttataaagctcctgttactcatattagttatttacatcaaaaagcttttagaaaatggtacgaggtaaccaattcttgtcatggtgaaatctgattgagtaaccaagcagttttactattctggtgctgcttcataacaaaaatgaaaagctgcatgcatctacagcaggcatggattgtttatgtcgtatgatatcctttattaagtaagttcacttatagtatttctataatttgattcattgccgtaatagagccatgtaggaaatgcactgattgcatgttattgtggcaagaatatcctaaatgtcattaaaatcctccaacatgatggatctacttatggtcttgtttgttgacatgacaaattaacattcttatagttacatctggaaatgagcatttgaaatagataatcctttaagccttgtggcaaaatttttgtggcttttgtttaactttgaaaggttattatgcactaaccttttttggtggctaattagggtttaaatacagaaacaagatttcaaataaaactgtctttggcagtgagtaaatagcatattttgaagtagagttgtatactttttcataagatgtttgggaatttttttcctgaagtaataatttattccacatctacatcagtgaaagctatctacctatcctgagtctatcttaaaggaaaaaaagaaaaaaaccttatctcttgcccttattttgaattttccactctttcattaatttgttttaagctccgtgttggaaaaaaggggtagtgcattttaaattgaccttcatacgcttttaaaataagacaaatctacttgataatgtacctttatttgatctcaagttgtataaaaccaataaatttgtgttactgcagtagtaatcttatgcacacggtgatttcatgttatatatgcaaagtaggcaactgttttcttagttacagaagtttcaagcttcacttttgtgcagtagaaacaaaagtaggctacagtctgtgccatgttgatgtacagtttctgaaattgttttacaagactttgataataaaacccttaaactta

SEQ ID NO: 339297 - DNA, 1275 bp, Artificial Sequence
  derived and/or modified sequence
atgatcaacaaccacagaaaccaggccctgtacttcagcgagcacaagtacttccagcagacccaggtggtgtaccagggcgacatcttctgggtgttcctgtgcgtgttctgcctgagaaaggagtgcgtgctgatgcagggctgcttcagcgccggcgtgatccccgacgaggccaaggccctgagcctgctggcccccgccaacgccgtggccggcctgctgcccggcggcggcctgctgcccacccccaaccccctgacccagatcggcgccgtgcccctggccgccctgggcgcccccaccctggaccccgccctggccgccctgggcctgcccggcgccaacctgaacagccagagcctggccgccgaccagctgctgaagctgatgagcaccgtggaccccaagctgaaccacgtggccgccggcctggtgagccccagcctgaagagcgacaccagcagcaaggagatcgaggaggccatgaagagagtgagagaggcccagagcctgatcagcgccgccatcgagcccgacaagaaggaggagaagagaagacacagcagaagcagaagcagaagcagaagaagaagaacccccagcagcagcagacacagaagaagcagaagcagaagcagaagaagaagccacagcaagagcagaagcagaagaagaagcaagagccccagaagaagaagaagccacagcagagagagaggcagaagaagcagaagcaccagcaagaccagagacaagaagaaggaggacaaggagaagaagagaagcaagaccccccccaagagctacagcaccgccagaagaagcagaagcgccagcagagagagaagaagaagaagaagcagaagcggcaccagaagccccaagaagcccagaagccccaagagaaagctgagcagaagccccagccccagaagacacaagaaggagaagaagaaggacaaggacaaggagagaagcagagacgagagagagagaagcaccagcaagaagaagaagagcaaggacaaggagaaggacagagagagaaagagcgagagcgacaaggacgtgaagcaggtgaccagagactacgacgaggaggagcagggctacgacagcgagaaggagaagaaggaggagaagaagcccatcgagaccggcagccccaagaccaaggagtgcagcgtggagaagggcaccggcgacagcctgagagagagcaaggtgaacggcgacgaccaccacgaggaggacatggacatgagcgactag

SEQ ID NO: 339298 - DNA, 769 bp, Artificial Sequence
  derived and/or modified sequence
gccgcagctaccggacacctgggctccgactctgacttttggaagcgaggcggccttaggcttcctggttatcagtttccttttagcaggccgtccccgggcgctgtttccttcccaggggtctctcacccgtgtcccggctttctgagctggttgttaacctggctggtcgctctggccgaccgcatcccgtctcggattcctgacgtttctttttcattctttgagtgtttcaggcagtcccaagggtgggccctctttcccttcctgtcactcgctctgcctctggtttcttagaaccagtcagttctctgctggcaaatagccaagatcctccggctgtggttactgattcctcgtctctgtcttgagcctgggctttggtcccatttctatgcgctcggtcgcccgtcgtaacttattccactttgcgtcccctcttctttccttttctggaatgggttgtgggggggttgggagagggggaggagcgattttttttttcttgggagaagaagaggtagtgaattcctttagatcttgacgatgatgggtagagggagagaagtttgaaggagactggctagactaacaatttgatacggtagaaatgaatgggctcacaaatattgtcatcaatagactattttgatcgaaacagaaaataaaagcactgttccagttacagccatcccttgtcataacttttgaactgtatttggaaaaatactggccaggaaagaaaaatgataaaatttttcctcatggt

SEQ ID NO: 339299 - protein, 1425 aa, Artificial Sequence
  derived and/or modified sequence
MENYFQAEAYNLDKVLDEFEQNEDETVSSTLLDTKWNKILDPPSHRLSFNPTLASVNESAVSNESQPQLKVFSLAHSAPLTTEEEDHCANGQDCNLNPEIATMWIDENAVAEDQLIKRNYSWDDQCSAVEVGEKKCGNLACLPDEKNVLVVAVMHNCDKRTLQNDLQDCNNYNSQSLMDAFSCSLDNENRQTDQFSFSINESTEKDMNSEKQMDPLNRPKTEGRSVNHLCPTSSDSLASVCSPSQLKDDGSIGRDPSMSAITSLTVDSVISSQGTDGCPAVKKQENYIPDEDLTGKISSPRTDLGSPNSFSHMSEGILMKKEPAEESTTEESLRSGLPLLLKPDMPNGSGRNNDCERCSDCLVPNEVRADENEGYEHEETLGTTEFLNMTEHFSESQDMTNWKLTKLNEMNDSQVNEEKEKFLQISQPEDTNGDSGGQCVGLADAGLDLKGTCISESEECDFSTVIDTPAANYLSNGCDSYGMQDPGVSFVPKTLPSKEDSVTEEKEIEESKSECYSNIYEQRGNEATEGSGLLLNSTGDLMKKNYLHNFCSQVPSVLGQSSPKVVASLPSISVPFGGARPKQPSNLKLQIPKPLSDHLQNDFPANSGNNTKNKNDILGKAKLGENSATNVCSPSLGNISNVDTNGEHLESYEAEISTRPCLALAPDSPDNDLRAGQFGISARKPFTTLGEVAPVWVPDSQAPNCMKCEARFTFTKRRHHCRACGKVFCASCCSLKCKLLYMDRKEARVCVICHSVLMNAQAWENMMSASSQSPNPNNPAEYCSTIPPLQQAQASGALSSPPPTVMVPVGVLKHPGAEVAQPREQRRVWFADGILPNGEVADAAKLTMNGTSSAGTLAVSHDPVKPVTTSPLPAETDICLFSGSITQVGSPVGSAMNLIPEDGLPPILISTGVKGDYAVEEKPSQISVMQQLEDGGPDPLVFVLNANLLSMVKIVNYVNRKCWCFTTKGMHAVGQSEIVILLQCLPDEKCLPKDIFNHFVQLYRDALAGNVVSNLGHSFFSQSFLGSKEHGGFLYVTSTYQSLQDLVLPTPPYLFGILIQKWETPWAKVFPIRLMLRLGAEYRLYPCPLFSVRFRKPLFGETGHTIMNLLADFRNYQYTLPVVQGLVVDMEVRKTSIKIPSNRYNEMMKAMNKSNEHVLAGGACFNEKADSHLVCVQNDDGNYQTQAISIHNQPRKVTGASFFVFSGALKSSSGYLAKSSIVEDGVMVQITAENMDSLRQALREMKDFTITCGKADAEEPQEHIHIQWVDDDKNVSKGVVSPIDGKSMETITNVKIFHGSEYKANGKVIRWTEVFFLENDDQHNCLSDPADHSRLTEHVAKAFCLALCPHLKLLKEDGMTKLGLRVTLDSDQVGYQAGSNGQPLPSQYMNDLDSALVPVIHGGACQLSEGPVVMELIFYILENIV

SEQ ID NO: 339300 - protein, 762 aa, Artificial Sequence
  derived and/or modified sequence
MENYFQAEAYNLDKVLDEFEQNEDETVSSTLLDTKWNKILDPPSHRLSFNPTLASVNESAVSNESQPQLKVFSLAHSAPLTTEEEDHCANGQDCNLNPEIATMWIDENAVAEDQLIKRNYSWDDQCSAVEVGEKKCGNLACLPDEKNVLVVAVMHNCDKRTLQNDLQDCNNYNSQSLMDAFSCSLDNENRQTDQFSFSINESTEKDMNSEKQMDPLNRPKTEGRSVNHLCPTSSDSLASVCSPSQLKDDGSIGRDPSMSAITSLTVDSVISSQGTDGCPAVKKQENYIPDEDLTGKISSPRTDLGSPNSFSHMSEGILMKKEPAEESTTEESLRSGLPLLLKPDMPNGSGRNNDCERCSDCLVPNEVRADENEGYEHEETLGTTEFLNMTEHFSESQDMTNWKLTKLNEMNDSQVNEEKEKFLQISQPEDTNGDSGGQCVGLADAGLDLKGTCISESEECDFSTVIDTPAANYLSNGCDSYGMQDPGVSFVPKTLPSKEDSVTEEKEIEESKSECYSNIYEQRGNEATEGSGLLLNSTGDLMKKNYLHNFCSQVPSVLGQSSPKVVASLPSISVPFGGARPKQPSNLKLQIPKPLSDHLQNDFPANSGNNTKNKNDILGKAKLGENSATNVCSPSLGNISNVDTNGEHLESYEAEISTRPCLALAPDSPDNDLRAGQFGISARKPFTTLGEVAPVWVPDSQAPNCMKCEARFTFTKRRHHCRACGKVFCASCCSLKCKLLYMDRKEARVCVICHSVLMNGKY

SEQ ID NO: 339301 - DNA, 4278 bp, Artificial Sequence
  derived and/or modified sequence
atggagaactacttccaggccgaggcctacaacctggacaaggtgctggacgagttcgagcagaacgaggacgagaccgtgagcagcaccctgctggacaccaagtggaacaagatcctggacccccccagccacagactgagcttcaaccccaccctggccagcgtgaacgagagcgccgtgagcaacgagagccagccccagctgaaggtgttcagcctggcccacagcgcccccctgaccaccgaggaggaggaccactgcgccaacggccaggactgcaacctgaaccccgagatcgccaccatgtggatcgacgagaacgccgtggccgaggaccagctgatcaagagaaactacagctgggacgaccagtgcagcgccgtggaggtgggcgagaagaagtgcggcaacctggcctgcctgcccgacgagaagaacgtgctggtggtggccgtgatgcacaactgcgacaagagaaccctgcagaacgacctgcaggactgcaacaactacaacagccagagcctgatggacgccttcagctgcagcctggacaacgagaacagacagaccgaccagttcagcttcagcatcaacgagagcaccgagaaggacatgaacagcgagaagcagatggaccccctgaacagacccaagaccgagggcagaagcgtgaaccacctgtgccccaccagcagcgacagcctggccagcgtgtgcagccccagccagctgaaggacgacggcagcatcggcagagaccccagcatgagcgccatcaccagcctgaccgtggacagcgtgatcagcagccagggcaccgacggctgccccgccgtgaagaagcaggagaactacatccccgacgaggacctgaccggcaagatcagcagccccagaaccgacctgggcagccccaacagcttcagccacatgagcgagggcatcctgatgaagaaggagcccgccgaggagagcaccaccgaggagagcctgagaagcggcctgcccctgctgctgaagcccgacatgcccaacggcagcggcagaaacaacgactgcgagagatgcagcgactgcctggtgcccaacgaggtgagagccgacgagaacgagggctacgagcacgaggagaccctgggcaccaccgagttcctgaacatgaccgagcacttcagcgagagccaggacatgaccaactggaagctgaccaagctgaacgagatgaacgacagccaggtgaacgaggagaaggagaagttcctgcagatcagccagcccgaggacaccaacggcgacagcggcggccagtgcgtgggcctggccgacgccggcctggacctgaagggcacctgcatcagcgagagcgaggagtgcgacttcagcaccgtgatcgacacccccgccgccaactacctgagcaacggctgcgacagctacggcatgcaggaccccggcgtgagcttcgtgcccaagaccctgcccagcaaggaggacagcgtgaccgaggagaaggagatcgaggagagcaagagcgagtgctacagcaacatctacgagcagagaggcaacgaggccaccgagggcagcggcctgctgctgaacagcaccggcgacctgatgaagaagaactacctgcacaacttctgcagccaggtgcccagcgtgctgggccagagcagccccaaggtggtggccagcctgcccagcatcagcgtgcccttcggcggcgccagacccaagcagcccagcaacctgaagctgcagatccccaagcccctgagcgaccacctgcagaacgacttccccgccaacagcggcaacaacaccaagaacaagaacgacatcctgggcaaggccaagctgggcgagaacagcgccaccaacgtgtgcagccccagcctgggcaacatcagcaacgtggacaccaacggcgagcacctggagagctacgaggccgagatcagcaccagaccctgcctggccctggcccccgacagccccgacaacgacctgagagccggccagttcggcatcagcgccagaaagcccttcaccaccctgggcgaggtggcccccgtgtgggtgcccgacagccaggcccccaactgcatgaagtgcgaggccagattcaccttcaccaagagaagacaccactgcagagcctgcggcaaggtgttctgcgccagctgctgcagcctgaagtgcaagctgctgtacatggacagaaaggaggccagagtgtgcgtgatctgccacagcgtgctgatgaacgcccaggcctgggagaacatgatgagcgccagcagccagagccccaaccccaacaaccccgccgagtactgcagcaccatcccccccctgcagcaggcccaggccagcggcgccctgagcagccccccccccaccgtgatggtgcccgtgggcgtgctgaagcaccccggcgccgaggtggcccagcccagagagcagagaagagtgtggttcgccgacggcatcctgcccaacggcgaggtggccgacgccgccaagctgaccatgaacggcaccagcagcgccggcaccctggccgtgagccacgaccccgtgaagcccgtgaccaccagccccctgcccgccgagaccgacatctgcctgttcagcggcagcatcacccaggtgggcagccccgtgggcagcgccatgaacctgatccccgaggacggcctgccccccatcctgatcagcaccggcgtgaagggcgactacgccgtggaggagaagcccagccagatcagcgtgatgcagcagctggaggacggcggccccgaccccctggtgttcgtgctgaacgccaacctgctgagcatggtgaagatcgtgaactacgtgaacagaaagtgctggtgcttcaccaccaagggcatgcacgccgtgggccagagcgagatcgtgatcctgctgcagtgcctgcccgacgagaagtgcctgcccaaggacatcttcaaccacttcgtgcagctgtacagagacgccctggccggcaacgtggtgagcaacctgggccacagcttcttcagccagagcttcctgggcagcaaggagcacggcggcttcctgtacgtgaccagcacctaccagagcctgcaggacctggtgctgcccacccccccctacctgttcggcatcctgatccagaagtgggagaccccctgggccaaggtgttccccatcagactgatgctgagactgggcgccgagtacagactgtacccctgccccctgttcagcgtgagattcagaaagcccctgttcggcgagaccggccacaccatcatgaacctgctggccgacttcagaaactaccagtacaccctgcccgtggtgcagggcctggtggtggacatggaggtgagaaagaccagcatcaagatccccagcaacagatacaacgagatgatgaaggccatgaacaagagcaacgagcacgtgctggccggcggcgcctgcttcaacgagaaggccgacagccacctggtgtgcgtgcagaacgacgacggcaactaccagacccaggccatcagcatccacaaccagcccagaaaggtgaccggcgccagcttcttcgtgttcagcggcgccctgaagagcagcagcggctacctggccaagagcagcatcgtggaggacggcgtgatggtgcagatcaccgccgagaacatggacagcctgagacaggccctgagagagatgaaggacttcaccatcacctgcggcaaggccgacgccgaggagccccaggagcacatccacatccagtgggtggacgacgacaagaacgtgagcaagggcgtggtgagccccatcgacggcaagagcatggagaccatcaccaacgtgaagatcttccacggcagcgagtacaaggccaacggcaaggtgatcagatggaccgaggtgttcttcctggagaacgacgaccagcacaactgcctgagcgaccccgccgaccacagcagactgaccgagcacgtggccaaggccttctgcctggccctgtgcccccacctgaagctgctgaaggaggacggcatgaccaagctgggcctgagagtgaccctggacagcgaccaggtgggctaccaggccggcagcaacggccagcccctgcccagccagtacatgaacgacctggacagcgccctggtgcccgtgatccacggcggcgcctgccagctgagcgagggccccgtggtgatggagctgatcttctacatcctggagaacatcgtgtag

SEQ ID NO: 339302 - DNA, 2289 bp, Artificial Sequence
  derived and/or modified sequence
atggagaactacttccaggccgaggcctacaacctggacaaggtgctggacgagttcgagcagaacgaggacgagaccgtgagcagcaccctgctggacaccaagtggaacaagatcctggacccccccagccacagactgagcttcaaccccaccctggccagcgtgaacgagagcgccgtgagcaacgagagccagccccagctgaaggtgttcagcctggcccacagcgcccccctgaccaccgaggaggaggaccactgcgccaacggccaggactgcaacctgaaccccgagatcgccaccatgtggatcgacgagaacgccgtggccgaggaccagctgatcaagagaaactacagctgggacgaccagtgcagcgccgtggaggtgggcgagaagaagtgcggcaacctggcctgcctgcccgacgagaagaacgtgctggtggtggccgtgatgcacaactgcgacaagagaaccctgcagaacgacctgcaggactgcaacaactacaacagccagagcctgatggacgccttcagctgcagcctggacaacgagaacagacagaccgaccagttcagcttcagcatcaacgagagcaccgagaaggacatgaacagcgagaagcagatggaccccctgaacagacccaagaccgagggcagaagcgtgaaccacctgtgccccaccagcagcgacagcctggccagcgtgtgcagccccagccagctgaaggacgacggcagcatcggcagagaccccagcatgagcgccatcaccagcctgaccgtggacagcgtgatcagcagccagggcaccgacggctgccccgccgtgaagaagcaggagaactacatccccgacgaggacctgaccggcaagatcagcagccccagaaccgacctgggcagccccaacagcttcagccacatgagcgagggcatcctgatgaagaaggagcccgccgaggagagcaccaccgaggagagcctgagaagcggcctgcccctgctgctgaagcccgacatgcccaacggcagcggcagaaacaacgactgcgagagatgcagcgactgcctggtgcccaacgaggtgagagccgacgagaacgagggctacgagcacgaggagaccctgggcaccaccgagttcctgaacatgaccgagcacttcagcgagagccaggacatgaccaactggaagctgaccaagctgaacgagatgaacgacagccaggtgaacgaggagaaggagaagttcctgcagatcagccagcccgaggacaccaacggcgacagcggcggccagtgcgtgggcctggccgacgccggcctggacctgaagggcacctgcatcagcgagagcgaggagtgcgacttcagcaccgtgatcgacacccccgccgccaactacctgagcaacggctgcgacagctacggcatgcaggaccccggcgtgagcttcgtgcccaagaccctgcccagcaaggaggacagcgtgaccgaggagaaggagatcgaggagagcaagagcgagtgctacagcaacatctacgagcagagaggcaacgaggccaccgagggcagcggcctgctgctgaacagcaccggcgacctgatgaagaagaactacctgcacaacttctgcagccaggtgcccagcgtgctgggccagagcagccccaaggtggtggccagcctgcccagcatcagcgtgcccttcggcggcgccagacccaagcagcccagcaacctgaagctgcagatccccaagcccctgagcgaccacctgcagaacgacttccccgccaacagcggcaacaacaccaagaacaagaacgacatcctgggcaaggccaagctgggcgagaacagcgccaccaacgtgtgcagccccagcctgggcaacatcagcaacgtggacaccaacggcgagcacctggagagctacgaggccgagatcagcaccagaccctgcctggccctggcccccgacagccccgacaacgacctgagagccggccagttcggcatcagcgccagaaagcccttcaccaccctgggcgaggtggcccccgtgtgggtgcccgacagccaggcccccaactgcatgaagtgcgaggccagattcaccttcaccaagagaagacaccactgcagagcctgcggcaaggtgttctgcgccagctgctgcagcctgaagtgcaagctgctgtacatggacagaaaggaggccagagtgtgcgtgatctgccacagcgtgctgatgaacggcaagtactag

SEQ ID NO: 339303 - DNA, 4278 bp, Artificial Sequence
  derived and/or modified sequence
atggagaattattttcaggccgaagcctacaacctggataaagtactggatgaatttgagcagaacgaggacgagacagtgtcctctactctgctggataccaagtggaacaaaattttggatcccccgtcacatcgcctgtcatttaaccctactttggcaagcgtgaatgaatctgctgtgtcaaatgaaagccagcctcagttgaaagtgttctcgcttgcacactctgcacctctcacgaccgaagaagaggatcactgcgcaaacggacaggactgcaatcttaaccccgagattgccacaatgtggattgacgagaatgccgtcgcggaagaccagcttattaaacgcaattactcatgggatgaccagtgtagcgccgtagaagttggcgagaaaaagtgtggcaacctggcatgcctgcctgacgaaaagaatgtcctggtggtcgccgtaatgcataactgcgacaaacggaccctacagaacgacctgcaagattgcaataactacaactcccagtcgctaatggacgcattctcatgctcgctcgataacgaaaacaggcagactgatcagttttctttttctatcaacgagtctacagagaaggacatgaactccgagaagcagatggatccactgaataggccaaagacagaggggagatccgtcaatcatctgtgtccaacaagttccgatagtcttgcaagcgtgtgttctccctctcagcttaaagatgatggcagcatcggccgcgatccctcaatgagcgcaatcacaagcctgacagtggattcagtcataagctcccaaggcacagatggatgccctgcagtcaagaaacaggagaactatattcctgatgaggacctgacagggaagatctcaagcccacggaccgacctgggctcccccaatagcttctcacatatgagcgagggcatcctaatgaagaaagagcctgcagaagaatcaacaaccgaggagtcgttaagatcggggctccccctgcttcttaaaccggacatgcccaatggttctggacgcaacaacgactgcgaacggtgctctgattgtctggtgcctaacgaggtgagagccgacgagaatgaaggctacgaacacgaggagaccctggggaccaccgagtttctgaacatgacagagcactttagcgaaagccaggacatgacaaactggaaactcactaaactgaatgaaatgaacgattcacaggtaaacgaagaaaaggagaagttcctgcagattagtcaacccgaagacactaacggtgactctggagggcaatgcgtgggattggcagacgcgggactggatctgaaaggcacctgcatttccgaatccgaggagtgtgatttttctacagtcattgatactccagcagcgaattatctttccaacggatgcgattcttacggcatgcaggatcctggagtttcattcgtgcctaaaacccttccgtctaaggaggatagcgtgaccgaggaaaaggagattgaggagtccaagtcggaatgctactcaaacatttatgaacagagaggtaatgaggcaaccgagggttcgggtctgctgctgaacagcacgggagatctcatgaagaagaactatctgcacaacttttgctctcaggtaccatctgtcctcggacagagctctccaaaggttgtggcctccctgccctctatcagcgtcccattcggaggcgcccggccaaagcagccttctaatttaaagctccagatccccaagcctttgagcgatcatctacagaacgactttcctgctaactctgggaacaataccaagaacaagaatgacatcctgggaaaagccaagctgggggagaactctgccacgaacgtttgcagcccaagcctaggaaatataagtaatgtggatacaaatggcgagcatctggaatcatacgaggccgagatctccaccagaccctgtttggctctggccccagattcccccgacaatgacctgcgagctgggcagtttggtatctcagccaggaagccatttactacactgggggaggttgcgccagtgtgggtcccagattcacaagcccccaactgcatgaaatgcgaggctcgatttacatttaccaagcggagacatcactgccgggcttgcgggaaggtcttttgtgccagctgctgcagcctgaaatgtaaactcctttatatggatcgtaaggaggcccgcgtgtgtgtgatatgccactctgtcttaatgaatgctcaggcttgggagaacatgatgtccgcgtccagtcaaagccctaatcccaacaacccagctgaatactgttccacaattcctcctcttcagcaggcccaggcttcgggggcactgtcatcacccccacccactgttatggtgccagtgggggtacttaaacaccctggcgccgaggtagctcagccgcgggagcagaggcgggtgtggttcgccgatgggatcctcccaaacggagaagtggctgatgcagctaagctgaccatgaatggtaccagtagtgccggcacactggccgtctcccatgatccagttaaacccgtgaccaccagccccctgcccgccgagacggatatttgcctcttcagcggatcaatcacacaggtgggttcgccagttggctccgctatgaaccttattcctgaggacggactgcctcccattctgatctcaacaggggtaaagggggactatgcagtggaggaaaagccatcacaaatcagtgtgatgcagcagctggaggatggaggacccgatccactcgtgtttgtccttaacgccaacctgctgagtatggttaaaatcgtcaattatgtaaatagaaagtgttggtgttttacaaccaaggggatgcatgccgtaggacagagtgagattgttatactactccaatgcctcccagacgagaagtgcctgccaaaggatatctttaaccattttgtccagctttacagggatgctctggccggaaacgttgtgtcaaatttggggcactcattttttagccagtcattcctgggcagtaaggagcatgggggctttctgtacgtgacctccacttaccagtccctgcaggacctagtactgccaacacctccgtacttgtttggcatcctgatccagaagtgggaaaccccttgggcgaaagtctttcctatccggctgatgctgcggcttggcgctgaatataggctgtatccatgtccgctgttttcagtcagattccgcaagccgttgtttggcgagacgggacacaccatcatgaatctactcgccgacttcaggaactaccagtatacgttacccgtagtgcaggggctcgtcgtggatatggaggtgaggaaaactagtataaaaatcccctcaaatcggtataatgaaatgatgaaggctatgaacaagtctaatgagcacgtcctggcggggggcgcttgtttcaatgagaaggcggactcacatctggtctgtgtacagaacgacgacggaaactatcagactcaggcaatttctattcataatcaacctaggaaggtcactggcgcctctttttttgtcttctctggcgcccttaagagttcatctggatacttagctaaatcatctattgttgaggacggggtgatggtccaaatcaccgccgagaacatggactccctgaggcaggccctcagagagatgaaggacttcactatcacatgcggcaaggctgacgctgaagaaccccaggaacacattcacatccagtgggtcgatgatgacaaaaacgtttcaaagggcgtggtgtcgccaattgatgggaaaagcatggagacgataacaaatgtgaaaatctttcacggaagtgagtataaagctaacggaaaggtgattaggtggacagaggtttttttcttagagaacgatgatcagcacaattgcctgagcgacccggcagatcacagtaggctgaccgagcacgtggccaaggcattctgtctggcactctgtccacatcttaaactgctgaaggaagacggcatgaccaagctcggactgagagtgacacttgacagcgaccaggtggggtaccaagcgggatccaacggccagcctctaccaagtcagtatatgaatgacctcgatagcgccctggttcccgtgatacatggcggcgcgtgccaactaagcgaaggacccgtggtaatggagctaatcttctatatcttggaaaacattgtatag

SEQ ID NO: 339304 - DNA, 2289 bp, Artificial Sequence
  derived and/or modified sequence
atggaaaattacttccaggcagaagcctataacttggacaaggtgcttgatgagtttgaacagaacgaggatgagacagtaagttcgactctcttggataccaagtggaacaaaatacttgatcctcccagtcataggctgtctttcaatcctaccctggccagcgttaacgaaagcgcagtgtctaatgagagccagccccagttaaaggtcttttctttggcccactccgccccgctaaccactgaggaggaggaccactgcgctaatggccaggattgtaacctcaatcccgagatcgctaccatgtggatcgacgagaacgccgtggccgaagatcagcttattaagagaaattactcatgggatgaccagtgttcagccgtcgaagtgggggagaagaaatgcggcaatcttgcatgcctgccagacgaaaagaacgtcctggtagtcgcagtaatgcacaactgcgataaaaggacgctacaaaacgacctacaggactgtaacaattacaactctcaatccctgatggatgccttctcctgcagcctggataacgaaaatcgacagacagaccagttttcctttagcattaacgagagcactgagaaagacatgaattctgagaagcagatggatcctcttaacaggcccaaaacggagggacgtagtgtgaaccatctttgcccaaccagttccgacagccttgccagtgtctgttcacctagccaactaaaagacgatggttcgattgggcgtgatccttcgatgtcggctattacctctctcacagtggactctgttatcagctcccaaggtactgatggttgccctgccgtgaagaagcaagagaactatatccccgacgaggatctcaccgggaagatcagctctccacgaactgacctcgggtctccaaactccttctcccacatgagcgaggggatcctgatgaagaaggaacccgccgaggagtcgaccactgaggagtctctcagatctgggctgcctttgctcctgaaacccgatatgcctaatggctctggacgcaacaatgactgcgagcgttgttccgattgccttgtcccgaatgaggttcgggcagacgagaatgaaggctacgaacacgaggagacactcggaactacagagtttctgaatatgaccgagcatttcagtgagtctcaagatatgactaactggaagttaacaaaacttaacgagatgaacgacagccaggtaaatgaagaaaaagaaaagtttctgcaaattagtcagccagaagatactaatggagactccggtggacagtgcgtgggattggctgacgccggcttggaccttaagggcacgtgtatcagcgagagcgaggaatgcgacttcagcaccgtgattgatacaccggctgccaattatctgtccaatggctgtgattcctacggtatgcaggatccaggcgtgtcattcgtcccaaagactcttcctagtaaggaagattccgtcacggaagagaaggagatcgaagaaagtaagagtgaatgctatagtaacatctacgaacagagaggaaatgaagctacagaaggatccggacttctgcttaactcgacaggggacctgatgaaaaaaaactacctgcacaatttctgtagccaggtcccttccgtgctcggccagtcgtcccccaaagtggtggcttccctgccatctatcagtgtgccttttggtggagcccggccaaagcagcccagcaatctgaagctgcagattccaaagccactgtctgatcacctgcagaatgacttccctgcaaacagcggcaataacactaaaaataagaatgatatactcggaaaggccaagctgggagagaacagcgcaaccaacgtgtgtagtccaagcctcggaaacatttctaacgttgacaccaatggtgagcacctggagtcctacgaggcggaaatcagcacccgcccatgcctggctttagcacccgattcacccgataatgatctgcgcgctggacagtttggtatttcagcacggaagccttttaccacccttggagaggtggcccccgtgtgggttcccgacagccaagcccctaactgtatgaaatgcgaggctcgcttcacctttactaaaagaaggcatcattgtcgtgcttgcggaaaggtattttgcgcctcctgctgcagcctcaagtgtaaactgctatacatggacaggaaagaggccagggtttgtgtaatatgccacagcgtgctgatgaacggcaaatactag

SEQ ID NO: 339305 - DNA, 4278 bp, Artificial Sequence
  derived and/or modified sequence
atggagaattactttcaggcggaggcttacaacctggataaggtgctggatgagtttgagcaaaacgaggacgaaaccgtatcaagtaccctactcgatactaagtggaataaaatcctggatccaccctcccatagactcagtttcaatccaactctcgcgtccgtgaacgaatcggcggtgtcaaatgaaagccagccacagctcaaagtcttcagtcttgcacatagcgccccgcttacgaccgaagaggaggaccactgcgcgaatggtcaggactgtaacttaaacccggagattgctacaatgtggatagatgaaaacgctgttgcagaggatcagcttattaagcggaactattcctgggacgatcagtgttctgctgtggaagtgggcgagaagaagtgcggtaatctggcatgcctgccagacgagaaaaatgtcttagtggtggccgtgatgcataattgcgacaaacggacgctccagaatgacctgcaagattgcaataattacaattcccaaagccttatggatgcatttagttgtagccttgataatgagaatcgacagacggaccaattcagtttttcaatcaatgaaagcacagaaaaggacatgaactccgaaaagcaaatggatccactgaacaggcctaagaccgagggtagatccgtgaatcatctatgccctaccagcagtgattccctggctagcgtctgttcccccagtcagctgaaagatgacgggtcaatcgggcgagatccaagcatgagtgccatcacttctctgacagtggattccgttatctccagccagggcacggacggttgccctgctgtgaaaaagcaggaaaactacattcccgacgaggaccttactgggaagatcagctccccaagaaccgatctcgggagccctaattccttctctcacatgagcgagggcatcttgatgaagaaggagcccgccgaggagagcacaacagaggaaagcctacgctctgggttgccgctcctgttgaaacccgacatgcccaacggtagtggcaggaacaacgactgtgaaagatgcagcgattgcctggtgcccaatgaggtccgcgcggatgaaaatgagggatacgagcacgaagaaacactggggaccacggaattcctgaacatgactgagcatttttctgaaagccaagacatgactaattggaaacttaccaagcttaacgagatgaacgactctcaggtgaatgaagagaaggagaaattcctgcaaatatcacagcctgaggacaccaacggtgactccggaggacaatgcgtgggtctcgctgatgccggtttggacctgaaagggacctgcatatccgagtcggaagagtgcgacttcagtaccgtaattgatacgcccgcggctaattacctgagtaacggatgtgattcttatggcatgcaggaccccggtgtttccttcgtccctaagactctgccaagcaaagaagattctgttacggaggagaaagaaattgaagagtccaaatccgagtgttactccaacatctacgaacagcgcgggaatgaagccaccgagggttctggattgcttctgaacagcaccggcgatcttatgaagaaaaattatctccacaatttttgctcacaggtgccaagtgtgctgggacagtcgagcccaaaagtagtggcttcgcttcctagtatctctgtaccattcgggggcgctcgccctaagcagccttcgaacttgaagctgcagattcctaaaccgctgtccgaccacttacagaacgactttcctgccaacagcggaaataacacaaagaacaagaacgacatccttgggaaggccaagttaggagagaatagtgctaccaatgtgtgctccccgtcactgggaaacattagtaacgtggatactaacggtgaacatctagaaagttacgaggctgaaatcagcaccaggccgtgcttggcgcttgcacctgactctcctgataatgatctgcgggcgggacagtttggaatttccgcacggaagccctttacaacccttggcgaggtggccccagtatgggtgcctgactcccaggctcccaactgtatgaaatgcgaagcccggttcactttcaccaagcgcaggcaccattgtcgggcatgtgggaaggtgttttgcgcttcatgctgtagcctcaaatgcaagcttctgtatatggatcgcaaggaggcccgcgtctgtgtcatctgccactccgtcctgatgaatgctcaggcatgggagaacatgatgtcagcctcctcccagagccctaaccccaataaccccgccgagtactgctcaactataccacctctacagcaagcccaagctagtggtgccttgtcttctccacctccgacagtgatggtgcctgtgggggtcttgaagcaccctggcgcagaggtggctcaacccagagaacagcgcagagtgtggtttgcggatggcattctcccaaatggagaggtggcggacgccgccaagctgacaatgaatggcacgtcatccgccggtacactcgcggtgtcacacgacccagtgaaaccagttaccacatcaccactgcctgcagaaacggatatctgtctgttttcaggatccattacccaggtcggatctcccgtcgggtctgctatgaacctcattccggaggacggcctaccacccattctcatcagcactggcgtgaagggagattacgctgttgaggagaaacccagtcagatctcagtgatgcaacagctcgaggacggagggccagacccactggttttcgtcctgaatgcaaacctgctgtcgatggtgaagatagttaattatgtcaatcggaagtgttggtgcttcaccacaaaaggtatgcatgctgttggccagtctgaaattgtgatccttttacagtgcctgccagacgaaaagtgcctgcccaaagatattttcaatcactttgtgcagctctatcgcgacgcactggcaggcaacgtggtgtctaacctgggacactcattcttttcacagtcctttttgggctccaaggagcacggcggattcctctacgtcaccagcacctaccagtctctccaagatttagtgctgcctacccccccctatctgttcggcatcctgattcagaaatgggagacaccatgggccaaggtgttcccgatcaggcttatgctgaggttgggagctgaatatcgcctgtatccatgcccactgttctccgttcgatttcggaagccactgtttggagagaccgggcacacaattatgaacctgctggccgactttaggaactaccaatatactctccccgtggtgcaggggctggtcgtcgatatggaagtgaggaaaacatcgatcaagataccaagtaatcgatacaatgagatgatgaaggcaatgaataaaagcaacgaacatgtacttgctggaggagcttgctttaatgagaaggctgacagccacctggtctgcgtgcagaacgatgatgggaattatcagacccaagccatcagtatccacaaccagccgaggaaggtgacaggagcctccttcttcgtgttctccggcgctcttaagagctcctctgggtatctcgctaagagttcaatcgtcgaggacggtgtcatggttcaaattacagccgagaacatggatagtcttcgacaggcattgcgcgagatgaaggatttcaccattacgtgcggcaaagccgatgcggaagagccccaggagcacatccacatacagtgggtcgatgacgacaaaaacgtctcaaagggggttgtgagcccaatcgacggcaagtctatggaaacaataacaaacgtcaagatcttccatggttccgagtataaagccaatggtaaagtcatacgctggaccgaggtctttttcctggaaaatgacgaccagcacaactgtttaagtgatcccgcagaccacagcagacttaccgagcacgtggcaaaggcattttgccttgctttgtgtccacacctgaaactgcttaaggaggacgggatgaccaaactgggcttgagagtcacacttgattctgatcaagtgggataccaggcaggcagcaacggccaaccgctcccatcccaatatatgaatgatctcgactcggcactagtcccggtcattcatgggggtgcctgccagctgagtgaaggcccagtggttatggagctcattttttatattttagagaatattgtttag

SEQ ID NO: 339306 - DNA, 4278 bp, Artificial Sequence
  derived and/or modified sequence
atggagaactacttccaggccgaggcctacaacctggacaaggtgctggatgaatttgagcagaatgaagatgagaccgtgagcagcaccctgctggacaccaagtggaacaagatcctggacccccccagccaccggctgtccttcaaccccaccctggcctctgtgaatgaatctgctgtgtccaatgaaagccagccccagctgaaggtgttcagcctggcccacagcgcccccctgaccacagaggaggaggaccactgtgccaacggccaggactgcaacctgaaccctgagatcgccaccatgtggattgatgaaaatgctgtggccgaggaccagctgatcaagaggaactacagctgggatgaccagtgcagcgctgtggaggtgggggagaagaagtgtggcaacctggcctgcctgcctgatgagaagaatgtgctggtggtggccgtgatgcacaactgtgacaagaggaccctgcagaatgacctgcaggactgcaacaactacaacagccagagcctgatggatgccttcagctgcagcctggacaatgaaaatcggcagacagaccagttctccttcagcatcaatgaaagcacagagaaggacatgaacagcgagaagcagatggaccccctgaaccggcccaagacagagggccgctctgtgaaccacctgtgccccaccagcagtgacagcctggcctctgtgtgcagccccagccagctgaaggatgatggcagcatcggccgggaccccagcatgtctgccatcaccagcctgactgtggacagcgtcatcagcagccagggcacagatggctgcccagctgtgaagaagcaggagaactacatcccagatgaggacctgaccgggaagatcagcagccccaggacagacctgggcagccccaacagcttcagccacatgtctgagggcatcctgatgaagaaggagcctgctgaggagagcaccacagaggagagcctgcggagcggcctgcccctgctgctgaagccagacatgcccaatggaagtggaagaaataatgactgtgagcgctgcagcgactgcctggtgcccaatgaggtgcgggcagatgaaaatgaaggctatgaacatgaggagaccctgggcaccacagagttcctgaacatgacagagcacttcagcgagagccaggacatgaccaactggaagctgaccaagctgaatgagatgaatgacagccaggtgaatgaggagaaggagaagttcctgcagatcagccagcctgaggacaccaacggggacagcggcggccagtgtgtgggcctggctgatgctggcctggacctgaagggcacctgcatcagcgagagtgaagaatgtgacttcagcaccgtcatcgacaccccagctgccaactacctgagcaatggctgtgacagctatggcatgcaggaccccggggtgtcctttgtgcccaagaccctgcccagcaaagaagattctgtgacagaggagaaggagattgaggagagcaagtctgagtgctacagcaacatctatgagcagagaggaaatgaggccacagagggcagcggcctgctgctgaacagcactggagacctgatgaagaagaactacctgcacaacttctgcagccaggtgcccagcgtgctgggccagagcagccccaaggtggtggccagcctgcccagcatctctgtgccctttggaggagcccggcccaagcagcccagcaacctgaagctgcagatccccaagcccctgagtgaccacctgcagaatgacttccctgccaacagcggcaacaacaccaagaacaagaatgacatcctgggcaaggccaagctgggagaaaattctgccaccaacgtgtgcagccccagcctgggcaacatcagcaatgtggacaccaatggagagcacctggagagctatgaggccgagatcagcacccggccctgcctggccctggccccagacagcccagacaatgacctgcgggccggccagtttggcatcagcgccaggaagcccttcaccaccctgggggaggtggcccctgtgtgggtgcctgacagccaggcccccaactgcatgaagtgtgaggcccgcttcaccttcaccaagagaagacaccactgccgggcctgtgggaaggtgttctgtgccagctgctgcagcctgaagtgcaagctgctgtacatggacaggaaggaggcccgggtgtgtgtgatctgccacagcgtgctgatgaatgcccaggcctgggagaacatgatgtctgccagcagccagagccccaaccccaacaacccagctgagtactgcagcaccatcccccccctgcagcaggcccaggccagcggggccctgagcagccccccacccaccgtgatggtgcctgtgggcgtgctgaagcaccctggagctgaggtggcccagccccgggagcagaggagagtgtggtttgctgatggcatcctgcccaatggagaggtggctgatgctgccaagctgaccatgaatggcaccagcagcgctggcaccctggccgtgtcccatgaccctgtgaagcctgtgaccaccagccccctgcctgctgagacagacatctgcctcttcagcggcagcatcacccaggtgggcagccctgtgggcagcgccatgaacctgatcccagaagatggcctgccccccatcctgatcagcactggagtgaagggggactatgctgtggaggagaagcccagccagatctctgtgatgcagcagctggaggatggcggccctgaccccctggtgtttgtgctgaatgccaacctgctgtccatggtgaagatcgtgaactacgtgaacaggaagtgctggtgcttcaccaccaagggcatgcatgctgtgggccagagcgagatcgtcatcctgctgcagtgcctgcctgatgagaagtgcctgcccaaggacatcttcaaccactttgtgcagctgtacagagatgccctggccggaaatgtggtgagcaacctgggccacagcttcttcagccagagcttcctgggcagcaaggagcacggcggcttcctgtatgtgaccagcacctaccagagcctgcaggacctggtgctgcccaccccaccctacctgtttggcatcctgatccagaagtgggagaccccctgggccaaggtgttccccatccggctgatgctgcggctgggcgctgagtaccgcctgtacccctgccccctcttctctgtgcgcttcaggaagcccctgtttggagagaccggccacaccatcatgaacctgctggccgacttcaggaactaccagtacaccctgcctgtggtgcagggcctggtggtggacatggaggtgaggaagaccagcatcaagatccccagcaaccgctacaatgagatgatgaaggccatgaacaagagcaatgaacatgtgctggccggcggggcctgcttcaatgagaaggctgacagccacctggtgtgtgtgcagaatgatgatggcaactaccagacccaggccatcagcatccacaaccagcccaggaaggtgactggagccagcttctttgtgttcagcggggccctgaagagcagcagcggctacctggccaagagcagcatcgtggaggatggagtgatggtgcagatcacagctgagaacatggacagcctgcggcaggccctgcgggagatgaaggacttcaccatcacctgtgggaaggcagatgctgaggagccccaggagcacatccacatccagtgggtggatgatgacaagaatgtgtccaaaggagtggtgagccccattgatggcaagtccatggagaccatcaccaacgtgaagatcttccacggcagcgagtacaaggccaacgggaaggtgatccgctggacagaggtgttcttcctggagaatgatgaccagcacaactgcctgagtgaccctgctgaccacagccggctgacagagcacgtggccaaggccttctgcctggccctgtgcccccacctgaagctgctgaaggaggatggcatgaccaagctgggcctgcgggtgaccctggacagcgaccaggtgggctaccaggccggcagcaatggccagcccctgcccagccagtacatgaatgacctggacagcgccctggtgcctgtgattcatggaggagcctgccagctgtctgagggccctgtggtgatggagctgatcttctacatcctggagaacatcgtgtag

SEQ ID NO: 339307 - DNA, 2289 bp, Artificial Sequence
  derived and/or modified sequence
atggagaactacttccaggccgaggcctacaacctggacaaggtgctggatgaatttgagcagaatgaagatgagaccgtgagcagcaccctgctggacaccaagtggaacaagatcctggacccccccagccaccggctgtccttcaaccccaccctggcctctgtgaatgaatctgctgtgtccaatgaaagccagccccagctgaaggtgttcagcctggcccacagcgcccccctgaccacagaggaggaggaccactgtgccaacggccaggactgcaacctgaaccctgagatcgccaccatgtggattgatgaaaatgctgtggccgaggaccagctgatcaagaggaactacagctgggatgaccagtgcagcgctgtggaggtgggggagaagaagtgtggcaacctggcctgcctgcctgatgagaagaatgtgctggtggtggccgtgatgcacaactgtgacaagaggaccctgcagaatgacctgcaggactgcaacaactacaacagccagagcctgatggatgccttcagctgcagcctggacaatgaaaatcggcagacagaccagttctccttcagcatcaatgaaagcacagagaaggacatgaacagcgagaagcagatggaccccctgaaccggcccaagacagagggccgctctgtgaaccacctgtgccccaccagcagtgacagcctggcctctgtgtgcagccccagccagctgaaggatgatggcagcatcggccgggaccccagcatgtctgccatcaccagcctgactgtggacagcgtcatcagcagccagggcacagatggctgcccagctgtgaagaagcaggagaactacatcccagatgaggacctgaccgggaagatcagcagccccaggacagacctgggcagccccaacagcttcagccacatgtctgagggcatcctgatgaagaaggagcctgctgaggagagcaccacagaggagagcctgcggagcggcctgcccctgctgctgaagccagacatgcccaatggaagtggaagaaataatgactgtgagcgctgcagcgactgcctggtgcccaatgaggtgcgggcagatgaaaatgaaggctatgaacatgaggagaccctgggcaccacagagttcctgaacatgacagagcacttcagcgagagccaggacatgaccaactggaagctgaccaagctgaatgagatgaatgacagccaggtgaatgaggagaaggagaagttcctgcagatcagccagcctgaggacaccaacggggacagcggcggccagtgtgtgggcctggctgatgctggcctggacctgaagggcacctgcatcagcgagagtgaagaatgtgacttcagcaccgtcatcgacaccccagctgccaactacctgagcaatggctgtgacagctatggcatgcaggaccccggggtgtcctttgtgcccaagaccctgcccagcaaagaagattctgtgacagaggagaaggagattgaggagagcaagtctgagtgctacagcaacatctatgagcagagaggaaatgaggccacagagggcagcggcctgctgctgaacagcactggagacctgatgaagaagaactacctgcacaacttctgcagccaggtgcccagcgtgctgggccagagcagccccaaggtggtggccagcctgcccagcatctctgtgccctttggaggagcccggcccaagcagcccagcaacctgaagctgcagatccccaagcccctgagtgaccacctgcagaatgacttccctgccaacagcggcaacaacaccaagaacaagaatgacatcctgggcaaggccaagctgggagaaaattctgccaccaacgtgtgcagccccagcctgggcaacatcagcaatgtggacaccaatggagagcacctggagagctatgaggccgagatcagcacccggccctgcctggccctggccccagacagcccagacaatgacctgcgggccggccagtttggcatcagcgccaggaagcccttcaccaccctgggggaggtggcccctgtgtgggtgcctgacagccaggcccccaactgcatgaagtgtgaggcccgcttcaccttcaccaagagaagacaccactgccgggcctgtgggaaggtgttctgtgccagctgctgcagcctgaagtgcaagctgctgtacatggacaggaaggaggcccgggtgtgtgtgatctgccacagcgtgctgatgaatggcaagtactag

SEQ ID NO: 339308 - DNA, 4278 bp, Artificial Sequence
  derived and/or modified sequence
atggagaactacttccaggccgaggcctacaacctggacaaggtgctggatgagtttgaacagaacgaagacgagacagtctccagtacattgttagatacaaagtggaacaaaattctggaccctccaagccataggttatcattcaacccaacactggcctcagtgaacgaatcagccgttagtaacgagagtcaacctcaattgaaggtgttctcccttgctcactctgcaccgttgactaccgaggaggaagatcattgtgctaatggccaggattgtaatctgaatcccgagattgctactatgtggatagatgagaacgctgtggctgaggatcaacttatcaaacgcaattactcctgggatgatcagtgcagtgcagttgaagtgggcgaaaaaaaatgtggaaacctggcttgtttgcccgacgaaaagaatgtgctcgtcgtggcagtgatgcataactgcgataagaggacactccagaatgatttgcaggattgtaataattacaactcacaaagcctgatggatgctttctcatgctctctggataacgagaatcggcagacagatcagttttccttctctatcaacgagtctacagaaaaggatatgaactcagaaaagcagatggaccccctgaatcgacctaaaaccgaaggacgctcggtcaatcacctgtgccccacctcatctgactcccttgcttctgtctgcagcccctcacaactgaaagacgacgggagtattggacgggatccctccatgagcgcgatcacatccctgacagtcgatagcgttatctcatcccagggcacggatggctgtcctgccgtcaagaaacaggaaaattacatccccgacgaagacctgaccggcaagattagtagccctcgaacagacctaggaagtccaaactcatttagccacatgtctgaggggatattgatgaagaaagagcccgcagaggagtcgaccaccgaagaatcactcagaagcgggctgcccttgctgctgaagcccgatatgccaaacggcagcggtagaaacaacgactgcgagcggtgttcggattgcctggtccccaatgaagtccgcgcagacgaaaacgagggatacgagcatgaggagaccttgggaaccactgagtttttgaatatgaccgagcatttctccgagtcacaggatatgaccaattggaaactgacaaaactcaacgaaatgaacgatagccaggtcaacgaagaaaaagagaagttcctacaaatttcccagcctgaggacaccaacggtgactctggggggcagtgtgtagggctggccgatgccggtcttgatctaaagggaacatgcattagcgagtcagaggagtgcgattttagtaccgttatcgacacaccagcagctaactatttgtctaacggctgcgatagctatgggatgcaagacccgggcgtcagtttcgttcctaaaactctgccatcaaaggaggactccgtcactgaagaaaaagaaattgaagagtcaaaatctgagtgctattctaacatttacgaacagaggggaaacgaggcaacagaagggtccgggctgttactgaactcaaccggagatctgatgaaaaagaattatttgcacaacttctgctctcaagtgccctccgtgctgggccagtcaagccctaaagttgtagcaagcctgcccagcattagtgtccctttcggcggtgcacggcccaagcagccttctaacctgaaattgcagattccaaaacctctgagcgatcacctgcaaaacgacttcccagctaattcaggtaacaacacaaagaataagaacgacatactggggaaagccaagttgggcgagaacagtgcgaccaacgtatgctcgccttccctgggaaatatctccaacgtcgacaccaatggggagcacctcgagtcctatgaagccgaaattagcaccaggccatgtttagcattggcgcctgattcacccgacaacgacctgcgagctggacagttcggtatcagtgcacggaaaccgtttactaccctgggggaggtggcccccgtatgggttccagatagccaggcccctaattgcatgaaatgcgaagcgagattcaccttcactaaaaggcgacaccactgtagagcttgtggcaaagttttctgcgcttcctgttgcagtctgaagtgtaaattgctctatatggaccgcaaggaggcccgggtctgcgtcatatgccatagcgtgctgatgaatgcacaagcgtgggaaaacatgatgtccgcctcatcgcagagccccaacccaaacaacccggccgagtattgcagcacgatcccccccttgcagcaggctcaggcttccggcgccctgtcctctccgccccctactgtaatggtgcctgtaggggtgttgaagcaccccggcgccgaggtggcccaacctcgggaacagagaagagtttggtttgcagacgggatactcccaaacggtgaggtagcggacgccgccaagttgaccatgaacggcacctcttccgcgggaacactggccgtcagccacgatcccgttaagccagtcaccacgtcccccctgcctgctgaaaccgacatttgtctgttctcagggtccataacccaggttggttcgcccgtggggtccgctatgaatcttattcctgaagatgggcttcctcctatactgatctccaccggagtcaagggggattacgctgtggaagagaagccaagccaaatcagcgtgatgcaacagctcgaggatggcggacccgaccccctggtgttcgtcttgaatgctaatctgctgtccatggtgaagatcgtcaactacgtaaatcgtaagtgctggtgttttactactaagggaatgcatgctgtgggtcaaagcgagatcgtgatcctactgcagtgcctgccagatgagaagtgtctccctaaggatatcttcaatcatttcgtgcagctatatagagatgccctggcagggaatgtggtctccaaccttggccacagcttttttagccaaagtttccttgggagcaaggagcacggcggttttctgtatgttacttctacataccagtccctacaggatctggtactccctacaccaccgtatcttttcggcatccttattcagaagtgggaaacaccttgggcaaaagtattccccattcggttgatgctgagactcggagccgaatatcgactttacccttgtcccctattttcggtccggtttcggaagcctctgttcggggagactggccacacgatcatgaatctgctcgcagactttcggaactatcagtacaccctgcccgtggtgcagggcttagtcgttgacatggaagtaagaaaaacgtcaatcaagattccaagtaacagatataatgagatgatgaaagcgatgaacaagtccaatgaacacgtcttagccgggggggcttgttttaacgaaaaagccgacagccatctggtttgcgtgcagaacgatgacggtaactatcagacgcaggctatcagtatacataaccaaccgcgtaaagtgaccggagcttctttcttcgtattctctggtgccctcaaatctagcagcggatacctcgcgaagtcttcaattgtggaggacggtgtgatggtccaaatcactgccgagaacatggatagcctgcgccaagcccttcgtgaaatgaaggattttactattacctgcgggaaagcagatgccgaggagccccaagagcacatacatatacagtgggtggacgatgataagaacgtgtccaagggggtcgtgtccccaattgacgggaagagcatggaaaccatcaccaatgtcaagatattccacggatccgagtacaaggccaacggcaaagttataagatggaccgaggtcttcttcctggagaatgatgaccagcacaattgcctctcagatccggccgaccacagccgcctaaccgagcacgtcgcaaaagcattttgtctagccctctgtcctcatctcaaactgcttaaagaagacggcatgactaagctgggattgagagtgacattagattctgaccaagtgggataccaagctgggtccaatggccagccgttaccatcccagtacatgaatgacctcgattctgccctggttcccgtcatccacggtggggcctgccaactgtctgaaggccccgtcgtgatggaacttatcttttacatcctcgagaatatcgtgtag

SEQ ID NO: 339309 - DNA, 2289 bp, Artificial Sequence
  derived and/or modified sequence
atggagaactacttccaggccgaggcctacaacctggacaaggtgctggacgaatttgaacagaatgaggacgagaccgtctccagtactctgctggacactaagtggaacaagatcctcgatcccccatctcaccgtctcagctttaatcctactctggctagcgtcaatgagtccgcggtctccaatgagagccagccacagctgaaggtgttttccctagctcacagcgccccactgacaaccgaagaggaagaccactgtgccaacggacaagactgtaatctgaatccagaaattgctaccatgtggattgacgagaacgctgtcgccgaggaccaattgataaagcgtaactattcctgggacgatcagtgctccgccgtcgaagtaggagaaaaaaaatgtgggaatcttgcgtgtcttccagacgagaagaacgtgcttgtggtggccgtgatgcacaattgtgataaacgtaccctgcagaatgatcttcaagactgtaacaattacaactcccagtcgctgatggacgccttttcttgttctctagataacgagaatcggcagacggaccagtttagcttctcgatcaatgagtcaaccgaaaaggacatgaactctgagaagcagatggatcccctaaatcgacccaagactgaaggccgctctgtgaatcatctgtgtcccacaagttcagacagcttagcgagcgtgtgctctccctcacagctaaaagatgatggatcaattggacgcgatccatcaatgtctgccatcacttctctgactgtggactccgtgatctcttcgcaggggacagacggttgccctgcagtgaagaaacaggagaactacatccctgacgaagacctgactggcaagatatcaagtccacgcacggatctcgggtccccaaattctttcagtcacatgtccgaagggatcttgatgaagaaagagccagccgaagagtctactaccgaggagtcattgcgatctgggctgcctttacttctgaaaccagacatgccgaatgggtcaggtcggaataacgattgtgaaagatgtagtgactgcctggtgcctaacgaggttcgtgcggatgagaacgaggggtacgaacacgaggagaccctcgggacaactgagtttttaaatatgacagagcattttagtgagtcccaggatatgacaaactggaagctgaccaagctgaatgagatgaacgatagccaagtgaatgaagaaaaggagaaattcctgcagatttcccagcctgaggatactaacggagactcaggggggcaatgcgtgggattggcagacgccggattggatctgaagggcacctgtatctcagaaagcgaggaatgcgacttcagcaccgtgattgacaccccggcagccaattaccttagcaacggctgcgatagctacgggatgcaggatccaggtgttagcttcgtgcctaagacactcccttccaaggaggacagtgtaacagaggagaaggagatcgaggagtccaaatcagagtgctactcaaacatctacgagcagcgcggcaacgaggccaccgagggctcaggactcctgctgaatagcacgggagacttgatgaagaagaactaccttcataatttctgctcccaagtgccttctgtgctcgggcaatcgagtcctaaagtcgttgcttccctaccgagtatttcagttccctttggcggcgcgcggcccaagcaacctagtaatctcaaactccagatccctaaacctctttccgatcacttgcagaatgattttccagctaattcaggcaacaatactaaaaacaagaacgacatcttggggaaggcgaaactaggagagaactcagcaacaaatgtgtgttcgccctcactcggcaacattagcaacgtcgatactaacggtgaacacctggaaagttacgaggccgaaatttcaacccgcccatgcctggctttggcccctgacagccctgacaatgatctgcgtgctggtcagttcggtatcagcgcacggaagcctttcaccacgctgggagaggtcgccccagtctgggtacccgactctcaggccccaaattgtatgaaatgcgaagctaggttcacttttaccaaacgcagacaccactgcagggcgtgcggaaaggttttttgcgcatcatgttgctctctgaagtgcaagctgttatacatggaccggaaagaggctagagtgtgtgtcatatgccactcagtgctcatgaacggaaagtactag

SEQ ID NO: 339310 - DNA, 4278 bp, Artificial Sequence
  derived and/or modified sequence
atggagaactacttccaggccgaggcctacaacctggacaaggtgctagatgagttcgagcaaaacgaagatgaaactgtgtcctctacactcctggacacgaagtggaataagatccttgacccaccgtcgcatcggctcagcttcaaccccaccctggcctccgtgaacgagagtgccgtgagcaatgagagccagccgcagctgaaggtattttccttggctcactcagcccccctcaccactgaagaggaggaccactgtgccaatggccaggattgcaatctgaatcccgagatcgctaccatgtggatcgatgaaaacgccgtcgcggaggatcaacttattaagagaaattacagttgggacgaccagtgttccgccgtggaagttggcgagaagaagtgcgggaatttggcttgtctccccgatgaaaaaaatgtgttggttgttgctgtgatgcataactgtgacaaaagaactctgcagaacgacctacaggattgcaataactacaactctcaatccttgatggatgctttctcttgcagtctagacaatgaaaatcgccagaccgatcagttctctttctccattaacgaatcaacagaaaaagacatgaatagtgagaagcaaatggacccgctgaaccgacccaagacggagggcagaagtgttaaccatctgtgtccaacatcatccgattcactggccagcgtctgctcaccgtcccagttgaaagacgacggctccatcggcagagacccttctatgtctgccattaccagcctgacagtggatagcgtgattagttctcagggtacggacgggtgccctgctgtcaagaagcaagaaaattacattcctgacgaagatctcactggtaaaatttcctcgccacgaacagacctggggagtccaaacagttttagccatatgagcgaaggcatccttatgaagaaagaaccggctgaagaatccaccaccgaggaaagtcttcgatccggactgcccctgttactgaagccggatatgcctaacggatcaggcaggaacaacgattgtgaacgctgttctgactgtctcgtgcccaacgaggttagagccgatgagaacgaaggatatgagcatgaggaaacactgggaaccacagagtttctgaacatgaccgaacacttcagcgagagccaggacatgacaaactggaaactcacgaagctcaatgaaatgaacgattctcaggtgaatgaagagaaggagaagtttttgcagatctcgcaacctgaggatacaaacggtgatagcggcggccagtgcgttggcctggcggatgcaggccttgatcttaaggggacatgcattagtgagtctgaggagtgcgacttttctaccgttattgacaccccagccgccaactacctgtcaaatggatgtgacagctacggcatgcaagaccccggcgtgtctttcgtacccaaaaccctgccatctaaggaggattctgtgacagaggagaaggaaatcgaagaatccaaatcagaatgttatagcaacatttacgagcagcgaggaaacgaggctacggagggcagcgggttgcttttaaacagcaccggggacctgatgaaaaaaaattatctgcacaatttctgtagtcaggtgccctcagtgctaggccaatcctcacccaaagtagtagccagcttaccttccattagcgtcccatttggcggagccagaccgaaacagcccagcaacttaaagctgcagatccctaaacctcttagtgatcacctccagaatgattttccagcaaacagcggcaataacaccaaaaataagaacgacatattgggcaaggccaagctcggcgaaaactctgctacaaacgtgtgcagcccaagcctgggaaacatctctaatgtggacaccaatggagagcacctggaatcctatgaagcggaaataagcactcggccctgtctggcactggctcccgactcccccgacaacgatctcagagcaggccagtttggtatctccgcacgaaagcccttcactactctaggtgaggtagcccctgtgtgggtgccagattcccaggctccaaattgcatgaaatgcgaagccaggttcacctttacgaaacgccgtcatcactgcagggcttgtgggaaagtgttttgtgccagttgctgcagtctgaaatgcaagctgctttacatggacagaaaggaggcccgggtgtgtgtcatctgtcactcagtgttaatgaatgctcaagcctgggagaacatgatgagcgcctcctctcaaagcccgaacccaaacaatcctgcagaatattgcagcaccatcccacctcttcagcaggcccaggcttctggtgccctgtctagccctcctcctacagtgatggtgcctgtcggggttctgaaacatccaggcgctgaggtcgctcagccaagggaacaacggagagtatggtttgccgacgggattttgccaaatggtgaggtcgccgatgccgccaaactcactatgaacggaaccagctctgccggcactctggctgttagtcacgaccccgtgaagccagtaactaccagccccttaccggctgaaacggatatctgtctattctccggttcgataactcaggtgggctctccggtgggaagtgcgatgaacctgatacccgaggatgggctgcctcctattctgatctctaccggagtaaaaggcgattacgccgtggaggaaaagccctcacagatatcagtgatgcaacagctggaagacggcggtcctgaccccctggtgttcgtgctaaatgcgaacctactgtctatggttaagattgtgaactatgtgaatcggaagtgttggtgtttcacaacaaaaggtatgcacgcagtgggccaaagtgagattgtgattcttcttcaatgcttacctgatgaaaaatgcttacctaaggacatttttaaccacttcgtccagctgtatcgcgacgcgctggccgggaatgtggtcagcaacctgggccactcctttttctcccagagcttcctgggaagtaaagagcatggtggttttctgtacgtaacgtctacctaccagagccttcaggacctggtgctcccaacccccccctacctgttcggcattctgattcagaagtgggaaactccttgggcaaaagttttcccaattagactgatgctgcgattgggagccgaatataggctttatccgtgccccctcttcagcgtgcggtttaggaaacccctctttggagaaaccggtcacacaatcatgaacttgctcgctgattttcgaaattaccagtacaccctgcccgttgtacagggtctcgtggtggatatggaggttaggaaaacatcaataaaaattccctcaaataggtacaacgagatgatgaaggccatgaataaatcaaacgagcacgttttggctggaggcgcctgctttaatgaaaaagccgactctcatctggtatgtgtgcagaacgatgatgggaattaccagactcaggcaatttccattcacaatcaacctcggaaagttacgggggcctcctttttcgtgttcagcggtgcactcaagagctcttccggctacctcgctaaatcttctatcgtagaagatggggtgatggtacaaatcacagcggagaacatggactctctcagacaggccctgagagagatgaaagattttacaattacgtgtggcaaggccgacgcagaggagcctcaggagcacatccatatccagtgggtggatgatgacaagaacgtgtccaagggagtggtgtctccaatcgatggaaagtctatggagacaatcacaaacgttaaaattttccacggcagcgagtacaaggcaaatggcaaagttatccgctggacagaggtgttttttcttgaaaatgatgaccaacacaactgcctgagtgacccggcggaccactcccgactaaccgagcacgtggccaaagccttctgtctagccctatgcccccatttgaaactcctgaaggaagacggtatgacaaaactcgggttgagagtgacgttggacagcgaccaggttggataccaagccggcagcaatggtcagcctctcccgagccagtatatgaacgacctggatagtgccctggtccctgttatccatggaggcgcctgtcagctgagcgagggaccagtggtgatggagctcatcttttatatactggagaacatcgtttag

SEQ ID NO: 339311 - DNA, 4278 bp, Artificial Sequence
  derived and/or modified sequence
atggaaaactattttcaagccgaggcctataacctggacaaggtgcttgacgagttcgagcaaaacgaagacgagactgtgtcctcaaccctgcttgatacaaaatggaataagatcctggacccgccaagtcatcgcctctccttcaacccaacactggcctctgtgaacgagtcagctgtttctaatgaatcccagccgcagttgaaggtctttagtctcgcacacagtgccccactgaccaccgaggaggaagaccactgcgccaatgggcaggactgtaacctcaatccagaaattgccaccatgtggatagacgagaacgcggtcgcagaagaccagctgattaagcggaattatagctgggatgaccaatgttcagccgtggaagtcggcgagaagaagtgcgggaacctggcgtgtctgccggacgagaaaaacgttctcgtggtagccgtgatgcacaattgtgataaacgaacattgcagaacgatcttcaggactgcaacaactataactctcagagtctcatggacgcgttctcctgctcgttagacaacgagaatagacagactgatcagtttagcttttccattaacgagagtactgagaaggacatgaattccgagaagcaaatggacccccttaaccgtcccaaaacagagggcaggtcagtgaatcacttgtgccctacatcttctgatagtctcgctagcgtgtgcagcccttcacagctgaaggatgatggctctataggcagggatcccagcatgtccgctattaccagcctgacagtggactctgtgatctcatcccagggcacagacggatgccccgctgtgaagaagcaggaaaactacatccccgatgaggacctgactggcaagatttctagtcctcgaaccgacctgggttcgcctaacagctttagccacatgagcgaggggatcctcatgaaaaaagaacccgcagaagaatctacaaccgaggaaagcctccggtcaggtcttcccctgctcctaaagccggatatgcccaacgggagtggccgaaacaacgattgcgagaggtgttcggactgtctggtgccaaacgaagtgcgggctgatgaaaatgagggatatgagcacgaggaaacgctaggcaccactgaattcttgaacatgaccgaacactttagcgaatctcaggatatgaccaattggaagttgactaaattgaacgaaatgaatgacagccaggtcaacgaggagaaagaaaagtttctgcagatttctcagccagaggacacaaatggcgattccggagggcagtgcgtaggcctggccgacgccggactcgatttgaaaggaacatgcatttccgaatctgaggaatgcgacttcagtacagtaatagatactccagccgctaattatttgtcaaacgggtgcgatagttacggtatgcaggatccgggagtgtctttcgtaccgaaaacccttccttctaaagaggactctgtcaccgaagagaaggagattgaggagtcaaaaagcgaatgttattcgaatatatacgagcagaggggcaacgaggccaccgaagggtcagggcttctattaaattctacgggcgatttaatgaagaagaattatctgcacaacttttgctcacaggtcccgtctgtgctaggccaaagctctcctaaggtggtggcctctctgccgtccatcagcgtgcctttcggaggggcacgccctaagcaaccttcaaatctcaagctgcagatcccgaagccattgtctgatcacctgcagaatgacttcccggcaaatagcggcaataatactaaaaataaaaacgacattcttggtaaggctaaactgggtgagaattcagcaactaacgtgtgttctcctagtttaggtaacattagcaatgtggacaccaatggagagcacttagaatcctacgaagctgaaatctccacccggccttgcttggctcttgccccagactccccggataacgacctccgagctggtcagtttggaatttccgccaggaaacccttcactactcttggtgaggtcgctcccgtttgggttcccgactcccaagcccctaattgtatgaagtgcgaggcaagattcaccttcacaaagcgcagacaccattgtagagcctgcgggaaagtcttctgcgcttcctgctgttcgctcaagtgcaagctcttgtacatggatcggaaggaggcacgggtgtgcgtaatttgccacagtgtgctgatgaatgcccaggcatgggagaacatgatgagtgcctctagccaatcccccaacccaaataaccccgctgagtactgtagcactatccctcccctgcagcaggctcaggccagtggcgctctgagctcaccaccgcctactgtgatggtccctgtcggtgttcttaagcacccgggagctgaagttgcccagcctagagaacagaggagggtttggttcgccgacggaattctgccaaatggtgaggtggcagatgcagctaaactgaccatgaatggcaccagcagtgccggaacactcgctgtttcccatgatccagtcaaacccgtaaccacctccccgttaccagcagaaacagacatctgtctgtttagtggctctataactcaggtcgggagtccagtgggtagtgccatgaacttgatcccggaggacggtcttcctccaattcttatcagtactggagtcaaaggagattacgccgtcgaagaaaaaccatctcagatcagcgtgatgcagcaactcgaagacggcggacccgaccccttggtttttgttctgaatgcaaatttactcagcatggtgaagattgtcaattacgtgaatcggaagtgttggtgcttcactaccaagggaatgcacgcagtggggcagtccgagattgtgatactgctccagtgccttccagacgaaaagtgcttacccaaagatatttttaatcactttgtccagctctatagagacgctttggctggcaacgtcgtgtcaaatctaggccattccttttttagccagtcctttctcggaagtaaagagcatggaggttttttatacgtgaccagtacctatcagtctttacaagacctggtcttgcccacccccccttacctctttggcatcttgattcagaaatgggagacaccttgggccaaagtttttccaataaggttgatgctgcggttaggcgctgagtatcggctgtacccttgcccactgttctctgtccgatttcgaaaaccgctgtttggggagaccggacacaccatcatgaacctgctggcggatttcaggaattaccaatatactctgcccgtcgtgcaaggtctggtggtagacatggaggtgcgcaagacatctataaaaatcccatctaaccgctataatgagatgatgaaggcaatgaataaatccaatgaacacgtgctcgcgggtggggcatgtttcaacgagaaggccgacagtcatctggtttgtgtgcagaacgatgatggaaattaccagacacaggccatctctatacataatcaacccagaaaagtgacgggcgcatcattcttcgttttctccggcgctctgaagagtagcagcgggtatctggcaaaatcttctatagtggaggacggagttatggtgcagatcactgccgagaatatggactccctccgccaggcactgagagaaatgaaggacttcaccattacctgtggcaaggctgacgccgaggagccccaggagcatatccacatccagtgggttgacgatgataaaaacgtctccaagggcgtagtgtctccaattgatggaaaaagcatggaaaccatcacaaacgtcaagatctttcacgggagcgagtataaggccaatggcaaggtgatccgatggaccgaggttttcttcctggagaacgatgaccagcataattgtctgtccgatcccgcagaccattctcggcttaccgagcacgtggccaaggccttttgcctggcattgtgcccacatctaaagttgttaaaggaagatggcatgactaagctcggactgcgcgtcacacttgattcggaccaggtaggctaccaagccggaagcaacgggcaaccattgccgagtcagtacatgaatgacttggactccgccctggtgcctgtaattcacgggggagcatgtcagctgagcgaggggccagtggtgatggaactgatcttctacattctggagaacatcgtgtag

SEQ ID NO: 339312 - DNA, 2289 bp, Artificial Sequence
  derived and/or modified sequence
atggaaaattactttcaggctgaagcctacaacctcgacaaagtcctcgacgaattcgaacagaacgaagatgagactgtctcctctacgctcctcgacactaagtggaataagattctggatccacccagccatagattatcgttcaaccctactctggcatctgtgaacgaaagtgccgtgagtaatgagtcacagccccagcttaaagtcttctcgctggcccacagcgctcctctgacaacggaggaagaagatcattgcgccaacggacaagactgtaacctgaaccccgaaatcgcaaccatgtggatcgatgagaatgcagtggccgaggaccagcttatcaagcgtaactattcatgggatgatcagtgcagtgctgtcgaggtcggagagaagaagtgcggcaatctggcatgcttgcctgacgagaagaatgtgctcgtggtcgcggttatgcataattgcgacaagcgaacgcttcagaacgatcttcaggattgcaataactataattctcagagcctgatggatgccttctcctgttctctagacaacgagaacaggcagaccgatcagtttagttttagcatcaacgaatctactgaaaaagacatgaactctgagaagcagatggaccctctgaataggcctaaaaccgaggggaggtccgttaatcatctatgccctacctcctcggacagtttagccagcgtgtgcagcccttctcagctgaaggatgatggaagcattgggagagacccttccatgtctgcgatcacatccttaacagtggattccgtgatttcttcccagggaaccgacggctgccctgctgtgaagaagcaagagaactatataccagacgaagacttgaccggcaaaataagctctcctaggacggacctaggttcaccgaattccttcagccatatgtcagagggtatcctgatgaaaaaagagcccgcagaagagtcgaccacggaggagagcctgcgcagcggactgcctctgctcctaaagccagatatgcctaacgggagcggtaggaataatgattgcgaaaggtgctctgattgcctagtaccaaatgaagtgcgggctgatgaaaatgaaggttacgagcacgaagagacacttggaaccacagagttcttgaatatgactgagcatttttccgagtctcaagacatgacgaattggaaattaacgaaactcaatgaaatgaacgactcccaggtgaacgaagaaaaggagaaattcctccagatttcccaaccagaggacacaaacggtgacagcggcggtcagtgcgtcggcctagccgatgccggattggacctgaaggggacatgcatctccgaatcagaagagtgtgatttctcaacggtgatagacacccctgctgcaaattacctttccaacgggtgtgattcctacgggatgcaggatcctggcgtttcttttgtccctaaaacactgccttccaaagaagattcggtgaccgaggagaaagaaatcgaagagagtaaatcggaatgttattctaatatatacgagcaaagaggaaatgaggccaccgaaggctccgggctgctgctgaactccacaggagatctgatgaaaaaaaactatctccacaacttctgcagccaggtgcccagtgtgcttggtcagagtagccccaaggtagtggcctcgcttccgtccatctctgtgccttttgggggagccagaccaaaacagccctctaaccttaagctacaaattcctaagcctctgagtgatcatctccagaatgatttcccggctaacagtggtaataatactaagaacaaaaacgacatcctgggcaaagccaagttaggagagaactccgcgactaatgtgtgctctcccagtcttggaaatatctcaaacgtcgacaccaacggcgaacacttagaatcctacgaggcagaaatctccacacggccatgcctggccttagccccagattcacctgacaatgacctgcgtgccggacagttcggaatctcagcccgtaaaccgttcaccacgctgggggaagttgctcctgtgtgggtccctgatagccaggcccctaactgcatgaaatgtgaggctcgcttcaccttcaccaaaaggaggcatcactgcagggcttgcggaaaagtgttttgtgcttcttgttgttctctcaaatgtaaattgctgtatatggatagaaaagaggcccgtgtttgcgtcatttgccactccgtactgatgaatggaaagtattag

SEQ ID NO: 339313 - DNA, 4278 bp, Artificial Sequence
  derived and/or modified sequence
atggaaaattactttcaggcggaagcatacaacctggataaagtcctggatgaattcgaacaaaacgaggatgaaactgttagctctacactacttgacacgaaatggaacaagatcctcgaccctccatctcacagattatcattcaatccgacactggcttcggtcaatgagtcggctgtgagtaatgagagccagccccaactgaaggtattctcactggcccacagcgccccactcacaacagaggaggaagaccactgcgccaacggtcaggactgcaacctgaatcccgaaattgcaaccatgtggattgatgaaaatgcagttgcagaggatcagcttattaaaaggaattacagttgggacgatcaatgtagtgccgtggaggtgggcgagaagaagtgcggcaatctagcctgtctgcctgatgagaaaaatgtgctggtcgttgctgtgatgcacaactgcgataagagaacactgcagaacgacctgcaggactgtaacaactataactctcagtctctcatggacgcgttctcatgctcactggacaacgagaatagacagactgaccaattttcattctctatcaatgagtcgactgagaaggacatgaacagtgaaaagcagatggatccgctgaaccgacccaaaactgagggacgctccgtgaaccacctctgccccacctcatctgactcccttgcctccgtctgcagtcccagccagctcaaggacgatggctctatcgggcgtgacccatcgatgagtgcaattacctctctgaccgtggactcggttatttcctctcagggcaccgatggatgtccggcagtgaagaagcaggagaactacatcccagacgaagacttaactggaaagataagctcccccaggacggatttaggttcccccaactctttctctcatatgtccgagggcatactgatgaagaaggaaccagctgaagaatctacgacagaagaatctctccggtcaggactgccgttgctcctcaaaccagacatgccaaacggttctgggaggaataacgattgtgagaggtgtagtgactgtctcgtgccaaatgaggttagggccgacgagaacgagggttatgaacatgaagagacacttggcacaaccgaattcttgaacatgaccgaacatttttccgaatcccaagatatgaccaactggaaactcacaaagctgaacgaaatgaacgatagtcaggtgaacgaagagaaggagaagttcctgcagatatctcaacccgaagacacaaacggcgatagcggaggtcagtgcgtgggccttgctgatgccggtcttgatttgaaaggaacctgcatttctgaaagtgaggagtgcgacttttctacagtgatagacactcctgctgccaactatctcagcaatggctgtgactcatacggcatgcaggacccaggggtttcattcgtgccgaaaactctgccgtccaaggaagactctgtcactgaggaaaaggagatcgaggagagtaaatcggagtgctactctaatatatatgaacagcgtggtaatgaagcgacagagggctctgggctactcctgaattcaaccggggacttgatgaaaaaaaactatcttcataatttctgctctcaagttccatcagtccttgggcaatcttcacccaaggtcgttgcatctctcccatcgatcagtgttccctttggcggtgccagacctaagcagccctccaatctaaaactgcagattcctaaaccgctcagtgaccacctgcagaatgattttcctgctaacagcggcaacaataccaaaaataagaatgacatccttgggaaggctaagttaggcgagaatagcgccaccaatgtctgcagtccctcactcgggaatatctccaatgtggacactaacggcgagcatctggagtcttacgaggccgagatttcaacccgaccttgcctggccctcgccccagatagtcctgacaatgaccttcgtgccggacaattcggtatcagcgcgaggaagccttttaccacgttgggagaggtcgcccctgtgtgggtccctgattcccaggcaccaaactgcatgaagtgtgaagcgaggttcacctttacaaagaggcgtcaccactgtagggcttgcggaaaggtcttttgtgcatcatgttgttctctcaaatgcaaacttctctacatggatcgtaaagaagctcgtgtttgcgtaatctgtcacagcgtgcttatgaatgcgcaggcttgggaaaacatgatgtcggcaagctcccaatcgcctaaccctaacaatcctgcggagtattgctctacgatccctccattgcagcaggcacaggcttccggagctctcagctccccacctccgactgtcatggtaccagtgggggttcttaaacacccaggcgcagaggtggcccaacctagagagcagcgccgagtgtggttcgctgacgggatcttgcccaacggagaagtggctgacgccgcaaagctcaccatgaacggaacgagcagcgccggaactctcgccgtctcgcacgacccagtaaaacccgttacaacctctcctcttcccgcagagacagacatttgtctgttctccggctctatcactcaggtgggaagtcccgtcggcagcgccatgaatcttattcccgaggacgggctacctccaatccttattagtaccggagtgaaaggagattacgccgtggaggagaaaccgagtcaaattagtgttatgcagcagctggaggacggcggacccgatccgttagtatttgttttaaatgctaatcttctctctatggtcaagatcgtgaactatgtcaaccgcaagtgttggtgctttaccacgaaaggcatgcacgcagtcggacagagcgaaattgtcatcctgctgcagtgcttgccagacgagaaatgtttgcctaaggacatcttcaaccacttcgtgcagttatatagagatgcacttgctggcaatgttgtaagtaatctcgggcatagtttcttctcgcaaagcttcctgggtagtaaggaacacggcggatttctttatgtgacatcgacctatcaatcacttcaggatctcgttctgccgactccgccatatctgtttggcatcctcattcagaaatgggagactccgtgggctaaggtctttccaatccgcctcatgctgaggttgggggctgagtaccgactgtacccctgccccctcttctcggtccggttccgcaaacccctgttcggagagactggtcataccatcatgaatcttctcgctgattttcgtaactaccagtacactttacccgtggtccaaggcctcgttgtggatatggaagtgagaaagaccagcataaagattccaagtaacagatataatgagatgatgaaggctatgaataaatctaatgagcatgtgctagctggaggagcatgcttcaatgagaaggctgactcccatttggtttgtgtgcagaatgacgatggaaattaccaaactcaggccatcagcatccataaccaaccaaggaaggttactggcgcttcgttcttcgtcttctctggcgcactgaaatcctccagcggataccttgctaagtctagcattgtcgaagacggtgtgatggtacagatcactgctgagaacatggactctttgcggcaggccctcagagagatgaaggacttcacgatcacttgcggcaaggcagatgccgaggaaccacaggagcacatccacatccagtgggttgacgacgacaagaatgtgtcaaagggtgtagtgagtcctatcgatggaaagtccatggagaccatcactaacgtcaaaatattccatggatccgagtataaggccaacggcaaagtcattagatggacggaagtgttctttctggagaatgatgaccagcataattgtctgtcagaccccgcagatcactctcggttaaccgaacatgtggctaaagcgttctgtttggccctgtgtccacatctgaaattattaaaagaagacggtatgacgaaattgggtctccgcgtcacattagatagtgaccaggtcgggtatcaggcaggaagtaatggccagccactgccttctcagtatatgaacgatttagatagcgctttggtgccagttatccacgggggtgcctgccagctgagtgaaggtcccgtggtcatggaattaatcttctatatcctagagaacatcgtgtag

SEQ ID NO: 339314 - DNA, 4914 bp, Artificial Sequence
  derived and/or modified sequence
atgctgaagcggaggcggccgctgctcgaggatcaaacagagcatactgaatcagcaggactggctggtggtgcagcagacatcatgagtaagcaccgagaagtctgttccttatcacgtgtgtaaggggaaaaaggtttaaacaagtctcttaagtggtgtttcctcaccgatggagaattacttccaagcagaagcttacaacctggacaaggtgttagatgaatttgaacaaaacgaagatgaaacagtttcttctactttattggatacaaagtggaataagattctagatcccccttctcaccggctgtcatttaaccctactttggccagtgtgaatgaatctgcagtttctaatgagtcacaaccacaactgaaagtcttctccctggctcattcagctcccctgaccacagaggaagaggatcactgtgctaatggacaggactgtaatctaaatccagagattgccacaatgtggattgatgaaaatgctgttgcagaagaccagttaattaagagaaactatagttgggatgatcaatgcagtgctgttgaagtgggagagaagaaatgtggaaacctggcttgtctgccagatgagaagaatgttcttgttgtagccgtcatgcataactgtgataaaaggacattacaaaacgatttacaggattgtaataattataatagtcaatcccttatggatgcttttagctgttcactggataatgaaaacagacaaactgatcaatttagttttagtataaatgagtccactgaaaaagatatgaattcagagaaacaaatggatccattgaatagaccgaaaacagaggggagatctgttaaccatctgtgtcctacttcatctgatagtctagccagtgtctgttccccttcacaattaaaggatgacggaagtataggtagagacccctccatgtctgcgattacaagtttaacggttgattcagtaatctcatcccagggaacagatggatgtcctgctgttaaaaagcaagagaactatataccagatgaggacctcactggcaaaatcagctctcctaggacagatctagggagtccaaattccttttcccacatgagtgaggggattttgatgaaaaaagagccagcagaggagagcaccactgaagaatccctccggtctggtttacctttgcttctcaaaccagacatgcctaatgggtctggaaggaataatgactgtgaacggtgttcagattgccttgtgcctaatgaagttagggctgatgaaaatgaaggttatgaacatgaagaaactcttggcactacagaattccttaatatgacagagcatttctctgaatctcaggacatgactaattggaagttgactaaactaaatgagatgaatgatagccaagtaaacgaagaaaaggaaaagtttctacagattagtcagcctgaggacactaatggtgatagtggaggacagtgtgttggattggcagatgcaggtctagatttaaaaggaacttgcattagtgaaagtgaagaatgtgatttctccactgttatagacacaccagcagcaaattatctatctaatggttgtgattcctatggaatgcaagacccaggtgtttcttttgttccaaagactttaccctccaaagaagattcagtaacagaagaaaaagaaatagaggaaagcaagtcagaatgctactcaaatatttatgaacagagaggaaatgaggccacagaagggagtggactacttttaaacagcactggtgacctaatgaagaaaaattatttacataatttctgtagtcaagttccatcagtgcttgggcaatcttcccccaaggtagtagcaagcctgccatctatcagtgttccttttggtggtgcaagacccaagcaaccttctaatcttaaacttcaaattccaaagccattatcagaccatttacaaaatgactttcctgcaaacagtggaaataatactaaaaataaaaatgatattcttgggaaagcaaaattaggggaaaactcagcaaccaatgtatgcagtccatctttgggaaacatctctaatgtcgatacaaatggggaacatttagaaagttatgaggctgagatctccactagaccatgccttgcattagctccagatagcccagataatgatctcagagctggtcagtttggaatttctgccagaaagccattcaccactctgggtgaggtggctccagtatgggtaccggattctcaggctccaaattgcatgaaatgtgaagccaggtttacattcaccaaaaggaggcatcactgcagagcatgtgggaaggttttctgtgcttcctgctgtagcctgaaatgtaaactgttatacatggacagaaaggaagctagagtgtgtgtaatctgccattcagtgctaatgaatgctcaagcctgggagaacatgatgagtgcctcaagccagagccctaaccctaacaatcctgctgaatactgttctactatccctcccttgcagcaagctcaggcctcaggagctctgagctctccacctcccactgtgatggtacctgtgggagttttaaagcaccctggagcagaagtggctcagcccagagagcagaggcgagtttggtttgctgatgggatcttgcccaatggagaagttgctgatgcagccaaattaacaatgaatggaacttcctctgcaggaaccctggctgtgtcacacgacccagtcaagccagtaactaccagtcctctaccagcagagacggatatttgtctattctctgggagtataactcaggttggaagtcctgttggaagtgcaatgaatcttattcctgaagatggccttcctcccattctcatctccactggtgtaaaaggagactatgctgtggaagagaaaccatcacagatttcagtaatgcagcagttggaggatggtggccctgacccacttgtatttgttttaaatgcaaatttgttgtcaatggttaaaattgtaaattatgtgaacaggaagtgctggtgtttcacaaccaagggaatgcatgcagtgggtcagtctgagatagtcattcttctacagtgtttaccggatgaaaagtgtttgccaaaggatatctttaatcactttgtgcagctttatcgggatgctctggcagggaatgtggtgagcaacttgggacattccttcttcagtcaaagtttccttggcagtaaagaacatggtggattcttatatgtgacatctacctaccagtcactgcaagacctagtactcccaaccccaccttacttgtttgggattcttatccagaaatgggaaactccttgggctaaagtatttcctatccgtctgatgttgagacttggagctgaatatcgactttatccatgcccactattcagtgtcagatttcggaagccattgtttggagagacggggcataccatcatgaatcttcttgcagacttcagaaattaccagtataccttgccagtagttcaaggtttggtggttgatatggaagttcggaaaactagcatcaaaattcccagcaacagatacaatgagatgatgaaagccatgaacaagtccaatgagcatgtcctggcaggaggtgcctgcttcaatgaaaaggcagactctcatcttgtgtgtgtacagaatgatgatggaaactatcagacccaggctatcagtattcacaatcagcccagaaaagtgactggtgccagtttctttgtgttcagtggcgctctgaaatcctcttctggataccttgccaagtccagtattgtggaagatggtgttatggtccagattactgcagagaacatggattccttgaggcaggcactgcgagagatgaaggacttcaccatcacctgtgggaaggcggacgcggaggaaccccaggagcacatccacatccagtgggtggatgatgacaagaacgttagcaagggtgtcgtaagtcctatagatgggaagtccatggagactataacaaatgtgaagatattccatggatcagaatataaagcaaatggaaaagtaatcagatggacagaggtgtttttcctagaaaacgatgaccagcacaattgcctcagtgatcctgcagatcacagtagattgactgagcatgttgccaaagctttttgccttgctctctgtcctcacctgaaacttctgaaggaagatggaatgaccaaactgggactacgtgtgacacttgactcagatcaggttggctatcaagcagggagcaatggccagccccttccctcgcagtacatgaatgatctggacagcgccttggtgccggtgatccatggaggggcctgccagcttagtgagggccccgttgtcatggaactcatcttttatattctggaaaacatcgtataaacagagaagacttcatttttttctgttcagacttgttgcaacagcagtcatacccaaatcatttgcactttaaaactggaagattaagcttttgttaacactattaatggggtggggaatagggtgggagtgggggtttgggagacgggtgggaaagggtggttggggggaccgatgttccataattctaagtcttctatgcattgtccaccaagaagatctgggcagcttctgttcctgcacaacagttatgctatccttgcagctaatccccttctgttactgtttagacaagaattccgctcctctctcaagatttacttatggtcatgtgctcagaaatgctcaaatgggtacaaccatcaccaagggtgggatgggagggcagaggggaaataaaatataaagcatcagttcttgcactctttgtacagaattggtataaaaaggataattccacactg

SEQ ID NO: 339315 - DNA, 2625 bp, Artificial Sequence
  derived and/or modified sequence
atgctgaagcggaggcggccgctgctcgaggatcaaacagagcatactgaatcagcaggactggctggtggtgcagcagacatcatgagtaagcaccgagaagtctgttccttatcacgtgtgtaaggggaaaaaggtttaaacaagtctcttaagtggtgtttcctcaccgatggagaattacttccaagcagaagcttacaacctggacaaggtgttagatgaatttgaacaaaacgaagatgaaacagtttcttctactttattggatacaaagtggaataagattctagatcccccttctcaccggctgtcatttaaccctactttggccagtgtgaatgaatctgcagtttctaatgagtcacaaccacaactgaaagtcttctccctggctcattcagctcccctgaccacagaggaagaggatcactgtgctaatggacaggactgtaatctaaatccagagattgccacaatgtggattgatgaaaatgctgttgcagaagaccagttaattaagagaaactatagttgggatgatcaatgcagtgctgttgaagtgggagagaagaaatgtggaaacctggcttgtctgccagatgagaagaatgttcttgttgtagccgtcatgcataactgtgataaaaggacattacaaaacgatttacaggattgtaataattataatagtcaatcccttatggatgcttttagctgttcactggataatgaaaacagacaaactgatcaatttagttttagtataaatgagtccactgaaaaagatatgaattcagagaaacaaatggatccattgaatagaccgaaaacagaggggagatctgttaaccatctgtgtcctacttcatctgatagtctagccagtgtctgttccccttcacaattaaaggatgacggaagtataggtagagacccctccatgtctgcgattacaagtttaacggttgattcagtaatctcatcccagggaacagatggatgtcctgctgttaaaaagcaagagaactatataccagatgaggacctcactggcaaaatcagctctcctaggacagatctagggagtccaaattccttttcccacatgagtgaggggattttgatgaaaaaagagccagcagaggagagcaccactgaagaatccctccggtctggtttacctttgcttctcaaaccagacatgcctaatgggtctggaaggaataatgactgtgaacggtgttcagattgccttgtgcctaatgaagttagggctgatgaaaatgaaggttatgaacatgaagaaactcttggcactacagaattccttaatatgacagagcatttctctgaatctcaggacatgactaattggaagttgactaaactaaatgagatgaatgatagccaagtaaacgaagaaaaggaaaagtttctacagattagtcagcctgaggacactaatggtgatagtggaggacagtgtgttggattggcagatgcaggtctagatttaaaaggaacttgcattagtgaaagtgaagaatgtgatttctccactgttatagacacaccagcagcaaattatctatctaatggttgtgattcctatggaatgcaagacccaggtgtttcttttgttccaaagactttaccctccaaagaagattcagtaacagaagaaaaagaaatagaggaaagcaagtcagaatgctactcaaatatttatgaacagagaggaaatgaggccacagaagggagtggactacttttaaacagcactggtgacctaatgaagaaaaattatttacataatttctgtagtcaagttccatcagtgcttgggcaatcttcccccaaggtagtagcaagcctgccatctatcagtgttccttttggtggtgcaagacccaagcaaccttctaatcttaaacttcaaattccaaagccattatcagaccatttacaaaatgactttcctgcaaacagtggaaataatactaaaaataaaaatgatattcttgggaaagcaaaattaggggaaaactcagcaaccaatgtatgcagtccatctttgggaaacatctctaatgtcgatacaaatggggaacatttagaaagttatgaggctgagatctccactagaccatgccttgcattagctccagatagcccagataatgatctcagagctggtcagtttggaatttctgccagaaagccattcaccactctgggtgaggtggctccagtatgggtaccggattctcaggctccaaattgcatgaaatgtgaagccaggtttacattcaccaaaaggaggcatcactgcagagcatgtgggaaggttttctgtgcttcctgctgtagcctgaaatgtaaactgttatacatggacagaaaggaagctagagtgtgtgtaatctgccattcagtgctaatgaatggtaagtattaaaacaggttgatttcatagttattgagacaaaacaagggaattacgatgagaagacttttttccccctgcctttctttacaagttgctcaccttctcaaatgtcataactttaactgaaaatatttagctaaatttccatgttttgaaagtatcttagcatttca

SEQ ID NO: 339316 - DNA, 4874 bp, Artificial Sequence
  derived and/or modified sequence
gcatactgaatcagcaggactggctggtggtgcagcagacatcatgagtaagcaccgagaagtctgttccttatcacgtgtgtaaggggaaaaaggtttaaacaagtctcttaagtggtgtttcctcaccgatggagaattacttccaagcagaagcttacaacctggacaaggtgttagatgaatttgaacaaaacgaagatgaaacagtttcttctactttattggatacaaagtggaataagattctagatcccccttctcaccggctgtcatttaaccctactttggccagtgtgaatgaatctgcagtttctaatgagtcacaaccacaactgaaagtcttctccctggctcattcagctcccctgaccacagaggaagaggatcactgtgctaatggacaggactgtaatctaaatccagagattgccacaatgtggattgatgaaaatgctgttgcagaagaccagttaattaagagaaactatagttgggatgatcaatgcagtgctgttgaagtgggagagaagaaatgtggaaacctggcttgtctgccagatgagaagaatgttcttgttgtagccgtcatgcataactgtgataaaaggacattacaaaacgatttacaggattgtaataattataatagtcaatcccttatggatgcttttagctgttcactggataatgaaaacagacaaactgatcaatttagttttagtataaatgagtccactgaaaaagatatgaattcagagaaacaaatggatccattgaatagaccgaaaacagaggggagatctgttaaccatctgtgtcctacttcatctgatagtctagccagtgtctgttccccttcacaattaaaggatgacggaagtataggtagagacccctccatgtctgcgattacaagtttaacggttgattcagtaatctcatcccagggaacagatggatgtcctgctgttaaaaagcaagagaactatataccagatgaggacctcactggcaaaatcagctctcctaggacagatctagggagtccaaattccttttcccacatgagtgaggggattttgatgaaaaaagagccagcagaggagagcaccactgaagaatccctccggtctggtttacctttgcttctcaaaccagacatgcctaatgggtctggaaggaataatgactgtgaacggtgttcagattgccttgtgcctaatgaagttagggctgatgaaaatgaaggttatgaacatgaagaaactcttggcactacagaattccttaatatgacagagcatttctctgaatctcaggacatgactaattggaagttgactaaactaaatgagatgaatgatagccaagtaaacgaagaaaaggaaaagtttctacagattagtcagcctgaggacactaatggtgatagtggaggacagtgtgttggattggcagatgcaggtctagatttaaaaggaacttgcattagtgaaagtgaagaatgtgatttctccactgttatagacacaccagcagcaaattatctatctaatggttgtgattcctatggaatgcaagacccaggtgtttcttttgttccaaagactttaccctccaaagaagattcagtaacagaagaaaaagaaatagaggaaagcaagtcagaatgctactcaaatatttatgaacagagaggaaatgaggccacagaagggagtggactacttttaaacagcactggtgacctaatgaagaaaaattatttacataatttctgtagtcaagttccatcagtgcttgggcaatcttcccccaaggtagtagcaagcctgccatctatcagtgttccttttggtggtgcaagacccaagcaaccttctaatcttaaacttcaaattccaaagccattatcagaccatttacaaaatgactttcctgcaaacagtggaaataatactaaaaataaaaatgatattcttgggaaagcaaaattaggggaaaactcagcaaccaatgtatgcagtccatctttgggaaacatctctaatgtcgatacaaatggggaacatttagaaagttatgaggctgagatctccactagaccatgccttgcattagctccagatagcccagataatgatctcagagctggtcagtttggaatttctgccagaaagccattcaccactctgggtgaggtggctccagtatgggtaccggattctcaggctccaaattgcatgaaatgtgaagccaggtttacattcaccaaaaggaggcatcactgcagagcatgtgggaaggttttctgtgcttcctgctgtagcctgaaatgtaaactgttatacatggacagaaaggaagctagagtgtgtgtaatctgccattcagtgctaatgaatgctcaagcctgggagaacatgatgagtgcctcaagccagagccctaaccctaacaatcctgctgaatactgttctactatccctcccttgcagcaagctcaggcctcaggagctctgagctctccacctcccactgtgatggtacctgtgggagttttaaagcaccctggagcagaagtggctcagcccagagagcagaggcgagtttggtttgctgatgggatcttgcccaatggagaagttgctgatgcagccaaattaacaatgaatggaacttcctctgcaggaaccctggctgtgtcacacgacccagtcaagccagtaactaccagtcctctaccagcagagacggatatttgtctattctctgggagtataactcaggttggaagtcctgttggaagtgcaatgaatcttattcctgaagatggccttcctcccattctcatctccactggtgtaaaaggagactatgctgtggaagagaaaccatcacagatttcagtaatgcagcagttggaggatggtggccctgacccacttgtatttgttttaaatgcaaatttgttgtcaatggttaaaattgtaaattatgtgaacaggaagtgctggtgtttcacaaccaagggaatgcatgcagtgggtcagtctgagatagtcattcttctacagtgtttaccggatgaaaagtgtttgccaaaggatatctttaatcactttgtgcagctttatcgggatgctctggcagggaatgtggtgagcaacttgggacattccttcttcagtcaaagtttccttggcagtaaagaacatggtggattcttatatgtgacatctacctaccagtcactgcaagacctagtactcccaaccccaccttacttgtttgggattcttatccagaaatgggaaactccttgggctaaagtatttcctatccgtctgatgttgagacttggagctgaatatcgactttatccatgcccactattcagtgtcagatttcggaagccattgtttggagagacggggcataccatcatgaatcttcttgcagacttcagaaattaccagtataccttgccagtagttcaaggtttggtggttgatatggaagttcggaaaactagcatcaaaattcccagcaacagatacaatgagatgatgaaagccatgaacaagtccaatgagcatgtcctggcaggaggtgcctgcttcaatgaaaaggcagactctcatcttgtgtgtgtacagaatgatgatggaaactatcagacccaggctatcagtattcacaatcagcccagaaaagtgactggtgccagtttctttgtgttcagtggcgctctgaaatcctcttctggataccttgccaagtccagtattgtggaagatggtgttatggtccagattactgcagagaacatggattccttgaggcaggcactgcgagagatgaaggacttcaccatcacctgtgggaaggcggacgcggaggaaccccaggagcacatccacatccagtgggtggatgatgacaagaacgttagcaagggtgtcgtaagtcctatagatgggaagtccatggagactataacaaatgtgaagatattccatggatcagaatataaagcaaatggaaaagtaatcagatggacagaggtgtttttcctagaaaacgatgaccagcacaattgcctcagtgatcctgcagatcacagtagattgactgagcatgttgccaaagctttttgccttgctctctgtcctcacctgaaacttctgaaggaagatggaatgaccaaactgggactacgtgtgacacttgactcagatcaggttggctatcaagcagggagcaatggccagccccttccctcgcagtacatgaatgatctggacagcgccttggtgccggtgatccatggaggggcctgccagcttagtgagggccccgttgtcatggaactcatcttttatattctggaaaacatcgtataaacagagaagacttcatttttttctgttcagacttgttgcaacagcagtcatacccaaatcatttgcactttaaaactggaagattaagcttttgttaacactattaatggggtggggaatagggtgggagtgggggtttgggagacgggtgggaaagggtggttggggggaccgatgttccataattctaagtcttctatgcattgtccaccaagaagatctgggcagcttctgttcctgcacaacagttatgctatccttgcagctaatccccttctgttactgtttagacaagaattccgctcctctctcaagatttacttatggtcatgtgctcagaaatgctcaaatgggtacaaccatcaccaagggtgggatgggagggcagaggggaaataaaatataaagcatcagttcttgcactctttgtacagaattggtataaaaaggataattccacactga

SEQ ID NO: 339317 - DNA, 2412 bp, Artificial Sequence
  derived and/or modified sequence
ggagtgtgctggagcctgaagtccacgcgcgcggctgagaaccgccgggaccgcacgtgggcgccgcgcgcttcccccgcttcccaggtgggcgccggccgccaggccacctcacgtccggccccggggatgcgcgtcctcctcgccgcgctgggactgctgttcctgggggcgctacgagccttcccacagggctgttcccgacacagcagtgcccacagaggcctactgactgcaggaagcagtgtgagcctgactactacctggatgaggccgaccgctgtacagcctgcgtgacttgttctcgagacgacctcgtggagaagacgccgtgtgcatggaactcctcccgtgtctgcgaatgtcgacccggcatgttctgttccacgtctgccgtcaactcctgtgcccgctgcttcttccattctgtctgtccggcagggatgattgtcaagttcccaggcacggcgcagaagaacacggtctgtgagccggcttccccaggggtcagccctgcctgtgccagcccagagaactgcaaggaaccctccagtggcaccatcccccaggccaagcccaccccggtgtccccagcaacctccagtgccagcaccatgcctgtaagagggggcacccgcctcgcccaggaagctgcttctaaactgacgagggctcccgactctccctcctctgtgggaaggcctagttcagatccaggtctgtccccaacacagccatgcccagaggggtctggtgattgcagaaagcagtgtgagcccgactactacctggacgaggccggccgctgcacggcctgcgtgagctgttctcgagatgaccttgtggagaagacgccatgtgcatggaactcctcccgcacctgcgaatgtcgacctggcatgatctgtgccacatcagccaccaactcccgtgcccgctgtgtcccctacccaatctgtgcagcagagacggtcaccaagccccaggatatggctgagaaggacaccacctttgaggcgccacccctggggacccagccggactgcaaccccaccccagagaatggcgaggcgcctgccagcaccagccccactcagagcttgctggtggactcccaggccagtaagacgctgcccatcccaaccagcgctcccgtcgctctctcctccacggggaagcccgttctggatgcagggccagtgctcttctgggtgatcctggtgttggttgtggtggtcggctccagcgccttcctcctgtgccaccggagggcctgcaggaagcgaattcggcagaagctccacctgtgctacccggtccagacctcccagcccaagctagagcttgtggattccagacccaggaggagctcaacgctgaggagtggtgcgtcggtgacagaacccgtcgcggaagagcgagggttaatgagccagccactgatggagacctgccacagcgtgggggcagcctacctggagagcctgccgctgcaggatgccagcccggccgggggcccctcgtcccccagggaccttcctgagccccgggtgtccacggagcacaccaataacaagattgagaaaatctacatcatgaaggctgacaccgtgatcgtggggaccgtgaaggctgagctgccggagggccggggcctggcggggccagcagagcccgagttggaggaggagctggaggcggaccataccccccactaccccgagcaggagacagaaccgcctctgggcagctgcagcgatgtcatgctctcagtggaagaggaagggaaagaagaccccttgcccacagctgcctctggaaagtgaggcctgggctgggctggggctaggagggcagcagggtggcctctgggaggccaggatggcactgttggcaccgaggttgggggcagaggcccatctggcctgaactgaggctccagcatctagtggtggaccggccggtcactgcaggggtctggtggtctctgcttgcatccccaacttagctgtcccctgacccagagcctaggggatccggggcttgtacagaagagacagtccaaggggactggatcccagcagtgatgttggttgaggcagcaaacagatggcaggatgggcactgccgagaacagcattggtcccagagccctgggcatcagaccttaaccaccaggcccacagcccagcgagggagaggtcgtgaggccagctcccggggcccctgtaaccctactctcctctctccctggacctcagaggtgacacccattgggcccttccggcatgcccccagttactgtaaatgtggcccccagtgggcatggagccagtgcctgtggttgtttctccagagtcaaaagggaagtcgagggatggggcgtcgtcagctggcactgtctctgctgca

SEQ ID NO: 339318 - DNA, 2363 bp, Artificial Sequence
  derived and/or modified sequence
gtcttgtgtggttgcagcaaggcaaagagtgtggggcgtctctgtgttccagggccagtgctcttctgggtgatcctggtgttggttgtggtggtcggctccagcgccttcctcctgtgccaccggagggcctgcaggaagcgaattcggcagaagctccacctgtgctacccggtccagacctcccagcccaagctagagcttgtggattccagacccaggaggagctcaacgcagctgaggagtggtgcgtcggtgacagaacccgtcgcggaagagcgagggttaatgagccagccactgatggagacctgccacagcgtgggggcagcctacctggagagcctgccgctgcaggatgccagcccggccgggggcccctcgtcccccagggaccttcctgagccccgggtgtccacggagcacaccaataacaagattgagaaaatctacatcatgaaggctgacaccgtgatcgtggggaccgtgaaggctgagctgccggagggccggggcctggcggggccagcagagcccgagttggaggaggagctggaggcggaccataccccccactaccccgagcaggagacagaaccgcctctgggcagctgcagcgatgtcatgctctcagtggaagaggaagggaaagaagaccccttgcccacagctgcctctggaaagtgaggcctgggctgggctggggctaggagggcagcagggtggcctctgggaggccaggatggcactgttggcaccgaggttgggggcagaggcccatctggcctgaactgaggctccagcatctagtggtggaccggccggtcactgcaggggtctggtggtctctgcttgcatccccaacttagctgtcccctgacccagagcctaggggatccggggcttgtacagaagagacagtccaaggggactggatcccagcagtgatgttggttgaggcagcaaacagatggcaggatgggcactgccgagaacagcattggtcccagagccctgggcatcagaccttaaccaccaggcccacagcccagcgagggagaggtcgtgaggccagctcccggggcccctgtaaccctactctcctctctccctggacctcagaggtgacacccattgggcccttccggcatgcccccagttactgtaaatgtggcccccagtgggcatggagccagtgcctgtggttgtttctccagagtcaaaagggaagtcgagggatggggcgtcgtcagctggcactgtctctgctgcagcggccacactgtactctgcactggtgtgagggcccctgcctggactgtgggaccctcctggtgctgcccaccttccctgtcctgtagccccctcggtgggcccagggcctagggcccaggatcaagtcactcatctcagaatgtccccaccaatccccgccacagcaggcgcctcgggtcccagatgtctgcagccctcagcagctgcagaccgcccctcaccaacccagagaacctgctttactttgcccagggacttcctccccatgtgaacatggggaacttcgggccctgcctggagtccttgaccgctctctgtgggccccacccactctgtcctgggaaatgaagaagcatcttccttaggtctgccctgcttgcaaatccactagcaccgaccccaccacctggttccggctctgcacgctttggggtgtggatgtcgagaggcaccacggcctcacccaggcatctgctttactctggaccataggaaacaagaccgtttggaggtttcatcaggattttgggtttttcacatttcacgctaaggagtagtggccctgacttccggtcggctggccagctgactccctagggccttcagacgtgtatgcaaatgagtgatggataaggatgagtcttggagttgcgggcagcctggagactcgtggacttaccgcctggaggcaggcccgggaaggctgctgtttactcatcgggcagccacgtgctctctggaggaagtgatagtttctgaaaccgctcagatgttttggggaaagttggagaagccgtggccttgcgagaggtggttacaccagaacctggacattggccagaagaagcttaagtgggcagacactgtttgcccagtgtttgtgcaaggatggagtgggtgtctctgcatcacccacagccgcagctgtaaggcacgctggaaggcacacgcctgccaggcagggcagtctggcgcccatgatgggagggattgacatgtttcaacaaaataatgcacttccttacctagtggcccttcacacaacttttgaatctctaaaaatccataaaatccttaaagaactgtaa

SEQ ID NO: 339319 - protein, 132 aa, Artificial Sequence
  derived and/or modified sequence
MSQPLMETCHSVGAAYLESLPLQDASPAGGPSSPRDLPEPRVSTEHTNNKIEKIYIMKADTVIVGTVKAELPEGRGLAGPAEPELEEELEADHTPHYPEQETEPPLGSCSDVMLSVEEEGKEDPLPTAASGK

SEQ ID NO: 339320 - protein, 133 aa, Artificial Sequence
  derived and/or modified sequence
MEPVPLQDFVRALDPASLPRVLRVCSGVYFEGYFTPLNTPQSYETLEELVSATTQSSKQLPTCFMSTHRIVTEGRVVTEDQLLMLEAVVMHLGIRSARCVLGMEGQQVILHLPLSQKGPFWTWEPSAPRTLLQ

SEQ ID NO: 339321 - DNA, 415 bp, Artificial Sequence
  derived and/or modified sequence
gagagccgcggggaccatggagccggtgccgctgcaggacttcgtgcgcgccttggaccccgcctccctcccgcgcgtgctgcgggtctgctcgggggtctacttcgagggctacttcacccccctcaacaccccacagagctatgaaaccctggaggagctggtctctgccacaactcagagctccaagcagctgcccacttgcttcatgtcgacccacaggattgtcacagagggcagggtggtgactgaggaccagctcctcatgcttgaggctgtggtgatgcacctcgggatccgctctgcccgctgtgtcctgggcatggagggtcagcaggtcatcctgcacctgcccctatcccagaaggggcccttctggacatgggagcctagtgcccctcgaactctgctccag

SEQ ID NO: 339322 - DNA, 402 bp, Artificial Sequence
  derived and/or modified sequence
atggagcccgtgcccctgcaggacttcgtgagagccctggaccccgccagcctgcccagagtgctgagagtgtgcagcggcgtgtacttcgagggctacttcacccccctgaacaccccccagagctacgagaccctggaggagctggtgagcgccaccacccagagcagcaagcagctgcccacctgcttcatgagcacccacagaatcgtgaccgagggcagagtggtgaccgaggaccagctgctgatgctggaggccgtggtgatgcacctgggcatcagaagcgccagatgcgtgctgggcatggagggccagcaggtgatcctgcacctgcccctgagccagaagggccccttctggacctgggagcccagcgcccccagaaccctgctgcagtag

SEQ ID NO: 339323 - DNA, 402 bp, Artificial Sequence
  derived and/or modified sequence
atggagcctgtaccactgcaagatttcgttcgtgctctggaccccgcttcactgcctagagttcttcgcgtctgctcaggagtatatttcgaagggtattttactcccttgaatacacctcagtcttacgagactctggaggaacttgtatccgctacaacccaatctagcaaacagcttccaacttgctttatgtctacccacaggattgtaacagagggcagagtagtcaccgaggaccagctgctgatgctcgaggccgtcgtcatgcatttaggcatcagatcagctagatgcgttttgggaatggaagggcaacaggtaatccttcacctgccactttcccaaaaaggccctttttggacgtgggagccatctgccccacgcaccctcctccagtag

SEQ ID NO: 339324 - DNA, 402 bp, Artificial Sequence
  derived and/or modified sequence
atggagcctgtgcccctgcaggactttgtgcgggccctggaccctgccagcctgccccgggtgctgcgggtgtgcagcggcgtgtactttgagggctacttcacccccctgaacaccccccagagctatgagaccctggaggagctggtgtctgccaccacccagagcagcaagcagctgcccacctgcttcatgagcacccaccgcatcgtgacagagggccgggtggtgacagaggaccagctgctgatgctggaggccgtggtgatgcacctgggcatccgcagcgcccgctgtgtgctgggcatggagggccagcaggtgatcctgcacctgcccctgagccagaagggccccttctggacctgggagcccagcgcccccaggaccctgctgcagtag

SEQ ID NO: 339325 - DNA, 402 bp, Artificial Sequence
  derived and/or modified sequence
atggagcccgtgcccctgcaggacttcgtgcgggccctggaccccgcttcactacccagagtactgagagtgtgctcaggtgtgtatttcgaagggtacttcacgcccctgaatacccctcagagctacgagactttggaagagttagtctctgcgaccacgcaaagttcaaagcaactccctacctgtttcatgtccacccacaggatagttacagagggtagagtggtcacagaggaccagctcttgatgcttgaggcagtggtgatgcacctcgggatccgttccgctagatgtgttctggggatggagggtcagcaagtgatactccacctgccattgtcacagaaaggccctttttggacctgggagcctagcgcccctcggacactcctgcaatag

SEQ ID NO: 339326 - DNA, 402 bp, Artificial Sequence
  derived and/or modified sequence
atggagccagtgcccttgcaggattttgtgcgagctcttgacccagcaagtctgcccagagtccttcgcgtgtgctcgggggtgtacttcgaaggctactttacgcccctgaacacaccccagtcctatgaaactttggaagaattggtgagtgccacaactcagagtagcaagcagcttccaacctgttttatgtctacgcatcgcatagtcaccgaagggagggttgttactgaggaccagctgctcatgctcgaagcggttgtgatgcatcttggcataagaagtgcgcgatgtgtgctgggcatggagggacagcaggtgattctgcacttacccctgagccaaaagggacccttctggacctgggagccctcagcacctaggactctgctgcagtag

SEQ ID NO: 339327 - DNA, 423 bp, Artificial Sequence
  derived and/or modified sequence
atgacccagagaagcatcgccggccccatctgcaacctgaagttcgtgaccctgctggtggccctgagcagcgagctgcccttcctgggcgccggcgtgcagctgcaggacaacggctacaacggcctgctgatcgccatcaacccccaggtgcccgagaaccagaacctgatcagcaacatcaaggagatgatcaccgaggccagcttctacctgttcaacgccaccaagagaagagtgttcttcagaaacatcaagatcctgatccccgccacctggaaggccaacaacaacagcaagatcaagcaggagagctacgagaaggccaacgtgatcgtgaccgactggtacggcgcccacggcgacgaccagggcgtggagaagagagagaacaccttcatcagccacctgatcagctactag

SEQ ID NO: 339328 - DNA, 585 bp, Artificial Sequence
  derived and/or modified sequence
tcccagatggatccaccccagacttttcaaagaagacacctccttcatcttgtgttctaaaaccttgcaagttcaggaagaaaccatctgcatccatattgaaaacctgacacaatgtatgcagcaggctcagtgtgagtgaactggaggcttctctacaacatgacccaaaggagcattgcaggtcctatttgcaacctgaagtttgtgactctcctggttgccttaagttcagaactcccattcctgggagctggagtacagcttcaagacaatgggtataatggattgctcattgcaattaatcctcaggtacctgagaatcagaacctcatctcaaacattaaggaaatgataactgaagcttcattttacctatttaatgctaccaagagaagagtatttttcagaaatataaagattttaatacctgccacatggaaagctaataataacagcaaaataaaacaagaatcatatgaaaaggcaaatgtcatagtgactgactggtatggggcacatggagatgatcagggtgtggaaaagagggaaaatacattcatttcacacctaatttcctactga

SEQ ID NO: 339329 - DNA, 423 bp, Artificial Sequence
  derived and/or modified sequence
atgacacaacgctctatagccgggccaatctgcaatctgaagttcgtgacactcctggtcgccctgagctctgagctacccttcctaggtgccggagtacaactgcaagataacggatacaacggactcttaatcgctattaatccacaggtgcctgagaatcaaaatctgatcagtaacattaaggagatgataactgaagcaagtttttatctgtttaatgctacaaaacgcagggtcttttttagaaatatcaaaatcctcattccagctacgtggaaggccaataacaactctaagataaaacaagagagttacgagaaagccaacgttatcgttacagattggtatggcgcacacggcgatgaccaaggtgtggaaaaaagagagaacacatttatatcgcatctgattagctactag

SEQ ID NO: 339330 - DNA, 423 bp, Artificial Sequence
  derived and/or modified sequence
atgacccagaggagcattgctggccccatctgcaacctgaagtttgtgaccctgctggtggccctgagcagcgagctgcccttcctgggcgccggcgtgcagctgcaggacaatggctacaacggcctgctgattgccatcaacccccaggtgcctgagaaccagaacctgatcagcaacatcaaggagatgatcacagaggccagcttctacctgttcaatgccaccaagagaagagtcttcttcaggaacatcaagatcctgatcccagccacctggaaggccaacaacaacagcaagatcaagcaggagagctatgagaaggccaacgtcatcgtgacagactggtatggagcccatggagatgaccagggcgtggagaagcgggagaacaccttcatcagccacctgatctcctactag

SEQ ID NO: 339331 - DNA, 423 bp, Artificial Sequence
  derived and/or modified sequence
atgacccagcggagcatcgccggccccatctgcaacctgaagttcgtaaccctcctggtcgccctgtcatccgagttgcctttcctgggcgctggcgtccagctccaggataacggatacaacgggttgctgatcgcaatcaatccacaggtccccgaaaaccagaacttgatcagcaacataaaggagatgataacagaggcctccttttacctgtttaatgccaccaagcgtagagtgttttttcgcaacatcaagattctgattccagccacatggaaggcgaacaataattctaagattaagcaggagtcatatgaaaaggcaaatgtgattgttaccgattggtatggcgcccatggggacgatcaaggagtagagaaaagagagaataccttcatctcccatctgataagctattag

SEQ ID NO: 339332 - DNA, 423 bp, Artificial Sequence
  derived and/or modified sequence
atgacacagcggagtattgcagggcctatttgcaacctaaagtttgtcactttgctggtggccctcagttccgaactgccttttctgggggctggagtgcaactgcaggacaacggatacaacggattattgattgccataaacccccaagtgccagaaaatcagaatcttattagcaacataaaggagatgatcacagaggcttcattttatttgttcaatgctaccaagcgcagggtcttctttaggaacattaaaattttaatcccagctacatggaaggcgaataataatagtaagattaaacaggaatcctacgagaaagccaatgtcattgttaccgattggtacggagcacacggggacgatcaaggcgtggaaaagcgggagaatacctttatttcacacctgatctcatattag

SEQ ID NO: 339333 - protein, 181 aa, Artificial Sequence
  derived and/or modified sequence
MVLGAGWGWAYQLHLLQALKRKPDLFLCERLDVKAVFQCAVLALKFPEAPTVKASCGFFTELLPRCGEVESVGKVVQEDGRMLLIAVLEAIGGQASRSLMDCFADILFALNKHCFSLLSMWIKEALQPPGFPSARLSPEQKDTFSQQILRERVNKRRVKEMVKEFTLLCRGLHGTDYTADY

SEQ ID NO: 339334 - DNA, 546 bp, Artificial Sequence
  derived and/or modified sequence
atggtgctgggcgccggctggggctgggcctaccagctgcacctgctgcaggccctgaagagaaagcccgacctgttcctgtgcgagagactggacgtgaaggccgtgttccagtgcgccgtgctggccctgaagttccccgaggcccccaccgtgaaggccagctgcggcttcttcaccgagctgctgcccagatgcggcgaggtggagagcgtgggcaaggtggtgcaggaggacggcagaatgctgctgatcgccgtgctggaggccatcggcggccaggccagcagaagcctgatggactgcttcgccgacatcctgttcgccctgaacaagcactgcttcagcctgctgagcatgtggatcaaggaggccctgcagccccccggcttccccagcgccagactgagccccgagcagaaggacaccttcagccagcagatcctgagagagagagtgaacaagagaagagtgaaggagatggtgaaggagttcaccctgctgtgcagaggcctgcacggcaccgactacaccgccgactactag

SEQ ID NO: 339335 - DNA, 546 bp, Artificial Sequence
  derived and/or modified sequence
atggttctgggtgctggatggggctgggcctatcaactgcaccttctccaggccctcaagcgcaagccggacctcttcttgtgcgaaagactcgacgtgaaggcagtgttccagtgtgcagttcttgccttgaagttcccagaagcccccacggtgaaggcaagttgtggcttcttcaccgagttacttcccaggtgcggtgaagtggaaagcgtgggtaaagttgtgcaggaggatggtaggatgctgctgattgccgtgctggaagctatcggcggacaagcttcacggtcgctcatggattgctttgctgatatcctgtttgcactcaacaaacactgtttcagcttgctgagtatgtggatcaaagaggctctgcagcctccaggctttccaagtgcgcggctgtcacctgaacagaaggatacattcagtcagcagattctgagagagagggtaaacaagaggcgggttaaggagatggtgaaagagttcacattgctgtgcagaggcctacacgggaccgactataccgcagactattag

SEQ ID NO: 339336 - DNA, 1201 bp, Artificial Sequence
  derived and/or modified sequence
cttcacttcatctcttccccctcacccacagcagcactggctccttggtgtgtgtatggccgaagagggcctggacacagggtaccctgggtgaaagatggggctgaggctccaaggctcctgctgtacttttcttctttttgagcaggagctggagggtgcctcaggaatacaggagggacatgggaggagggctgttgggctgagggctccctgtctggctgccatctcttcttcctgctaccctgttcacaaactgggggtgcttaactccctctgtgaatcaacatgaagtcactgctggcaacctagagcctgcgagacatctggccctgatggagggggagggaaaggtgtctggaacccaaactttctgcattatgatccccacccccaacctctctcacgtacacctgcgtgttcatgtacacatacatgtacatagcatcccttgagctgtcctcacctgacctactgaactctgaggtggtccgggtcccccagagatggctgggtagctggttttggcagcctctacctgtgaggtgtgaagttgggggctggggtggcaggtgagtgggggggatggtccttggagctggctggggctgggcttaccagctccacctcctgcaggctctgaagcggaagccagatttgttcctgtgtgaacgattggatgtcaaagctgtgttccagtgtgctgtgctggccctcaagttccctgaggcacctactgtcaaggcctcctgtggcttctttacagagctgctgcctcggtgtggggaagtagagtctgtgggaaaggtggtacaggaagacggtcgtatgctgctcatagcagtgctggaggccattgggggccaggcctcccgcagcctcatggactgctttgccgatatcctgttcgccctgaacaagcactgcttcagcctcctgagcatgtggatcaaggaggccctgcagccacctggtttcccctctgcccgcctcagccctgaacagaaggataccttcagccagcagatccttcgcgagcgagtgaacaagaggcgggtgaaggagatggtgaaggagttcacactgctgtgccggggtctccatggcacagattacacagctgactactgaggggtgcccccatcccatccaccccttctcttcatccttccctattcccaaagagtaaacctggaccctc

SEQ ID NO: 339337 - DNA, 546 bp, Artificial Sequence
  derived and/or modified sequence
atggtgctgggcgccggctggggctgggcctaccagctgcacctgctgcaggccctgaagaggaagccagacctcttcctgtgtgagcggctggatgtgaaggctgtgttccagtgtgctgtgctggccctgaagtttcctgaggcccccaccgtgaaggccagctgtggcttcttcacagagctgctgccccgctgtggggaggtggagagcgtgggcaaggtggtgcaggaggatggccgcatgctgctgattgctgtgctggaggccatcggcggccaggccagccgcagcctgatggactgctttgctgacatcctgtttgccctgaacaagcactgcttcagcctgctgtccatgtggatcaaggaggccctgcagcccccaggcttccccagcgcccggctgagccctgagcagaaggacaccttcagccagcagatcctgcgggagcgggtgaacaagagaagagtgaaggagatggtgaaggagttcaccctgctgtgccggggcctgcatggaacagactacacagctgactactag

SEQ ID NO: 339338 - DNA, 546 bp, Artificial Sequence
  derived and/or modified sequence
atggtgctgggcgccggctggggctgggcctaccagctgcacctgctgcaggctttgaagagaaaaccagacctgttcctgtgtgaacggctagacgttaaggcagtgttccagtgtgccgtcctcgctttgaaattccctgaagcacccactgtgaaagcaagttgtggatttttcacagagctgctaccccgctgcggcgaagtggagagtgttggcaaggtagttcaagaagacggaagaatgttgttgatagcagttcttgaagcaataggcggtcaggccagtcgatccctgatggattgctttgctgatatcttgttcgcattgaataagcactgcttctcgttactgagtatgtggatcaaggaagcactccaacctcctggatttccttcagcccgcctcagtccggaacagaaagacacctttagccagcagatcctgcgggaaagggtgaataaaaggcgcgtgaaggagatggtcaaagagtttacactgctctgccgaggactccacggtaccgactatactgccgattattag

SEQ ID NO: 339339 - DNA, 546 bp, Artificial Sequence
  derived and/or modified sequence
atggtgctgggagctggttggggttgggcctatcagttgcacctcttacaagcactcaagcgtaaacccgatctctttctttgtgaaagattggatgttaaggctgtattccaatgtgccgtcctggcccttaagttccccgaggccccaacagtgaaagcctcctgtggattcttcactgaattactgcccagatgtggtgaggtcgagtctgtcggaaaagtcgtgcaggaggacgggaggatgcttctgattgccgtccttgaagccattggcggacaggcttccagatctctcatggactgctttgcggacatcctgttcgcattgaataaacactgctttagcctgctgtccatgtggataaaagaggcattgcagccgcctgggttcccgtccgctagactctcgcccgagcagaaggatacattctcccaacagattctaagagagagagtgaacaaacgtagagtaaaagaaatggtgaaggaatttacccttctgtgccggggtctccacggaactgactatacggcagattactag

SEQ ID NO: 339340 - protein, 384 aa, Artificial Sequence
  derived and/or modified sequence
MAIAYLGSSCPSQPPSSLALSLSPTPSDFEQESGIETAMRFSPDVALAVSTTPAVLPTTNIQPVGTPFEELPSERPTLEPATSPLVVTEVPEEPSQRATTVSTTMATTAATSTGDPTVATVPATVATATPSTPAAPPFTATTAVIRTTGVRRLLPLPLTTVATARATTPEAPSPPTTAAVLDTEAPTPRLVSTATSRPRALPRPATTQEPDIPERSTLPLGTTAPGPTEVAQTPTPETFLTTIRDEPEVPVSGGPSGDFELPEEETTQPDTANEVVAVGGAAAKASSPPGTLPKGARPGPGLLDNAIDSGSSAAQLPQKSILERKEVLVAVIVGGVVGALFAAFLVTLLIYRMKKKDEGSYTLEEPKQASVTYQKPDKQEEFYA

SEQ ID NO: 339341 - DNA, 1155 bp, Artificial Sequence
  derived and/or modified sequence
atggccatcgcctacctgggcagcagctgccccagccagccccccagcagcctggccctgagcctgagccccacccccagcgacttcgagcaggagagcggcatcgagaccgccatgagattcagccccgacgtggccctggccgtgagcaccacccccgccgtgctgcccaccaccaacatccagcccgtgggcacccccttcgaggagctgcccagcgagagacccaccctggagcccgccaccagccccctggtggtgaccgaggtgcccgaggagcccagccagagagccaccaccgtgagcaccaccatggccaccaccgccgccaccagcaccggcgaccccaccgtggccaccgtgcccgccaccgtggccaccgccacccccagcacccccgccgccccccccttcaccgccaccaccgccgtgatcagaaccaccggcgtgagaagactgctgcccctgcccctgaccaccgtggccaccgccagagccaccacccccgaggcccccagcccccccaccaccgccgccgtgctggacaccgaggcccccacccccagactggtgagcaccgccaccagcagacccagagccctgcccagacccgccaccacccaggagcccgacatccccgagagaagcaccctgcccctgggcaccaccgcccccggccccaccgaggtggcccagacccccacccccgagaccttcctgaccaccatcagagacgagcccgaggtgcccgtgagcggcggccccagcggcgacttcgagctgcccgaggaggagaccacccagcccgacaccgccaacgaggtggtggccgtgggcggcgccgccgccaaggccagcagcccccccggcaccctgcccaagggcgccagacccggccccggcctgctggacaacgccatcgacagcggcagcagcgccgcccagctgccccagaagagcatcctggagagaaaggaggtgctggtggccgtgatcgtgggcggcgtggtgggcgccctgttcgccgccttcctggtgaccctgctgatctacagaatgaagaagaaggacgagggcagctacaccctggaggagcccaagcaggccagcgtgacctaccagaagcccgacaagcaggaggagttctacgcctag

SEQ ID NO: 339342 - DNA, 1329 bp, Artificial Sequence
  derived and/or modified sequence
atgaagcccggccccccccacagagccggcgccgcccacggcgccggcgccggcgccggcgccgccgccggccccggcgccagaggcctgctgctgccccccctgctgctgctgctgctggccggcagagccgccggcgcccagagatggagaagcgagaacttcgagagacccgtggacctggagggcagcggcgacgacgacagcttccccgacgacgagctggacgacctgtacagcggcagcggcagcggctacttcgagcaggagagcggcatcgagaccgccatgagattcagccccgacgtggccctggccgtgagcaccacccccgccgtgctgcccaccaccaacatccagcccgtgggcacccccttcgaggagctgcccagcgagagacccaccctggagcccgccaccagccccctggtggtgaccgaggtgcccgaggagcccagccagagagccaccaccgtgagcaccaccatggccaccaccgccgccaccagcaccggcgaccccaccgtggccaccgtgcccgccaccgtggccaccgccacccccagcacccccgccgccccccccttcaccgccaccaccgccgtgatcagaaccaccggcgtgagaagactgctgcccctgcccctgaccaccgtggccaccgccagagccaccacccccgaggcccccagcccccccaccaccgccgccgtgctggacaccgaggcccccacccccagactggtgagcaccgccaccagcagacccagagccctgcccagacccgccaccacccaggagcccgacatccccgagagaagcaccctgcccctgggcaccaccgcccccggccccaccgaggtggcccagacccccacccccgagaccttcctgaccaccatcagagacgagcccgaggtgcccgtgagcggcggccccagcggcgacttcgagctgcccgaggaggagaccacccagcccgacaccgccaacgaggtggtggccgtgggcggcgccgccgccaaggccagcagcccccccggcaccctgcccaagggcgccagacccggccccggcctgctggacaacgccatcgacagcggcagcagcgccgcccagctgccccagaagagcatcctggagagaaaggaggtgctggtggccgtgatcgtgggcggcgtggtgggcgccctgttcgccgccttcctggtgaccctgctgatctacagaatgaagaagaaggacgagggcagctacaccctggaggagcccaagcaggccagcgtgacctaccagaagcccgacaagcaggaggagttctacgcctag

SEQ ID NO: 339343 - DNA, 1155 bp, Artificial Sequence
  derived and/or modified sequence
atggctatcgcatacctcggttcctcctgtcccagtcagccccccagctcccttgctctttcactgagccccaccccctccgacttcgaacaggagtccggcattgagacagcaatgcgtttcagcccagatgtagctctggcggtgagtaccacaccggctgtgctgccgaccacaaatatccagcccgtcggcaccccattcgaggagctgccctccgagcgcccaactctggaacccgcaacctcccccctggttgtgacagaggtcccggaagaaccttcacagagggccacgacggtaagtaccactatggccaccactgctgcaaccagtaccggtgaccccactgtcgctacagtgccagcgacagtcgccacggcaacaccctccacccccgctgccccaccgtttaccgcaacgactgccgtgattaggacgaccggtgtaagaagacttctacctctacctttgaccacggtggcaaccgcccgcgccacaaccccagaagctccaagtccccctacaaccgcagccgtgctggatacggaagcacctaccccaaggctggtatccaccgccacatcgcggcctagggccctgccacggcccgcgacgacccaagaacccgacattccagagcggagcaccttgcctctgggcaccactgccccagggcctacagaggttgctcagactcccactcccgagacgttcttaacgacaatcagggacgaacctgaggtgcctgtttccgggggccccagcggagatttcgagctaccagaggaggaaacaactcagccagacaccgccaatgaggtggtggccgtgggtggagctgctgctaaggcctcaagcccacctgggacattaccgaaaggagcccgacccggtccagggctgctggacaacgccatcgattctggatccagcgctgctcagcttcctcaaaagtccatactcgaaaggaaagaagtccttgtcgccgttatagtaggcggggtggtaggagctcttttcgcggcgtttttggtcacccttctaatataccgaatgaagaagaaagatgaaggaagttacaccttggaagagcctaaacaggcgtctgtcacctaccagaagcctgacaagcaggaggagttctatgcttag

SEQ ID NO: 339344 - DNA, 1329 bp, Artificial Sequence
  derived and/or modified sequence
atgaagccgggtccaccacaccgtgccggcgctgctcatggcgccggtgcaggtgcaggagctgctgctgggcctggggctcgcgggctattactgcctcctctgctactgctactcctcgcaggaagggccgccggggctcagcggtggcgctcggaaaactttgagaggccagtcgacctggaagggtccggggacgatgacagcttccccgatgatgagctggacgatctttacagtggctcaggaagcggctacttcgagcaagagtccggaatcgaaactgccatgagattttcccccgatgtcgcactggccgtttctactaccccagccgtgttgcctacaacaaacattcaacccgtggggacccctttcgaggaattgccttccgagaggccaacccttgagccagcaacttcccccctggtggtgacggaggttccagaagaaccatctcagagggcaactaccgtgtcaactacaatggcaacaactgccgcaacatctaccggtgaccctactgtagccacagttcctgctaccgttgccacggccaccccatctacacctgcggcccctccgtttaccgccactaccgccgttatccggaccactggtgtacggagactgctgcccctcccattaactacggttgcgactgcgagagccactactcccgaagcacccagtccaccaacaaccgcagctgtgctggatacagaagccccaactccccgcctggtctctaccgccacctcaaggcctcgagctctgcctcgacctgccaccacccaggaaccggatattccagaaagatctacactcccacttggcactactgcgccgggccccaccgaggttgcccaaacaccaacccctgagactttcctaactaccattcgcgacgagcccgaggtgcccgtaagcggcggcccatctggggacttcgagctccccgaagaggaaactacccagcccgacactgctaatgaggtggttgccgtggggggagccgcggcaaaggcatcctcaccccccggtactctgcccaagggcgcccgacctggaccaggtctgctggacaacgccatagacagcggaagcagcgccgcccagttgccacagaagagtatccttgagcgtaaggaagtcctcgtcgcagtgatcgtagggggtgtcgtgggggccctgtttgccgctttccttgtgacactcctgatctatcgaatgaagaagaaggatgaaggatcctatacgctcgaggaacccaaacaagcttctgtgacataccagaagcccgataagcaggaggagttttatgcctag

SEQ ID NO: 339345 - DNA, 1155 bp, Artificial Sequence
  derived and/or modified sequence
atggccatcgcctacctgggcagcagctgccccagccagccccccagcagcctggccctgagcctgagccccacccccagcgactttgagcaggagagcggcattgaaacagccatgaggttctccccagatgtggccctggccgtgtccaccaccccagctgtgctgcccaccaccaacatccagcctgtgggcaccccatttgaggagctgcccagcgagcggcccaccctggagcccgccaccagccccctggtggtgacagaggtgcctgaggagcccagccagagggccaccaccgtgtccaccaccatggccaccacagctgccaccagcactggagaccccaccgtggccaccgtgcctgccaccgtggccacagccacccccagcaccccagctgccccacccttcaccgccaccacagctgtgatccgcaccaccggggtgcggcggctgctgcccctgcccctgaccaccgtggccacagcccgggccaccaccccagaggcccccagcccccccaccacagctgctgtgctggacacagaggcccccaccccccggctggtgtccacagccaccagccggccccgggccctgcccaggcctgccaccacccaggagccagacatccctgagaggagcaccctgcccctgggcaccacagcccctggccccacagaggtggcccagacccccaccccagagaccttcctgaccaccatcagagatgagcctgaggtgcctgtgtctgggggccccagcggggactttgagctgcctgaggaggagaccacccagcctgacacagccaatgaggtggtggccgtgggcggggccgccgccaaggccagcagccccccaggcaccctgcccaagggggcccggcccggccctggcctgctggacaatgccattgattctggcagcagcgctgcccagctgccccagaagagcatcctggagaggaaggaggtgctggtggccgtcatcgtgggcggcgtggtgggcgccctgtttgctgccttcctggtgaccctgctgatctacaggatgaagaagaaggatgagggcagctacaccctggaggagcccaagcaggcctctgtgacctaccagaagccagacaagcaggaggagttctacgcctag

SEQ ID NO: 339346 - DNA, 1329 bp, Artificial Sequence
  derived and/or modified sequence
atgaagccaggccccccccacagagctggagctgcccatggagctggagctggagctggagctgctgctggccctggggcccggggcctgctgctgccccccctgctgctgctgctgctggccggccgggctgctggggcccagcgctggaggagtgaaaattttgagaggcctgtggacctggagggcagcggagatgatgacagcttcccagatgatgagctggatgacctgtacagcggcagcggcagcggctactttgagcaggagagcggcattgaaacagccatgaggttctccccagatgtggccctggccgtgtccaccaccccagctgtgctgcccaccaccaacatccagcctgtgggcaccccatttgaggagctgcccagcgagcggcccaccctggagcccgccaccagccccctggtggtgacagaggtgcctgaggagcccagccagagggccaccaccgtgtccaccaccatggccaccacagctgccaccagcactggagaccccaccgtggccaccgtgcctgccaccgtggccacagccacccccagcaccccagctgccccacccttcaccgccaccacagctgtgatccgcaccaccggggtgcggcggctgctgcccctgcccctgaccaccgtggccacagcccgggccaccaccccagaggcccccagcccccccaccacagctgctgtgctggacacagaggcccccaccccccggctggtgtccacagccaccagccggccccgggccctgcccaggcctgccaccacccaggagccagacatccctgagaggagcaccctgcccctgggcaccacagcccctggccccacagaggtggcccagacccccaccccagagaccttcctgaccaccatcagagatgagcctgaggtgcctgtgtctgggggccccagcggggactttgagctgcctgaggaggagaccacccagcctgacacagccaatgaggtggtggccgtgggcggggccgccgccaaggccagcagccccccaggcaccctgcccaagggggcccggcccggccctggcctgctggacaatgccattgattctggcagcagcgctgcccagctgccccagaagagcatcctggagaggaaggaggtgctggtggccgtcatcgtgggcggcgtggtgggcgccctgtttgctgccttcctggtgaccctgctgatctacaggatgaagaagaaggatgagggcagctacaccctggaggagcccaagcaggcctctgtgacctaccagaagccagacaagcaggaggagttctacgcctag

SEQ ID NO: 339347 - DNA, 1155 bp, Artificial Sequence
  derived and/or modified sequence
atggccatcgcctacctgggcagcagctgccccagccagccccccagctcgctagcactgtccctgagtcctacacctagcgatttcgagcaggaatcgggcattgagactgctatgcggttctccccagatgtggctttagcggtcagtacaactccagccgtgctgccgacaacaaacatccaacctgtcgggaccccatttgaggaactccctagtgagcgtcctactttggagcccgccacaagccctttagtcgtgacagaggtacccgaggagccttcacagcgggcgacaactgtgagcactactatggccaccaccgcagcaacctcaacgggagatcccacggtggcgactgtgcccgcaacagtcgctacggccaccccctccactcccgctgcccctccttttactgctacgaccgcggtgattagaacaacaggtgtgcgtcgcctgctacctctccccctaactacagtggcaactgccagagccacaactccagaggctccctcccccccaactacagcagccgtgctggatacagaggcacctacgcctcggctcgtgtctaccgctacctcccgaccaagggctttgccaagacctgcaactacccaggaaccagacatcccagagaggtctacactgcccttgggtacaactgctcccggtcccaccgaagtggcccagacacctactccagagacattcctgacgacgatcagagatgagcctgaagtcccagtgagtggaggtccatccggagacttcgaactccctgaagaggaaaccacacagcctgacacagcaaatgaggtggtcgctgtgggaggcgccgccgccaaagcctcctcacctcctgggaccctgccaaaaggcgctaggcctggtccaggcctcctggacaacgcaattgactcagggtcttccgccgcccagttgccccagaaatctatcctggagagaaaagaagtgctggtggccgtgatcgttggaggggtggtcggggcgctgtttgcagcatttctggtcaccctgttaatctacaggatgaagaaaaaggacgaaggttcatatacactcgaggaacccaagcaggcaagcgtgacctaccagaagccagataagcaagaggagttttacgcctag

SEQ ID NO: 339348 - DNA, 1329 bp, Artificial Sequence
  derived and/or modified sequence
atgaagcccggccccccccaccgggccggcgccgcccacggcgccggtgcaggcgccggcgcagccgccggacccggagcaagaggcctacttttgccaccacttttacttctgctgctcgccggcagagctgccggggctcaacgctggcgaagcgagaacttcgaacgccccgttgatcttgaggggagtggtgacgacgattctttccctgatgacgaattggacgacttatattcagggtctgggagcggatattttgagcaggagtcaggaattgagaccgctatgcggttctctccggacgttgcattggcagtgtccacaaccccagccgtgctccctactacaaacatccagccggtagggacccccttcgaggagctgccaagcgagcggcccacacttgaacccgccaccagcccccttgtagtgactgaggtgcccgaagagccttctcaacgcgccactacagtgtccacgaccatggctaccactgcggcaacttccactggcgatcctaccgtcgctacggtgcccgccacagttgcaacagccaccccaagtactcctgctgccccaccatttaccgctactaccgcggtgattcgaacaaccggtgtgcgccgtctgttaccactccccctcacaaccgtggcaacggcaagagccaccactccagaagcaccatccccgcccacaaccgccgctgtgctggacacagaggcccccactcccaggttggtctccactgctacctcacggcccagagccctgcctcgtcccgcaactacacaggaacccgatatccctgagcgttctacgctgcctttgggtacgacagcccctggtccaactgaagtggcacagacaccaacaccagaaacatttctcaccaccattcgggacgagccagaggtacccgtctcaggcggcccaagcggtgactttgaactcccagaagaagagacaacccagcccgacaccgccaatgaagtggtcgccgtgggcggcgccgcagctaaggcctccagtccccctggaacactccccaagggcgccagaccagggcccggcctgttggacaacgccatcgactcaggctcaagcgcagctcaactgccacaaaaatccattttagaacggaaagaagtacttgtggcagttatcgtcggaggcgtggttggagcactgtttgcggcctttttagtcaccctgttgatttaccggatgaaaaaaaaggacgagggatcttacaccctcgaggagcccaagcaggccagtgtcacctatcaaaaacccgacaagcaggaggaattttacgcatag

SEQ ID NO: 339349 - DNA, 1155 bp, Artificial Sequence
  derived and/or modified sequence
atggccatcgcatatttagggtccagctgccccagtcagccgcctagcagcctggccctctccctgtcacctacgcccagcgatttcgagcaagagagtgggattgagaccgctatgcgcttcagtccagacgtagccttagccgtgtcaaccactcctgccgtgctgccaacaacaaatatccaacctgtgggcacccccttcgaggagctccccagcgagcggcctacactggaacctgctactagccctctggtagtcaccgaggtgcctgaggaaccttcccagcgcgcaacaacagttagtaccaccatggccacaactgcagccacgtctactggtgaccccactgtcgccaccgtgccagctacagttgccactgctaccccaagtacaccagccgctccccctttcaccgcgacgacggcggtgatccgtacgaccggtgtacgacgcctgttgcccctacctcttaccacggtcgccacagcaagggccacgacacctgaagcgccttcaccaccaactacggccgcagtgttggataccgaagcccctacacctagacttgtctcaacagcaacctcaaggccccgagcactcccccgaccagcgaccacacaggagcccgacattccagagcgcagtaccctacctctgggcacaacagccccagggcctaccgaagtggctcaaactcctactccagagaccttcctaactacaatccgggacgaaccagaggtgccggtatcaggtggacccagtggagactttgagctgccagaggaggaaacaacccagcctgataccgccaacgaggttgtggctgtgggcggtgcagccgctaaagcctcttcccctcccggaaccctaccaaagggcgctcgcccaggtccgggactgctggacaacgctatagacagtggatcttctgcagcgcagctgccgcagaagtccatcttggagaggaaggaagtcctggtggcagtgatagtgggtggggtagtgggagcactcttcgccgcatttctggtaacactcctgatctacagaatgaaaaagaaggacgagggatcttatactctcgaagagccaaagcaggcatcggttacctaccagaagccggataaacaggaggaattttacgcctag

SEQ ID NO: 339350 - DNA, 1329 bp, Artificial Sequence
  derived and/or modified sequence
atgaagccaggcccaccccatagagcaggggcagcacatggtgccggagctggtgcaggcgctgccgcaggccctggagctagggggctgctgctccctccacttctgctgctgctcctggcaggaagggccgcaggggctcaacgatggcgttctgaaaattttgagcgacccgtggatctcgagggctctggtgatgatgattcatttcctgatgatgagctggacgatctgtattccggctctggctccgggtacttcgagcaggagtcggggatagaaaccgccatgagattctcgcccgacgtagcactggcagtgtccacgaccccggcagtgctgccgactactaacatccagcccgtgggcacaccgtttgaggagttgccaagtgaacggccaaccctagagcctgccacctcacctctggttgtgacagaggtccccgaggaaccttcacaacgcgcaacgaccgtaagcaccaccatggccaccaccgctgcaaccagcactggcgatcctaccgttgctactgttcccgcaacggtggctacagctactccttccactcccgcagctcctcctttcactgccaccaccgccgtgatacggaccaccggcgttcgacgtctgctccccctacccttaaccaccgtcgccacagcaagggccaccacaccagaagccccatccccccctactaccgccgctgtgttagatacagaggcccctactcctcggttagtcagcaccgccacctctaggccccgtgcactgcccagaccagctactacacaggagcccgacatccctgaacggagtaccttgccattgggaactaccgccccaggcccaaccgaggttgcgcagacccctacaccagagactttcctgaccactatccgggatgagcctgaggttcctgttagtggaggacctagcggagattttgagttgcccgaggaggaaacaacccagcctgacactgccaatgaggtggtagctgtgggaggggctgcagcgaaagcctctagtcctcccggtaccctcccaaagggggctcgtccaggccctggcctactagacaatgccattgactccggtagttccgctgctcaactgccccagaaatccattctggagagaaaggaggtcctagtggcggtgatcgtgggcggtgtcgtgggcgcactttttgccgcattcctcgtgacactcttgatttatcggatgaaaaagaaagacgagggctcttatacactcgaagaacccaagcaagctagcgtgacgtatcaaaaacccgacaaacaagaagaattctatgcctag

SEQ ID NO: 339351 - DNA, 6392 bp, Artificial Sequence
  derived and/or modified sequence
gcccagcgctggcgcagtgagaacttcgagagacccgtggacctggagggctctggggatgatgactcctttcccgatgatgaactggatgacctctactcggggtcgggctcgggctgtaagtacccccctccctacctctgcctgggggcagtgaccagtctgtatccagcctcaactctgagaagcccacggggggcttgcttcagtgaggcagggggcattcactgcctgggtcaggcaagttcttcttgctctggatccccagaacaagaagggcagaacatccttctggggatagaacaagacctgggaggacctcagggcccagaatgtccaggtctccagggtcccacgtctgcatctttgtgtgtgctatgtggctttctctgcagaccttgcttggttccggtggtcccgtcaggtgcaataagctgtggccaatggtggggttagggcagtgatgacacagggcaggtgcttcaagtggtgcctgggatggccccgccctggggaaggggagccaggtcagctgggtctagcagaatctcgggagagaagggcaccgcgaaccccactctgccatgtagcaactgtgtgcccctcggtgctccccctccctgaatccctgtattttcacctgtggatggtgagaaatacgacttcttctcagtgcctctaggagggtttgggataggaagctggggtctggcacagaggaggagctctcaaaatggtagcaaaaagaaggcagctgagactgggcccagtgagggcacgggctggcatctgaggagatggtacggggtctgcacgccacagagctggctccccacagccctcgcctctggtctcccctccttagccaagtcctttgagcctctttcaaattaatctttgtaaaacccgtttatattgggtcacatctctattcgcaaagttccctggctcccctccctcctgcctggttccgagcccaggagctggctgtggcttctccctcccccatcccctactccccatctcatttcctcccaagttccttcactgtcccggctttgcgtcagccagattgctcaagcagttcccctgcctcaagggcttcttttcccttttaccctccgcctctgcctctgggggaagcccttagtgtaccacccctgccttgagcttgtggtaggggtgcctttggggtctgactcttcccagaatgccactcctgtgttcccctgcaagccccagcaagttttgcagccagtagcgcctcagttgctgctgcctggattcaacctcatagaaactgtaggctgggtgggcaggaatagtcaaggaaggcttcccgggagaggcggcccccagaatttttgacttggcagagagaagttggggaacatcagcaactgaccacctttagctgggctgtgccttcctcctttctctcatcttttctgggaaaattgggtaaagagagggggttgggagacctaatcttgatggccattgcttacctgggatcctcatgcccctcacaaccacccagctccctagctctctccctctcccccaccccctcagacttcgagcaggagtcgggcattgagacagccatgcgcttcagcccagatgtagccctggcggtgtccaccacacctgcggtgctgcccaccacgaacatccagcctgtgggcacaccatttgaagagctcccctctgagcgccccaccctggagccagccaccagccccctggtggtgacagaagtcccggaagagcccagccagagagccaccaccgtctccactaccatggctaccactgctgccacaagcacaggggacccgactgtggccacagtgcctgccacagtggccaccgccacccccagcacccctgcagcacccccttttacggccaccactgctgttataaggaccactggcgtacggaggcttctgcctctcccactgaccacagtggctacggcacgggccactacccccgaggcgccctccccgcccaccacggcggctgtcttggacaccgaggccccaacacccaggctggtcagcacagctacctcccggccaagagcccttcccaggccggccaccacccaggagcctgacatccctgagaggagcaccctgcccctggggaccactgcccctggacccacagaggtggctcagaccccaactccagagaccttcctgaccacaatccgggatgagccagaggttccggtgagtggggggcccagtggagacttcgagctgccagaagaagagaccacacaaccagacacagccaatgaggtggtagctgtgggaggggctgcggccaaggcatcatctccacctgggacactgcccaagggtgcccgcccgggccctggcctcctggacaatgccatcgactcgggcagctcagctgctcagctgcctcagaagagtatcctggagcggaaggaggtgctcgtagctgtgattgtgggcggggtggtgggcgccctctttgctgccttcttggtcacactgctcatctatcgtatgaagaaaaaggatgagggcagctacacgctggaggaacccaagcaggcgagcgtcacataccagaagcctgacaagcaggaggagttctatgcctagtggagccacagtgcctccctgcagcctcaacaccaccctgctgtccagtccccagcctggccccaccagcccaagcctgggactgggcctggaacctggccccagttcttctctgccctctctcccaaggtctgcccaggctgccagcctcacacagatcttccccgaggaagaggggctgctgccatctgccccagactgtgcccttacgagctcatctcttgttcccctcatccctgccaccagtctggggcttcaggacctcatgtcagatggatgggaggaagaaagctcctgattggctggtggtggaagaaagggtggggcttgagatgagcctgagccctgacttggcacccacagtgctcactgagatctcctttttggggcagagaggcactcaggctggtttccaggacaaacatttggtaaacacagcccttgaaatcatctagacactgcaacctcttgctcgtatcccagggcctctctctagctgggtgagagggtgtcccttgtcaccagcctgttttgtcctggtctctctggggttgttgaatctctcctcttgcctgccaagtacacatgtacccagacttcatttctttctgcatcttcccccaagaaacagcttcctgagggtgctggggcagccactggtgaggaggggctgctctgatgtccctcctatgaggggactctgcacagacaccattgcccacactatcaccatattttcactcagtcacacacaagacaaaagcatgcaatgacaaaaccatacgcaatcctgaccgcccagccaatcaagacatatcacagaacacacgcgtccttccaagaatgtttatcctcatgcatcacttacacacccccagacacgtactgcaatgcaagtcactagtcatggtcacatgacagtgacagtgtggcctcctcctaccccaaatacacccacactctggcaccacacacattgtctccagctttcaggcttactggggagggtggaatcgagccagaacaatcagcccatattgggtccccctaagttgccccgtcatactcagtcccatgccatggtgcccacaccaaccatgcagccgccaaccccagccagtgtcagacacaatcccatgtggatgcacagtctcactccacatgacctgctctcaatgctggagggaaacaggcaggcccttgcctttctcggaaaaagtgtggggccacagcccttttagggcattgcatgcaggtgggcctggcttcacccctacctgcttcctccccaccgcagctggcagagggggaggtttggggccagacccccactagctgggagcctgggggctcctctaaggctgaggaaggaaatttggccccaggttgttggggggtcttgggtctcccaggacggaaggcccagggcagggagggggcatgtggttgggctcctttatctccctgtgtccccttcctgctttgagctagggggctgactctgcctcccaggacacaagtctccaaagtgcctgtgagggcgggccctccgcaccctctgccctctgcctggcaggccaacctcagcccacctgcccagaggccctccctgtggacaccccctcacctatttggccaaacaattctggctgcagcttcaggggccatggctggaagcagcccctgcagatccctcaggccccgaggtcagggtttgagggatgagaccaggtgatagtgggggaggggttacttcctttgttacctagcaagtagggctatttccatcggtattttaaatgtggggtcacagatcttttggggagggtgtgcttggcagggggcctcttggagccaaagggatgtggtgtgagttgcgattggctggcactcacacccccacccctcacccacatcccagattcaagtcaggaaggcaggttttatttcagggcccttttcaagatgccctggcagcagatttctgcaggatgaggggtagcggtgtgtaggcagtgagggggaggttccaggggctgtcccacagcctgtcttttccaggctgggctccatcttccagtcccaaaaccctccttcacagggcccagaggcttgtgaggaagccaggtggacccagccttagaagagtgggcatggggggcccctgatatctggagggggcgggttggcctcagtcatctttggagcagaagggctgggtcctggggccacagaccacaaggctcagcctccctaccctgctccctggggtgctgctgtcttggagagcacagctctggtgagacggcctgggcaggccgaggctgagaaaccagggaggatagaggagaaaagggcttgggcccccagccccagaagatgctggaccccaggtgggagacccaacagtgggtgcagtttctcagtagggctggagccaatggtgggggtggccccggcaggcctggctcctcacatcccaggggttggcttctgatttggggcttgggctccaggcactggcttctcttctctgtgtccttagcatttgagagaagaggccaggggccttgttcatggatccctggacccaaggcagatgtccaggctttatcctcctgaggatgaggagtctgaccagcccaaatctgccctggccggcctgaccggggcaaggcagtccaagagagttcagtgaggaccagctaggctctcccaggtgcaatgtgggtgcagggccctcatgtccccctacccctgcctgtgatggagtgttctgaggggctttggcatttgctggaagcacagggagttccaaatgagagggagcttctgtggcttgagagcctctggggccttggctgccagagcacgaggcaggccaggacctggagagcccagaccctgtctccaggaggccaggaggccagatgggggccttgcctgaaagactggtccccttgatcgctggaggcatgtgggtggcaaccagggctgggcagggcttagggtgtgtgggccaaacccccctggggttggcaaagccgcctgtcaggcctcctggtgggggcccctggacacagggagcagaccctctgcctcatggggtaggagtggctgcctcctgtgttctctggatttcttctcccaacaactacaaccctggacttgcctccccaggcctcttgcctgtaaatagaagcccgcaaactgtacagatttacagaggcatcgagactgggccctgggagttgccatctgagagccgatggccccagcatcccccaggtgcctgcctggcaccacagtgaccctggcctcagcgtggcaaatgcatgtaaatatttttcgtaggcagcgtggctccagagagccccctgaagacagtgtccctccctcctgtgagtcctttctcctgtacagaacctgcctggggtgggtgggggtctgccattccctcccccaggccttccctgccccttctctcccctgtaacctgtttattaaccatacctgtcctgagttcatggccaaaaccttaaataagaaaaacaaaagaaaaagacagtggaaaaaagagaccaaggcgcctgccccactgcgggtactctcctgttccagccttgtgaaggaactggttttgtttttgtttttttttttttttttttttttttgtttgtttgtttttttaacacttcctgtgctgtgcccatttataagaggaaataaaattaagctgaaatg

SEQ ID NO: 339352 - DNA, 1580 bp, Artificial Sequence
  derived and/or modified sequence
gctgtgggcgcggagctgcgaggcggagccgggcggccgagccgggagcccgcgagcctagagcgcgtcggtccagccgccgggccgcgccgccgccaagcagccgccccgcgcgccgcgcctcgggaacaaaggcgcccgcccgccgcccgccgcccgcgcccgcgccgccgccatgaagccggggccgccgcaccgtgccggggccgcccacggggccggcgccggggccggggccgcggccgggcccggggcccgcgggctgctcctgccaccgctgctgctgctgctgctggcggggcgcgccgcgggggcccagcgctggcgcagtgagaacttcgagagacccgtggacctggagggctctggggatgatgactcctttcccgatgatgaactggatgacctctactcggggtcgggctcgggctacttcgagcaggagtcgggcattgagacagccatgcgcttcagcccagatgtagccctggcggtgtccaccacacctgcggtgctgcccaccacgaacatccagcctgtgggcacaccatttgaagagctcccctctgagcgccccaccctggagccagccaccagccccctggtggtgacagaagtcccggaagagcccagccagagagccaccaccgtctccactaccatggctaccactgctgccacaagcacaggggacccgactgtggccacagtgcctgccacagtggccaccgccacccccagcacccctgcagcacccccttttacggccaccactgctgttataaggaccactggcgtacggaggcttctgcctctcccactgaccacagtggctacggcacgggccactacccccgaggcgccctccccgcccaccacggcggctgtcttggacaccgaggccccaacacccaggctggtcagcacagctacctcccggccaagagcccttcccaggccggccaccacccaggagcctgacatccctgagaggagcaccctgcccctggggaccactgcccctggacccacagaggtggctcagaccccaactccagagaccttcctgaccacaatccgggatgagccagaggttccggtgagtggggggcccagtggagacttcgagctgccagaagaagagaccacacaaccagacacagccaatgaggtggtagctgtgggaggggctgcggccaaggcatcatctccacctgggacactgcccaagggtgcccgcccgggccctggcctcctggacaatgccatcgactcgggcagctcagctgctcagctgcctcagaagagtatcctggagcggaaggaggtgctcgtagctgtgattgtgggcggggtggtgggcgccctctttgctgccttcttggtcacactgctcatctatcgtatgaagaaaaaggatgagggcagctacacgctggaggaacccaagcaggcgagcgtcacataccagaagcctgacaagcaggaggagttctatgcctagtggagccacagtgcctccctgcagcctcaacaccaccctgctgtccagtccccagcctggccccaccagcccaagc

SEQ ID NO: 339353 - DNA, 491 bp, Artificial Sequence
  derived and/or modified sequence
gaggagcagctggttgatccaggagagacagggaggcgctgagatgagatgagctctctcccttatgtggagaagtccttttaggaatctgccatgtttaaatgactttggacttgggccggaactacacatcagctctcctgggcctctagcttgccaactacggacactgtgacttttcagccatcacaattgttatttagggagaaagaagagattgagtcacagtttcagaaaagaaagggtagcctggaaaaaaaagagaagcaacagttcctgagggaagaatgcattaacaactcggatgggtgctgtctgccagcactgcagaggaacctacggagagggctgctgggagagaatgctcatacctcccaaggcgtcagcctgccctcccgcccccaagttgctttgctcaagagggtgaaggggaaccagagcgcacaagggaactgactcaggaggcagagaagatgggcatcctcagcgta

SEQ ID NO: 339354 - DNA, 114 bp, Artificial Sequence
  derived and/or modified sequence
atgggggacgaaaaggattcgtggaaggtcaaaaccctggacgagattctacaggagaagaaaaggcggaaggaacaggaggaaaaggcagaaattaaaagactaaagaattag

SEQ ID NO: 339355 - DNA, 114 bp, Artificial Sequence
  derived and/or modified sequence
atgggagatgagaaggacagctggaaggtgaagaccctggatgagatcctgcaggagaagaagaggaggaaggagcaggaggagaaggccgagatcaagaggctgaagaactag

SEQ ID NO: 339356 - DNA, 114 bp, Artificial Sequence
  derived and/or modified sequence
atgggcgacgagaaggacagctggaaggtgaagaccctggacgagatactgcaagagaaaaagagacggaaagaacaggaagaaaaggctgagatcaagaggctgaagaactag

SEQ ID NO: 339357 - DNA, 114 bp, Artificial Sequence
  derived and/or modified sequence
atgggcgacgagaaagactcttggaaggttaaaactttggacgaaattttacaagaaaagaagcgcaggaaagagcaggaggagaaagccgagatcaagaggttgaaaaattag

SEQ ID NO: 339358 - DNA, 114 bp, Artificial Sequence
  derived and/or modified sequence
atgggcgacgagaaggacagctggaaggtgaagaccctggacgagatcctgcaggagaagaagagaagaaaggagcaggaggagaaggccgagatcaagagactgaagaactag

SEQ ID NO: 339359 - protein, 605 aa, Artificial Sequence
  derived and/or modified sequence
MNMFDADTTTNLVTISFILPIGVHVFGLCSTALITDIIQLSTGYQAPYFLTVCKPNYTSLNVSCKENSYIVEDICSGSDLTVINSGRKSFPSQHATLAAFAAVYVSMYFNSTLTDSSKLLKPLLVFTFIICGIICGLTRITQYKNHPVDVYCGFLIGGGIALYLGLYAVGNFLPSDESMFQHRDALRSLTDLNQDPNRLLSAKNGSSSDGIAHTEGILNRNHRDASSLTNLKRANADVEIITPRSPMGKENMVTFSNTLPRANTPSVEDPVRRNASIHASMDSARSKQLLTQWKNKNESRKLSLQVIEPEPGQSPPRSIEMRSSSEPSRVGVNGDHHGPGNQYLKIQPGAVPGCNNSMPGGPRVSIQSRPGSSQLVHIPEETQENISTSPKSSSARAKWLKAAEKTVACNRSNSQPRIMQVIAMSKQQGVLQSSPKNTEGSTVSCTGSIRYKTLTDHEPSGIVRVEAHPENNRPIIQIPSTEGEGSGSWKWKAPEKGSLRQTYELNDLNRDSESCESLKDSFGSGDRKRSNIDSNEHHHHGITTIRVTPVEGSEIGSETLSISSSRDSTLRRKGNIILIPERSNSPENTRNIFYKGTSPTRAYKD

SEQ ID NO: 339360 - protein, 740 aa, Artificial Sequence
  derived and/or modified sequence
MAESRGRLYLWMCLAAALASFLMGFMVGWFIKPLKETTTSVRYHQSIRWKLVSEMKAENIKSFLRSFTKLPHLAGTEQNFLLAKKIQTQWKKFGLDSAKLVHYDVLLSYPNETNANYISIVDEHETEIFKTSYLEPPPDGYENVTNIVPPYNAFSAQGMPEGDLVYVNYARTEDFFKLEREMGINCTGKIVIARYGKIFRGNKVKNAMLAGAIGIILYSDPADYFAPEVQPYPKGWNLPGTAAQRGNVLNLNGAGDPLTPGYPAKEYTFRLDVEEGVGIPRIPVHPIGYNDAEILLRYLGGIAPPDKSWKGALNVSYSIGPGFTGSDSFRKVRMHVYNINKITRIYNVVGTIRGSVEPDRYVILGGHRDSWVFGAIDPTSGVAVLQEIARSFGKLMSKGWRPRRTIIFASWDAEEFGLLGSTEWAEENVKILQERSIAYINSDSSIEGNYTLRVDCTPLLYQLVYKLTKEIPSPDDGFESKSLYESWLEKDPSPENKNLPRINKLGSGSDFEAYFQRLGIASGRARYTKNKKTDKYSSYPVYHTIYETFELVEKFYDPTFKKQLSVAQLRGALVYELVDSKIIPFNIQDYAEALKNYAASIYNLSKKHDQQLTDHGVSFDSLFSAVKNFSEAASDFHKRLIQVDLNNPIAVRMMNDQLMLLERAFIDPLGLPGKLFYRHIIFAPSSHNKYAGESFPGIYDAIFDIENKANSRLAWKEVKKHISIAAFTIQAAAGTLKEVL

SEQ ID NO: 339361 - DNA, 2223 bp, Artificial Sequence
  derived and/or modified sequence
atggcagagtcccgcggcagactatatttatggatgtgtctcgctgccgcgctggcaagtttcctcatgggtttcatggtgggatggttcattaagccattaaaggaaactacaacctccgtcaggtatcaccagtcaatcaggtggaaactggtgtctgaaatgaaggcggagaacatcaagtccttcctgcgctcctttactaaattgccccacctagccggcaccgagcagaatttccttcttgctaaaaagattcagacacaatggaagaaatttggattagattcggccaagctggtgcactacgatgttctgctcagttatcccaacgagactaatgcgaactatatttcaattgtggatgagcatgaaaccgagatcttcaagacaagctacctggagcccccgccggacggctacgagaatgttactaatatcgtgccaccatacaacgccttttctgcccagggaatgcccgaaggcgatttggtctacgtaaattatgcgcgtacggaagattttttcaaacttgagcgggagatggggattaactgcacgggcaaaatcgtgatcgccaggtacggcaaaatcttcaggggcaataaggtcaaaaacgcaatgctcgctggcgctattggaattattctctactctgatcccgcggactactttgctcccgaagtgcagccttaccctaagggctggaacttgcctggtactgctgcacagagaggcaatgtgctgaatctcaacggcgccggggacccgcttactcccggttatccagcaaaggagtacacgttccgtctggatgtggaagaaggcgtcggtattcccagaattccggtacaccccatcgggtataatgacgcagagatcttgcttcgatatctgggtggaatagctcctccagacaagtcgtggaagggcgcactcaatgtgtcttatagcattgggcctggtttcacagggtcagactccttccgcaaagtccgcatgcacgtgtataatataaataaaattacacgcatctataacgtcgtgggcacaatccggggttcagttgagcccgaccgctacgtcatcttgggcggacatcgtgattcttgggttttcggcgcaattgaccccaccagtggtgtcgccgtcttacaggagatagcccgcagttttggaaagctgatgtctaaaggatggagaccgcgacggaccatcatcttcgccagctgggatgcagaggaattcggccttctgggaagcacagagtgggctgaagaaaacgtcaaaatactgcaggagcgaagcatcgcatacatcaacagtgacagtagcattgaaggtaactatactttgagggtcgactgtaccccccttttgtaccagcttgtctacaagctcactaaagaaatacctagtccggacgatggtttcgagtcaaagagcctatacgaatcctggctggagaaagaccctagtcccgagaacaagaacttgccacggattaataagcttgggagcggttccgacttcgaggcatacttccagaggctagggatagcctctgggcgggccaggtataccaaaaacaagaaaaccgacaaatactcgtcataccccgtgtaccacacaatttatgagacatttgagctggtagagaagttttacgacccgacgttcaagaagcagttgtctgtcgcccagctaaggggcgctctagtatacgagcttgtcgattcaaagattatccccttcaacatccaggactacgctgaagcacttaagaattacgcggccagcatatataatttaagtaaaaagcacgaccagcagctcaccgatcatggcgtcagtttcgatagtttgttctccgcagtgaagaacttctctgaggcagcctcagacttccataaaaggctgatccaagtggatctgaacaaccctatagccgtacggatgatgaatgaccagttgatgctgctggaacgagctttcatcgacccccttgggcttccagggaaactgttttaccggcacatcatctttgctcccagctcccacaataagtacgccggggagtcttttccgggcatttatgacgctatctttgatatcgaaaacaaggcgaatagcagattagcttggaaagaggtcaagaagcacatctccatcgccgcatttacaattcaggcggctgctggaaccctgaaggaggtgctctag

SEQ ID NO: 339362 - DNA, 2223 bp, Artificial Sequence
  derived and/or modified sequence
atggccgagagccggggccgcctgtacctgtggatgtgcctggccgccgccctggccagcttcctgatgggcttcatggtgggctggttcatcaagcccctgaaggagaccaccacctctgtgcgctaccaccagagcatccgctggaagctggtgtctgagatgaaggccgagaacatcaagagcttcctgcggagcttcaccaagctgccccacctggccggcacagagcagaacttcctgctggccaagaagatccagacccagtggaagaagtttggcctggacagcgccaagctggtgcactatgatgtgctgctgagctacccaaatgagaccaatgccaactacatcagcatcgtggatgagcacgagacagagatcttcaagaccagctacctggagcccccaccagatggctatgaaaatgtgaccaacatcgtgcccccctacaatgccttcagcgcccagggcatgcctgagggggacctggtgtatgtgaactatgccaggacagaggacttcttcaagctggagcgggagatgggcatcaactgcaccgggaagatcgtcatcgcccgctatggcaagatcttccggggcaacaaggtgaagaatgccatgctggccggggccatcggcatcatcctgtacagcgaccctgctgactactttgcccctgaggtgcagccctaccccaagggctggaacctgcctggaacagctgcccagagaggaaatgtgctgaacctgaatggagctggggaccccctgaccccaggctacccagccaaggagtacaccttccggctggatgtggaggagggcgtgggcatcccccgcatccctgtgcaccccatcggctacaatgatgctgagatcctgctgcgctacctgggcggcatcgcccccccagacaagtcctggaagggggccctgaatgtgtcctacagcatcggccctggcttcaccggcagtgacagcttcaggaaggtgaggatgcacgtgtacaacatcaacaagatcacccgcatctacaacgtggtgggcaccatccggggctctgtggagccagacagatatgtgatcctgggcggccaccgggacagctgggtgtttggagccatcgaccccaccagcggcgtggccgtgctgcaggagatcgcccggagctttgggaagctgatgagcaagggctggaggcccaggaggaccatcatctttgcctcctgggatgctgaggagtttggcctgctgggcagcacagagtgggccgaggagaatgtgaagatcctgcaggagaggagcatcgcctacatcaacagcgacagcagcattgagggcaactacaccctgcgggtggactgcacccccctgctgtaccagctggtgtacaagctgaccaaggagatccccagcccagatgatggctttgagagcaagagcctgtatgagagctggctggagaaggaccccagccctgagaacaagaacctgccccgcatcaacaagctgggcagcggcagtgactttgaggcctacttccagaggctgggcatcgccagcggccgggcccgctacaccaagaacaagaagacagacaagtacagcagctaccctgtgtaccacaccatctatgagacctttgagctggtggagaagttctatgaccccaccttcaagaagcagctgtctgtggcccagctgcggggggccctggtgtatgagctggtggacagcaagatcatccccttcaacatccaggactatgcagaggccctgaagaactatgctgccagcatctacaacctgagcaagaagcatgaccagcagctgacagaccatggagtgtcctttgacagcctcttctctgctgtgaagaacttcagcgaggccgccagtgacttccacaagaggctcatccaggtggacctgaacaaccccatcgctgtgaggatgatgaatgaccagctgatgctgctggagcgggccttcatcgaccccctgggcctgcccgggaagctgttctaccgccacatcatctttgcccccagcagccacaacaagtatgctggggagagcttccctggcatctatgatgccatctttgatattgagaacaaggccaacagccggctggcctggaaggaggtgaagaagcacatcagcattgctgccttcaccatccaggccgctgctggcaccctgaaggaggtgctgtag

SEQ ID NO: 339363 - DNA, 730 bp, Artificial Sequence
  derived and/or modified sequence
aaaacctgaaattttgtggcacagcacctggtgagactgtgggtttgacaaatatctcaccactttatcatcaagttaaacattattcttttttattaaagcttaataattaaagcttaattctgcaagtgaaatttatatatactgctttattagtacatatatgacactttgttttcaaacattgccataacctgtttgaaggaacttgagcttcagggttacaaaactgcttctgctatgatggagaagaggaggaaaaaatgcttagataagagcaatttaacttaaatggaggaagtgtgtctatattgacaaaagtccaaagacttgttgagccagctaactgggctttttacaatggcttttcaagattgcagatgccgcctacagagacgacagtcatatttgagccccgaagctcgcgaatgtagcaggcgccccaagctcggtcctcaagaagccatggcggaatccaggggccgtctgtacctttggatgtgcttggctgctgcgctggcatctttcctgatgggatttatggtgggctggtttattaagcctctcaaagaaacgaccacttctgtgcgctatcatcaaagtatacggtggaaactggtatccgaaatgaaagctgaaaacatcaaatcatttcttcgttcttttacaaagcttcctcatctggcaggaacagaacaaaatttcttgcttgccaagaaaatccaaaccc

SEQ ID NO: 339364 - DNA, 3600 bp, Artificial Sequence
  derived and/or modified sequence
agttgcccgccaacaggaagaatgtctcctccctctgcagggcttcctttcccccatcgagggcccctggggaccacaggtccccagcgggtagggcggaggcgtggccttgcgaaggtcagcggaggccacccagagctcacagcctcctgccagcgcgctctctgtttctctgcagccccgaagctcgcgaatgtagcaggcgccccaagctcggtcctcaagaagccatggcggaatccaggggccgtctgtacctttggatgtgcttggctgctgcgctggcatctttcctgatgggatttatggtgggctggtttattaagcctctcaaagaaacgaccacttctgtgcgctatcatcaaagtatacggtggaaactggtatccgaaatgaaagctgaaaacatcaaatcatttcttcgttcttttacaaagcttcctcatctggcaggaacagaacaaaatttcttgcttgccaagaaaatccaaacccagtggaagaaatttggactagattcagccaagttggttcattatgatgtcctcttatcttaccccaatgagacaaatgccaactatatatcgattgtggatgaacatgaaactgagattttcaaaacatcataccttgaaccaccaccagatggctatgagaatgttacaaatattgtgccaccatataatgctttctcagcccaaggcatgccagagggagatcttgtatatgtgaactatgctcgcactgaagactttttcaaactagaaagagagatgggcatcaactgtactgggaagattgttattgcaagatatggaaaaatcttcagaggaaataaagttaaaaatgccatgttagcaggagccataggaatcatcttgtactcagatccagctgactactttgctcctgaggtacagccatatcccaaaggatggaatcttcctggaactgcagcccagagaggaaatgtgttaaatttgaatggtgctggtgacccactcactccaggctatccagcaaaagaatacactttcagacttgatgttgaagaaggagtgggaatcccccgaatacctgtacatcccattggatataatgatgcagaaatattattacgctacttgggaggaattgctccaccagataagagttggaagggagcccttaatgtgagttatagtatcggacctggctttacagggagtgattctttcaggaaggttagaatgcatgtttataacatcaataaaattacaaggatttacaatgtagttggaactatcagaggatctgtggaacctgacaggtatgttattctgggaggtcaccgggactcctgggtatttggagctattgacccaaccagtggggttgctgttttgcaagaaattgcccggagttttggaaaactgatgagtaaaggctggagacctagaagaactatcatttttgccagctgggatgcagaagaatttggacttctgggttccacagaatgggctgaggagaatgtcaaaatactccaggagagaagcattgcttatatcaactcggattcatctatagaaggcaattatactctcagagttgactgtactccccttctttaccaattagtgtataaactgacaaaagagatccccagccctgatgatgggtttgagagtaaatcactgtatgaaagctggttggaaaaagacccttcacctgaaaataaaaatttgcctagaatcaataagctgggatctggaagtgactttgaagcttattttcagagacttggaattgcttcaggcagagcccgttacactaagaataagaaaacagataagtacagcagctacccagtgtaccacacaatttatgagacatttgaattggtagagaaattttatgaccccacatttaaaaaacaactttctgtggctcaattacgaggagcactggtatatgagcttgtggattctaaaatcattccttttaatattcaagactatgcagaagctttgaaaaactatgcagcaagtatctataatctatctaagaaacatgatcaacaattgacagaccatggagtatcatttgactccttattttctgctgtgaaaaacttctcagaggctgcttcagattttcataaacgacttatacaagttgatcttaacaatcccattgcagtgagaatgatgaatgaccaactgatgctcctggaaagagcattcatcgatcctcttggtttaccaggaaagctgttctataggcacatcatatttgctccaagtagccacaacaaatatgctggagaatcatttcctggaatctatgatgctatctttgatattgaaaataaagccaactctcgtttggcctggaaagaagtaaagaaacatatttctattgcagcttttacaattcaagcagcagcaggaactctgaaagaagtattatagaaggtctcaagtggctagccattaaaggtgttgctaaaagtctgaggataaaattcacctttctgataacttatgaagccagggtgttctaaactcttttcatgtcatgttttgattataggctttggtcttttcatctgcaaagccttttttttttgctctttaaaagttaataattatattagcaaagtgttaatctaatgaagtaaaaaactcctgtgtggcagaaagtaaaagaaaattccctaaattatagcaaggaacatgaattctcagacattgtgagtgtgggaatgtaaaatggtaaaatcacttttgaaaacagtttggcagtttcctataaagttaaacatacacttttactttaggactccagaattccacttctagttatttattcaagagaaggaaaaacaatgatcacagcaatacttgtatgcatgttcattgcaacttaaaagcgtaaaaaccccaaatgtccatccacagacgaatgtataaactgtggtatccattacacaatagactacttactactcagcaataaaaatgaagtaactttcaataaatgcaatattattggcagacattgttgaaggaaaaaagccagacaaacaactacataaaatatgtttctatttagatgaagtggcaaactaatctgtagtgttaaaaattagattagtgattgcctgggccaagtggcaggttggggaggatggctgcaaagaagtatgaggaaactttctccaatagatgagaattttccgtatcttgatctgagtggcaaattgtaaacttaaaatatatataaaatttattgtatgaaaattaagcctcaataaacgtgattataaaaaacaagtctgcaaggaaaccagaatcatataccttctcttgtgaaatcaccatgaagtgtgaatggtcaggaaaaagccagtaatattcatacatttaataatttcagctctactgaataaacatataagtctgatgggtgatgaaaatagctactacaatcttcatattctaactcctataaagactgtatatcagaatctgcaaacttttatgcagatcccagtgactcaattacatgttcaactatgattaaagcttcaataaacttggttgttcatctacttca

SEQ ID NO: 339365 - DNA, 2223 bp, Artificial Sequence
  derived and/or modified sequence
atggccgagagccggggccggctgtacctgtggatgtgcctggccgctgctctcgcgtccttcctgatggggtttatggtgggttggtttataaagcccctcaaagagaccactacgagcgtgcgttatcaccagtccataaggtggaagttggtgtccgagatgaaggccgaaaacatcaaatcattccttcgtagtttcaccaaattgcctcacttggccggcaccgaacagaattttctgcttgctaaaaagatccaaacccaatggaaaaaatttggcttggattccgctaagcttgttcactacgatgtccttctatcctatcctaatgagaccaatgccaattatatctcaatcgtggatgagcacgaaaccgagattttcaagacaagctatttagaaccacctcccgatgggtacgagaacgtgactaacatcgtacccccatacaacgctttcagtgctcaaggtatgcccgagggtgatctggtatacgttaactacgctcgcacagaagattttttcaagttggaacgggagatggggattaactgcactggaaaaattgtcattgctcggtatggtaagattttcaggggtaacaaggtgaaaaacgctatgctggccggggccattggaatcattctctactccgaccccgcggattactttgcaccggaggtgcagccctaccccaagggctggaatctgccaggcacggcagcccagagaggaaatgtcttaaacttaaatggagccggagatcctttgacaccagggtatcctgccaaggaatatacgttcagactggacgtagaagaaggcgtgggaattccgaggataccagtgcacccaatcggttataacgatgccgagatcctactccggtatctagggggcattgcacctcctgacaaatcctggaaaggcgctctcaacgtgagctactcaatcggccccggatttacggggagcgactcctttaggaaagtaagaatgcacgtctataatataaataagattacacgtatctacaacgtcgtgggcaccatcagaggctctgtggagccagaccggtacgtgatcctgggtggtcaccgcgacagctgggtgttcggggctatcgatcccacttccggtgtcgccgtcctccaggaaatcgcacgatcctttggcaaacttatgtcgaaaggatggcgacctcgccgtacaatcatcttcgcatcttgggacgcggaagaattcggcctgctcggatccactgagtgggcggaggagaatgtcaagatcctccaagagagaagcattgcctatataaacagtgactcaagcatcgaaggcaattacactctgcgcgtggactgtacaccccttctgtaccagctggtgtataaactcaccaaggaaatacctagccctgacgacggctttgagtccaaatccctctatgaatcctggctggagaaagacccttctcctgagaacaagaacctgcctcgtattaacaagctgggaagcggatcggacttcgaagcttacttccagagactgggcatcgcgtcaggtagagcaaggtacactaaaaacaagaagaccgacaagtactccagctatccagtctatcacaccatctacgagactttcgagctggtggagaagttctacgacccaaccttcaagaagcagctcagtgtcgctcagttgcggggcgccctggtgtacgaactggtggactcaaagatcatacccttcaatatccaggattacgccgaagctctgaaaaattatgcagctagcatctacaacctttcaaagaagcacgaccaacagctgaccgaccacggcgtgtcttttgattcccttttctctgctgttaagaacttctccgaggcagcaagcgattttcataagaggctgatacaggttgatctgaataacccaattgccgtgcgaatgatgaatgatcaactgatgctgcttgagcgagcattcatcgatcccctcgggctgcccggaaaattattttatcgacatattatctttgccccaagctctcacaacaagtacgctggggaatcttttccggggatatacgacgcgatatttgacatcgaaaataaggccaatagtcgcctggcttggaaggaagtgaaaaaacatatatccattgccgcattcaccatccaggccgcagctggcacccttaaagaggtcctgtag

SEQ ID NO: 339366 - DNA, 2223 bp, Artificial Sequence
  derived and/or modified sequence
atggccgagtcacggggacgactgtatctttggatgtgtctggctgccgctctggcgagcttcctcatgggttttatggtaggatggttcattaaaccactaaaagagacaacaacttctgtgcgctaccatcagtccatccggtggaagcttgttagcgaaatgaaagccgagaatataaagagttttttgaggagttttaccaagctgcctcacctggctggaactgagcagaactttctgttagccaaaaagattcagacccagtggaaaaaatttggactagactcagcaaagctggttcattatgacgtgttactttcatatcccaacgagaccaacgccaattacatttctatcgtcgatgaacacgagactgagatcttcaagacctcatacctggaaccaccgcctgatgggtatgagaacgtgactaacatcgtgccaccttataacgcctttagtgcccagggaatgccggagggagaccttgtgtatgttaactatgcaaggactgaggatttctttaaactggaacgcgagatgggcatcaattgtacaggcaaaatcgtgatcgcaaggtacgggaaaatcttccgtggtaacaaggtcaagaatgcaatgctggccggagcaatcggaataatcctttactccgaccctgccgattatttcgcacctgaggttcagccctatcccaagggatggaatctgcccggaaccgccgctcagcgcggaaatgtcttgaatctgaatggagcaggggaccctctgacaccgggatatcccgcaaaagaatatacctttagactggacgtcgaggaaggcgttggcatcccccgtatccccgtccacccgatcgggtacaatgatgccgagattctcctacggtaccttggtgggattgcccctcctgataaatcctggaaaggagctctgaatgtaagctatagcatcggcccaggattcacaggctctgactcctttcgcaaagtgaggatgcacgtttacaatatcaacaaaataacgcgcatttataacgtcgtgggcaccattcggggttccgtcgagccagatcgctacgtgattctgggcggacacagggatagctgggttttcggggcaattgatcctactagcggggttgccgtcttgcaagagattgcgagatcttttggcaaactcatgtctaagggctggcgacctcgcagaacaatcatcttcgcttcctgggacgccgaggaattcggactgctgggatctacagaatgggcagaggagaatgtgaaaatcctgcaggagaggtcaatcgcctatattaattctgattcctccatagaaggtaactatacactgcgcgtggactgtacccccttactgtaccagttagtgtataagctaaccaaagagatcccatccccagacgatggattcgaaagcaaatcattatatgaatcttggctggagaaggacccctcaccagaaaacaagaatctgccacgcattaataaactgggcagcggttctgacttcgaggcttactttcagcgtctgggaattgcctctggccgagctaggtacacgaaaaacaagaagacagataaatacagcagttatcccgtgtatcacaccatctacgagacctttgaactagtagaaaaattttacgaccccacctttaaaaagcagctgagcgtagcccaattacgcggtgcactggtctacgagttggtcgactccaagattatcccttttaatatccaagactatgctgaggctttaaagaactacgccgcaagcatttataatctctctaagaagcacgatcagcaactgaccgatcacggtgtttccttcgattccttgttttctgccgtcaaaaacttctcggaagcagctagtgattttcacaaacggctgattcaggtcgacttaaataatccaatcgccgtgcgcatgatgaatgaccaactgatgctactggagcgagcctttatcgatcctctggggctgcccggtaaactgttctaccgacacatcatatttgccccttcgtcccacaacaaatatgccggtgaaagctttcccggaatttacgatgcgatttttgatatcgagaacaaagccaattcccgcctagcctggaaagaagttaaaaagcacatttccatcgcagcctttactattcaggctgccgcaggcactctgaaggaagtgctctag

SEQ ID NO: 339367 - DNA, 2223 bp, Artificial Sequence
  derived and/or modified sequence
atggccgagagcagaggcagactgtacctgtggatgtgcctggccgccgccctggccagcttcctgatgggcttcatggtgggctggttcatcaagcccctgaaggagaccaccaccagcgtgagataccaccagagcatcagatggaagctggtgagcgagatgaaggccgagaacatcaagagcttcctgagaagcttcaccaagctgccccacctggccggcaccgagcagaacttcctgctggccaagaagatccagacccagtggaagaagttcggcctggacagcgccaagctggtgcactacgacgtgctgctgagctaccccaacgagaccaacgccaactacatcagcatcgtggacgagcacgagaccgagatcttcaagaccagctacctggagcccccccccgacggctacgagaacgtgaccaacatcgtgcccccctacaacgccttcagcgcccagggcatgcccgagggcgacctggtgtacgtgaactacgccagaaccgaggacttcttcaagctggagagagagatgggcatcaactgcaccggcaagatcgtgatcgccagatacggcaagatcttcagaggcaacaaggtgaagaacgccatgctggccggcgccatcggcatcatcctgtacagcgaccccgccgactacttcgcccccgaggtgcagccctaccccaagggctggaacctgcccggcaccgccgcccagagaggcaacgtgctgaacctgaacggcgccggcgaccccctgacccccggctaccccgccaaggagtacaccttcagactggacgtggaggagggcgtgggcatccccagaatccccgtgcaccccatcggctacaacgacgccgagatcctgctgagatacctgggcggcatcgccccccccgacaagagctggaagggcgccctgaacgtgagctacagcatcggccccggcttcaccggcagcgacagcttcagaaaggtgagaatgcacgtgtacaacatcaacaagatcaccagaatctacaacgtggtgggcaccatcagaggcagcgtggagcccgacagatacgtgatcctgggcggccacagagacagctgggtgttcggcgccatcgaccccaccagcggcgtggccgtgctgcaggagatcgccagaagcttcggcaagctgatgagcaagggctggagacccagaagaaccatcatcttcgccagctgggacgccgaggagttcggcctgctgggcagcaccgagtgggccgaggagaacgtgaagatcctgcaggagagaagcatcgcctacatcaacagcgacagcagcatcgagggcaactacaccctgagagtggactgcacccccctgctgtaccagctggtgtacaagctgaccaaggagatccccagccccgacgacggcttcgagagcaagagcctgtacgagagctggctggagaaggaccccagccccgagaacaagaacctgcccagaatcaacaagctgggcagcggcagcgacttcgaggcctacttccagagactgggcatcgccagcggcagagccagatacaccaagaacaagaagaccgacaagtacagcagctaccccgtgtaccacaccatctacgagaccttcgagctggtggagaagttctacgaccccaccttcaagaagcagctgagcgtggcccagctgagaggcgccctggtgtacgagctggtggacagcaagatcatccccttcaacatccaggactacgccgaggccctgaagaactacgccgccagcatctacaacctgagcaagaagcacgaccagcagctgaccgaccacggcgtgagcttcgacagcctgttcagcgccgtgaagaacttcagcgaggccgccagcgacttccacaagagactgatccaggtggacctgaacaaccccatcgccgtgagaatgatgaacgaccagctgatgctgctggagagagccttcatcgaccccctgggcctgcccggcaagctgttctacagacacatcatcttcgcccccagcagccacaacaagtacgccggcgagagcttccccggcatctacgacgccatcttcgacatcgagaacaaggccaacagcagactggcctggaaggaggtgaagaagcacatcagcatcgccgccttcaccatccaggccgccgccggcaccctgaaggaggtgctgtag

SEQ ID NO: 339368 - protein, 88 aa, Artificial Sequence
  derived and/or modified sequence
MAESRGRLYLWMCLAAALASFLMGFMVGWFIKPLKETTTSVRYHQSIRWKLVSEMKAENIKSFLRSFTKLPHLAGTEQNFLLAKKIQT

SEQ ID NO: 339369 - DNA, 267 bp, Artificial Sequence
  derived and/or modified sequence
atggctgaatcccggggccgattatacttgtggatgtgtctcgcagccgccctggcaagctttcttatgggatttatggtggggtggttcataaagcctctgaaagagacgactacgagcgtgcggtatcaccagtctatacggtggaaactagtgagcgagatgaaggccgagaacatcaaatcttttctacggtcgttcaccaaactgccacacctggcggggactgagcaaaacttcctgttggccaagaagatacagacctag

SEQ ID NO: 339370 - DNA, 267 bp, Artificial Sequence
  derived and/or modified sequence
atggccgagagccggggccgcctgtacctgtggatgtgcctggccgccgccctggccagcttcctgatgggcttcatggtgggctggttcatcaagcccctgaaggagaccaccacctctgtgcgctaccaccagagcatccgctggaagctggtgtctgagatgaaggccgagaacatcaagagcttcctgcggagcttcaccaagctgccccacctggccggcacagagcagaacttcctgctggccaagaagatccagacctag

SEQ ID NO: 339371 - DNA, 267 bp, Artificial Sequence
  derived and/or modified sequence
atggccgagagccggggccggctgtacctgtggatgtgcctggccgccgctctggcttcgttcctcatgggatttatggtcggctggtttatcaaaccactgaaggagacgacaacaagtgtgcgataccatcagtcgatcagatggaagctggttagcgagatgaaagcagagaatattaaatcattcttgcgatcttttacaaagctgccccatctcgctgggacagagcaaaacttcctcttggcaaagaagatccagacctag

SEQ ID NO: 339372 - DNA, 267 bp, Artificial Sequence
  derived and/or modified sequence
atggccgagtccagaggtcgattatatctgtggatgtgcctcgcagcagccctagcaagtttcctgatgggatttatggtgggttggttcataaaacctctgaaggagactactaccagtgtccgctaccatcagagcatacgctggaagctggtctcagagatgaaagctgagaacattaaatcttttctcagatcattcactaaactcccacacctggcagggactgagcagaattttctattagcaaaaaagatccagacttag

SEQ ID NO: 339373 - DNA, 267 bp, Artificial Sequence
  derived and/or modified sequence
atggccgagagcagaggcagactgtacctgtggatgtgcctggccgccgccctggccagcttcctgatgggcttcatggtgggctggttcatcaagcccctgaaggagaccaccaccagcgtgagataccaccagagcatcagatggaagctggtgagcgagatgaaggccgagaacatcaagagcttcctgagaagcttcaccaagctgccccacctggccggcaccgagcagaacttcctgctggccaagaagatccagacctag

SEQ ID NO: 339374 - DNA, 4511 bp, Artificial Sequence
  derived and/or modified sequence
aatgtaacagtttgcaaaccgagaggagttgtgaagggcgcgggtggggggcgctgccggcctcgtgggtacgttcgtgccgcgtctgtcccagagctggggccgcaggagcggaggcaagaggggcactatggcagacaaagttaggaggcagaggccgaggaggcgagtctgttgggccttggtggctgtgctcttggcagacctgttggcactgagtgatacactggcagtgatgtctgtggacctgggcagtgagtccatgaaggtggccattgtcttgaataaggaatctcggaggaaaacaccggtgatcgtgaccctgaaagaaaatgaaagattctttggagacagtgcagcaagcatggcgattaagaatccaaaggctacgctacgttacttccagcacctcctggggaagcaggcagataacccccatgtagctctttaccaggcccgcttcccggagcacgagctgactttcgacccacagaggcagactgtgcactttcagatcagctcgcagctgcagttctcacctgaggaagtgttgggcatggttctcaattattctcgttctctagctgaagattttgcagagcagcccatcaaggatgcagtgatcaccgtgccagtcttcttcaaccaggccgagcgccgagctgtgctgcaggctgctcgtatggctggcctcaaagtgctgcagctcatcaatgacaacaccgccactgccctcagctatggtgtcttccgccggaaagatattaacaccactgcccagaatatcatgttctatgacatgggctcaggcagcaccgtatgcaccattgtgacctaccagatggtgaagactaaggaagctgggatgcagccacagctgcagatccggggagtaggatttgaccgtaccctggggggcctggagatggagctccggcttcgagaacgcctggctgggcttttcaatgagcagcgcaagggtcagagagcaaaggatgtgcgggagaacccgcgtgccatggccaagctgctgcgtgaggctaatcggctcaaaaccgtcctcagtgccaacgctgaccacatggcacagattgaaggcctgatggatgatgtggacttcaaggcaaaagtgactcgtgtggaatttgaggagttgtgtgcagacttgtttgagcgggtgcctgggcctgtacagcaggccctccagagtgccgaaatgagtctggatgagattgagcaggtgatcctggtgggtggggccactcgggtccccagagttcaggaggtgctgctgaaggccgtgggcaaggaggagctggggaagaacatcaatgcagatgaagcagccgccatgggggcagtgtaccaggcagctgcgctcagcaaagcctttaaagtgaagccatttgtcgtccgagatgcagtggtctaccccatcctggtggagttcacgagggaggtggaggaggagcctgggattcacagcctgaagcacaataaacgggtactcttctctcggatggggccctaccctcaacgcaaagtcatcacctttaaccgctacagccatgatttcaacttccacatcaactacggcgacctgggcttcctggggcctgaagatcttcgggtatttggctcccagaatctgaccacagtgaagctaaaaggggtgggtgacagcttcaagaagtatcctgactacgagtccaagggcatcaaggctcacttcaacctggatgagagtggcgtgctcagtctagacagggtggagtctgtatttgagacactggtagaggacagcgcagaagaggaatctactctcaccaaacttggcaacaccatttccagcctgtttggaggcggtaccacaccagatgccaaggagaatggtactgatactgtccaggaggaagaggagagccctgcagaggggagcaaggacgagcctggggagcaggtggagctcaaggaggaagctgaggccccagtggaggatggctctcagcccccaccccctgaacctaagggagatgcaacccctgagggagaaaaggccacagaaaaagaaaatggggacaagtctgaggcccagaaaccaagtgagaaggcagaggcagggcctgagggcgtcgctccagccccagagggagagaagaagcagaagcccgccaggaagcggcgaatggtagaggagatcggggtggagctggttgttctggacctgcctgacttgccagaggataagctggctcagtcggtgcagaaacttcaggacttgacactccgagacctggagaagcaggaacgggaaaaagctgccaacagcttggaagcattcatatttgagacccaggacaagctgtaccagcccgagtaccaggaagtgtccacagaggagcagcgtgaggagatctctgggaagctcagcgccgcatccacctggctggaggatgagggtgttggagccaccacagtgatgttgaaggagaagctggctgagctgaggaagctgtgccaagggctgttttttcgggtagaggagcgcaagaagtggcccgaacggctgtctgccctcgataatctcctcaaccattccagcatgttcctcaagggggcccggctcatcccagagatggaccagatcttcactgaggtggagatgacaacgttagagaaagtcatcaatgagacctgggcctggaagaatgcaactctggccgagcaggctaagctgcccgccacagagaagcctgtgttgctctcaaaagacattgaagctaagatgatggccctggaccgagaggtgcagtatctgctcaataaggccaagtttaccaagccccggccccggcctaaggacaagaatgggacccgggcagagccacccctcaatgccagtgccagtgaccagggggagaaggtcatccctccagcaggccagactgaagatgcagagcccatttcagaacctgagaaagtagagactgcaggatccgagccaggagacactgagcctttggagttaggaggtcctggagcagaacctgaacagaaagaacaatcgacaggacagaagcggcctttgaagaacgacgaactataacccccacctctgttttccccattcatctccacccccttcccccaccacttctatttatttaacatcgagggttgggggaggggttggtcctgccctcggctggagttcctttctcacccctgtgatttggaggtgtggagaaggggaagggagggacagctcactggttccttctgcagtacctctgtggttaaaaatggaaactgttctcctccccagccccactccctgttccctacccatataggccctaaatttgggaaaaatcactattaatttctgaatcctttgcctgtgggtaggaagagaatggctgccagtggctgatgggtcccggtgatgggaagggtatcaggttgctggggagtttccactcttctctggtgattgttccttccctcccttcctctcccaccatgcgatgagcatcctttcaggccagtgtctgcagagcctcagttaccaggtttggtttctgagtgcctatctgtgctctttcctccctctgcgggcttctcttgctctgagcctcccttccccattccccatccagctcctttccccctgggtttccttggcttcctgcagcaaattgggcagttctctgccccttgcctaaaagcctgtacctctggattggcggaagtaaatctggaaggattctcactcgtatttcccacccctagtggccagaggagggaggggcacagtgaagaagggagcccaccacctctccgaagaggaaagccacgtagagtggttggcatggggtgccagcatcgtgcaagctctgtcataatctgcatcttcccagcagcctggtaccccaggttcctgtaactccctgcctcctcctctcttctgctgttctgctcctcccagacagagcctttccctcaccccctgaccccctgggctgaccaaaatgtgctttctactgtgagtccctatcccaagatcctggggaaaggagagaccatggtgtgaatgtagagatgccacctccctctctctgaggcaggcctgtggatgaaggaggagggtcagggctggccttcctctgtgcatcactctgctaggttgggggcccccgacccaccatacctacgcctagggagcccgtcctccagtattccgtctgtagcaggagctagggctgctgcctcagctccaagacaagaatgaacctggctgtgtcagtcattttgtcttttccttttttttttttttttgccacattggcagagatgggacctaagggtcccacccctcaccccacccccacctcttctgtatgtttgaattctttcagtagctgttgatgctggttggacaggtttgagtcaaattgtactttgctccattgttaattgagaaactgtttcaataaaatattcttttctac

SEQ ID NO: 339375 - protein, 980 aa, Artificial Sequence
  derived and/or modified sequence
MWQSRGPMLFHLGLCVGAAGMIREWFVPIRREKGSRLICPGGTMADKVRRQRPRRRVCWALVAVLLADLLALSDTLAVMSVDLGSESMKVAIVKPGVPMEIVLNKESRRKTPVIVTLKENERFFGDSAASMAIKNPKATLRYFQHLLGKQADNPHVALYQARFPEHELTFDPQRQTVHFQISSQLQFSPEEVLGMVLNYSRSLAEDFAEQPIKDAVITVPVFFNQAERRAVLQAARMAGLKVLQLINDNTATALSYGVFRRKDINTTAQNIMFYDMGSGSTVCTIVTYQMVKTKEAGMQPQLQIRGVGFDRTLGGLEMELRLRERLAGLFNEQRKGQRAKDVRENPRAMAKLLREANRLKTVLSANADHMAQIEGLMDDVDFKAKVTRVEFEELCADLFERVPGPVQQALQSAEMSLDEIEQVILVGGATRVPRVQEVLLKAVGKEELGKNINADEAAAMGAVYQAAALSKAFKVKPFVVRDAVVYPILVEFTREVEEEPGIHSLKHNKRVLFSRMGPYPQRKVITFNRYSHDFNFHINYGDLGFLGPEDLRVFGSQNLTTVKLKGVGDSFKKYPDYESKGIKAHFNLDESGVLSLDRVESVFETLVEDSAEEESTLTKLGNTISSLFGGGTTPDAKENGTDTVQKPSEKAEAGPEGVAPAPEGEKKQKPARKRRMVEEIGVELVVLDLPDLPEDKLAQSVQKLQDLTLRDLEKQEREKAANSLEAFIFETQDKLYQPEYQEVSTEEQREEISGKLSAASTWLEDEGVGATTVMLKEKLAELRKLCQGLFFRVEERKKWPERLSALDNLLNHSSMFLKGARLIPEMDQIFTEVEMTTLEKVINETWAWKNATLAEQAKLPATEKPVLLSKDIEAKMMALDREVQYLLNKAKFTKPRPRPKDKNGTRAEPPLNASASDQGEKVIPPAGQTEDAEPISEPEKVETGSEPGDTEPLELGGPGAEPEQKEQSTGQKRPLKNDEL

SEQ ID NO: 339376 - DNA, 3000 bp, Artificial Sequence
  derived and/or modified sequence
atggctgataaggtccgcagacaacgtcctaggcgtcgggtgtgttgggcactggtagcggtccttcttgctgacctgctcgccttgtcagacactctcgcagttatgtccgtcgatctcggcagcgaatccatgaaggtggctattgtgaagccaggcgtgcccatggagatagtcctgaacaaggagagccgaaggaaaacgcctgtaatcgtgactctcaaagagaacgagaggttcttcggagactccgccgcgtcaatggcaatcaagaatcccaaggccacactgagatacttccagcacctactcgggaaacaggctgacaatccacatgtcgccctgtaccaagccagattcccagagcacgagctgacctttgacccacagcgccagacagtccatttccagatcagctcacaactgcagttcagccccgaagaggtgttgggaatggtcctgaactattcgagatctttggccgaggacttcgcggaacaaccgataaaagacgccgtgatcactgtgccagtattttttaaccaggctgaaaggagagccgtcctgcaggcagcccggatggctggtttgaaggtcttgcaactgattaatgacaacaccgcaacggctctctcatacggggtgttccgcaggaaagatatcaacacaactgcccaaaacataatgttctacgatatggggtccggctctaccgtgtgcaccattgtcacctaccagatggtcaagaccaaagaagccggcatgcagccacagctccaaatacgaggggtcggttttgatcgcactctgggtggcctcgagatggaactcaggctcagggagagactggcaggcctcttcaatgaacagagaaagggtcagcgcgctaaagacgtcagagaaaatccccgggccatggccaagcttctcagagaggccaataggctgaaaacggtgctaagcgcaaatgcggatcatatggcccagattgaagggctgatggacgatgtcgactttaaggccaaagtgacccgggtggagttcgaggaactctgcgctgaccttttcgagcgggtgcctgggcccgttcagcaggcacttcagtcagctgaaatgtcgctagacgaaatcgagcaggttatcctagtgggaggcgctacaagagttcctcgggtgcaggaggtgctgttaaaggccgtgggaaaggaggagctggggaaaaacattaacgctgacgaagccgccgcaatgggggctgtctatcaagccgccgcactgtccaaagccttcaaagtcaagccatttgtcgttcgcgatgctgtggtgtacccgatcctggtggagttcacacgggaagtggaagaagagcccgggatccactccctgaagcataacaaacgggttctgtttagcagaatggggccttacccccaacgaaaggtgattaccttcaataggtactctcacgactttaattttcacataaattatggagacctggggttcctgggacctgaggacctccgtgtgtttggctcccagaacttgactaccgtcaagctgaagggggttggggactccttcaagaagtatccagactacgaaagcaaaggaattaaggctcattttaacttagatgaaagtggagtgctgagtctcgacagagtggaaagtgtgttcgaaaccctggtggaggatagcgccgaagaggaatctactctcacaaaactaggaaatactattagctctctcttcggcggaggcactaccccagatgccaaagagaatggcaccgataccgtgcaagaggaggaggaatcgcctgcagaaggatccaaagacgagccaggagagcaggtcgagttgaaagaagaggccgaggcgccagtggaagatgggtcacagcctccgcctcctgaacctaaaggcgacgcgactcccgaaggcgagaaagctaccgaaaaagagaatggtgacaaaagcgaggctcagaagcccagtgagaaagcggaggccggacccgaaggagttgcacccgcccctgaaggagagaaaaagcagaagccggctcgcaagcgcaggatggtggaggagattggggtggagctggtggttctggacctgcccgaccttccagaggacaagctggcgcagagcgttcagaaattgcaagatctgacattgcgagatctggagaagcaagagagggaaaaggctgctaattctcttgaagcctttatcttcgagacccaggataagctgtaccagccagaatatcaggaggtgtccacagaggagcagagagaggaaatatctgggaagctgtcagctgcctccacgtggctagaggatgagggggttggagctacgaccgtaatgctgaaggaaaagctggctgaactcagaaagttatgtcaaggccttttcttccgagtggaggagcgcaagaagtggcctgagcggctttcagccctggacaacctcctgaatcacagttctatgttcctgaaaggagcaaggctgatccccgaaatggaccagatcttcacagaagtggagatgacaacgctcgaaaaggtgatcaatgaaacttgggcctggaaaaacgcaactcttgcagagcaggccaaactgccagcaacggaaaagcctgtgttattgagcaaggacatagaggctaaaatgatggcccttgaccgggaagttcagtacctactgaataaagctaagtttaccaaacctcgccccaggcctaaagataagaatggtactcgtgcggagccacctcttaatgcttcagcgagtgatcagggtgagaaggtgatcccacctgccggccagaccgaggatgccgagcctatatccgaacccgagaaggtggaaactggctctgagcccggagataccgaaccactggagctcggagggcccggggcggagcctgagcagaaagaacagtccactggccagaagcgtcctctgaagaatgacgagttatag

SEQ ID NO: 339377 - DNA, 2547 bp, Artificial Sequence
  derived and/or modified sequence
atggttctaaattactcaagatcgctcgctgaagatttcgccgaacaacccatcaaggatgcggtcatcaccgtgcccgtatttttcaaccaggcggaacggcgcgccgtgctgcaggccgcccggatggctggcctgaaagttctccagctaataaacgacaatacagctacagcgctctcttatggggtgtttaggagaaaggatatcaatacaacagcccagaacattatgttttatgatatgggctccggctcaaccgtgtgtaccatcgtgacctaccagatggtgaaaactaaggaggcggggatgcaaccgcagctgcagatcagaggcgtcggcttcgataggactcttggtggtctggaaatggaattgcgcctgcgcgaaaggctcgctggattattcaatgagcagcgtaaggggcagcgggcgaaagacgtacgtgaaaatcctagagcaatggcgaagctgctgagagaggccaaccgccttaagactgtcctgagcgccaacgccgaccatatggctcagatagaagggttaatggacgatgtggactttaaggctaaggtcacccgcgtggaatttgaggagctgtgtgcggacttgttcgagagggttcctggccctgtacagcaggcacttcaaagcgcggaaatgtctctcgatgagatcgaacaggtgatattagttgggggagctaccagggtcccaagggtacaagaggttttgctcaaggccgtcggcaaggaggaattgggcaagaatatcaacgccgacgaggccgcggccatgggcgcggtgtaccaggcggccgctttgagcaaagcttttaaggtcaagcctttcgtggtaagggacgcagtggtgtatccaattctggtcgagtttacaagagaggtggaagaggaacctggcatccattcactcaagcacaataagcgagttctcttctcccggatgggcccctacccccagcgcaaagtaatcacattcaataggtattctcatgacttcaactttcatatcaactacggggacctgggtttcctcggacccgaagatcttcgcgtgttcggttcacagaatctgactaccgttaagctcaagggggttggagacagtttcaagaaataccctgactacgagtcgaagggaatcaaagcccatttcaatctggatgaatccggggtgttatcattggatcgggtggaatccgtatttgaaaccctggtagaagatagcgccgaggaggaaagcaccctgaccaagctgggcaacacaatttcttctctcttcggggggggcaccactcccgacgcaaaagaaaatggaactgacaccgtccaagaggaagaggaatctccggccgaagggagcaaagatgaaccgggagagcaagtggaactgaaagaggaagcagaggcccctgtcgaggatggatcgcaacctcccccgcccgaacccaagggcgacgccaccccggagggggaaaaggccacagaaaaggagaacggggacaaatcagaagctcaaaagccgtcagaaaaagctgaggcgggacctgaaggagttgcccccgcccccgagggagagaaaaaacagaagcccgcacgaaagaggcgaatggttgaggaaatcggtgtggaactggtcgtgctggacttgccagatcttcccgaggacaagctggcacagtcagtgcagaaactgcaagatctcaccttacgtgacctcgagaagcaggagcgggaaaaggccgcgaattctctggaagcttttattttcgaaacacaggacaagctgtatcaaccagaataccaggaagttagcaccgaagagcagcgcgaggagataagcggcaaattaagtgctgcctccacatggctggaagacgaaggggtaggagccaccaccgttatgttaaaggagaagctcgctgagctccgcaaactctgtcagggactatttttcagggttgaggagcggaaaaagtggccagagcgactgagcgccttagataatctgctgaaccactcttcgatgttcttaaagggtgccaggctgatcccagaaatggatcagatttttactgaggtcgaaatgaccactctcgagaaggtgatcaacgaaacctgggcctggaagaatgcaaccctcgcagagcaggcaaagcttcccgccaccgagaagcctgttttgctctcaaaggatatcgaagcaaaaatgatggcgctggatagggaagttcaatacctgctgaataaggccaaattcacaaagccaaggccgcggccgaaagacaaaaatgggacgcgcgcggagcccccgctgaacgccagcgcctccgaccagggtgaaaaggtgattccacctgctggacaaacagaagacgccgagcccatctctgaacctgagaaggtggaaacgggatcagaacccggcgatacagagccccttgagttggggggccctggcgccgagccagaacagaaggaacagtccactgggcagaagcgtcccctgaaaaacgatgaactgtag

SEQ ID NO: 339378 - DNA, 2943 bp, Artificial Sequence
  derived and/or modified sequence
atgtggcagtcccggggccccatgctattccacctcggactctgcgtgggcgctgcgggtatgatccgggaatggtttgtgccaattaggagggagaagggcagtcgactcatttgccccggcggtaccatggcggacaaggttagacgccagcgcccacgccgcagagtttgctgggctctggtagcagttcttctcgcggacctcctggctcttagcgacactctagccgtaatgtcagtcgacctcggaagcgaatcaatgaaagtggccatcgttaaacccggggtccccatggaaatcgtgctgaacaaagagagtagacgaaagacgcccgtgatcgttactctgaaagagaatgaaagattcttcggcgatagcgctgcttctatggccataaaaaatccgaaggccacacttcggtattttcagcatctgctgggcaaacaggcggataacccccatgtagccctgtaccaagcaagatttcccgaacacgagctgacctttgatccccagcgccagaccgtgcacttccagatttcatcccagctgcaattttctccagaggaggtgctcgggatggtgctgaattattccaggtccctggctgaggactttgccgaacagccgatcaaggatgcggtcataaccgttcccgttttctttaatcaggcggagcgaagagccgttctgcaggcggctaggatggccggattgaaagtcttgcagttgatcaacgacaataccgcaaccgccctttcctatggggtgtttcgtcggaaggacattaatactaccgcacaaaatattatgttttacgatatgggcagcggttcaaccgtctgcacaattgtgacttatcagatggtaaagaccaaggaggcaggcatgcaacctcagttacagatacggggcgtgggctttgatcgcactctcggtggactggaaatggaattgagactgcgagaacgcctggcaggcttgttcaatgagcaacgaaaggggcagagagcaaaggacgttagagaaaatccgagagctatggccaagctgctgcgggaggcaaaccgactcaaaacagttctcagtgcaaatgccgaccacatggcccagattgaggggctgatggatgatgtcgacttcaaagccaaagtgacccgcgtggaattcgaggaattatgcgccgatttgtttgagagagtgccaggccctgtgcagcaagcactgcagagcgctgaaatgtccctagatgagattgagcaggtaattttagtgggtggcgccacacgcgtgccccgggtccaagaagtcctccttaaagcggtaggaaaggaggagttagggaagaatattaacgctgacgaagctgcagccatgggggcagtttaccaagccgctgctctgagtaaggcatttaaggtgaagccattcgtcgtgagagacgcagttgtgtatcccatcctcgtggagtttacacgggaagtggaggaagagcctggaatccacagtctcaaacacaataaacgagtgctgttctcccgcatgggaccctatccgcagcgcaaggtcataacattcaaccggtactcgcacgatttcaactttcacattaattatggcgatctggggtttctcggaccagaagatctgcgcgtgttcgggtctcagaaccttactacagtcaagttgaagggtgtcggcgatagtttcaaaaagtaccccgactatgagagtaagggcatcaaggcacacttcaatctggacgagtccggcgtattgtctctggatcgcgtcgaaagtgtgtttgaaactctggttgaagacagtgcggaagaggagagcacactgacaaagcttgggaacaccatttctagcctctttggcgggggcacgacaccagacgcgaaggaaaatgggacagataccgtgcagaagccatccgagaaagccgaagcaggcccggagggcgtggcccctgctccagaaggagagaagaaacagaagcccgccaggaagaggaggatggtggaagaaataggggtagaacttgtggtcctcgatttacctgacctccctgaagacaagctggcacagtccgtacagaagctgcaagatcttactcttcgggacctcgagaaacaagagagagagaaggcagctaacagcttggaggcttttattttcgagacacaggataagctttaccagccagaataccaagaggtttccacggaagaacagagagaagagatctctggcaaactttctgctgcatcaacatggctggaagacgagggcgtaggggccacaaccgtgatgctgaaggagaagctcgctgaactgcgaaagttgtgtcagggcctcttctttcgcgttgaagagaggaagaagtggccagaaagattaagcgcgctggataacctgctcaatcatagcagcatgtttcttaagggtgctaggttgattcctgagatggatcaaatctttactgaagtagaaatgactactttggaaaaggttataaatgagacttgggcctggaaaaatgcgacgctggccgaacaagccaaattgcccgccactgagaagccggtcttactgtcgaaggacatagaggcaaagatgatggcccttgaccgggaggtgcagtatctcctgaacaaggccaagtttacgaagccacggcctagaccaaaagataagaacggaacacgggccgagcccccactgaatgcatccgcttcagaccagggagaaaaggtgattccgccagccggacagacagaggatgcggagcccatatccgaacctgagaaggtggaaacaggtagcgaaccaggggacacggagccactcgagctcggcggaccaggagccgaacctgaacagaaagaacagtccaccggccagaaaagacccctgaaaaacgatgaactttag

SEQ ID NO: 339379 - DNA, 4530 bp, Artificial Sequence
  derived and/or modified sequence
aacagtttgcaaaccgagaggagttgtgaagggcgcgggtggggggcgctgccggcctcgtgggtacgttcgtgccgcgtctgtcccagagctggggccgcaggagcggaggcaagaggggcactatggcagacaaagttaggaggcagaggccgaggaggcgagtctgttgggccttggtggctgtgctcttggcagacctgttggcactgagtgatacactggcagtgatgtctgtggacctgggcagtgagtccatgaaggtggccattgtcaaacctggagtgcccatggaaattgtcttgaataaggaatctcggaggaaaacaccggtgatcgtgaccctgaaagaaaatgaaagattctttggagacagtgcagcaagcatggcgattaagaatccaaaggctacgctacgttacttccagcacctcctggggaagcaggcagataacccccatgtagctctttaccaggcccgcttcccggagcacgagctgactttcgacccacagaggcagactgtgcactttcagatcagctcgcagctgcagttctcacctgaggaagtgttgggcatggttctcaattattctcgttctctagctgaagattttgcagagcagcccatcaaggatgcagtgatcaccgtgccagtcttcttcaaccaggccgagcgccgagctgtgctgcaggctgctcgtatggctggcctcaaagtgctgcagctcatcaatgacaacaccgccactgccctcagctatggtgtcttccgccggaaagatattaacaccactgcccagaatatcatgttctatgacatgggctcaggcagcaccgtatgcaccattgtgacctaccagatggtgaagactaaggaagctgggatgcagccacagctgcagatccggggagtaggatttgaccgtaccctggggggcctggagatggagctccggcttcgagaacgcctggctgggcttttcaatgagcagcgcaagggtcagagagcaaaggatgtgcgggagaacccgcgtgccatggccaagctgctgcgtgaggctaatcggctcaaaaccgtcctcagtgccaacgctgaccacatggcacagattgaaggcctgatggatgatgtggacttcaaggcaaaagtgactcgtgtggaatttgaggagttgtgtgcagacttgtttgagcgggtgcctgggcctgtacagcaggccctccagagtgccgaaatgagtctggatgagattgagcaggtgatcctggtgggtggggccactcgggtccccagagttcaggaggtgctgctgaaggccgtgggcaaggaggagctggggaagaacatcaatgcagatgaagcagccgccatgggggcagtgtaccaggcagctgcgctcagcaaagcctttaaagtgaagccatttgtcgtccgagatgcagtggtctaccccatcctggtggagttcacgagggaggtggaggaggagcctgggattcacagcctgaagcacaataaacgggtactcttctctcggatggggccctaccctcaacgcaaagtcatcacctttaaccgctacagccatgatttcaacttccacatcaactacggcgacctgggcttcctggggcctgaagatcttcgggtatttggctcccagaatctgaccacagtgaagctaaaaggggtgggtgacagcttcaagaagtatcctgactacgagtccaagggcatcaaggctcacttcaacctggatgagagtggcgtgctcagtctagacagggtggagtctgtatttgagacactggtagaggacagcgcagaagaggaatctactctcaccaaacttggcaacaccatttccagcctgtttggaggcggtaccacaccagatgccaaggagaatggtactgatactgtccaggaggaagaggagagccctgcagaggggagcaaggacgagcctggggagcaggtggagctcaaggaggaagctgaggccccagtggaggatggctctcagcccccaccccctgaacctaagggagatgcaacccctgagggagaaaaggccacagaaaaagaaaatggggacaagtctgaggcccagaaaccaagtgagaaggcagaggcagggcctgagggcgtcgctccagccccagagggagagaagaagcagaagcccgccaggaagcggcgaatggtagaggagatcggggtggagctggttgttctggacctgcctgacttgccagaggataagctggctcagtcggtgcagaaacttcaggacttgacactccgagacctggagaagcaggaacgggaaaaagctgccaacagcttggaagcattcatatttgagacccaggacaagctgtaccagcccgagtaccaggaagtgtccacagaggagcagcgtgaggagatctctgggaagctcagcgccgcatccacctggctggaggatgagggtgttggagccaccacagtgatgttgaaggagaagctggctgagctgaggaagctgtgccaagggctgttttttcgggtagaggagcgcaagaagtggcccgaacggctgtctgccctcgataatctcctcaaccattccagcatgttcctcaagggggcccggctcatcccagagatggaccagatcttcactgaggtggagatgacaacgttagagaaagtcatcaatgagacctgggcctggaagaatgcaactctggccgagcaggctaagctgcccgccacagagaagcctgtgttgctctcaaaagacattgaagctaagatgatggccctggaccgagaggtgcagtatctgctcaataaggccaagtttaccaagccccggccccggcctaaggacaagaatgggacccgggcagagccacccctcaatgccagtgccagtgaccagggggagaaggtcatccctccagcaggccagactgaagatgcagagcccatttcagaacctgagaaagtagagactggatccgagccaggagacactgagcctttggagttaggaggtcctggagcagaacctgaacagaaagaacaatcgacaggacagaagcggcctttgaagaacgacgaactataacccccacctctgttttccccattcatctccacccccttcccccaccacttctatttatttaacatcgagggttgggggaggggttggtcctgccctcggctggagttcctttctcacccctgtgatttggaggtgtggagaaggggaagggagggacagctcactggttccttctgcagtacctctgtggttaaaaatggaaactgttctcctccccagccccactccctgttccctacccatataggccctaaatttgggaaaaatcactattaatttctgaatcctttgcctgtgggtaggaagagaatggctgccagtggctgatgggtcccggtgatgggaagggtatcaggttgctggggagtttccactcttctctggtgattgttccttccctcccttcctctcccaccatgcgatgagcatcctttcaggccagtgtctgcagagcctcagttaccaggtttggtttctgagtgcctatctgtgctctttcctccctctgcgggcttctcttgctctgagcctcccttccccattccccatccagctcctttccccctgggtttccttggcttcctgcagcaaattgggcagttctctgccccttgcctaaaagcctgtacctctggattggcggaagtaaatctggaaggattctcactcgtatttcccacccctagtggccagaggagggaggggcacagtgaagaagggagcccaccacctctccgaagaggaaagccacgtagagtggttggcatggggtgccagcatcgtgcaagctctgtcataatctgcatcttcccagcagcctggtaccccaggttcctgtaactccctgcctcctcctctcttctgctgttctgctcctcccagacagagcctttccctcaccccctgaccccctgggctgaccaaaatgtgctttctactgtgagtccctatcccaagatcctggggaaaggagagaccatggtgtgaatgtagagatgccacctccctctctctgaggcaggcctgtggatgaaggaggagggtcagggctggccttcctctgtgcatcactctgctaggttgggggcccccgacccaccatacctacgcctagggagcccgtcctccagtattccgtctgtagcaggagctagggctgctgcctcagctccaagacaagaatgaacctggctgtgtcagtcattttgtcttttccttttttttttttttttgccacattggcagagatgggacctaagggtcccacccctcaccccacccccacctcttctgtatgtttgaattctttcagtagctgttgatgctggttggacaggtttgagtcaaattgtactttgctccattgttaattgagaaactgtttcaataaaatattcttttctac

SEQ ID NO: 339380 - DNA, 3134 bp, Artificial Sequence
  derived and/or modified sequence
aacagtttgcaaaccgagaggagttgtgaagggcgcgggtggggggcgctgccggcctcgtgggtacgttcgtgccgcgtctgtcccagagctggggccgcaggagcggaggcaagaggggcactatggcagacaaagttaggaggcagaggccgaggaggcgagctgactttcgacccacagaggcagactgtgcactttcagatcagctcgcagctgcagttctcacctgaggaagtgttgggcatggttctcaattattctcgttctctagctgaagattttgcagagcagcccatcaaggatgcagtgatcaccgtgccagtcttcttcaaccaggccgagcgccgagctgtgctgcaggctgctcgtatggctggcctcaaagtgctgcagctcatcaatgacaacaccgccactgccctcagctatggtgtcttccgccggaaagatattaacaccactgcccagaatatcatgttctatgacatgggctcaggcagcaccgtatgcaccattgtgacctaccagatggtgaagactaaggaagctgggatgcagccacagctgcagatccggggagtaggatttgaccgtaccctggggggcctggagatggagctccggcttcgagaacgcctggctgggcttttcaatgagcagcgcaagggtcagagagcaaaggatgtgcgggagaacccgcgtgccatggccaagctgctgcgtgaggctaatcggctcaaaaccgtcctcagtgccaacgctgaccacatggcacagattgaaggcctgatggatgatgtggacttcaaggcaaaagtgactcgtgtggaatttgaggagttgtgtgcagacttgtttgagcgggtgcctgggcctgtacagcaggccctccagagtgccgaaatgagtctggatgagattgagcaggtgatcctggtgggtggggccactcgggtccccagagttcaggaggtgctgctgaaggccgtgggcaaggaggagctggggaagaacatcaatgcagatgaagcagccgccatgggggcagtgtaccaggcagctgcgctcagcaaagcctttaaagtgaagccatttgtcgtccgagatgcagtggtctaccccatcctggtggagttcacgagggaggtggaggaggagcctgggattcacagcctgaagcacaataaacgggtactcttctctcggatggggccctaccctcaacgcaaagtcatcacctttaaccgctacagccatgatttcaacttccacatcaactacggcgacctgggcttcctggggcctgaagatcttcgggtatttggctcccagaatctgaccacagtgaagctaaaaggggtgggtgacagcttcaagaagtatcctgactacgagtccaagggcatcaaggctcacttcaacctggatgagagtggcgtgctcagtctagacagggtggagtctgtatttgagacactggtagaggacagcgcagaagaggaatctactctcaccaaacttggcaacaccatttccagcctgtttggaggcggtaccacaccagatgccaaggagaatggtactgatactgtccaggaggaagaggagagccctgcagaggggagcaaggacgagcctggggagcaggtggagctcaaggaggaagctgaggccccagtggaggatggctctcagcccccaccccctgaacctaagggagatgcaacccctgagggagaaaaggccacagaaaaagaaaatggggacaagtctgaggcccagaaaccaagtgagaaggcagaggcagggcctgagggcgtcgctccagccccagagggagagaagaagcagaagcccgccaggaagcggcgaatggtagaggagatcggggtggagctggttgttctggacctgcctgacttgccagaggataagctggctcagtcggtgcagaaacttcaggacttgacactccgagacctggagaagcaggaacgggaaaaagctgccaacagcttggaagcattcatatttgagacccaggacaagctgtaccagcccgagtaccaggaagtgtccacagaggagcagcgtgaggagatctctgggaagctcagcgccgcatccacctggctggaggatgagggtgttggagccaccacagtgatgttgaaggagaagctggctgagctgaggaagctgtgccaagggctgttttttcgggtagaggagcgcaagaagtggcccgaacggctgtctgccctcgataatctcctcaaccattccagcatgttcctcaagggggcccggctcatcccagagatggaccagatcttcactgaggtggagatgacaacgttagagaaagtcatcaatgagacctgggcctggaagaatgcaactctggccgagcaggctaagctgcccgccacagagaagcctgtgttgctctcaaaagacattgaagctaagatgatggccctggaccgagaggtgcagtatctgctcaataaggccaagtttaccaagccccggccccggcctaaggacaagaatgggacccgggcagagccacccctcaatgccagtgccagtgaccagggggagaaggtcatccctccagcaggccagactgaagatgcagagcccatttcagaacctgagaaagtagagactggatccgagccaggagacactgagcctttggagttaggaggtcctggagcagaacctgaacagaaagaacaatcgacaggacagaagcggcctttgaagaacgacgaactataacccccacctctgttttccccattcatctccacccccttcccccaccacttctatttatttaacatcgagggttgggggaggggttggtcctgccctcggctggagttcctttctcacccctgtgatttggaggtgtggagaaggggaagggagggacagctcactggttccttctgcagtacctctgtggttaaaaatggaaactgttctcctccccagccccactccctgttccctacccatataggccctaaatttgggaaaaatcactattaatttctgaatcctttgcctgtgggtaggaagagaatggctgccagtggctgatgggtcccggtgat

SEQ ID NO: 339381 - DNA, 2170 bp, Artificial Sequence
  derived and/or modified sequence
aatgtaacagtttgcaaaccgagaggagttgtgaagggcgcgggtggggggcgctgccggcctcgtgggtacgttcgtgccgcgtctgtcccagagctggggccgcaggagcggaggcaagaggggcactatggcagacaaagttaggaggcagaggccgaggaggcgagtctgttgggccttggtggctgtgctcttggcagacctgttggcactgagtgatacactggcagtgatgtctgtggacctgggcagtgagtccatgaaggtggccattgtcaaacctggagtgcccatggaaattgtcttgaataaggaatctcggaggaaaacaccggtgatcgtgaccctgaaagaaaatgaaagattctttggagacagtgcagcaagcatggcgattaagaatccaaaggctacgctacgttacttccagcacctcctggggaagcaggcagataacccccatgtagctctttaccaggcccgcttcccggagcacgagctgactttcgacccacagaggcagactgtgcactttcagatcagctcgcagctgcagttctcacctgaggaagtgttgggcatggttctcaattattctcgttctctagctgaagattttgcagagcagcccatcaaggatgcagtgatcaccgtgccagtcttcttcaaccaggccgagcgccgagctgtgctgcaggctgctcgtatggctggcctcaaagtgctgcagctcatcaatgacaacaccgccactgccctcagctatggtgtcttccgccggaaagatattaacaccactgcccagaatatcatgttctatgacatgggctcaggcagcaccgtatgcaccattgtgacctaccagatggtgaagactaaggaagctgggatgcagccacagctgcagatccggggagtaggatttgaccgtaccctggggggcctggagatggagctccggcttcgagaacgcctggctgggcttttcaatgagcagcgcaagggtcagagagcaaaggatgtgcgggagaacccgcgtgccatggccaagctgctgcgtgaggctaatcggctcaaaaccgtcctcagtgccaacgctgaccacatggcacagattgaaggcctgatggatgatgtggacttcaaggcaaaagtgactcgtgtggaatttgaggagttgtgtgcagacttgtttgagcgggtgcctgggcctgtacagcaggccctccagagtgccgaaatgagtctggatgagattgagcaggtgatcctggtgggtggggccactcgggtccccagagttcaggaggtgctgctgaaggccgtgggcaaggaggagctggggaagaacatcaatgcagatgaagcagccgccatgggggcagtgtaccaggcagctgcgctcagcaaagcctttaaagtgaagccatttgtcgtccgagatgcagtggtctaccccatcctggtggagttcacgagggaggtggaggaggagcctgggattcacagcctgaagcacaataaacgggtactcttctctcggatggggccctaccctcaacgcaaagtcatcacctttaaccgctacagccatgatttcaacttccacatcaactacggcgacctgggcttcctggggcctgaagatcttcgggtatttggctcccagaatctgaccacagtgaagctaaaaggggtgggtgacagcttcaagaagtatcctgactacgagtccaagggcatcaaggctcacttcaacctggatgagagtggcgtgctcagtctagacagggtggagtctgtatttgagacactggtagaggacagcgcagaagaggaatctactctcaccaaacttggcaacaccatttccagcctgtttggaggcggtaccacaccagatgccaaggagaatggtactgatactgtccaggaggaagaggagagccctgcagaggggagcaaggacgagcctggggagcaggtggagctcaaggaggaagctgaggccccagtggaggatggctctcagcccccaccccctgaacctaagggagatgcaacccctgagggagaaaaggccacagaaaaagaaaatggggacaagtctgaggcccagaaaccaaccagtgtctgcagagcctcagttaccaggtttggtttctga

SEQ ID NO: 339382 - DNA, 1570 bp, Artificial Sequence
  derived and/or modified sequence
gccgcgtccggggccggctggtgcgcgagacgccgccgagaggggcactatggcagacaaagttaggaggcagaggccgaggaggcgagtctgttgggccttggtggctgtgctcttggcagacctgttggcactgagtgatacactggcagtgatgtctgtggacctgggcagtgagtccatgaaggtggccattgtcaaacctggagtgcccatggaaattgtcttgaataaggaatctcggaggaaaacaccggtgatcgtgaccctgaaagaaaatgaaagattctttggagacagtgcagcaagcatggcgattaagaatccaaaggctacgctacgttacttccagcacctcctggggaagcaggcagataacccccatgtagctctttaccaggcccgcttcccggagcacgagctgactttcgacccacagaggcagactgtgcactttcagatcagctcgcagctgcagttctcacccctgtgatttggaggtgtggagaaggggaagggagggacagctcactgtttccactcttctctggtgattgttccttccctcccttcctctcccaccatgcgatgagcatcctttcaggccagtgtctgcagagcctcagttaccaggtttggtttctgagtgcctatctgtgctctttcctccctctgcgggcttctcttgctctgagcctcccttccccattccccatccagctcctttccccctgggtttccttggcttcctgcagcaaattgggcagttctctgccccttgcctaaaagcctgtacctctggattggcggaagtaaatctggaaggattctcactcgtatttcccacccctagtggccagaggagggaggggcacagtgaagaagggagcccaccacctctccgaagaggaaagccacgtagagtggttggcatggggtgccagcatcgtgcaagctctgtcataatctgcatcttcccagcagcctggtaccccaggttcctgtaactccctgcctcctcctctcttctgctgttctgctcctcccagacagagcctttccctcaccccctgaccccctgggctgaccaaaatgtgctttctactgtgagtccctatcccaagatcctggggaaaggagagaccatggtgtgaatgtagagatgccacctccctctctctgaggcaggcctgtggatgaaggaggagggtcagggctggccttcctctgtgcatcactctgctaggttgggggcccccgacccaccatacctacgcctagggagcccgtcctccagtattccgtctgtagcaggagctagggctgctgcctcagctccaagacaagaatgaacctggctgtgtcagtcattttgtcttttccttttttttttttttttgccacattggcagagatgggacctaagggtcccacccctcaccccacccccacctcttctgtatgtttgaattctttcagtagctgttgatgctggttggacaggtttgagtcaaattgtactttgctccattgttaattgagaaactgtttcaataaaatattcttttct

SEQ ID NO: 339383 - DNA, 3355 bp, Artificial Sequence
  derived and/or modified sequence
agtttgcaaaccgagaggagttgtgaagggcgcgggtggggggcgctgccggcctcgtgggtacgttcgtgccgcgtctgtcccagagctggggccgcaggagcggaggcaagagcttctctgtttagggatgtggcaaagccgaggacccatgctctttcacttgggcctttgtgtgggcgctgctgggatgattagagaatggtttgtacccatcaggagggagaagggaagtaggctgatctgccctgggggcactatggcagacaaagttaggaggcagaggccgaggaggcgagtctgttgggccttggtggctgtgctcttggcagacctgttggcactgagtgatacactggcagtgatgtctgtggacctgggcagtgagtccatgaaggtggccattgtcaaacctggagtgcccatggaaattgtcttgaataaggaatctcggaggaaaacaccggtgatcgtgaccctgaaagaaaatgaaagattctttggagacagtgcagcaagcatggcgattaagaatccaaaggctacgctacgttacttccagcacctcctggggaagcaggcagataacccccatgtagctctttaccaggcccgcttcccggagcacgagctgactttcgacccacagaggcagactgtgcactttcagatcagctcgcagctgcagttctcacctgaggaagtgttgggcatggttctcaattattctcgttctctagctgaagattttgcagagcagcccatcaaggatgcagtgatcaccgtgccagtcttcttcaaccaggccgagcgccgagctgtgctgcaggctgctcgtatggctggcctcaaagtgctgcagctcatcaatgacaacaccgccactgccctcagctatggtgtcttccgccggaaagatattaacaccactgcccagaatatcatgttctatgacatgggctcaggcagcaccgtatgcaccattgtgacctaccagatggtgaagactaaggaagctgggatgcagccacagctgcagatccggggagtaggatttgaccgtaccctggggggcctggagatggagctccggcttcgagaacgcctggctgggcttttcaatgagcagcgcaagggtcagagagcaaaggatgtgcgggagaacccgcgtgccatggccaagctgctgcgtgaggctaatcggctcaaaaccgtcctcagtgccaacgctgaccacatggcacagattgaaggcctgatggatgatgtggacttcaaggcaaaagtgactcgtgtggaatttgaggagttgtgtgcagacttgtttgagcgggtgcctgggcctgtacagcaggccctccagagtgccgaaatgagtctggatgagattgagcaggtgatcctggtgggtggggccactcgggtccccagagttcaggaggtgctgctgaaggccgtgggcaaggaggagctggggaagaacatcaatgcagatgaagcagccgccatgggggcagtgtaccaggcagctgcgctcagcaaagcctttaaagtgaagccatttgtcgtccgagatgcagtggtctaccccatcctggtggagttcacgagggaggtggaggaggagcctgggattcacagcctgaagcacaataaacgggtactcttctctcggatggggccctaccctcaacgcaaagtcatcacctttaaccgctacagccatgatttcaacttccacatcaactacggcgacctgggcttcctggggcctgaagatcttcgggtatttggctcccagaatctgaccacagtgaagctaaaaggggtgggtgacagcttcaagaagtatcctgactacgagtccaagggcatcaaggctcacttcaacctggatgagagtggcgtgctcagtctagacagggtggagtctgtatttgagacactggtagaggacagcgcagaagaggaatctactctcaccaaacttggcaacaccatttccagcctgtttggaggcggtaccacaccagatgccaaggagaatggtactgatactgtccagaaaccaagtgagaaggcagaggcagggcctgagggcgtcgctccagccccagagggagagaagaagcagaagcccgccaggaagcggcgaatggtagaggagatcggggtggagctggttgttctggacctgcctgacttgccagaggataagctggctcagtcggtgcagaaacttcaggacttgacactccgagacctggagaagcaggaacgggaaaaagctgccaacagcttggaagcattcatatttgagacccaggacaagctgtaccagcccgagtaccaggaagtgtccacagaggagcagcgtgaggagatctctgggaagctcagcgccgcatccacctggctggaggatgagggtgttggagccaccacagtgatgttgaaggagaagctggctgagctgaggaagctgtgccaagggctgttttttcgggtagaggagcgcaagaagtggcccgaacggctgtctgccctcgataatctcctcaaccattccagcatgttcctcaagggggcccggctcatcccagagatggaccagatcttcactgaggtggagatgacaacgttagagaaagtcatcaatgagacctgggcctggaagaatgcaactctggccgagcaggctaagctgcccgccacagagaagcctgtgttgctctcaaaagacattgaagctaagatgatggccctggaccgagaggtgcagtatctgctcaataaggccaagtttaccaagccccggccccggcctaaggacaagaatgggacccgggcagagccacccctcaatgccagtgccagtgaccagggggagaaggtcatccctccagcaggccagactgaagatgcagagcccatttcagaacctgagaaagtagagactggatccgagccaggagacactgagcctttggagttaggaggtcctggagcagaacctgaacagaaagaacaatcgacaggacagaagcggcctttgaagaacgacgaactataacccccacctctgttttccccattcatctccacccccttcccccaccacttctatttatttaacatcgagggttgggggaggggttggtcctgccctcggctggagttcctttctcacccctgtgatttggaggtgtggagaaggggaagggagggacagctcactggttccttctgcagtacctctgtggttaaaaatggaaactgttctcctccccagccccactccctgttccctacccatataggccctaaatttgggaaaaatcactattaatttctg

SEQ ID NO: 339384 - DNA, 3000 bp, Artificial Sequence
  derived and/or modified sequence
atggctgacaaggtgcggcggcagaggccccggcggcgggtgtgctgggccctggtggccgtgctgctggccgacctgctggccctgagtgacaccctggccgtgatgtctgtggacctgggcagcgagagcatgaaggtggccatcgtgaagccaggagtgcccatggagatcgtgctgaacaaggagagcaggaggaagacccctgtgattgtgaccctgaaggaaaatgaacgcttctttggagacagcgctgcctccatggccatcaagaaccccaaggccaccctgcgctacttccagcacctgctgggcaagcaggccgacaacccccacgtggccctgtaccaggcccgcttccctgagcacgagctgacctttgacccccagaggcagacagtgcacttccagatcagcagccagctgcagttcagccctgaggaggtgctgggcatggtgctgaactacagccgcagcctggccgaggactttgctgagcagcccatcaaggatgctgtgatcaccgtgcctgtgttcttcaaccaggccgagaggagagctgtgctgcaggccgccaggatggccggcctgaaggtgctgcagctgatcaatgacaacacagccacagccctgtcctatggagtcttccggaggaaggacatcaacaccacagcccagaacatcatgttttatgacatgggcagcggcagcacagtgtgcaccatcgtgacctaccagatggtgaagaccaaggaggccggcatgcagccccagctgcagatccggggcgtgggctttgacaggaccctgggcggcctggagatggagctgcggctgcgggagcggctggccggcctcttcaatgagcagaggaagggccagagggccaaggatgtgcgggagaacccccgggccatggccaagctgctgcgggaggccaaccggctgaagacagtgctgagcgccaatgctgaccacatggcccagatcgagggcctgatggatgatgtggacttcaaggccaaggtgaccagggtggagtttgaggagctgtgtgccgacctgtttgagcgggtgcccggccctgtgcagcaggccctgcagagcgctgagatgagcctggatgaaattgagcaggtgatcctggtgggcggggccaccagggtgccccgggtgcaggaggtgctgctgaaggctgtgggcaaggaggagctgggcaagaacatcaatgctgatgaggccgccgccatgggcgctgtgtaccaggccgccgccctgagcaaggccttcaaggtgaagccctttgtggtgagagatgctgtggtgtaccccatcctggtggagttcacccgggaggtggaggaggagcccggcatccacagcctgaagcacaacaagagggtgctcttcagcaggatgggcccctacccccagaggaaggtgatcaccttcaaccgctacagccatgacttcaacttccacatcaactatggagacctgggcttcctgggccctgaggacctgcgggtgtttggcagccagaacctgaccaccgtgaagctgaagggcgtgggggacagcttcaagaagtacccagactatgagagcaagggcatcaaggcccacttcaacctggatgagagcggcgtgctgagcctggacagagtggagagcgtgtttgagaccctggtggaggacagcgctgaggaggagagcaccctgaccaagctgggcaacaccatcagcagcctgtttggaggcggcaccaccccagatgccaaggaaaatggaacagacacagtgcaggaggaggaggagagccctgctgagggcagcaaggatgagcccggggagcaggtggagctgaaggaggaggccgaggcccctgtggaggatggcagccagcccccacctcctgagcccaagggagatgccaccccagagggggagaaggccacagagaaggaaaatggagacaagtctgaggcccagaagcccagcgagaaggccgaggccggccctgagggcgtggccccagcccctgagggggagaagaagcagaagccagccaggaagaggaggatggtggaggagattggagtggagctggtggtgctggacctgcctgacctgcctgaggacaagctggcccagagcgtgcagaagctgcaggacctgaccctgcgggacctggagaagcaggagcgggagaaggccgccaacagcctggaggccttcatctttgagacccaggacaagctgtaccagcctgagtaccaggaggtgtccacagaggagcagcgggaggagatcagcggcaagctgtctgctgccagcacctggctggaggatgagggcgtgggcgccaccaccgtgatgctgaaggagaagctggccgagctgaggaagctgtgccagggcctcttcttccgggtggaggagaggaagaagtggccagagcggctgagcgccctggacaacctgctgaaccacagctccatgttcctgaagggggcccggctcatccctgagatggaccagatcttcacagaggtggagatgaccaccctggagaaggtgatcaatgagacctgggcctggaagaatgccaccctggccgagcaggccaagctgcctgccacagagaagcctgtgctgctgagcaaggacatcgaggccaagatgatggccctggaccgggaggtgcagtacctgctgaacaaggccaagttcaccaagccccggccccggcccaaggacaagaatggcaccagggctgagccccccctgaatgccagcgccagtgaccagggcgagaaggtgattcctcctgctggccagacagaagatgctgagcccatcagcgagcctgagaaggtggagaccggcagcgagcccggggacacagagcccctggagctgggcggccctggagctgagcctgagcagaaggagcagagcacaggccagaagaggcccctgaagaatgatgagctgtag

SEQ ID NO: 339385 - DNA, 2547 bp, Artificial Sequence
  derived and/or modified sequence
atggtgctgaactacagccgcagcctggctgaagattttgctgagcagcccatcaaggatgctgtgatcaccgtgcctgtgttcttcaaccaggccgagcggcgggctgtgctgcaggccgccaggatggccggcctgaaggtgctgcagctgatcaatgacaacacagccacagccctgtcctatggagtcttccggaggaaggacatcaacaccacagcccagaacatcatgttttatgacatgggcagcggcagcacagtgtgcaccatcgtgacctaccagatggtgaagaccaaggaggccggcatgcagccccagctgcagatccggggcgtgggctttgacaggaccctgggcggcctggagatggagctgcggctgcgggagcggctggccggcctcttcaatgagcagaggaagggccagagggccaaggatgtgcgggagaacccccgggccatggccaagctgctgcgggaggccaaccggctgaagacagtgctgagcgccaatgctgaccacatggcccagatcgagggcctgatggatgatgtggacttcaaggccaaggtgaccagggtggagtttgaggagctgtgtgccgacctgtttgagcgggtgcccggccctgtgcagcaggccctgcagagcgctgagatgagcctggatgaaattgagcaggtgatcctggtgggcggggccaccagggtgccccgggtgcaggaggtgctgctgaaggctgtgggcaaggaggagctgggcaagaacatcaatgctgatgaagctgctgccatgggcgctgtgtaccaggccgccgccctgagcaaggccttcaaggtgaagccctttgtggtgagagatgctgtggtgtaccccatcctggtggagttcacccgggaggtggaggaggagcccggcatccacagcctgaagcacaacaagagggtgctcttcagcaggatgggcccctacccccagaggaaggtgatcaccttcaaccgctacagccatgacttcaacttccacatcaactacggggacctgggcttcctgggccctgaggacctgcgggtgtttggcagccagaacctgaccaccgtgaagctgaagggcgtgggggacagcttcaagaagtacccagactatgagagcaagggcatcaaggcccacttcaacctggatgaaagtggagtgctgagcctggacagagtggagagcgtgtttgagaccctggtggaggacagcgctgaggaggagagcaccctgaccaagctgggcaacaccatcagcagcctgtttggaggcggcaccaccccagatgccaaggaaaatggaacagacacagtgcaggaggaggaggagagccctgctgagggcagcaaggatgagcctggagagcaggtggagctgaaggaggaggccgaggcccctgtggaggatggcagccagcccccacctcctgagcccaagggagatgccaccccagagggggagaaggccacagagaaggaaaatggagacaagtctgaggcccagaagcccagcgagaaggccgaggccggccctgagggcgtggccccagcccctgagggggagaagaagcagaagccagccaggaagaggaggatggtggaggagattggagtggagctggtggtgctggacctgcctgacctgcctgaggacaagctggcccagagcgtgcagaagctgcaggacctgaccctgcgggacctggagaagcaggagcgggagaaggccgccaacagcctggaggccttcatctttgagacccaggacaagctgtaccagcctgagtaccaggaggtgtccacagaggagcagcgggaggagatcagcggcaagctgtctgctgccagcacctggctggaggatgaaggagtgggcgccaccaccgtgatgctgaaggagaagctggccgagctgaggaagctgtgccagggcctcttcttccgggtggaggagaggaagaagtggccagagcggctgagcgccctggacaacctgctgaaccacagctccatgttcctgaagggggcccggctcatccctgagatggaccagatcttcacagaggtggagatgaccaccctggagaaggtgatcaatgagacctgggcctggaagaatgccaccctggccgagcaggccaagctgcctgccacagagaagcctgtgctgctgagcaaggacatcgaggccaagatgatggccctggaccgggaggtgcagtacctgctgaacaaggccaagttcaccaagccccggccccggcccaaggacaagaatggcaccagggctgagccccccctgaatgccagcgccagtgaccagggcgagaaggtgatccccccagctggccagacagaagatgctgagcccatcagcgagcctgagaaggtggagactggaagtgagcccggggacacagagcccctggagctgggcggccctggagctgagcctgagcagaaggagcagagcacaggccagaagaggcccctgaagaatgatgagctgtag

SEQ ID NO: 339386 - DNA, 2943 bp, Artificial Sequence
  derived and/or modified sequence
atgtggcagagccggggccccatgctgttccacctgggcctgtgtgtgggcgctgctggcatgatccgggagtggtttgtgcccatccggcgggagaagggcagccgcctcatctgccctgggggcaccatggctgacaaggtgcggcggcagaggcccaggagaagagtgtgctgggccctggtggccgtgctgctggccgacctgctggccctgagtgacaccctggccgtgatgtctgtggacctgggcagcgagagcatgaaggtggccatcgtgaagccaggagtgcccatggagatcgtgctgaacaaggagagcaggaggaagacccctgtgattgtgaccctgaaggaaaatgaacgcttcttcggggacagcgctgcctccatggccatcaagaaccccaaggccaccctgcgctacttccagcacctgctgggcaagcaggccgacaacccccacgtggccctgtaccaggcccgcttccctgagcacgagctgacctttgacccccagaggcagacagtgcacttccagatcagcagccagctgcagttcagccctgaggaggtgctgggcatggtgctgaactacagccgcagcctggctgaagattttgctgagcagcccatcaaggatgctgtgatcaccgtgcctgtgttcttcaaccaggccgagcggcgggctgtgctgcaggccgccaggatggccggcctgaaggtgctgcagctgatcaatgacaacacagccacagccctgtcctatggagtcttccggaggaaggacatcaacaccacagcccagaacatcatgttttatgacatgggcagcggcagcacagtgtgcaccatcgtgacctaccagatggtgaagaccaaggaggccggcatgcagccccagctgcagatccggggcgtgggctttgacaggaccctgggcggcctggagatggagctgcggctgcgggagcggctggccggcctcttcaatgagcagaggaagggccagagggccaaggatgtgcgggagaacccccgggccatggccaagctgctgcgggaggccaaccggctgaagacagtgctgagcgccaatgctgaccacatggcccagatcgagggcctgatggatgatgtggacttcaaggccaaggtgaccagggtggagtttgaggagctgtgtgccgacctgtttgagcgggtgcccggccctgtgcagcaggccctgcagagcgctgagatgagcctggatgaaattgagcaggtgatcctggtgggcggggccaccagggtgccccgggtgcaggaggtgctgctgaaggctgtgggcaaggaggagctgggcaagaacatcaatgctgatgaagctgctgccatgggcgctgtgtaccaggccgccgccctgagcaaggccttcaaggtgaagccctttgtggtgagagatgctgtggtgtaccccatcctggtggagttcacccgggaggtggaggaggagcccggcatccacagcctgaagcacaacaagagggtgctcttcagcaggatgggcccctacccccagaggaaggtgatcaccttcaaccgctacagccatgacttcaacttccacatcaactacggggacctgggcttcctgggccctgaggacctgcgggtgtttggcagccagaacctgaccaccgtgaagctgaagggcgtgggggacagcttcaagaagtacccagactatgagagcaagggcatcaaggcccacttcaacctggatgaaagtggagtgctgagcctggacagagtggagagcgtgtttgagaccctggtggaggacagcgctgaggaggagagcaccctgaccaagctgggcaacaccatcagcagcctgtttggaggcggcaccaccccagatgccaaggaaaatggaacagacacagtgcagaagcccagcgagaaggccgaggccggccctgagggcgtggccccagcccctgagggggagaagaagcagaagccagccaggaagaggaggatggtggaggagattggagtggagctggtggtgctggacctgcctgacctgcctgaggacaagctggcccagagcgtgcagaagctgcaggacctgaccctgcgggacctggagaagcaggagcgggagaaggccgccaacagcctggaggccttcatctttgagacccaggacaagctgtaccagcctgagtaccaggaggtgtccacagaggagcagcgggaggagatcagcggcaagctgtctgctgccagcacctggctggaggatgaaggagtgggcgccaccaccgtgatgctgaaggagaagctggccgagctgaggaagctgtgccagggcctcttcttccgggtggaggagaggaagaagtggccagagcggctgagcgccctggacaacctgctgaaccacagctccatgttcctgaagggggcccggctcatccctgagatggaccagatcttcacagaggtggagatgaccaccctggagaaggtgatcaatgagacctgggcctggaagaatgccaccctggccgagcaggccaagctgcctgccacagagaagcctgtgctgctgagcaaggacatcgaggccaagatgatggccctggaccgggaggtgcagtacctgctgaacaaggccaagttcaccaagccccggccccggcccaaggacaagaatggcaccagggctgagccccccctgaatgccagcgccagtgaccagggcgagaaggtgatccccccagctggccagacagaagatgctgagcccatcagcgagcctgagaaggtggagactggaagtgagcccggggacacagagcccctggagctgggcggccctggagctgagcctgagcagaaggagcagagcacaggccagaagaggcccctgaagaatgatgagctgtag

SEQ ID NO: 339387 - DNA, 3000 bp, Artificial Sequence
  derived and/or modified sequence
atggccgacaaggtgcggcggcagcggccccggcggcgggtgtgctgggctcttgttgcagtcctgctggcggatctgctggcactttccgatacactggccgtgatgagcgtggacctgggttctgagtcgatgaaagtagctatcgttaagccaggcgtgcccatggagatagttctgaataaagaatctcgcaggaagacgccagtaatcgttactcttaaggagaacgaacggttcttcggggactctgctgcgtcaatggcaattaaaaatccaaaggcaaccctgcgctacttccagcacctgctgggcaagcaggccgacaacccgcatgtggccctataccaagccagattccctgagcacgaactcacttttgatcctcaacgtcagactgtccatttccagatctcctcgcagttgcagttctcacccgaggaggtgcttgggatggtgctcaactactctcgctccctggcagaggactttgccgaacagcccattaaggatgcagtgattacggtgcccgtctttttcaatcaggcagagcgccgagccgtgctgcaggctgctcggatggcaggacttaaagtccttcagctgatcaacgataatactgcgaccgctttgagttacggcgtgttccgacgaaaagacatcaacactacagcccaaaatattatgttctacgatatgggaagtgggtctacagtgtgcacaatcgttacataccagatggtaaagaccaaggaggctggtatgcagccgcagctccagatcaggggagtcggctttgatagaacactgggaggtctggagatggagctgcggttgagagaaagactcgccggcctcttcaacgagcagcgcaaagggcagcgcgctaaagacgtgcgagaaaatcctcgggctatggccaagctcctgagggaggccaataggctgaagactgtactgtcagctaatgctgatcatatggcgcagatcgaagggctcatggatgacgtcgatttcaaggccaaggttactcgcgtggaattcgaggaactgtgcgcagatctgtttgagagggttccgggccccgtccagcaggctttgcaatccgcggaaatgtcccttgatgagattgagcaggttatcctagtgggaggcgccacaagggttcctcgggttcaggaagtcttgttaaaagcagtgggtaaagaagagttgggtaaaaatattaatgctgatgaggctgctgcgatgggggccgtgtatcaggccgccgcactctcaaaagccttcaaagtgaaaccttttgtggtgagagacgccgtggtgtatcctatcctggtggagtttactcgcgaagtggaggaggagcccggaatacacagcctcaaacacaacaagagagtactcttcagtcgcatgggcccttaccctcaacgcaaggttatcaccttcaatcgctacagccacgactttaatttccacattaattatggggacctcggtttcctggggccagaggatttacgcgtttttgggagtcaaaacctaaccaccgtaaaacttaaaggcgtcggggactcatttaagaagtatcccgattacgaatccaaggggatcaaagcccattttaacctggacgagtccggcgtcctcagcttggacagggtggagtccgtgtttgagacactggtggaagatagtgctgaggaggagtcaaccctgacaaagctgggcaatactatctctagcttatttggaggaggaaccacacccgacgccaaggagaacggtacagacaccgtgcaggaagaagaggagagcccagcagaaggttcgaaagacgagcctggtgagcaggtggagctcaaagaagaggcagaagctcccgtagaggatggttcgcaaccacccccgccagagcccaagggggacgccacccctgagggcgaaaaagccactgaaaaggaaaacggcgataagtctgaggcccagaagcccagcgaaaaagccgaagcaggaccggagggagtggctcctgccccggaaggcgagaaaaagcagaagcccgcgaggaaaaggagaatggtggaggaaatcggcgtcgagttagtggtactggaccttcctgacttacctgaagataagcttgcacaaagtgtgcagaaattgcaggatctgaccctaagagatttagaaaaacaggagcgggaaaaggcggccaactctctcgaggcgttcatatttgagacacaggataagctgtatcagcccgaataccaggaggtttcgactgaggagcagcgggaggaaatctccggtaaactgtctgctgccagtacatggctcgaggacgaaggggttggagccacaaccgtgatgctaaaggaaaaactggccgagcttcggaaactttgccaaggccttttcttccgcgtggaagagaggaagaaatggcctgaaaggttatctgcgctggataatcttttgaatcattcgtctatgttccttaaaggcgcccgactgatccccgagatggaccagatctttacagaagtcgagatgacaacactcgagaaggtgattaatgagacctgggcctggaagaatgcaacgctcgcggagcaggccaaactgcccgcaaccgagaagcccgtgctgctcagtaaagacatcgaagcaaagatgatggccttggacagggaagttcagtacctccttaacaaggccaaattcaccaagcctcgccccagacctaaggataagaatgggacgcgcgctgagcctcctctgaacgcctctgcttccgaccagggtgagaaagtgattcccccagccggacaaaccgaagatgctgagcctattagtgagcccgaaaaggtggagaccggtagcgagcccggtgataccgagccactcgaacttggaggaccaggcgcagagcctgaacagaaagaacagtccacgggtcaaaagcgccctcttaagaatgacgaactgtag

SEQ ID NO: 339388 - DNA, 2547 bp, Artificial Sequence
  derived and/or modified sequence
atggtgctgaactacagccggagcctggccgaggacttcgccgagcagccaataaaagacgcagtcataaccgttcccgtattcttcaaccaggccgaaaggcgcgccgttttacaagcagccaggatggcgggacttaaggtgctgcagctgataaacgataacactgcaacagccttatcatatggagtattcagacggaaagatatcaatactactgcccagaacatcatgttctacgatatgggtagtgggtctaccgtgtgtacaatcgtgacttaccagatggtgaaaaccaaggaggccgggatgcaacctcaattgcagattaggggcgtcggatttgataggaccctgggtggcctggagatggaacttagacttcgcgaacgccttgcaggcctgtttaacgagcagcggaagggccagcgcgcaaaagacgtcagggaaaaccctagggctatggcaaaactgctgcgggaagctaatcgcctcaaaacggtcctaagcgcaaacgcagaccatatggctcagatcgagggtctgatggatgatgtggattttaaagccaaagttactagggtggagttcgaggaattatgtgcagacctgttcgagcgggttccagggcctgtccagcaggcactccagtctgcggagatgtctctggatgaaatcgaacaggttatcctagtggggggagccactcgcgtcccacgcgtgcaggaagtcctgctgaaggctgtaggaaaagaggagctgggtaaaaacatcaacgctgacgaggccgcagcgatgggagcagtgtaccaggccgcggccctgtccaaagcgttcaaggtcaagccattcgtggttagagacgcggtggtgtatccaatcctggtggagtttacccgagaagtcgaagaagagcctggaatccactctctcaagcacaataagcgcgtgctgttcagcagaatggggccctacccacagcggaaggtaatcactttcaacaggtacagtcatgattttaacttccatatcaattacggcgacctgggatttctgggtccagaggacctacgagtctttgggtcacagaacctcactactgtgaagctaaagggggttggcgactcattcaagaagtacccagattacgagagcaaaggcattaaagctcacttcaacctggacgaatccggcgtgctttcactagaccgggtcgagtcagtttttgaaaccctcgtggaagactccgccgaggaggagtctacactgacgaaactgggaaacacgatctcatccctttttggtggcggcacaacgccggatgccaaagagaatggcacagacacggtacaagaggaagaggagtcgcccgctgagggatcaaaagacgagccaggagagcaggtcgagctcaaagaagaggctgaagccccagtggaagacgggagccagcctccaccccccgaacccaagggagacgccactccagagggagagaaagccacggagaaagagaacggggacaagtctgaggcgcagaagccgtccgaaaaggccgaagctggaccagaaggggtggcaccagctcccgagggggagaagaagcagaagcccgccagaaaaaggagaatggtggaagagattggcgtagagcttgtagttctggacctcccagaccttcccgaggacaaactcgcacagtcggtgcagaaactgcaggacttgacactccgcgatctggaaaagcaagaacgggaaaaggccgccaatagcttagaagcttttatcttcgaaacacaggacaagctttatcagccagaatatcaggaagtatcaacggaggaacagagggaggagatttccgggaaattgtccgcagcttccacttggcttgaggacgagggagtgggcgctacaacagtgatgctgaaggaaaagctcgcagagctccgcaagctgtgccagggcttattttttcgcgtcgaggaaagaaagaaatggcccgaaagacttagcgctctggataacttactgaaccatagctccatgttcttgaagggcgccagactcatccccgagatggaccagatcttcacagaagtagaaatgacgactctggaaaaggtgattaatgagacatgggcatggaagaacgctaccctggctgaacaagcaaagctccctgcaacagagaaacctgtgctcctgtccaaagatattgaagctaagatgatggcactggacagagaggtgcagtatctcctgaataaggcaaagttcactaagccaagacctaggccaaaagataagaacgggacaagggccgagccacctcttaatgcctctgccagtgaccaaggggaaaaggtgatcccacctgcgggacagactgaggatgccgaacctatctctgagccagagaaggtcgaaaccggatctgagcccggcgataccgagcctctcgagttaggaggcccaggagcggaacctgaacaaaaggaacagtccacaggccaaaaacgccccctgaaaaacgatgagttgtag

SEQ ID NO: 339389 - DNA, 2943 bp, Artificial Sequence
  derived and/or modified sequence
atgtggcagagccggggccccatgctgttccacctgggcctgtgcgttggggctgccggcatgattcgggagtggtttgtgccaatcagacgcgaaaaaggatctcgcttgatttgcccaggaggcactatggccgacaaggtgcggcgccaaagaccacgacgaagagtttgctgggccctcgttgcagtgctactggccgacttgttggctctgagcgacaccttggctgtcatgtccgtggacctcggatcagaatccatgaaggtggcaatagttaagcccggggtgcccatggaaattgtcctcaacaaagaatccaggagaaagacaccggtaatagttaccctcaaggagaacgaacgtttctttggtgattcagccgccagcatggctattaaaaacccaaaagcaacgctgagatacttccaacacttactgggtaaacaagctgacaacccacacgtggccctatatcaggcgcgcttccccgagcacgagctaacattcgatcctcaacgccagacagtgcacttccagattagctcccagctgcagttctcgcccgaggaagtgctggggatggtgctgaattatagcaggagcctggctgaagattttgctgaacagccgataaaggatgcagtgattaccgtacctgtcttctttaaccaggcagaacgacgggccgtcctgcaagcagcccgcatggctgggctcaaggtgctgcagctcatcaacgataacaccgccacagcactttcttatggcgttttccgccggaaagatataaacacaaccgcccagaatattatgttctacgacatggggagcgggtccacggtctgcaccatcgtgacttaccagatggtaaagactaaggaggctggtatgcagccacagttgcagatcaggggtgtgggcttcgatcgcacacttggaggcctggagatggaactgcggttacgtgagagactggcgggcctcttcaatgaacagcgcaaagggcagagagctaaagacgttagggagaaccccagggcgatggctaaactgctgagagaagcgaaccgtctgaaaacggtgttatctgcaaatgccgaccacatggcccagatcgaaggccttatggatgacgttgactttaaggccaaggttacgagagtggagttcgaagaactctgtgctgatctgtttgagagagtgccagggcccgtccagcaagccctgcagtcggccgaaatgagtctggacgagattgaacaggtgatactcgttggtggagccactcgtgttccacgagtgcaggaggtgctgcttaaggccgtggggaaggaagaactcggaaaaaacataaatgctgatgaggccgccgctatgggagcagtgtaccaagccgcggctctgtcaaaagctttcaaggtgaagccatttgtagtgcgcgacgccgttgtttatcctattctcgttgaattcactagagaagtcgaggaagaacccggtattcattccttaaaacataacaaacgcgtcttattctctcgcatgggaccctacccccaacggaaggtaataacattcaaccgctattcccatgacttcaatttccatatcaactacggcgatcttggttttctgggccctgaagatctgcgcgtgtttggtagccaaaacctaacaaccgtgaagctcaaaggcgtgggcgattcatttaaaaaataccccgattacgaatctaagggtataaaggcccatttcaacttggacgagagcggtgtgctgtccctggatcgggtggaatcagtctttgagaccctcgtggaggactcagccgaagaggaatcaactctgactaaactcggtaatactatctcctcattatttggcggggggacgacaccggacgccaaagaaaacggaacagataccgtccagaagccctccgagaaagccgaggctggcccagagggggtcgcacccgctcctgagggggagaaaaagcaaaagccagcacggaagcgccgtatggtggaagaaatcggagtcgaactggtagttctggacctgccagacttgcccgaggacaaactggcacagtcagtgcaaaaactgcaggaccttactctgagggatctcgagaagcaagagagggaaaaagcagcaaattcgctggaagctttcatattcgaaacacaggacaaactctatcagccagagtaccaggaggtcagcacagaagaacagcgcgaggagatctctggaaaactgagcgccgcctctacctggctcgaagatgagggcgtgggcgcaaccaccgtgatgcttaaagagaagctcgccgagctgagaaagttatgccaaggccttttcttccgggtggaagaaagaaagaaatggccggaaagactgtcagccctggacaacctcctgaatcactcatcaatgtttctgaagggagctaggttaattcccgaaatggaccagatcttcacagaagtagaaatgacaacactggagaaggtgatcaatgagacatgggcctggaagaacgccacactggccgagcaagcgaagttgcctgcaactgagaagcccgtgctgttgtctaaggacattgaggccaaaatgatggcccttgatcgggaggttcagtatcttctgaataaggctaaattcactaaaccacgcccacgcccaaaagataagaatggcacgcgagccgagccgccgttaaacgctagtgcttcagaccagggcgaaaaggtcattccacctgcaggacagaccgaggacgctgaaccaatcagtgagcccgagaaagtggagacaggatcggaaccaggcgacacggagcctctggaattaggcgggcccggcgccgaacccgagcagaaggagcagagtacagggcagaagcggcctctgaagaatgacgaactgtag

SEQ ID NO: 339390 - DNA, 3000 bp, Artificial Sequence
  derived and/or modified sequence
atggctgacaaggtgcggagacaacggccacgcaggcgggtatgttgggcgcttgtggccgtcttgcttgcggaccttctggctctcagcgacacactggccgtcatgtccgttgatcttggatccgagagtatgaaggtagcgatagtaaagcctggagtgcctatggagatagtgttaaataaggaatctcggaggaaaacccccgttatcgtcaccctgaaagagaatgaaagattcttcggcgacagcgctgcctcaatggcaataaaaaatccgaaagccaccctgagatacttccagcatctgctgggcaagcaggccgataaccctcacgtcgcattgtatcaggccaggttccccgagcacgagcttaccttcgatccgcagaggcaaactgttcactttcagatctcttcacaattacagttcagtccggaagaggtactggggatggtgttaaactactcccggtctctcgctgaagatttcgctgagcaacctatcaaggacgcggtgatcaccgtgccagtgttctttaaccaggctgaacgacgggcagtactacaggccgctcggatggctggactgaaagttctgcagttaattaacgacaacacagccaccgctctgtcctatggtgtatttaggcgcaaagatataaatacaactgctcagaacattatgttctatgacatgggcagcgggagcaccgtatgcacgattgtgacttaccagatggtcaagaccaaggaagcaggcatgcagccccagcttcagatccgcggagtgggatttgatcgtacgctggggggactggagatggagctgaggttgcgtgagaggctggccggactgttcaatgagcaacggaagggccaaagagccaaggatgttcgagagaacccgagagctatggccaaacttctgcgagaggccaaccgactcaaaaccgttctgtccgctaacgctgatcacatggcccagattgaggggttgatggacgacgtcgacttcaaagctaaagttacacgggtcgaatttgaagagctgtgtgctgatttgtttgaaagggtgcccggacccgttcagcaggcccttcagtcagccgaaatgtctttggacgaaattgaacaggtgattttagttgggggagccacacgagtccccagagtccaggaagtgcttcttaaagccgtcggcaaagaagagctcgggaaaaatatcaacgccgatgaggccgcagctatgggggcagtgtaccaggccgcagccctgtctaaagcctttaaagttaaacccttcgttgtaagggatgcggtggtataccctatactcgtagagttcaccagagaggttgaagaggaacccggaatccatagcctgaagcacaataagcgggtcctgttctcgcggatgggcccttatcctcagaggaaagtgattactttcaaccgctacagccacgacttcaatttccatatcaactacggcgatcttggcttcctgggcccagaggacctcagagtgtttggaagccagaatcttacaaccgttaagcttaaaggcgtgggggattccttcaagaaataccctgattatgaatccaagggcattaaggctcatttcaacctcgacgagtcaggagttctcagcctcgatagggttgaaagcgtattcgagaccttagtcgaggatagcgctgaagaagaaagcactttaactaagttgggaaatactatatcatcactcttcgggggtggcaccaccccagatgccaaggagaatggaactgatacggtgcaagaagaggaggagtcacccgctgaaggctccaaggacgaaccaggggaacaggtcgagctgaaagaggaggcagaggcacccgtagaggatggatcacagcccccacccccagagccaaaaggcgatgcaacccccgaaggcgaaaaagccacagagaaggagaacggagataaaagcgaggcacagaaaccttcagagaaagctgaagcaggcccagagggcgtggccccagccccagaaggagagaaaaagcagaagcccgctaggaagaggcgcatggtggaggaaatcggcgtcgaactggtagttttggacctgcccgacctccccgaggacaagcttgcccagtctgtccagaagctgcaggacctgacactgcgggatctggagaaacaagagcgcgagaaggctgccaattctcttgaagcattcatctttgaaacacaggacaaactgtaccaacccgagtaccaggaagtgtccacggaagagcaacgcgaggagatctccggcaagctttctgctgctagcacttggctggaggacgagggagttggagccactacagttatgctgaaggaaaagctggccgaactcaggaagctctgccaggggctgtttttccgagtggaggagagaaaaaagtggccggaacggctctctgcccttgataatctcttgaaccattcatctatgtttctaaaaggcgctagattgatacccgaaatggatcagatcttcaccgaggtagaaatgacgactctcgagaaggtgattaacgaaacttgggcctggaagaacgcaacactggccgaacaggctaaactgccggcaaccgaaaagccggtgttgctgtcgaaggatattgaggcaaagatgatggccctcgaccgggaggtgcagtatctgcttaacaaggccaagtttaccaagccgagaccaagacccaaagacaagaacgggacacgtgccgaacccccactcaacgcatcagcttctgaccagggggaaaaagtgataccacccgcaggtcagacggaggacgccgagcccatttcagagcccgaaaaagttgaaaccgggtctgaaccaggggatactgaacctcttgagctaggcggtcctggcgctgagcctgaacagaaggaacagagtaccggtcaaaagaggcccctgaagaacgacgagttgtag

SEQ ID NO: 339391 - DNA, 2547 bp, Artificial Sequence
  derived and/or modified sequence
atggtgctaaactattcgagaagtttggctgaggacttcgcagaacagccaatcaaggacgctgttatcacagttcccgtgtttttcaaccaggccgagcgcagggccgtgcttcaggcagccaggatggccggactcaaagttctgcagttgatcaacgataatacagcaactgccctgtcttacggtgtttttcgccgtaaggatatcaatactaccgcccagaacatcatgttctacgacatgggaagcggaagtaccgtgtgcactatcgtgacctaccagatggtgaagactaaggaggcgggtatgcagcctcagctccaaattagaggcgtgggctttgacagaacgctcgggggtctggaaatggaattaagattacgggaacgcctggccggactattcaacgagcaacgcaaggggcagagggctaaggacgtgcgcgaaaacccaagagcaatggcgaagctgctcagagaagctaatagattgaagactgtactgtctgcaaatgccgaccatatggcccagatcgaaggactgatggacgacgtggacttcaaagccaaggttaccagagtggagtttgaggagctctgcgccgacctgtttgagcgggtgcccggtccagtccagcaggccctgcagtccgcagaaatgtcactcgatgagatcgaacaggttatcctggttggaggggctacccgagtgccacgtgtgcaggaggttctgctgaaggccgtcgggaaagaagagctaggaaagaacataaatgcggatgaggccgctgccatgggggcagtgtaccaggcagcagctctctcaaaagccttcaaagttaagccttttgtagtgcgtgacgccgtagtctaccccattcttgtggagtttacccgagaagtggaggaggaacccggtatacacagcctcaaacacaataaacgggtgctgttcagtaggatggggccttacccccagagaaaggtcatcacttttaatcgctatagccatgatttcaactttcatattaactatggcgacttgggcttcttggggccagaagacctgagggtgttcggctctcagaatttgacaacagtgaagttaaaaggagttggcgattcctttaaaaagtatcctgattatgaaagcaagggtattaaggcccactttaacctggacgagtcgggcgttctttccttagaccgtgtcgaatcagttttcgagactctcgttgaagattctgctgaagaggaatctacactgactaaactggggaacactatcagtagcctcttcgggggaggcaccacccctgatgctaaagagaatggaaccgacacagtgcaggaagaggaagagagcccagcagagggcagtaaagacgagccaggagagcaggttgaactcaaggaggaggctgaggcccctgtggaagacggaagccagccgcctccacctgaaccgaagggggacgctactcctgaaggggagaaggcaaccgaaaaggaaaacggcgacaaatcagaagcacagaaaccatccgaaaaggcagaggccggtcccgaaggagttgccccagctcctgaaggtgaaaagaagcagaaacctgctaggaaacggagaatggtggaagaaatcggcgtagagctggtcgtccttgacttgccagatctccccgaagataagttggcccagagtgtgcagaaactccaggatttgacacttagagatcttgagaagcaggagcgggaaaaagcagcaaactctctggaagcatttatctttgagacacaggacaagttgtaccagcctgaataccaggaagtgtctacagaggagcagcgggaggaaatcagcggtaagttgtcagcggcttcaacctggttggaggacgaaggcgtgggggctaccactgtgatgttaaaagaaaaattagctgagctcaggaaactttgccaggggctgttctttagggtggaggagcggaagaaatggcctgaacggttaagcgccctcgacaatttgctgaatcactcaagtatgtttctcaaaggggcacgacttattccagagatggaccagatcttcactgaagtagagatgacgactctagagaaagtgattaatgaaacttgggcctggaagaacgccacactggctgaacaagcaaaattgccagcgactgagaagcccgtcctgctgagtaaggacatcgaagccaagatgatggcactggacagagaagtccaatacttgctcaacaaagctaagtttacgaaaccgagacctcgccctaaggacaagaatggcacccgggcagagcccccactcaacgcatctgcctccgaccaaggggaaaaggttatcccacccgctggacaaaccgaagatgctgagccaatctcggagccagagaaggttgaaactggttccgaacctggcgacacagaacccctagagttgggaggccctggcgctgaacccgagcagaaagagcagtcaacaggccaaaagaggcctctcaaaaatgatgagctctag

SEQ ID NO: 339392 - DNA, 2943 bp, Artificial Sequence
  derived and/or modified sequence
atgtggcaaagtcgtgggcctatgctgtttcaccttgggctgtgtgtcggagccgctggcatgatcagagaatggttcgtgcctattcggagggagaaagggagcagattgatctgtccaggcggaactatggccgacaaggtacgtcggcagcgcccacgtcggcgtgtgtgctgggccctggttgccgtcctcctggccgacctgctcgcactgtctgatacactggccgtcatgagcgtggacctgggcagcgaatccatgaaggttgctattgtgaagcctggggttcccatggaaatcgtcttgaataaagaatctaggaggaaaacaccggtcatagtaacgcttaaggagaacgagagatttttcggggactctgccgcaagcatggcaataaagaaccccaaggctactctgcggtatttccagcacctgctcggtaagcaagccgataatcctcacgtcgctctttaccaggccagattccctgagcacgagctcacattcgaccctcaacgacagaccgtccatttccaaatctcgtcacagctgcagtttagtcctgaggaggtgttgggtatggtgctgaattacagccgtagtctggctgaagactttgccgaacagcccatcaaagatgcagtcattaccgtgccagtgttctttaaccaagccgaacgcagagccgtgctgcaggcggcacggatggcaggtctcaaggtccttcagctcatcaacgataacactgcgaccgcattgtcctacggagtgttcagacggaaggacataaacactacagcccagaacatcatgttctacgacatgggttctgggtccacagtctgtactattgtgacgtatcagatggtgaagacaaaggaggcaggtatgcagcctcagctgcagattagaggcgttggcttcgacagaaccttaggcggactcgagatggagctccgcctgcgagagagattagccggactattcaacgaacagaggaagggccagagggcaaaggacgtgcgtgaaaatccgcgagcaatggcgaaactactgagagaggctaataggttgaagaccgttctctctgcaaatgcagatcacatggcacagattgaaggactgatggacgatgttgacttcaaggccaaggtgacacgggtggagttcgaggagctctgcgcggatctgttcgagcgggtaccagggcctgtgcagcaagcccttcagagcgccgaaatgtcactagacgagatcgaacaggtaatcttggtgggcggagccacacgcgtcccgagggttcaggaggtgctgctaaaagccgtggggaaggaggagctgggcaaaaatatcaatgccgacgaggctgccgcaatgggcgcagtgtaccaagctgcggctctgtctaaagcgttcaaggtaaagcctttcgtggtgcgtgacgcagtggtctaccctatcttggttgagttcacccgcgaagttgaggaggaacccggaatccatagtctgaagcataacaaacgtgtgcttttctcccgtatgggcccatatccccagcgaaaagttatcacttttaaccgctacagccatgactttaattttcacattaattacggggacctgggctttctcggccctgaagatctgcgggtttttgggtctcagaatctgacgactgttaagctgaagggcgtgggcgacagctttaaaaaataccccgactatgaaagcaaggggatcaaggcccacttcaacttggacgagtcaggagtcctgagcctggatcgcgtggagagcgtcttcgaaacacttgttgaagattcggctgaggaggaaagtaccctgacaaaactgggcaatactattagttcactctttggaggagggacaaccccagacgctaaagagaacggaactgatacagtccagaagccctccgagaaggcggaggctgggccagagggcgtcgcccctgccccagagggcgagaaaaaacagaaacccgctagaaagcggaggatggtggaggagatcggggttgagttagtggttttagatttacccgacctgcctgaagacaagctcgcccagtccgtgcagaagctgcaggacctcacactccgagatctagagaaacaggaaagagaaaaggccgcaaattcactggaggcatttatctttgaaactcaggacaaactgtaccaacccgaataccaagaggtctccacggaggagcaaagggaggaaatctcaggcaaactttcagccgcaagcacatggttagaagacgagggggttggggcaactaccgttatgttgaaggaaaagctggcggaactcagaaaactgtgccagggactgttctttagagtggaggaacgaaagaaatggcccgaacgcctcagcgctttggacaacctgcttaatcattcctcaatgtttctcaaaggggcacgcctgattcctgaaatggatcagatcttcacggaggtggagatgacgactctcgagaaggtgattaatgagacgtgggcctggaagaatgcgaccctggctgaacaggctaaactcccagctactgaaaaacctgtgttgctgtctaaagacattgaagcaaagatgatggcattagacagggaggttcagtacttgctgaacaaggccaagtttaccaagcccagacccagacccaaggacaaaaacggcacccgcgctgagccccctctgaacgcgtcagcaagtgatcagggggaaaaagtgatccctcctgccggacagacagaagacgctgaaccaatatccgagcccgaaaaagtcgagaccggctctgagccaggtgacactgaaccgttggaacttggcggacccggagctgaaccagaacagaaagaacagtctaccggtcaaaagaggccccttaagaatgacgagttgtag

SEQ ID NO: 339393 - DNA, 3000 bp, Artificial Sequence
  derived and/or modified sequence
atggccgacaaggtgagaagacagagacccagaagaagagtgtgctgggccctggtggccgtgctgctggccgacctgctggccctgagcgacaccctggccgtgatgagcgtggacctgggcagcgagagcatgaaggtggccatcgtgaagcccggcgtgcccatggagatcgtgctgaacaaggagagcagaagaaagacccccgtgatcgtgaccctgaaggagaacgagagattcttcggcgacagcgccgccagcatggccatcaagaaccccaaggccaccctgagatacttccagcacctgctgggcaagcaggccgacaacccccacgtggccctgtaccaggccagattccccgagcacgagctgaccttcgacccccagagacagaccgtgcacttccagatcagcagccagctgcagttcagccccgaggaggtgctgggcatggtgctgaactacagcagaagcctggccgaggacttcgccgagcagcccatcaaggacgccgtgatcaccgtgcccgtgttcttcaaccaggccgagagaagagccgtgctgcaggccgccagaatggccggcctgaaggtgctgcagctgatcaacgacaacaccgccaccgccctgagctacggcgtgttcagaagaaaggacatcaacaccaccgcccagaacatcatgttctacgacatgggcagcggcagcaccgtgtgcaccatcgtgacctaccagatggtgaagaccaaggaggccggcatgcagccccagctgcagatcagaggcgtgggcttcgacagaaccctgggcggcctggagatggagctgagactgagagagagactggccggcctgttcaacgagcagagaaagggccagagagccaaggacgtgagagagaaccccagagccatggccaagctgctgagagaggccaacagactgaagaccgtgctgagcgccaacgccgaccacatggcccagatcgagggcctgatggacgacgtggacttcaaggccaaggtgaccagagtggagttcgaggagctgtgcgccgacctgttcgagagagtgcccggccccgtgcagcaggccctgcagagcgccgagatgagcctggacgagatcgagcaggtgatcctggtgggcggcgccaccagagtgcccagagtgcaggaggtgctgctgaaggccgtgggcaaggaggagctgggcaagaacatcaacgccgacgaggccgccgccatgggcgccgtgtaccaggccgccgccctgagcaaggccttcaaggtgaagcccttcgtggtgagagacgccgtggtgtaccccatcctggtggagttcaccagagaggtggaggaggagcccggcatccacagcctgaagcacaacaagagagtgctgttcagcagaatgggcccctacccccagagaaaggtgatcaccttcaacagatacagccacgacttcaacttccacatcaactacggcgacctgggcttcctgggccccgaggacctgagagtgttcggcagccagaacctgaccaccgtgaagctgaagggcgtgggcgacagcttcaagaagtaccccgactacgagagcaagggcatcaaggcccacttcaacctggacgagagcggcgtgctgagcctggacagagtggagagcgtgttcgagaccctggtggaggacagcgccgaggaggagagcaccctgaccaagctgggcaacaccatcagcagcctgttcggcggcggcaccacccccgacgccaaggagaacggcaccgacaccgtgcaggaggaggaggagagccccgccgagggcagcaaggacgagcccggcgagcaggtggagctgaaggaggaggccgaggcccccgtggaggacggcagccagccccccccccccgagcccaagggcgacgccacccccgagggcgagaaggccaccgagaaggagaacggcgacaagagcgaggcccagaagcccagcgagaaggccgaggccggccccgagggcgtggcccccgcccccgagggcgagaagaagcagaagcccgccagaaagagaagaatggtggaggagatcggcgtggagctggtggtgctggacctgcccgacctgcccgaggacaagctggcccagagcgtgcagaagctgcaggacctgaccctgagagacctggagaagcaggagagagagaaggccgccaacagcctggaggccttcatcttcgagacccaggacaagctgtaccagcccgagtaccaggaggtgagcaccgaggagcagagagaggagatcagcggcaagctgagcgccgccagcacctggctggaggacgagggcgtgggcgccaccaccgtgatgctgaaggagaagctggccgagctgagaaagctgtgccagggcctgttcttcagagtggaggagagaaagaagtggcccgagagactgagcgccctggacaacctgctgaaccacagcagcatgttcctgaagggcgccagactgatccccgagatggaccagatcttcaccgaggtggagatgaccaccctggagaaggtgatcaacgagacctgggcctggaagaacgccaccctggccgagcaggccaagctgcccgccaccgagaagcccgtgctgctgagcaaggacatcgaggccaagatgatggccctggacagagaggtgcagtacctgctgaacaaggccaagttcaccaagcccagacccagacccaaggacaagaacggcaccagagccgagccccccctgaacgccagcgccagcgaccagggcgagaaggtgatcccccccgccggccagaccgaggacgccgagcccatcagcgagcccgagaaggtggagaccggcagcgagcccggcgacaccgagcccctggagctgggcggccccggcgccgagcccgagcagaaggagcagagcaccggccagaagagacccctgaagaacgacgagctgtag

SEQ ID NO: 339394 - DNA, 2547 bp, Artificial Sequence
  derived and/or modified sequence
atggtgctgaactacagcagaagcctggccgaggacttcgccgagcagcccatcaaggacgccgtgatcaccgtgcccgtgttcttcaaccaggccgagagaagagccgtgctgcaggccgccagaatggccggcctgaaggtgctgcagctgatcaacgacaacaccgccaccgccctgagctacggcgtgttcagaagaaaggacatcaacaccaccgcccagaacatcatgttctacgacatgggcagcggcagcaccgtgtgcaccatcgtgacctaccagatggtgaagaccaaggaggccggcatgcagccccagctgcagatcagaggcgtgggcttcgacagaaccctgggcggcctggagatggagctgagactgagagagagactggccggcctgttcaacgagcagagaaagggccagagagccaaggacgtgagagagaaccccagagccatggccaagctgctgagagaggccaacagactgaagaccgtgctgagcgccaacgccgaccacatggcccagatcgagggcctgatggacgacgtggacttcaaggccaaggtgaccagagtggagttcgaggagctgtgcgccgacctgttcgagagagtgcccggccccgtgcagcaggccctgcagagcgccgagatgagcctggacgagatcgagcaggtgatcctggtgggcggcgccaccagagtgcccagagtgcaggaggtgctgctgaaggccgtgggcaaggaggagctgggcaagaacatcaacgccgacgaggccgccgccatgggcgccgtgtaccaggccgccgccctgagcaaggccttcaaggtgaagcccttcgtggtgagagacgccgtggtgtaccccatcctggtggagttcaccagagaggtggaggaggagcccggcatccacagcctgaagcacaacaagagagtgctgttcagcagaatgggcccctacccccagagaaaggtgatcaccttcaacagatacagccacgacttcaacttccacatcaactacggcgacctgggcttcctgggccccgaggacctgagagtgttcggcagccagaacctgaccaccgtgaagctgaagggcgtgggcgacagcttcaagaagtaccccgactacgagagcaagggcatcaaggcccacttcaacctggacgagagcggcgtgctgagcctggacagagtggagagcgtgttcgagaccctggtggaggacagcgccgaggaggagagcaccctgaccaagctgggcaacaccatcagcagcctgttcggcggcggcaccacccccgacgccaaggagaacggcaccgacaccgtgcaggaggaggaggagagccccgccgagggcagcaaggacgagcccggcgagcaggtggagctgaaggaggaggccgaggcccccgtggaggacggcagccagccccccccccccgagcccaagggcgacgccacccccgagggcgagaaggccaccgagaaggagaacggcgacaagagcgaggcccagaagcccagcgagaaggccgaggccggccccgagggcgtggcccccgcccccgagggcgagaagaagcagaagcccgccagaaagagaagaatggtggaggagatcggcgtggagctggtggtgctggacctgcccgacctgcccgaggacaagctggcccagagcgtgcagaagctgcaggacctgaccctgagagacctggagaagcaggagagagagaaggccgccaacagcctggaggccttcatcttcgagacccaggacaagctgtaccagcccgagtaccaggaggtgagcaccgaggagcagagagaggagatcagcggcaagctgagcgccgccagcacctggctggaggacgagggcgtgggcgccaccaccgtgatgctgaaggagaagctggccgagctgagaaagctgtgccagggcctgttcttcagagtggaggagagaaagaagtggcccgagagactgagcgccctggacaacctgctgaaccacagcagcatgttcctgaagggcgccagactgatccccgagatggaccagatcttcaccgaggtggagatgaccaccctggagaaggtgatcaacgagacctgggcctggaagaacgccaccctggccgagcaggccaagctgcccgccaccgagaagcccgtgctgctgagcaaggacatcgaggccaagatgatggccctggacagagaggtgcagtacctgctgaacaaggccaagttcaccaagcccagacccagacccaaggacaagaacggcaccagagccgagccccccctgaacgccagcgccagcgaccagggcgagaaggtgatcccccccgccggccagaccgaggacgccgagcccatcagcgagcccgagaaggtggagaccggcagcgagcccggcgacaccgagcccctggagctgggcggccccggcgccgagcccgagcagaaggagcagagcaccggccagaagagacccctgaagaacgacgagctgtag

SEQ ID NO: 339395 - DNA, 2943 bp, Artificial Sequence
  derived and/or modified sequence
atgtggcagagcagaggccccatgctgttccacctgggcctgtgcgtgggcgccgccggcatgatcagagagtggttcgtgcccatcagaagagagaagggcagcagactgatctgccccggcggcaccatggccgacaaggtgagaagacagagacccagaagaagagtgtgctgggccctggtggccgtgctgctggccgacctgctggccctgagcgacaccctggccgtgatgagcgtggacctgggcagcgagagcatgaaggtggccatcgtgaagcccggcgtgcccatggagatcgtgctgaacaaggagagcagaagaaagacccccgtgatcgtgaccctgaaggagaacgagagattcttcggcgacagcgccgccagcatggccatcaagaaccccaaggccaccctgagatacttccagcacctgctgggcaagcaggccgacaacccccacgtggccctgtaccaggccagattccccgagcacgagctgaccttcgacccccagagacagaccgtgcacttccagatcagcagccagctgcagttcagccccgaggaggtgctgggcatggtgctgaactacagcagaagcctggccgaggacttcgccgagcagcccatcaaggacgccgtgatcaccgtgcccgtgttcttcaaccaggccgagagaagagccgtgctgcaggccgccagaatggccggcctgaaggtgctgcagctgatcaacgacaacaccgccaccgccctgagctacggcgtgttcagaagaaaggacatcaacaccaccgcccagaacatcatgttctacgacatgggcagcggcagcaccgtgtgcaccatcgtgacctaccagatggtgaagaccaaggaggccggcatgcagccccagctgcagatcagaggcgtgggcttcgacagaaccctgggcggcctggagatggagctgagactgagagagagactggccggcctgttcaacgagcagagaaagggccagagagccaaggacgtgagagagaaccccagagccatggccaagctgctgagagaggccaacagactgaagaccgtgctgagcgccaacgccgaccacatggcccagatcgagggcctgatggacgacgtggacttcaaggccaaggtgaccagagtggagttcgaggagctgtgcgccgacctgttcgagagagtgcccggccccgtgcagcaggccctgcagagcgccgagatgagcctggacgagatcgagcaggtgatcctggtgggcggcgccaccagagtgcccagagtgcaggaggtgctgctgaaggccgtgggcaaggaggagctgggcaagaacatcaacgccgacgaggccgccgccatgggcgccgtgtaccaggccgccgccctgagcaaggccttcaaggtgaagcccttcgtggtgagagacgccgtggtgtaccccatcctggtggagttcaccagagaggtggaggaggagcccggcatccacagcctgaagcacaacaagagagtgctgttcagcagaatgggcccctacccccagagaaaggtgatcaccttcaacagatacagccacgacttcaacttccacatcaactacggcgacctgggcttcctgggccccgaggacctgagagtgttcggcagccagaacctgaccaccgtgaagctgaagggcgtgggcgacagcttcaagaagtaccccgactacgagagcaagggcatcaaggcccacttcaacctggacgagagcggcgtgctgagcctggacagagtggagagcgtgttcgagaccctggtggaggacagcgccgaggaggagagcaccctgaccaagctgggcaacaccatcagcagcctgttcggcggcggcaccacccccgacgccaaggagaacggcaccgacaccgtgcagaagcccagcgagaaggccgaggccggccccgagggcgtggcccccgcccccgagggcgagaagaagcagaagcccgccagaaagagaagaatggtggaggagatcggcgtggagctggtggtgctggacctgcccgacctgcccgaggacaagctggcccagagcgtgcagaagctgcaggacctgaccctgagagacctggagaagcaggagagagagaaggccgccaacagcctggaggccttcatcttcgagacccaggacaagctgtaccagcccgagtaccaggaggtgagcaccgaggagcagagagaggagatcagcggcaagctgagcgccgccagcacctggctggaggacgagggcgtgggcgccaccaccgtgatgctgaaggagaagctggccgagctgagaaagctgtgccagggcctgttcttcagagtggaggagagaaagaagtggcccgagagactgagcgccctggacaacctgctgaaccacagcagcatgttcctgaagggcgccagactgatccccgagatggaccagatcttcaccgaggtggagatgaccaccctggagaaggtgatcaacgagacctgggcctggaagaacgccaccctggccgagcaggccaagctgcccgccaccgagaagcccgtgctgctgagcaaggacatcgaggccaagatgatggccctggacagagaggtgcagtacctgctgaacaaggccaagttcaccaagcccagacccagacccaaggacaagaacggcaccagagccgagccccccctgaacgccagcgccagcgaccagggcgagaaggtgatcccccccgccggccagaccgaggacgccgagcccatcagcgagcccgagaaggtggagaccggcagcgagcccggcgacaccgagcccctggagctgggcggccccggcgccgagcccgagcagaaggagcagagcaccggccagaagagacccctgaagaacgacgagctgtag

SEQ ID NO: 339396 - DNA, 1380 bp, Artificial Sequence
  derived and/or modified sequence
atgcccaactgcgtgcccggccagggcagctgcatcagcagcggcagaagctggggcagaagataccagagacccggccccgcccagggcctgaccaagggcaccgaggagagaaacgtgcccggcgcccacagcgtgttcggcgcccagatcagagacagctactgggtgatggagggcctgctgctgagcgagatggccgagaccgtgaagggcatgctgcagaacttcctggacctggtgaagacctacggccacgtgcccaacggcggcagagtgtactacctgcagagaagccagccccccctgctgaccctgatgatggactgctacctgacccacaccaacgacaccgccttcctgcaggagaacatcgagaccctggccctggagctggacttctggaccaagaacagaaccgtgagcgtgagcctggagggcaagaactacctgctgaacagatactacgtgccctacggcggccccagacccgagagctacagcaaggacgtggagctggccgacaccctgcccgagggcgacagagaggccctgtgggccgagctgaaggccggcgccgagagcggctgggacttcagcagcagatggctgatcggcggccccaaccccaacagcctgagcggcatcagaaccagcaagctggtgcccgtggacctgaacgccttcctgtgccaggccgaggagctgatgagcaacttctacagcagactgggcaacgacagccaggccaccaagtacagaatcctgagaagccagagactggccgccctgaacaccgtgctgtgggacgagcagaccggcgcctggttcgactacgacctggagaagaagaagaagaacagagagttctaccccagcaacctgacccccctgtgggccggctgcttcagcgaccccggcgtggccgacaaggccctgaagtacctggaggacaacagaatcctgacctaccagtacggcatccccaccagcctgcagaagaccggccagcagtgggacttccccaacgcctgggcccccctgcaggacctggtgatcagaggcctggccaaggcccccctgagaagagcccaggaggtggccttccagctggcccagaactggatcagaaccaacttcgacgtgtacagccagaagagcgccatgtacgagaagtacgacgtgagcaacggcggccagcccggcggcggcggcgagtacgaggtgcaggagggcttcggctggaccaacggcgtggtgctgatgctgctggacagatacggcgacagactgaccagcggccccaagctgcccttcctggagccccactgcctggccaccctgctgcccagcctgctgctgagcctgctgccctggtag

SEQ ID NO: 339397 - DNA, 1380 bp, Artificial Sequence
  derived and/or modified sequence
atgcctaactgcgtccccggccagggaagttgcatttccagcgggagaagctggggcagacgctatcagcgcccaggtccagcacagggattgaccaagggcacagaggagcgcaacgtcccaggcgcccacagcgttttcggtgcgcaaattcgagatagttattgggttatggaaggcctcttgctgagcgagatggcagagactgtcaaaggcatgctccagaatttcctcgatttggtcaagacatatggacacgtacctaacggcggaagagtgtactacctgcagcggagccagcctcctctgctcaccctgatgatggactgctacttaacgcacacaaatgatacagcattcctgcaggagaacattgagaccctggccctggagctggacttctggacaaagaatcgaactgtctctgtaagcttagaaggaaaaaactacttgttgaacaggtactacgtcccttacggcggcccaagacctgagagctactcaaaggacgtggagctcgccgatacactgccagagggggaccgcgaggcactgtgggcagaactgaaagcaggggccgagagcggttgggacttcagttcgaggtggttaattggcggccccaacccaaattcactctcaggcatacggaccagcaaactcgtgccagtggatctgaatgccttcttatgtcaagccgaagaactcatgtccaatttctactcacgcctcggcaacgactcacaggcgaccaaatatcggattctacgctcacagcgattggccgccctaaatactgtgttgtgggatgagcagaccggtgcatggttcgactacgatctcgaaaagaagaaaaagaaccgagagttttacccctccaacctcacgcctttgtgggctgggtgtttctctgacccaggtgtcgccgataaagcccttaagtatcttgaagacaaccggatcttgacctaccaatatgggatccccacatccttgcagaaaacggggcagcagtgggattttccgaacgcctgggccccattgcaagaccttgtcattcgaggactggcaaaagcacccctgcgaagggcccaagaggtggcattccaactggctcaaaattggatcaggactaacttcgacgtgtactctcagaagtctgccatgtacgagaaatatgacgttagtaatgggggccagcccggtggaggaggggaatatgaagtacaagagggcttcggctggacaaacggagtggtgctcatgctactggataggtacggggaccgacttacgagtggtcctaagttgccattcctggagccccactgtctggctactttgctgcccagcctactcctgtcacttctcccctggtag

SEQ ID NO: 339398 - DNA, 1380 bp, Artificial Sequence
  derived and/or modified sequence
atgcccaactgtgtgcccggccagggcagctgcatcagcagcggccgctcctggggccgccgctaccagaggcctggccctgcccagggcctgaccaagggcacagaggagagaaatgtgcctggggcccacagcgtgtttggagcccagatccgggacagctactgggtgatggagggcctgctgctgtctgagatggccgagaccgtgaagggcatgctgcagaacttcctggacctggtgaagacctacggccacgtgcccaatggaggccgggtgtactacctgcagaggagccagccccccctgctgaccctgatgatggactgctacctgacccacaccaatgacacagccttcctgcaggagaacatcgagaccctggccctggagctggacttctggaccaagaacagaacagtgtctgtgtccctggagggcaagaactacctgctgaaccgctactacgtgccctatggaggccccaggcctgagagctacagcaaggatgtggagctggccgacaccctgcctgagggggaccgggaggccctgtgggccgagctgaaggccggggctgagagcggctgggacttcagcagccgctggctgattggaggccccaaccccaacagcctgagcggcatccgcaccagcaagctggtgcctgtggacctgaatgccttcctgtgccaggccgaggagctgatgagcaacttctacagccggctgggcaatgacagccaggccaccaagtaccgcatcctgcggagccagaggctggccgccctgaacacagtgctgtgggatgagcagacaggagcctggtttgattatgacctggagaagaagaagaagaaccgggagttctaccccagcaacctgacccccctgtgggccggctgcttcagtgaccccggggtggccgacaaggccctgaagtacctggaggacaaccgcatcctgacctaccagtatggcatccccaccagcctgcagaagacaggccagcagtgggacttccccaatgcctgggcccccctgcaggacctggtgatccggggcctggccaaggcccccctgcggcgggcccaggaggtggccttccagctggcccagaactggatccgcaccaactttgatgtgtacagccagaagagcgccatgtatgagaagtatgatgtgtccaatggaggccagcccggcggcggcggggagtatgaggtgcaggagggcttcggctggaccaatggagtggtgctgatgctgctggacagatatggagaccggctgaccagcggccccaagctgcccttcctggagccccactgcctggccaccctgctgcccagcctgctgctgagcctgctgccctggtag

SEQ ID NO: 339399 - DNA, 1380 bp, Artificial Sequence
  derived and/or modified sequence
atgcccaactgcgtgcccggccagggcagctgcatcagcagcggccgaagttggggtagacgctaccagcggcccggacctgcccagggcctgacaaagggcacagaggagagaaacgtaccaggcgcgcacagcgtctttggtgcccagatacgggactcctattgggtaatggaaggcctgttactatcagagatggccgagaccgtaaagggcatgcttcagaactttttggacttggtaaaaacatatggacatgtgccaaatgggggcagagtctactacttgcagcggtctcaacctcctctgcttaccctcatgatggactgctatctcactcacaccaatgacactgcattcctacaggaaaatatcgaaacactggcacttgagctagacttttggacaaaaaatcgcactgtatcagtcagccttgaggggaagaactatctcctgaaccgttattatgtgccttatggtggtcctcggccagagagctattccaaagatgttgagctggccgacacgttgccagaaggcgaccgagaggcgctgtgggccgagctgaaagccggcgccgagagcggctgggacttttcatcccgctggcttattggcggtccaaacccgaatagcctctcagggatcaggacaagtaaactcgttcccgtggacttgaacgcgtttctgtgccaagctgaggagcttatgtcaaatttttatagtcggctcggcaatgactctcaggcgaccaagtatcggatcttacgatctcagaggctggctgccctgaatacagttctgtgggatgaacagacaggggcttggttcgactacgatctcgaaaagaagaaaaagaatagggaattttacccatcaaaccttaccccgctctgggcgggatgtttcagcgaccctggcgtagctgacaaggcactgaagtacctcgaggacaacagaatattgacatatcagtacggtatcccaacctctttgcagaaaacggggcagcagtgggacttccctaacgcatgggctcctctccaggacctagtgatccggggacttgcaaaggctccgctgagacgcgcacaagaagtcgccttccagctggctcagaattggatacgcacaaatttcgacgtgtactcacagaaatccgccatgtacgaaaagtatgacgtgtcaaatggcggccagccaggaggcggaggcgagtacgaagtgcaggagggctttggctggacaaatggtgtggtgctgatgttgctggatagatacggagaccgcctgacaagtggccctaagctgcccttcctcgaaccacactgcctcgccacgctgcttccatccttgctgctctcccttttgccctggtag

SEQ ID NO: 339400 - DNA, 1380 bp, Artificial Sequence
  derived and/or modified sequence
atgccaaattgtgtgccagggcaaggttcttgcatctcgtctggacggtcctggggccgacgctaccagagaccaggacccgcacagggcctgactaaaggtaccgaagagcgcaatgtgccaggagcccactccgtgtttggagcccagatacgcgacagctattgggtgatggagggcttacttctctcagaaatggcagagacggtgaaggggatgctgcagaactttcttgatctcgttaaaacttatggccatgtccccaacggtggaagagtttactacctgcagcggtcccagccccctctactgaccttgatgatggactgctaccttacgcataccaacgacacagctttcctccaggaaaacatagaaaccctggctctagaactcgatttttggacaaagaatagaaccgtctctgtctcattagaggggaaaaattacctcttaaaccgatactacgtgccctacggcggaccccgacctgagtcctattcaaaagatgtcgagctcgccgacacgctccccgagggggatagagaagccttatgggccgaactgaaagccggtgccgaatctggttgggacttttccagccgatggctgatcggtggtcctaatcccaacagcctatccggcatacggacctctaaactcgttcccgtggatttgaatgccttcctatgtcaggcagaagagttgatgtctaacttctacagccggctgggcaatgattcacaggcaacaaagtacagaatactaagaagtcagagattggcagcccttaacaccgtgctttgggacgaacagacaggcgcatggttcgattatgatctggagaagaagaagaaaaatcgggagttttacccctcaaatctcacacccctctgggcgggatgttttagcgatccgggagtcgccgacaaggcactgaagtacctggaggataaccgcattttgacctaccaatacggaattccgactagccttcagaaaaccggacagcagtgggattttccaaatgcatgggcccctcttcaggatctggtgatccgaggacttgccaaagcccctcttagacgagcacaggaggtggcatttcagctggcccaaaactggatccgcaccaattttgatgtttacagccagaagtccgccatgtatgagaagtatgacgtttcgaacggcggtcagcctggagggggaggcgagtacgaagtgcaggagggctttggctggactaatggagtagtgctcatgcttttggatagatatggcgatcggctgacgagtggtcccaagcttccatttctggaaccccattgccttgcaacgttgctgcctagtctgctcctcagtctactgccctggtag

SEQ ID NO: 339401 - DNA, 1720 bp, Artificial Sequence
  derived and/or modified sequence
attcagtcacagtcacagccaccatgccagggaggacctgggagctgtgcctgctactgctgctggggctgggactggggtcccaggaggccctacccccaccctgtgagagaacaagtcctgcagaccttcactgagctgtccagggaccacaatcacagcatccccagggagcagctgcaggcgtttgtccacgaacacttccaggccaaggggcaggagctgcagccctggacccctgcagactggaaagacagcccccagttcctgcagaagatttcagatgccaaactgcgtgcctgggcagggcagctgcatcagctctggaagaagctggggaagaaggtatcagcgtcctgggcctgcccaaggcctgaccaagggaactgaagagaggaatgtgcctggggcccacagtgtcttcggagcacagatcagggactcctactgggtcatggagggtctgctcctctcagagatggctgagacggtgaagggcatgctgcagaacttcttggacctggtgaaaacctatgggcatgtccccaatggtgggcgcgtgtactacctgcagcggagccagcccccactcttgaccctcatgatggattgctacttgactcacaccaatgacaccgcctttctacaggaaaacattgaaacactagccttggaattggacttttggaccaagaacaggactgtctctgtgagcttggagggaaagaactacctcctgaatcgctattatgtcccttatgggggacccaggcctgagtcctacagcaaagatgtggagttggctgacaccttgccagaaggagaccgggaggctctgtgggctgagctcaaggctggggctgagtctggctgggacttctcttcacgctggctcattggaggcccaaaccccaactcgcttagcggcatccgaacaagcaaactggtgcctgttgacctgaatgccttcctatgccaagcagaggagctgatgagcaacttctattccaggctggggaacgactcccaggccacgaagtacagaatcctgcggtcgcagcgcttggccgccctgaacacagtcctgtgggatgagcagaccggagcctggttcgattacgaccttgagaagaagaagaaaaaccgggagttttacccatccaacctcactccactctgggccgggtgtttctctgaccctggcgtggcggacaaggctctgaaatacctggaggacaaccggatcctgacttaccagtatgggatcccgacctctctccagaagacaggccagcagtgggatttccccaatgcctgggcccccctgcaggacctggtcatcagaggcctggccaaggcacctttacgtcgggcccaggaagtggctttccagctggctcagaattggatccgaaccaattttgatgtctactcgcagaagtcagccatgtatgagaagtatgacgtcagcaacggtggacagcccggtgggggaggagaatatgaagttcaggagggatttggctggacgaatggcgtggtcctgatgctgctggaccgctatggtgaccggctgacctcagggcccaagctgcctttcctggagccccactgcctggccacccttctgcccagcctcctgctaagcctcctgccatggtgacagccctcctctcctcacctggccccagctcctgccccattaaacctctgcaccagt

SEQ ID NO: 339402 - protein, 235 aa, Artificial Sequence
  derived and/or modified sequence
MASSTSLPAPGSRPKKPLGKMADWFRQTLLKKPKKRPNSPESTSSDASQPTSQDSPLPPSLSSVTSPSLPPTHASDSGSSRWSKDYDVCVCHSEEDLVAAQDLVSYLEGSTASLRCFLQLRDATPGGAIVSELCQALSSSHCRVLLITPGFLQDPWCKYQMLQALTEAPGAEGCTIPLLSGLSRAAYPPELRFMYYVDGRGPDGGFRQVKEAVMRCKLLQEGEGERDSATVSDLL

SEQ ID NO: 339403 - DNA, 708 bp, Artificial Sequence
  derived and/or modified sequence
atggccagcagcaccagcctgcccgcccccggcagcagacccaagaagcccctgggcaagatggccgactggttcagacagaccctgctgaagaagcccaagaagagacccaacagccccgagagcaccagcagcgacgccagccagcccaccagccaggacagccccctgccccccagcctgagcagcgtgaccagccccagcctgccccccacccacgccagcgacagcggcagcagcagatggagcaaggactacgacgtgtgcgtgtgccacagcgaggaggacctggtggccgcccaggacctggtgagctacctggagggcagcaccgccagcctgagatgcttcctgcagctgagagacgccacccccggcggcgccatcgtgagcgagctgtgccaggccctgagcagcagccactgcagagtgctgctgatcacccccggcttcctgcaggacccctggtgcaagtaccagatgctgcaggccctgaccgaggcccccggcgccgagggctgcaccatccccctgctgagcggcctgagcagagccgcctacccccccgagctgagattcatgtactacgtggacggcagaggccccgacggcggcttcagacaggtgaaggaggccgtgatgagatgcaagctgctgcaggagggcgagggcgagagagacagcgccaccgtgagcgacctgctgtag

SEQ ID NO: 339404 - DNA, 708 bp, Artificial Sequence
  derived and/or modified sequence
atggccagctcaacaagcttacccgcacctggatcccgaccgaaaaagccactggggaagatggctgattggttccggcagacactgctgaagaagcccaagaaaagaccaaatagtccagagagcacatcctcagacgcttctcagcccacgagccaggatagtcctctgcccccttctctcagtagcgttacatcgcctagtctgccccccacgcacgcctctgatagcggcagtagccggtggtccaaagactatgatgtgtgcgtatgtcacagcgaagaagatctggtagctgcacaggacttagtctcatacttggaaggcagcactgccagcctgaggtgctttcttcagctgagagacgccacccccggaggggcaatcgtgagtgagctatgccaggccctgtcctctagccactgtagggtcctgctgatcaccccgggctttttgcaggacccctggtgcaaataccaaatgctacaggccctgacagaggcacccggagccgaaggctgtaccattccactgctgtctggcctgagccgcgctgcctacccccccgagcttcgattcatgtattatgtcgatggaaggggtccagatgggggtttccggcaggtgaaagaagcggtgatgaggtgtaaattgttacaggaaggcgaaggggagagggacagcgcaaccgtgtccgatttactgtag

SEQ ID NO: 339405 - DNA, 708 bp, Artificial Sequence
  derived and/or modified sequence
atggccagcagcaccagcctgcctgcccctggcagccggcccaagaagcccctgggcaagatggctgactggttccggcagaccctgctgaagaagcccaagaagaggcccaacagccctgagagcaccagcagtgatgccagccagcccaccagccaggacagccccctgccccccagcctgagctctgtgaccagccccagcctgccccccacccacgccagtgacagcggcagcagccgctggagcaaggactatgatgtgtgtgtgtgccacagcgaggaggacctggtggccgcccaggacctggtgtcctacctggagggcagcacagccagcctgcgctgcttcctgcagctgagagatgccaccccaggaggagccatcgtgtctgagctgtgccaggccctgagcagcagccactgccgggtgctgctgatcaccccaggcttcctgcaggacccctggtgcaagtaccagatgctgcaggccctgacagaggcccctggagctgagggctgcaccatccccctgctgagcggcctgagcagagctgcctacccacctgagctgcgcttcatgtactacgtggatggccggggcccagatggcggcttccggcaggtgaaggaggccgtgatgcgctgcaagctgctgcaggagggggagggggagcgggacagcgccaccgtgtctgacctgctgtag

SEQ ID NO: 339406 - DNA, 708 bp, Artificial Sequence
  derived and/or modified sequence
atggccagcagcaccagcctgcccgcccccggcagccggcccaagaaacctctggggaaaatggctgattggttccgtcaaaccctgctgaaaaaacctaagaaaaggccgaactcccctgagtccacctcctctgatgcttcgcagccgacaagtcaggatagcccactcccaccctccttatcatcagtcacttctcccagcctcccccccactcacgcaagtgattcgggatcctcccggtggagtaaggactatgatgtctgtgtgtgtcactctgaagaagacctagtggcagcccaggacctggtttcttatctcgagggcagcacagctagcttgcgctgctttctgcaactgcgagacgccactccgggtggcgctattgtctctgagctgtgccaggctctgtcatctagtcactgcagggttttgctaatcacgccagggtttctgcaggatccatggtgcaaatatcaaatgctgcaggcacttacagaagcccccggcgcagagggctgtaccatccccctcctgtcagggctgtctagagcagcctacccccccgaactgcgattcatgtattacgtggacggaagggggccagatgggggttttcgccaggtgaaggaggccgttatgcggtgtaagctgctccaggaaggagagggagagagagattccgcgaccgtgagcgacctactatag

SEQ ID NO: 339407 - DNA, 708 bp, Artificial Sequence
  derived and/or modified sequence
atggcaagctctacaagtcttcccgctcccggttcacgccctaaaaaacctttgggcaaaatggcagactggttcagacagacgttgctgaagaaacccaagaagcgccctaattcccctgagtccacttcaagtgatgcttcccagcctacctctcaggattccccactgccccctagcctcagtagtgttacctcgccaagcctgcccccaacacacgcctccgacagtggtagttcacggtggtcaaaggactatgatgtgtgcgtgtgccatagcgaggaagacctcgttgccgcacaggacttagtgtcttatctcgagggctctaccgcctcattgcggtgcttcctgcagcttcgggacgcaaccccgggaggggcaatagtcagcgagctgtgtcaagccctcagcagcagtcactgcagagtgctgctcatcaccccgggtttcctgcaggatccttggtgcaagtaccagatgctgcaggcccttaccgaggcccctggagctgaaggctgcaccatccctctgctctctggcctgtcccgagccgcttatcctcctgaactacgctttatgtactacgtcgacggcaggggcccagatggagggttcaggcaagttaaggaagccgtaatgcgctgtaagctgctgcaggaaggggaaggcgagcgagattccgctacagtatctgatctgctctag

SEQ ID NO: 339408 - protein, 255 aa, Artificial Sequence
  derived and/or modified sequence
MASSTSLPAPGSRPKKPLGKMADWFRQTLLKKPKKRPNSPESTSSDASQPTSQDSPLPPSLSSVTSPSLPPTHASDSGSSRWSKDYDVCVCHSEEDLVAAQDLVSYLEGSTASLRCFLQLRDATPGGAIVSELCQALSSSHCRVLLITPGFLQDPWCKYQMLQALTEAPGAEGCTIPLLSGLSRAAYPPELRFMYYVDGRGPDGGFRQVKEAVMRSNQVLKHLLYHGTPEIGVKLETENPCRASDSHKCDKRYRE

SEQ ID NO: 339409 - protein, 221 aa, Artificial Sequence
  derived and/or modified sequence
MASSTSLPAPGSRPKKPLGKMADWFRQTLLKKPKKRPNSPESTSSDASQPTSQDSPLPPSLSSVTSPSLPPTHASDSGSSRWSKDYDVCVCHSEEDLVAAQDLVSYLEGSTASLRCFLQLRDATPGGAIVSELCQALSSSHCRVLLITPGFLQDPWCKYQMLQALTEAPGAEGCTIPLLSGLSRAAYPPELRFMYYVDGRGPDGGFRQVKEAVMRYLQTLS

SEQ ID NO: 339410 - DNA, 768 bp, Artificial Sequence
  derived and/or modified sequence
atggccagcagcaccagcctgcccgcccccggcagcagacccaagaagcccctgggcaagatggccgactggttcagacagaccctgctgaagaagcccaagaagagacccaacagccccgagagcaccagcagcgacgccagccagcccaccagccaggacagccccctgccccccagcctgagcagcgtgaccagccccagcctgccccccacccacgccagcgacagcggcagcagcagatggagcaaggactacgacgtgtgcgtgtgccacagcgaggaggacctggtggccgcccaggacctggtgagctacctggagggcagcaccgccagcctgagatgcttcctgcagctgagagacgccacccccggcggcgccatcgtgagcgagctgtgccaggccctgagcagcagccactgcagagtgctgctgatcacccccggcttcctgcaggacccctggtgcaagtaccagatgctgcaggccctgaccgaggcccccggcgccgagggctgcaccatccccctgctgagcggcctgagcagagccgcctacccccccgagctgagattcatgtactacgtggacggcagaggccccgacggcggcttcagacaggtgaaggaggccgtgatgagaagcaaccaggtgctgaagcacctgctgtaccacggcacccccgagatcggcgtgaagctggagaccgagaacccctgcagagccagcgacagccacaagtgcgacaagagatacagagagtag

SEQ ID NO: 339411 - DNA, 666 bp, Artificial Sequence
  derived and/or modified sequence
atggccagcagcaccagcctgcccgcccccggcagcagacccaagaagcccctgggcaagatggccgactggttcagacagaccctgctgaagaagcccaagaagagacccaacagccccgagagcaccagcagcgacgccagccagcccaccagccaggacagccccctgccccccagcctgagcagcgtgaccagccccagcctgccccccacccacgccagcgacagcggcagcagcagatggagcaaggactacgacgtgtgcgtgtgccacagcgaggaggacctggtggccgcccaggacctggtgagctacctggagggcagcaccgccagcctgagatgcttcctgcagctgagagacgccacccccggcggcgccatcgtgagcgagctgtgccaggccctgagcagcagccactgcagagtgctgctgatcacccccggcttcctgcaggacccctggtgcaagtaccagatgctgcaggccctgaccgaggcccccggcgccgagggctgcaccatccccctgctgagcggcctgagcagagccgcctacccccccgagctgagattcatgtactacgtggacggcagaggccccgacggcggcttcagacaggtgaaggaggccgtgatgagatacctgcagaccctgagctag

SEQ ID NO: 339412 - DNA, 768 bp, Artificial Sequence
  derived and/or modified sequence
atggcctcatcaacatcattgcctgcaccaggctctaggcctaagaagcccctggggaagatggccgactggtttagacagaccttactgaaaaagccgaagaaacggcccaattcgcccgaaagtactagctctgatgcttcccagccaaccagccaggatagtcctctcccaccatcgctttcaagcgtgaccagtccctccctccccccaacccacgccagcgactccggctcatctaggtggtctaaagactacgacgtgtgcgtgtgccattcagaggaggatctggttgccgcccaagacctggtgagctatttggagggctccacagcatcactgcgatgcttcctgcaactgagagatgcaactcctggtggggccatcgtgtccgaactttgtcaagcattgagttcttcccattgcagagtactgctcatcactcctggctttcttcaggacccgtggtgtaaataccaaatgcttcaggctcttacagaggctcctggagccgagggatgtacaattcctctactgtccgggttatcgagagcagcatatccacccgaactgcggtttatgtactacgtcgacggacggggccctgacggtggctttcgtcaagtgaaagaggccgtgatgagatccaaccaagttctcaagcacctgctgtatcatggcacccccgagataggggtgaaactggaaactgaaaatccatgtcgggcgtctgatagccacaaatgtgacaagcgataccgagaatag

SEQ ID NO: 339413 - DNA, 666 bp, Artificial Sequence
  derived and/or modified sequence
atggcctcgagcaccagcctgcctgcaccagggtctaggccgaagaaaccccttggaaaaatggccgactggttccgacagacattgctgaagaagcctaaaaagcgtccgaattctcccgaaagcacctcaagcgatgcatcccagccaaccagccaggattctcctctgccacccagccttagtagtgtaacgagccctagtttgcctcccacacacgccagtgattcaggcagttcacggtggagcaaggattatgacgtgtgcgtgtgtcacagcgaagaagatctcgtggcagctcaggatctagtgtcataccttgagggaagcacagcttccctccgttgcttcttacagcttcgggatgccacccctgggggtgcgatcgtctccgagctttgtcaagcgctatctagctctcactgtcgcgtgctgctgattacccccgggtttctgcaggacccttggtgtaaataccaaatgctgcaggcattgacagaggcccctggcgccgaaggatgcaccatccctttgctgtcaggcctgtctcgcgcagcatatcctccggaactccgttttatgtactacgtagacggcagaggacccgatggaggctttcgacaagtcaaggaggccgtaatgagatatcttcagaccttgagctag

SEQ ID NO: 339414 - DNA, 666 bp, Artificial Sequence
  derived and/or modified sequence
atggccagctccacctcacttcccgctcccggtagtagacctaaaaagcctctgggtaaaatggcagattggttcagacagactttgctgaaaaaacctaagaagagacctaatagtcccgaatctacctcaagcgatgccagccagcctacgtctcaggattctcctctgcccccttccctgtcaagcgtgacatctcccagcttgcccccgactcacgcctccgactcaggcagctccaggtggagcaaggactatgatgtgtgtgtgtgccactctgaggaggatctggttgccgcccaagacttggtctcttacctcgaggggtctaccgcatcactccgctgctttctgcaactacgcgatgcaacgcctggcggggcaatcgtgtctgaactgtgccaggctctgtcgtcatctcattgccgcgtcctcttaatcacaccgggctttctccaggatccttggtgcaagtatcaaatgcttcaagcattaactgaggccccgggagcagaggggtgtaccattcccttactcagcgggctgtctagagccgcgtatccgccagagctaagatttatgtactacgttgatggtcggggccctgatggaggcttcaggcaggtcaaggaggccgtgatgagatatttgcagactctcagttag

SEQ ID NO: 339415 - DNA, 666 bp, Artificial Sequence
  derived and/or modified sequence
atggcttcttcgacctcgctccccgcacccggtagccgccccaaaaaaccccttggtaaaatggccgattggtttcggcaaacactgttgaagaaacccaagaagcgccctaactctcctgagtccacatctagtgacgcctcccagccaacatctcaggattcccccctgcctcccagtttgtcatctgtaaccagtccgtccctgccccccactcatgcctcagacagtggctccagccgctggtccaaggactatgacgtttgcgtgtgtcatagcgaggaggatttggtcgccgctcaggacctggtctcttacctggaggggtctacagcgagtctgcggtgtttcctgcagctaagagatgctacccctgggggggctatagtttctgagctgtgccaagccctgtctagttcgcactgtagggttttacttatcactccgggcttcctccaggatccctggtgcaaatatcagatgttgcaggccctcactgaagcacctggagccgaagggtgcaccatccctttgctgtccggactgtcaagagcggcctacccccccgaacttaggttcatgtactacgtggatggccgaggtccggacggcggcttccggcaggttaaagaagcagtcatgagatacctgcagacactctcctag

SEQ ID NO: 339416 - DNA, 768 bp, Artificial Sequence
  derived and/or modified sequence
atggccagcagcaccagcctgcctgcccctggcagccggcccaagaagcccctgggcaagatggctgactggttccggcagaccctgctgaagaagcccaagaagaggcccaacagccctgagagcaccagcagtgatgccagccagcccaccagccaggacagccccctgccccccagcctgagctctgtgaccagccccagcctgccccccacccacgccagtgacagcggcagcagccgctggagcaaggactatgatgtgtgtgtgtgccacagcgaggaggacctggtggccgcccaggacctggtgtcctacctggagggcagcacagccagcctgcgctgcttcctgcagctgagagatgccaccccaggaggagccatcgtgtctgagctgtgccaggccctgagcagcagccactgccgggtgctgctgatcaccccaggcttcctgcaggacccctggtgcaagtaccagatgctgcaggccctgacagaggcccctggagctgagggctgcaccatccccctgctgagcggcctgagcagagctgcctacccacctgagctgcgcttcatgtactacgtggatggccggggcccagatggcggcttccggcaggtgaaggaggccgtgatgaggagcaaccaggtgctgaagcacctgctgtaccacggcaccccagaaattggagtgaagctggagacagagaacccctgccgggccagtgacagccacaagtgtgacaagcgctaccgggagtag

SEQ ID NO: 339417 - DNA, 666 bp, Artificial Sequence
  derived and/or modified sequence
atggccagcagcaccagcctgcctgcccctggcagccggcccaagaagcccctgggcaagatggctgactggttccggcagaccctgctgaagaagcccaagaagaggcccaacagccctgagagcaccagcagtgatgccagccagcccaccagccaggacagccccctgccccccagcctgagctctgtgaccagccccagcctgccccccacccacgccagtgacagcggcagcagccgctggagcaaggactatgatgtgtgtgtgtgccacagcgaggaggacctggtggccgcccaggacctggtgtcctacctggagggcagcacagccagcctgcgctgcttcctgcagctgagagatgccaccccaggaggagccatcgtgtctgagctgtgccaggccctgagcagcagccactgccgggtgctgctgatcaccccaggcttcctgcaggacccctggtgcaagtaccagatgctgcaggccctgacagaggcccctggagctgagggctgcaccatccccctgctgagcggcctgagcagagctgcctacccacctgagctgcgcttcatgtactacgtggatggccggggcccagatggcggcttccggcaggtgaaggaggccgtgatgagatacctgcagaccctgtcctag

SEQ ID NO: 339418 - DNA, 768 bp, Artificial Sequence
  derived and/or modified sequence
atggccagcagcaccagcctgcccgcccccggcagccggcccaagaagcctcttggaaagatggccgactggtttcggcagaccctgctcaaaaaaccaaagaaacggccaaattcccctgaatccacctcatcagatgcttctcaaccaacatcgcaagactcaccgctgcccccttcgctgtctagcgtgacatctcccagtttaccgcccacgcatgccagtgactcgggctcttcacggtggagtaaagattatgacgtgtgtgtttgtcattctgaggaggatctcgttgcagctcaggatttagtctcatatctcgaggggtctactgcgtcactgagatgctttttgcaactgcgcgacgctacgcccggaggtgctatcgtgagtgaactttgccaagccttatcctcttcacattgcagagtcttacttataacccctggctttttacaggacccatggtgcaagtatcagatgctccaggctctaacggaggccccaggtgcagaggggtgtaccatccctcttctgagcggactgtcccgtgccgcctatcctcccgaattgaggttcatgtactacgtcgacggccgtggccctgatggtggctttagacaggtcaaagaagccgtaatgaggtccaaccaggtgctcaagcatctgctgtatcacggcacccccgaaattggagtcaagctggagaccgaaaatccctgtcgggcgagtgactcccataagtgtgacaaaaggtatcgagagtag

SEQ ID NO: 339419 - DNA, 666 bp, Artificial Sequence
  derived and/or modified sequence
atggccagcagcaccagcctgcccgcccccggcagccggcccaagaagcccttaggcaagatggcagactggttccgacaaacactcctgaagaagcccaaaaaaaggcctaattctcctgaaagcacgtccagcgacgcgtcacaaccaacctcacaagatagtcccctgcctccgtctttgagctcggtgactagtccttcgctgccacctacacatgctagtgacagcggcagctctagatggagtaaagattacgacgtgtgtgtctgccatagtgaggaggacctggtcgccgcccaggacctcgtctcctatctagagggatccaccgcttctcttaggtgcttcctgcaacttcgtgacgcaactccgggaggggcaatcgtgtccgaattgtgccaggcactttcctcatcacattgtcgagtgttgctgatcaccccaggcttcttgcaggatccatggtgcaaataccagatgctgcaggccctcacagaagctcccggagccgaggggtgcaccatcccccttctgagcggtctgtccagagccgcataccctcccgaactccgttttatgtattatgtcgacggtcgggggccagacggcggatttcgccaagttaaggaagcggtgatgcgatacttacagactctgtcctag

SEQ ID NO: 339420 - DNA, 666 bp, Artificial Sequence
  derived and/or modified sequence
atggccagcagcaccagcctgcccgcccccggcagccggcccaagaagccactcgggaagatggcagattggtttaggcagactctacttaagaagcccaagaaacggcctaattctcccgagtccacttcctccgacgcttctcaaccaacatcccaggatagccccctgcccccatccctgtcgtctgttacaagcccaagtctgcctccaacccatgcgtcggatagtggatcctcacgctggagcaaagattatgatgtgtgtgtttgtcactctgaggaagatctcgtggccgcccaggacctggtctcttatctggagggctccactgcttccctaagatgcttcctacagttgcgcgatgccaccccaggcggggcaatcgtgtccgagctgtgccaagcactgtcctcttcacactgcagagtcctcctgataactcccggattccttcaggacccttggtgcaagtatcaaatgctgcaggcattgactgaagcaccaggcgcggagggttgcactattccactcctttctgggctgagcagggcagcttatccaccagagctcaggttcatgtactacgtcgatgggcgcgggcccgacggtggttttcgtcaagtcaaagaggcagtgatgcggtatctccaaactctgagctag

SEQ ID NO: 339421 - DNA, 666 bp, Artificial Sequence
  derived and/or modified sequence
atggccagcagcaccagcctgcccgcccccggcagccggcccaagaagcccctggggaagatggccgattggtttcggcaaacactcctgaaaaaaccgaaaaagcggccgaactcccctgaaagcacttctagcgatgcaagtcaacctacatcacaagatagtcccctgccaccatccctgagctccgtgacaagtccatccctcccccccacccacgccagtgactccggctcctctaggtggtctaaagactacgacgtctgcgtctgtcattcagaggaggatctagtggccgctcaggatcttgtgagttacctagaggggtccacagctagcctgcgctgtttcttacagttaagggacgctacgcctgggggggcgattgtgtccgagctctgccaagctctcagtagctcccattgccgcgtgctattaataacgccagggtttctgcaggatccctggtgtaagtaccaaatgttacaagcattgactgaagcaccaggggcagagggctgcaccatcccgctgctatctggactgtccagagccgcctaccctccagagctgcgcttcatgtactacgttgacggtcgggggcctgacgggggttttcgacaagtcaaagaagcggtcatgagatacctgcagaccttaagctag

SEQ ID NO: 339422 - DNA, 768 bp, Artificial Sequence
  derived and/or modified sequence
atggctagctcaacctcacttccagcaccaggctcccgccctaagaagccactgggaaaaatggccgactggttcaggcagacactactgaagaaaccaaagaaacgccctaactcacccgagagtacatcttccgacgcctcccaacccacctcgcaggactccccactacctccaagtctctcaagcgtgacctctccatccctaccacctacgcacgcaagcgatagcggctcttcacgctggtccaaagattatgatgtctgtgtgtgccactctgaggaagaccttgttgccgcacaggatttagtgtcgtatttggagggctcgacggcatccctgcggtgcttcttgcaactgagggacgccaccccaggaggtgccatcgtatccgagttatgtcaggcgctaagttcctcccattgtcgtgtgctgctaattacacccggattcctgcaggacccctggtgtaagtatcaaatgttgcaagccttgaccgaggcccctggagccgaaggctgcaccatccccctcctttcgggcctgtcccgcgcagcctacccccctgagttgaggttcatgtactatgttgacggacgtggcccagacggagggtttcggcaggtcaaggaagcagtaatgcgatctaaccaggtgctgaagcacttgctctaccacggcacccctgaaatcggcgtcaaactggagacagaaaacccctgccgcgcatccgactctcacaaatgtgataagaggtatagggagtag

SEQ ID NO: 339423 - DNA, 666 bp, Artificial Sequence
  derived and/or modified sequence
atggccagtagtacgtcactgcctgcaccgggtagccgcccaaaaaagccactggggaaaatggccgactggttccgccagaccctacttaaaaaaccgaagaagcggccaaattctcctgaatcgaccagttcagacgcgagtcagccgacaagccaggatagcccgctgcctccttctctgagtagcgtgacaagtccgtccttgccaccgacccacgcttccgattcgggaagctcacgctggagtaaggattacgatgtttgcgtctgtcacagtgaggaagaccttgtggctgcccaggatctggttagctacctggagggctccactgcaagcctacggtgttttctgcagcttagggatgcaaccccaggtggggctatcgtcagcgagctgtgtcaagctctgagctcctcccactgccgggtcttgctcatcactcccggttttctgcaggacccatggtgtaaataccagatgctccaagctctaacagaagcaccaggtgcagaaggctgcaccatacctcttttatccggtctctccagagcagcttacccacccgaactgaggtttatgtactatgtggacggaagggggcctgacgggggtttccggcaggtgaaagaggcagtgatgcggtatctccagaccctatcatag

SEQ ID NO: 339424 - DNA, 666 bp, Artificial Sequence
  derived and/or modified sequence
atggcctcttctaccagccttccagctcctggatctcgtcctaagaagccactggggaaaatggctgactggtttaggcagacgttactcaaaaaacccaaaaaacgccctaatagccccgagagtacttcttccgatgcttcgcagcctaccagtcaggactccccgctgcccccatcgctaagctctgtgacatcccccagcctgcctcccacccacgcaagtgatagcgggtccagtcgttggagcaaggattatgacgtgtgtgtgtgccacagtgaagaggacctcgtggctgcccaggatctcgtgtcgtacttggagggcagtacagccagcctccgctgtttcctgcagctgcgcgatgctacccccggaggagcgattgtgtcagagctgtgccaggccctaagcagcagtcactgcagagtcttgctcatcacccccggatttctgcaggacccatggtgtaaatatcagatgctgcaggccctcaccgaggccccaggagcagaggggtgtaccatcccactactttctggtctgtccagagccgcttaccctcctgagctgagattcatgtattacgttgacggccgtgggccagatgggggatttcggcaagtgaaggaagcagttatgcggtatttgcagaccctgtcatag

SEQ ID NO: 339425 - DNA, 666 bp, Artificial Sequence
  derived and/or modified sequence
atggcgtcctctacatcattgcctgccccaggatcgcgacctaaaaaaccgctgggtaagatggctgactggtttcgccagacactactcaagaagcccaagaaacgacctaactcgcccgagagcacaagcagtgatgcaagccaaccaacatcccaggactcacctctgccgccatctctttcatccgtgacgtccccatcactacccccaacgcacgcatccgacagtggatcatctagatggtcgaaggactacgatgtttgcgtgtgccactctgaggaagaccttgtcgccgctcaggacctggtttcttacttggagggatctactgccagcctgagatgcttcctgcagctgcgggacgccaccccgggtggagcaattgtgtccgagctctgccaagcattgagttcaagccattgccgagtgctgctgattacccctggatttctgcaagacccttggtgtaagtaccaaatgctgcaagcattgaccgaagctccgggtgccgaagggtgtactataccacttctgtctgggctgtctagggcagcctacccaccagagctaagatttatgtactatgtcgacggcaggggacccgatggcggtttccggcaagtcaaagaggcagtgatgcgttaccttcaaacactcagttag

SEQ ID NO: 339426 - protein, 4589 aa, Artificial Sequence
  derived and/or modified sequence
MDIIMGHCVGTRPPACCLILLLFKLLATVSQGLPGTGPLGFHFTHSIYNATVYENSAARTYVNSQSRMGITLIDLSWDIKYRIVSGDEEGFFKAEEVIIADFCFLRIRTKGGNSAILNREIQDNYLLIVKGSVRGEDLEAWTKVNIQVLDMNDLRPLFSPTTYSVTIAESTPLRTSVAQVTATDADIGSNGEFYYYFKNKVDLFSVHPTSGVISLSGRLNYDEKNRYDLEILAVDRGMKLYGNNGVSSTAKLYVHIERINEHAPTIHVVTHVPFSLEKEPTYAVVTVDDLDDGANGEIESVSIVAGDPLDQFFLAKEGKWLNEYKIKERKQIDWESFPYGYNLTLQAKDKGSPQKCSALKAVYIGNPTRDTVPIRFEKEVYDVSISEFSPPGVVVAIVKLSPEPIDVEYKLSPGEDAVYFKINPRSGLIVTARPLNTVKKEVYKLEVTNKEGDLKAQVTISIEDANDHTPEFQQPLYDAYVNESVPVGTSVLTVSASDKDKGENGYITYSIASLNLLPFVINQFTGVISTTEELDFESSPEIYRFIVRASDWGSPYRHESEVNVTIRIGNVNDNSPLFEKVACQGVISYDFPVGGHITAVSAIDIDELELVKYKIISGNELGFFYLNPDSGVLQLKKSLTNSGIKNGNFALRITATDGENLADPMSINISVLHGKVSSKSFSCRETRVAQKLAEKLLIKAKANGKLNLEDGFLDFYSINRQGPYFDKSFPSDVAVKEDLPVGANILKIKAYDADSGFNGKVLFTISDGNTDSCFNIDMETGQLKVLMPMDREHTDLYLLNITIYDLGNPQKSSWRLLTINVEDANDNSPVFIQDSYSVNILESSGIGTEIIQVEARDKDLGSNGEVTYSVLTDTQQFAINSSTGIVYVADQLDRESKANYSLKIEARDKAESGQQLFSVVTLKVFLDDVNDCSPAFIPSSYSVKVLEDLPVGTVIAWLETHDPDLGLGGQVRYSLVNDYNGRFEIDKASGAIRLSKELDYEKQQFYNLTVRAKDKGRPVSLSSVSFVEVEVVDVNENLHTPYFPDFAVVGSVKENSRIGTSVLQVTARDEDSGRDGEIQYSIRDGSGLGRFSIDDESGVITAADILDRETMGSYWLTVYATDRGVVPLYSTIEVYIEVEDVNDNAPLTSEPIYYPVVMENSPKDVSVIQIQAEDPDSSSNEKLTYRITSGNPQNFFAINIKTGLITTTSRKLDREQQAEHFLEVTVTDGGPSPKQSTIWVVVQVLDENDNKPQFPEKVYQIKLPERDRKKRGEPIYRAFAFDRDEGPNAEISYSIVDGNDDGKFFIDPKTGMVSSRKQFTAGSYDILTIKAVDNGRPQKSSTARLHIEWIKKPPPSPIPLTFDEPFYNFTVMESDRVTEIVGVVSVQPANTPLWFDIVGGNFDSAFDAEKGVGTIVIAKPLDAEQRSIYNMSVEVTDGTNVAVTQVFIKVLDNNDNGPEFSQPNYDVTISEDVLPDTEILQIEATDRDEKHKLSYTVHSSIDSISMRKFRIDPSTGVLYTAERLDHEAQDKHILNIMVRDQEFPYRRNLARVIVNVEDANDHSPYFTNPLYEASVFESAALGSAVLQVTALDKDKGENAELIYTIEAGNTGNMFKIEPVLGIITICKEPDMTTMGQFVLSIKVTDQGSPPMSATAIVRISVTMSDNSHPKFIHKDYQAEVNENVDIGTSVILISAISQSTLIYEVKDGDINGIFTINPYSGVITTQKALDYERTSSYQLIIQATNMAGMASNATVNIQIVDENDNAPVFLFSQYSGSLSEAAPINSIVRSLDNSPLVIRATDADSNRNALLVYQIVESTAKKFFTVDSSTGAIRTIANLDHETIAHFHFHVHVRDSGSPQLTAESPVEVNIEVTDVNDNPPVFTQAVFETILLLPTYVGVEVLKVSATDPDSEVPPELTYSLMEGSLDHFLIDSNSGVLTIKNNNLSKDHYMLIVKVSDGKFYSTSMVTIMVKEAMDSGLHFTQSFYSTSISENNTNITKVAIVNAVGNRLNEPLKYSILNPGNKFKIKSTSGVIQTTGVPFDREEQELYELVVEASRELDHLRVARVVVRVNIEDINDNSPVFVGLPYYAAVQVDAEPGTLIYQVTAIDKDKGPNGEVTYVLQDDYGHFEINPNSGNVILKEAFNSDLSNIEYGVTILAKDGGKPSLSTSVELPITIVNKAMPVFDKPFYTASVNEDIRMNTPILSINATSPEGQGIIYIIIDGDPFKQFNIDFDTGVLKVVSPLDYEVTSAYKLTIRASDALTGARAEVTVDLLVNDVNDNPPIFDQPTYNTTLSEASLIGTPVLQVVSIDADSENNKMVHYQIVQDTYNSTDYFHIDSSSGLILTARMLDHELVQHCTLKVRSIDSGFPSLSSEVLVHIYISDVNDNPPVFNQLIYESYVSELAPRGHFVTCVQASDADSSDFDRLEYSILSGNDRTSFLMDSKSGVITLSNHRKQRMEPLYSLNVSVSDGLFTSTAQVHIRVLGANLYSPAFSQSTYVAEVRENVAAGTKVIHVRATDGDPGTYGQISYAIINDFAKDRFLIDSNGQVITTERLDRENPLEGDVSIFVRALDGGGRTTFCTVRVIVVDENDNAPQFMTVEYRASVRADVGRGHLVTQVQAIDPDDGANSRITYSLYSEASVSVADLLEIDPDNGWMVTKGNFNQLKNTVLSFFVKAVDGGIPVKHSLIPVYIHVLPPETFLPSFTQSQYSFTIAEDTAIGSTVDTLRILPSQNVWFSTVNGERPENNKGGIFVIEQETGTIKLDKRLDRETSPAFHFKVAATIPLDKVDIVFTVDVDIKVLDLNDNKPVFETSSYDTIIMEGMPVGTKLTQVRAIDMDWGANGQVTYSLHSDSQPEKVMEAFNIDSNTGWISTLKDLDHETDPTFTFSVVASDLGEAFSLSSTALVSVRVTDINDNAPVFAQEVYRGNVKESDPPGEVVAVLSTWDRDTSDVNRQVSYHITGGNPRGRFALGLVQSEWKVYVKRPLDREEQDIYFLNITATDGLFVTQAMVEVSVSDVNDNSPVCDQVAYTALLPEDIPSNKIILKVSAKDADIGSNGYIRYSLYGSGNSEFFLDPESGELKTLALLDRERIPVYSLMAKATDGGGRFCQSNIHLILEDVNDNPPVFSSDHYNTCVYENTATKALLTRVQAVDPDIGINRKVVYSLADSAGGVFSIDSSSGIIILEQPLDREQQSSYNISVRATDQSPGQSLSSLTTVTITVLDINDNPPVFERRDYLVTVPEDTSPGTQVLAVFATSKDIGTNAEITYLIRSGNEQGKFKINPKTGGISVSEVLDYELCKRFYLVVEAKDGGTPALSAVATVNINLTDVNDNPPKFSQDVYSAVISEDALVGDSVILLIAEDVDSQPNGQIHFSIVNGDRDNEFTVDPVLGLVKVKKKLDRERVSGYSLLVQAVDSGIPAMSSTATVNIDISDVNDNSPVFTPANYTAVIQENKPVGTSILQLVVTDRDSFHNGPPFSFSILSGNEEEEFVLDPHGILRSAVVFQHTESLEYVLCVQAKDSGKPQQVSHTYIRVRVIEESTHKPTAIPLEIFIVTMEDDFPGGVIGKIHATDQDMYDVLTFALKSEQKSLFKVNSHDGKIIALGGLDSGKYVLNVSVSDGRFQVPIDVVVHVEQLVHEMLQNTVTIRFENVSPEDFVGLHMHGFRRTLRNAVLTQKQDSLRIISIQPVAGTNQLDMLFAVEMHSSEFYKPAYLIQKLSNARRHLENIMRISAILEKNCSGLDCQEQHCEQGLSLDSHALMTYSTARISFVCPRFYRNVRCTCNGGLCPGSNDPCVEKPCPGDMQCVSYEASRRPFLCQCPPGKLGECSGHTSLSFAGNSYIKYRLSENSKEEDFKLALRLRTLQSNGIIMYTRANPCIILKIVDGKLWFQLDCGSGPGILGISGRAVNDGSWHSVFLELNRNFTSLSLDDSYVERRRAPLYFQTLSTESSIYFGALVQADNIRSLTDTRVTQVLSGFQGCLDSVILNNNELPLQNKRSSFAEVVGLTELKLGCVLYPDACKRSPCQHGGSCTGLPSGGYQCTCLSQFTGRNCESEITACFPNPCRNGGSCDPIGNTFICNCKAGLTGVTCEEDINECEREECENGGSCVNVFGSFLCNCTPGYVGQYCGLRPVVVPNIQAGHSYVGKEELIGIAVVLFVIFILVVLFIVFRKKVFRKNYSRNNITLVQDPATAALLNKSNGIPFRNLRGSGDGRNVYQEVGPPQVPVRPMAYTPCFQSDSRSNLDKIVDGLGGEHQEMTTFHPESPRILTARRGVVVCSVAPNLPAVSPCRSDCDSIRKNGWDAGTENKGVDDPGEVTCFAGSNKGSNSEVQSLSSFQSDSGDDNASIVTVIQLVNNVVDTIENEVSVMDQGQNYNRAYHWDTSDWMPGARLSDIEEVPNYENQDGGSAHQGSTRELESDYYLGGYDIDSEYPPPHEEEFLSQDQLPPPLPEDFPDQYEALPPSQPVSLASTLSPDCRRRPQFHPSQYLPPHPFPNETDLVGPPASCEFSTFAVSMNQGTEPTGPADSVSLSLHNSRGTSSSDVSANCGFDDSEVAMSDYESVGELSLASLHIPFVETQHQTQV

SEQ ID NO: 339427 - DNA, 19126 bp, Artificial Sequence
  derived and/or modified sequence
gatggaagtatgatgtgatggatataattatgggacactgtgtgggcacacggcctcctgcttgttgcctcatcctcctgcttttcaagcttttggccactgtctcccaggggctgccagggactggacccctgggcttccacttcacacattccatttataatgctaccgtgtatgagaactcagcagcaaggacctacgtcaacagccagagtagaatgggcatcaccttaatagatctatcctgggatatcaaatacagaatagtgtccggagacgaggaaggctttttcaaagcagaggaagtcatcattgcagatttctgttttctcagaataagaactaaaggtggcaattctgccatattaaatagggaaatccaggataattatttattgatagtaaaaggttctgtcagaggagaggatttggaagcatggaccaaagtgaatatacaggttttagatatgaatgatctgagacctttgttttcacccacaacatactctgttaccatagcagaaagcacacctctaaggactagtgttgcccaggtgactgcaacagacgcagatattggttccaatggagaattctactactactttaaaaataaagttgatctcttttcagttcaccccacgagtggtgtcatctccttaagtggtcgattaaattatgatgaaaagaataggtatgatctggaaattttggctgtggaccggggaatgaaactgtatgggaacaatggagtgagcagtactgcaaagctttatgttcacattgagcgcataaatgaacatgccccaacaatccatgtagtcactcatgttcctttctcgttggaaaaagagccaacatatgcagtggtgacagttgatgacttagatgatggagcgaatggagagatcgaatctgtttccattgtggctggggatcctttagatcagttcttcctggctaaggaaggaaagtggttgaatgagtacaagattaaggagaggaagcagattgactgggagagctttccctatggctacaatctcactcttcaagcaaaagacaagggatctcctcaaaaatgttcagcattaaaggcagtctacattggcaaccccacaagagacactgtccccattagatttgaaaaagaagtgtacgatgtgagcataagtgaattttcccctcctggtgtcgtggttgctatagtaaaattaagtcctgaaccgatagatgtggaatacaaattatctcctggtgaggatgcagtgtactttaaaattaatcctcggtcgggtctgattgttacagcacggccactgaatactgttaagaaggaggtttataaactggaggtgacaaacaaggaaggagatttaaaagcacaggtcaccatcagcatagaagatgcaaatgaccacaccccagaatttcagcaaccactgtatgatgcttatgtgaatgaaagtgtcccagtgggaaccagcgttctaacagtttcagcttctgataaggataaaggagaaaatgggtacatcacctatagtatcgctagcctgaatttgttaccatttgtcattaatcagtttacaggtgttattagcacaactgaagaactggattttgaatcctccccagaaatttacagattcattgttagagcctctgactggggttcaccataccgccatgaaagtgaggtcaatgtgactattcgaataggaaatgtcaacgacaacagccctctctttgaaaaagtggcttgccagggagttatttcatatgactttccagttggtggtcacatcacagcagtctcagcgatcgatatcgatgaacttgaacttgtaaagtacaaaatcatttctggaaatgaacttggcttcttttatttaaacccagattctggtgttttacagcttaaaaaatcactgacaaattctggcattaaaaatggcaattttgccctcagaattacagcaactgatggagagaatcttgcagaccccatgtctattaacatttcagtcctacatgggaaagtgtcttcaaagagcttcagttgcagagaaactcgtgtggctcaaaagctggcagagaaactactcattaaggcaaaagcaaatgggaaactgaatctggaagatggatttcttgacttttattcaattaatagacagggaccatattttgacaagtcttttccttctgatgtggctgtaaaggaggatctgccagttggtgctaacattctgaagattaaagcctatgatgccgactctggcttcaatggaaaagtgctatttacaatatcagatggaaatacggatagttgctttaatattgatatggagactgggcagcttaaagtccttatgcccatggatcgagaacacacagacctctatctccttaatatcaccatctatgacttaggtaatccacagaaatcgtcatggagactgctgaccatcaatgtggaggatgctaatgacaatagcccagtttttattcaagacagttactcagttaacattcttgaaagttcaggcattggtactgaaatcattcaagtggaagccagagacaaagacttaggttctaatggtgaagtgacttactcagtcttgacagatacacagcagtttgccatcaatagctcaactggaatcgtttatgtagccgaccagttggaccgggaatccaaagccaattattctttgaaaatagaagccagggacaaggcagagagtggtcagcagctgttttcagttgtcactcttaaagtttttttagatgatgtcaatgactgctccccagctttcattcccagtagctatagtgtgaaggttcttgaagatctccctgttggcactgtcattgcttggcttgagacccatgatccagatcttggactggggggtcaagtgcgctattctttggtcaatgactataatgggagatttgaaatagataaagcaagtggtgccatccgcttgagcaaagagcttgattatgagaaacagcagttctataaccttactgtgcgggccaaagacaaagggcggcctgtctctctgtcatctgtttcctttgttgaggtggaagtggtggatgtcaatgaaaacctccacactccctatttcccagactttgctgttgttggatctgtaaaggaaaactcacgcattggaacaagcgtgctgcaggtgactgctcgagatgaagactccggaagggatggagagatccagtactccatcagggatggcagtggtcttggaaggttcagtatagacgacgagagtggggtcatcactgccgcagacattcttgatcgggagacaatggggtcatactggctaacagtgtatgccacagacaggggcgttgttccactctactccaccattgaggtctacattgaagttgaagatgtgaatgacaatgccccgctgacctcagaacctatatattatcctgttgtcatggaaaactctccaaaggacgtatctgtcattcagatccaggctgaagatcctgactccagttccaatgaaaaactgacatacaggattacaagtggaaatcctcagaatttttttgccatcaatatcaaaacaggtctgattacaacaacttcaaggaaattggatcgagaacagcaggcagaacattttctggaggtgactgtgacagatggtggtccctctccaaaacagtcaaccatttgggtggtggttcaggttctagatgaaaatgacaacaagccccagttcccagagaaggtctaccagatcaagctgccagaacgtgaccgaaagaagagaggagaaccgatttacagggcttttgcatttgatagagatgagggccccaacgcagaaatctcctacagtattgtggatgggaatgatgacggaaagttctttattgaccctaaaactgggatggtttcttctagaaagcagtttacagcaggcagttatgacatcctaacgataaaggcagtggacaatgggcgcccacagaaatcctccacggcccgcctccacattgaatggattaagaaaccacccccttcacctataccattgaccttcgatgagccgttttataacttcacagtcatggaaagtgatagagtgactgaaattgtaggggtggtgtctgtgcagccagctaacacccctctgtggtttgacatagttggggggaattttgacagcgcttttgatgcagagaagggtgttgggacaattgtcatcgcaaaacctttggatgcagagcagaggtccatctataatatgagtgtggaagtcaccgatgggacaaatgttgctgttactcaggtatttatcaaagtgctggataataatgataatggcccagaattctctcagccgaattacgatgtgacaatttccgaggatgtgcttccagacacggagatcctgcagattgaagccacagatagagatgagaagcacaagctgagctacactgttcatagcagcatcgactccatcagcatgagaaaattccggattgaccctagcactggcgtgctctatactgccgagaggctggaccatgaggcccaggacaagcacattctcaacataatggtcagagatcaggagtttccttatcgaagaaacttggcccgagtcattgtgaatgtggaggatgctaatgatcacagtccttattttaccaacccactgtatgaagcgtctgtgtttgaatctgctgctctgggatcagctgttctgcaagtgacggctctggacaaagacaaaggagaaaatgcagaactcatatataccatagaagcagggaacactgggaacatgtttaagatcgaaccggtcctaggcatcatcaccatttgcaaagaaccagacatgacgacgatgggtcagtttgtcctatccatcaaagtcacagatcagggatccccgccaatgtctgctactgcaattgtgcgcatttccgtcaccatgtctgacaattctcaccccaagttcattcacaaagactaccaagcagaagtaaatgaaaatgttgacattggaacatcagtcattctaatctctgccatcagtcaatctaccctcatttatgaagtcaaagatggagacattaatgggatctttaccataaatccatattctggagtcatcaccactcagaaggccctggattatgagcgcacatcctcttatcaactcatcattcaggccaccaatatggcaggaatggcttccaatgctacagtcaatattcagattgttgatgaaaatgataatgccccagtttttctcttttctcaatactcaggcagcctaagtgaggctgccccaattaatagcattgtcaggagcttggataacagcccactggtgattcgagccacagatgctgacagcaaccggaatgctctgcttgtgtatcagattgtggagtcaacagcaaaaaagtttttcacggtggactccagtacaggtgcaatcagaacaattgccaacctggaccatgaaaccattgcccatttccattttcatgtgcatgtgagagacagtggtagcccccaactgactgcagagagtcccgttgaagtcaacattgaggtgacagatgtgaatgataacccacctgtttttactcaggctgtgtttgagactatcttacttctacctacctatgttggagtggaggttctgaaagttagtgccacagatcctgactctgaggtaccccctgaactgacatacagcctaatggaaggcagtttggatcattttttaattgactcaaacagtggagtacttaccataaaaaacaacaacctctccaaggatcactacatgctgatagttaaggtgtctgatggaaagttctacagtacctccatggtcaccatcatggttaaagaagccatggacagcggcctccactttacacaaagcttctattccacctcaatctcagagaacaacactaacataaccaaagttgctattgtcaatgcagttggaaatcgccttaatgagcccttaaaatacagcatcttaaacccaggaaataagttcaagataaaatctacctcaggggtcattcagacgactggagtcccctttgaccgtgaagaacaagagttatatgagctggtggtagaagccagccgtgagctggaccatctgcgtgtggccagagtggtggtcagggttaacattgaagacataaatgacaattctccagtctttgtgggcctcccatactatgctgctgttcaagtggatgcggaacccgggactctgatttatcaggtgacagccattgacaaagataaaggtccaaatggagaagtgacctatgtcctgcaggatgactatggccactttgaaattaaccctaattcagggaatgttattttaaaggaagcattcaactctgacttgtccaacattgagtatggagtcaccatcctagccaaggatggcggaaaaccttctttgtctacatctgtggagcttcccatcactattgtcaacaaagcaatgcctgtgtttgataagcccttttatacagcatctgtcaatgaagacatcagaatgaacacacccatcctaagcatcaatgccaccagtccagaaggccaaggcatcatatatatcattatcgatggggacccttttaaacagtttaacattgactttgacactggggtcctgaaagttgttagccctttggattatgaagttacatctgcttacaagctgacaataagagccagcgacgcccttactggtgctagggctgaagtcactgttgacttgctagttaatgatgtaaatgacaacccccctattttcgatcagcctacatacaatacaacactatcagaagcatctcttattgggacacctgttttacaagttgtctctattgatgcagactcagaaaacaataaaatggtacattatcagattgtccaggatacctacaatagcacagattattttcacatagatagctcaagtggcttaatcctgacagcacgaatgctggaccatgagttagtacaacactgcactttgaaagtcagatcaatagatagtggcttcccatcactgagcagtgaggttctcgttcatatctacatctctgatgtaaatgacaaccctccagtttttaatcagctcatttatgagtcatatgtgagtgaattagccccccggggccattttgtaacctgtgtacaagcctctgatgcagacagctctgattttgaccggttggaatatagcattttatctgggaatgaccggacgagctttctgatggacagcaagagtggagttatcacattgtccaaccatcggaagcagcggatggagcctctgtacagtctcaatgtgtctgtctctgatgggttgttcaccagcactgcacaggtgcatattagggtacttggggctaacttgtacagccctgccttttcacaaagcacatacgtagctgaggtgagagagaacgtggctgcaggaacaaaggtaattcatgttcgagccacagatggtgatccagggacttatgggcagatcagctatgccatcatcaatgactttgccaaggatcgattcctcatagacagcaatgggcaggtcatcaccacagaaaggctagaccgggaaaaccctctagaaggggatgttagtatttttgtgagggcccttgatggtggagggagaacaactttctgcactgtgagagtgattgttgtggatgaaaatgacaatgctccccagttcatgacagtggaatatagagccagtgtcagggcagatgttggaaggggccacttggtcactcaagttcaagccatagatcccgatgatggagcaaattcaaggattacttattccctctatagcgaggcctctgtttcagtggccgacctcctggaaatcgatcctgacaatggctggatggtcacaaagggtaattttaaccagctgaaaaatacagtgctttcgttctttgtcaaagcagtagatgggggcatcccagtaaagcactccctcattcctgtctatatccacgtcttgccccctgaaacgttcttgccatcattcacccagtctcagtattcctttaccattgcagaagatacagccattgggagtacagtggacaccctgaggattttgcccagtcagaatgtctggttcagcacagttaatggggaacggccagaaaataacaaagggggcatattcgtcatagaacaggaaacaggcactattaagcttgacaaacgccttgaccgtgaaaccagcccagctttccactttaaagtagcagccactatacccctggacaaagtagacattgtgtttactgtggatgtagatatcaaggtattggatttgaatgacaacaagccagtctttgaaacttcaagctatgacaccattataatggaagggatgcctgttggcaccaaactcacacaagtgagagctattgatatggactggggagccaatggacaagtcacttactccctccactcggattcccagcccgaaaaggtaatggaagcattcaatattgacagcaacacgggctggatcagtaccttgaaggacctagatcacgagacagaccccacattcaccttctctgtggtggcctctgaccttggagaggcattctctctttcctccacggccttggtctctgtcagagtgacagatataaatgacaatgcaccagtcttcgcgcaggaagtgtaccgagggaatgtgaaggagagcgacccaccgggcgaggtggtagccgtcctcagcacctgggacagagacacatccgacgttaatcgccaagtgagctaccatattacaggaggaaaccctcgaggaaggtttgctctgggcctggtgcaaagtgagtggaaggtctatgtgaagaggcctctagacagagaagaacaggacatttactttctcaatatcactgccactgatgggctttttgtcacacaggccatggtggaagtgagcgtcagtgatgtgaatgacaatagcccagtgtgtgatcaggttgcatatacagcattacttcctgaagacattccatcaaataaaatcatcctgaaagtcagtgcaaaggatgctgatattggatccaatggatatatacgatactcactctatggatctggaaacagtgaattttttctagatccagaaagtggcgagttaaaaaccttggctctgttggaccgggagaggatccccgtgtacagcctgatggccaaggccactgacgggggtggcaggttctgccagtccaacatccacctaatcctggaggatgtgaatgataacccccctgtgttttcttctgaccactacaacacctgtgtctatgagaacacagccaccaaggctctgttgaccagagttcaagccgtggaccccgacattggcatcaataggaaggtcgtgtactccctggcagactcagctggtggggtcttctccattgacagctcatctggcatcatcatcctggagcagccactggaccgtgagcagcagtcttcgtacaacatcagcgtgcgggccactgaccagagtcctggacagtccctgtcctctctcactactgtcaccatcaccgttctggacattaatgacaacccccctgtgtttgagaggagggactacctggtgacggtgcctgaggacacctcccctggcacccaagtccttgctgtttttgccaccagcaaagatattggcacaaatgctgagatcacttatctcatccggtctgggaacgaacaagggaaatttaagatcaaccccaagacagggggtatttctgtctctgaagtcctggactatgaattatgcaaaaggttttacctggtagtggaagccaaagatgggggcaccccagctctcagcgctgtggccactgtcaacatcaacctcacagatgttaatgacaaccctcccaagttcagccaagacgtctacagtgcggttatcagtgaagacgccttggtgggagactctgtcattttgctaatagcagaagatgtagacagccagcccaacggacagattcatttttccattgtgaatggagatcgggacaatgaatttactgtagatcctgtcttgggacttgtgaaagttaagaagaaattggaccgggaacgggtgtctggatactctctgcttgtccaggccgtagacagtggcattcctgcaatgtcatcaactgcaactgtcaacattgatatttctgatgtgaatgacaacagcccggtgtttacacctgccaactatactgctgtgattcaggaaaataagccagtgggcaccagcatcttgcagctggtggtgacagacagagactcctttcacaatgggcctcccttttcattctctattttgtcgggaaatgaagaggaggagtttgtgttggaccctcatgggatcttgcggtcggctgtggtcttccagcacacagagtctctggaatacgtgttgtgtgtccaggcaaaggattcaggcaaaccccagcaagtttctcacacttacatccgcgtgcgagtcattgaggaaagcacccacaagcccacagccattcccctggaaattttcattgtcaccatggaggatgactttcctggtggggtcattgggaagattcatgccacagatcaagacatgtatgatgtgctcacatttgccctgaaatcggagcagaaaagcttatttaaagtgaacagtcacgatgggaaaatcatcgccctgggaggcctggacagcggcaagtatgtcctgaatgtgtctgtgagtgatggtcgcttccaggtacccattgatgtggtcgtgcatgtggagcagttggtgcatgagatgctgcagaacactgtcaccatccgctttgaaaatgtgtcccctgaggacttcgtggggctgcacatgcatgggttccggcgcaccctgcggaatgcagtcctcacccagaagcaggacagcctgcgcatcatcagcatccagcccgtggcaggcaccaaccaactggacatgctgtttgcggtggagatgcacagcagcgagttctacaagccagcctacctgatccagaagctgtccaatgctagaagacacctggagaatatcatgcgcatctcagccatcttggagaagaactgctcagggctggactgtcaggaacagcattgtgagcaaggcttgtcactcgattcccacgcgctcatgacctacagcacggctcgcatcagctttgtgtgtccgcgtttctacaggaacgtgcgttgcacctgcaatggaggactgtgtccggggtccaacgatccttgtgtggagaagccgtgtccaggggacatgcagtgtgtcagttatgaagccagcaggagaccgttcctctgccagtgtccaccagggaagctcggagagtgctcagggcacacttctctcagctttgctggaaacagttacatcaaatatcggctttctgaaaatagcaaagaagaggatttcaaactagctctgcgtcttcgaacactgcaaagcaatgggattataatgtacaccagagcaaatccctgcataattctgaagattgtggatggcaagctgtggttccagctggactgcggcagcggccctggaatcttgggcatctcgggccgtgctgtcaacgacgggagctggcactcggtcttcctggagctcaaccgcaatttcacgagcctgtccctggatgacagctacgtggagcggcgccgggcgcccctctacttccagacgctgagcactgagagtagcatctacttcggcgccctggtgcaagcggataacatccgcagcctgactgacacgcgggtcacgcaggtgctcagcggcttccagggctgcctggactcggtgatactgaataacaatgagctgccgctgcagaacaagcgcagcagcttcgcggaggtggtgggcctgacggagctgaagctgggctgcgtgctctatcccgacgcctgcaagcgcagcccgtgccagcacgggggcagctgcactggcctgccatcggggggctatcagtgtacctgtctctcacagtttacggggagaaactgtgaatctgagattacagcctgcttcccaaacccctgccggaatggaggatcctgcgatccaataggaaacactttcatctgcaattgtaaagctgggctcactggagtcacgtgtgaggaggacatcaatgagtgcgaacgagaggagtgtgagaacggaggctcctgcgtgaacgtgttcggctccttcctctgcaactgcacgccgggctacgtgggccagtactgcgggctgcgccccgtggtggtacccaatatccaggctggccactcctacgtggggaaggaggagctcatcggcatcgccgtggtcctcttcgtcatcttcatcctggtggttctcttcatagtcttccgcaagaaggtcttccgcaagaactactcccgcaacaacatcacgctagtgcaggacccggccaccgccgccctgcttaacaagagcaatggcatcccgttccggaacctgcgcggcagtggggacggccgcaacgtctaccaggaggtggggcccccgcaggtccccgtgcgccccatggcctacacaccctgcttccagagtgactccaggagcaacctggataagatcgtggacgggctgggaggcgagcaccaggaaatgaccacgtttcaccctgagtcgccccgcatcctgacagcccggcggggcgtggtcgtgtgcagtgtggcccccaacctccccgccgtgtcaccctgccgctccgactgcgactccatccggaagaatggctgggacgcgggaactgagaacaaaggggttgatgacccgggagaagtgacctgctttgcaggtagtaataaaggcagcaactctgaagttcagtccctcagctccttccagtcagattctggtgacgacaatgcctccatagtgactgtcattcagcttgtcaacaatgtagttgacactatagagaatgaagtgtctgtcatggaccaaggacagaactacaaccgagcctatcactgggacacctctgattggatgccaggggcccgcctgtcggacatagaggaagtgcccaactatgagaaccaggatggagggtctgcacaccaggggagcacacgggagctggagagcgattactacctgggtggttatgacattgacagtgaatacccaccccctcatgaagaggagttcttgagtcaggaccagctgcctcctcctctcccggaggacttcccagaccaatatgaggccctgccaccctcccagcctgtctccctggccagcacactgagcccagactgcaggagaaggccccagtttcatcctagccagtatctccctcctcacccattccccaacgaaacggatttggtgggcccgcctgccagctgtgaatttagtacttttgctgtgagcatgaaccagggcacagagcccacaggcccagcagacagcgtgtctctgtccttgcacaattccagaggcacctcatcctcggatgtgtctgccaactgcggctttgacgattccgaagtagccatgagtgactacgagagcgtgggagagctcagcctcgccagccttcacattccctttgtggagactcagcatcagactcaagtgtagacatcacatcttgggtacttcaccctgtttgttacagaaaagtggaagcagattggctgggcttctgtcccagtggagcattgtctgtggaatgagaagggaatactgtatttttccactagaaacttcttcacaagtcatactgtcccaacaagcaagcttgattccagttgggtgaaaatgaaaggctcagaaattgtttttgagaggtgactggtaatccttgatgtaggtacctatgttcacagctaaaaatgcaaagagggaaaaattatttcacccactaagttatacagccagtcttgtatggctttgtgcagtattgtgccctggaaagtgttacagcatcagtccttgcagtattaaaaactggcaacaatcaaagaggcattgttgcatgtaattttgagccaatgaaatgaaaatagtagtaatgattgttggaaaagttagtctcttaggcgaaagagaagagaaacaaatattattaaacaaaccagaaaatgggctgaagccttttaaatcaactctatttttttgataagctgcccaattttcagctataaaattaggcttgaataacatgtttagtatgctcagttatttctgtttgtttgtgttaagcatccaatctaatatagttgggttttatgatcttcaagaaaggtatcaatgaagagcaacatgaggctttttgggttccatttggtgggtgggggaggaagttaaagttgtttgaacattagaaagaatgtgattatctggttggttttgtgttttctggtaaatattccagttggtaaatctaacattgctacagaagttggctttgttcatatagcttctctacaattagatatttttagaagtttaagcaaaactcacaaattcaggggggaaaaaagaaaaaacgataccttcaaagtttgcggcctagataatcacaattcttcataatgcagaggaaaggtgtctgttattctaaatcggtagcatcaccattataaatacaattatgttaagaaaagaggaaagtagactagttattgtgtataaattataatagtgtgtgtgtgtctgggcctatgtacaaatatgtgcttgcactcagtaaggctgctcttgaggaaagctaatgtgaaggttttgggaaatggaccatgttgaaaattctgccggcgagcatggcatacctttcaatttctctgatctctatggtgttagagaaacatcaaatgccatattttactctggttcagttaactttattttggtactgccaataaagcaaaattgtgcttttttttttttttctcaagacagagtcttgctctgtcacccaggctagagtgcaatggcatgatctcagctcactgcaatctccacctcctgggttcaagcgattctcctgcctcagcctcccaggttgctggggttacaggtgtgtgccaccacgcctggctaattttttgtatttttagtagagatggggtttcaccatgttggccaggctggtctcaaactcctgacctcgtaatccacctgccgtggcctcccaaagtgctgggattacaggcatgagccaccgtgcccagcccaaaactgtgctttttaaaaacagtattttgttataattttccagaacttacctctgttttaaaagtgtgtaatgtttgattacaccctgggattcccttctcatctgtgggctttggccatgatttccaaaattaacaggagaatcattccactggaaatataacaatccagtcctcaaaactgaaagttgacaggttgagggactttccttttttgcttcaatcagattacggccgcctgtgcagtggccatggtaaatatatgcatatttgcactatctgcttaatgagcaaatctgtgtccacagtttctgatgacatatggcattggtgtgtaaattgtactgtccctagtctgtgcattattcactcagacatatttttagttatttcaattgcgtttaatccacttcttttttatgagtcagtgtttctgaatgtttatgcaaaaaaaaaaatcctttttcattcccaaactttctaagtaagtggatacactacacttcacaagttttccagcctttctcttcctgtctcttggtcagacctactcatggaggtattatccacactgtgatcttgaaataaatgaatttcactaaggctgctttcgagaacaaagtctttggtatttttcttatgtaagaagcacatttgcaagaatcatggaaaaaaatgacaaactaatggcctagaatagagtgactgctacactttaagtaatgcaatgacataaaaaccatcaaagtaaaaccaacatgtcatttcctgcccccaggaaatattagaatgagattaatgctgatgagtccctactgcttacacagcatctctttgagggagaatgcctgactgacacagtaatgaaagaataaatagatcctaatgcagtcatgaagccactgaagaaaattgtgcccaccctttgctgtgacctatataaaatatctctttctttgggatatcatcccctgattttctgcagaatagctctgcagctaaatatataccaggcaagcatgtattgtgttttgatttattatctttaaacacatgatatctcttcactttttggaaagttagatttctctgtagattatgaaatgctttgcagtcaggccaagatgctactaggtggggatgatcactaattcaaaaaagctggaagaatcctatttgctagtccaaactccttattttatcaaagaggaaacatacccagagtgggaaagagacttgcccaagcccacagaggaagttaattcgcttaacaaggagtagaacccatccatctagccaatattctttttacatcatattgttcacccctacactgccttgagcatgggagtcacctggttctgatggaccctctgacttccaccattccttctttggaatatgctataaaagaaaattcatggagaatatttttctgaaagcctcatgatcttatgtttccttgcagtccccctagggagaggggttatagaattcatacatttctgtagacattcatcgaaatgctgcttttgccaaatgaatgtttgtataatagggatgaaatgataattacagagttcagctcagaccagtcatcagttgtagtgaaactttgattatactgttacctactggttgcatttttggttttggttttgcatttttttcttcccacaaacactggctactctttgtcctaccccctccaccatgatgaaccatgtggaaactatttaaatcaattaatgtctttctcatttttcgaacatgtatgtgccacctcctggaagccatttcccataatctgttgtaggcactttactagtattgcacacattctggttaggttgagaatagctagactcttggtgctcgtcatatagtaagcaagaacttgggagtaataaaaggtgaataaaatgcatgcttcatttattccctttcctctatgaatattttgctgctgcattctagtctatgccagctttccatgtacccttggcctgcctattcatgaaatgccatataaaagacttaggaacatgagtaggtggtccatgctttgaggttcatccaattagggaataaatgtgaaaggctggaaagggaactagtttctgggatttgcctggaacttcccttggacattactagcacattctggaaaaaaagcaagttgaacatatctaccatcagtcctctcctacttacttcccaccccaccctatccactacccccactgatgctatgtttgcatcatcaaagtcaggggaattgagaaaagagattatcaaaataaattattaaaatccagaaaacagttttatgtgaagtaattcaggaagatctagtgttcattttgcatggattgtccagataattggctcttcactccgctgccttcccagtgcacaggtattgctaaagtggttaggctttaatgttttatgtttttagtttcaaactatgggaaatggagatttgaagaggcatttattccttgtcatcattttgtgtgctctgtgagaaggtggttatatgtttttgctggtttgtgtcccacagtgttcaactgcacattattctgatgaaaatccacaatgtctttgagcttctggttgtgtaatgctggggtttaaagtcaccatttgtgggtttggcatcaattaatatttagccagctggctaagagataggaaaagaatatgatatttctttccttatgtaataatgaaaagcaataattacaagtaggtaataatacacaaaggccataattagtctcttctagtgtttagaatgcacttgagaatcgtagagtcatttggagcgtgtttggaccaattagtatgtactgtagtacccttctggcaaacaaataactgaattgctactatttaacaatcttatgagcccacactactgcattttgggagtggcaaatgtgtttggaaatggaagcagttctttttaagcactgtatcagagagattgtcttgtacgtttgcctgttgcaaacaggctggtttgtaaaagatgtatgttttggtgtttgaaatgtttataaaattgtatataaatggtttcaattttccaggcttttgtagatactatatttgatgcctatcaggatgctttaatttggggggtcgaatataattgtaagtcatccacgctgttggtctgcaaacttttgaggtaactacacacacacacacacacacaaggattttagatttgaaaatgatgttttttactcatttcaaaatgtactgtaacctttctttggttcttactgttttcatttaactttctctgttttcaagaaaaattgtctttattgacatttgtaaaaaagaatgtgttttgcccagttattaagtattttatttttatgcaatttcagaatcacaatgaggtatgccatttcttcatatacatgcacattcacctcaacttgcacacacatcacacaccaaaccttatgcaaaggggaaagctaacacttagagtggattttgtcccttaaggaaatggattgttcctgcatatattgctggtggcagtattcagtcttgtgttctttttctaaaaaaaaagaaaagaaaagaaaaaaaaaacaaaagcaaacaaaaaaaaagacagccaaaaaaaagaaacaacaacaacaaaaaaaaacacaacagtgtacaggtttgtaactgccaaaatttgatggttaaaacaagttttcaagt

SEQ ID NO: 339428 - DNA, 3782 bp, Artificial Sequence
  derived and/or modified sequence
gatggaagtatgatgtgatggatataattatgggacactgtgtgggcacacggcctcctgcttgttgcctcatcctcctgcttttcaagcttttggccactgtctcccaggggctgccagggactggacccctgggcttccacttcacacattccatttataatgctaccgtgtatgagaactcagcagcaaggacctacgtcaacagccagagtagaatgggcatcaccttaatagatctatcctgggatatcaaatacagaatagtgtccggagacgaggaaggctttttcaaagcagaggaagtcatcattgcagatttctgttttctcagaataagaactaaaggtggcaattctgccatattaaatagggaaatccaggataattatttattgatagtaaaaggttctgtcagaggagaggatttggaagcatggaccaaagtgaatatacaggttttagatatgaatgatctgagacctttgttttcacccacaacatactctgttaccatagcagaaagcacacctctaaggactagtgttgcccaggtgactgcaacagacgcagatattggttccaatggagaattctactactactttaaaaataaagttgatctcttttcagttcaccccacgagtggtgtcatctccttaagtggtcgattaaattatgatgaaaagaataggtatgatctggaaattttggctgtggaccggggaatgaaactgtatgggaacaatggagtgagcagtactgcaaagctttatgttcacattgagcgcataaatgaacatgccccaacaatccatgtagtcactcatgttcctttctcgttggaaaaagagccaacatatgcagtggtgacagttgatgacttagatgatggagcgaatggagagatcgaatctgtttccattgtggctggggatcctttagatcagttcttcctggctaaggaaggaaagtggttgaatgagtacaagattaaggagaggaagcagattgactgggagagctttccctatggctacaatctcactcttcaagcaaaagacaagggatctcctcaaaaatgttcagcattaaaggcagtctacattggcaaccccacaagagacactgtccccattagatttgaaaaagaagtgtacgatgtgagcataagtgaattttcccctcctggtgtcgtggttgctatagtaaaattaagtcctgaaccgatagatgtggaatacaaattatctcctggtgaggatgcagtgtactttaaaattaatcctcggtcgggtctgattgttacagcacggccactgaatactgttaagaaggaggtttataaactggaggtgacaaacaaggaaggagatttaaaagcacaggtcaccatcagcatagaagatgcaaatgaccacaccccagaatttcagcaaccactgtatgatgcttatgtgaatgaaagtgtcccagtgggaaccagcgttctaacagtttcagcttctgataaggataaaggagaaaatgggtacatcacctatagtatcgctagcctgaatttgttaccatttgtcattaatcagtttacaggtgttattagcacaactgaagaactggattttgaatcctccccagaaatttacagattcattgttagagcctctgactggggttcaccataccgccatgaaagtgaggtcaatgtgactattcgaataggaaatgtcaacgacaacagccctctctttgaaaaagtggcttgccagggagttatttcatatgactttccagttggtggtcacatcacagcagtctcagcgatcgatatcgatgaacttgaacttgtaaagtacaaaatcatttctggaaatgaacttggcttcttttatttaaacccagattctggtgttttacagcttaaaaaatcactgacaaattctggcattaaaaatggcaattttgccctcagaattacagcaactgatggagagaatcttgcagaccccatgtctattaacatttcagtcctacatgggaaagtgtcttcaaagagcttcagttgcagagaaactcgtgtggctcaaaagctggcagagaaactactcattaaggcaaaagcaaatgggaaactgaatctggaagatggatttcttgacttttattcaattaatagacagggaccatattttgacaagtcttttccttctgatgtggctgtaaaggaggatctgccagttggtgctaacattctgaagattaaagcctatgatgccgactctggcttcaatggaaaagtgctatttacaatatcagatggaaatacggatagttgctttaatattgatatggagactgggcagcttaaagtccttatgcccatggatcgagaacacacagacctctatctccttaatatcaccatctatgacttaggtaatccacagaaatcgtcatggagactgctgaccatcaatgtggaggatgctaatgacaatagcccagtttttattcaagacagttactcagttaacattcttgaaagttcaggcattggtactgaaatcattcaagtggaagccagagacaaagacttaggttctaatggtgaagtgacttactcagtcttgacagatacacagcagtttgccatcaatagctcaactggaatcgtttatgtagccgaccagttggaccgggaatccaaagccaattattctttgaaaatagaagccagggacaaggcagagagtggtcagcagctgttttcagttgtcactcttaaagtttttttagatgatgtcaatgactgctccccagctttcattcccagtagctatagtgtgaaggttcttgaagatctccctgttggcactgtcattgcttggcttgagacccatgatccagatcttggactggggggtcaagtgcgctattctttggtcaatgactataatgggagatttgaaatagataaagcaagtggtgccatccgcttgagcaaagagcttgattatgagaaacagcagttctataaccttactgtgcgggccaaagacaaagggcggcctgtctctctgtcatctgtttcctttgttgaggtggaagtggtggatgtcaatgaaaacctccacactccctatttcccagactttgctgttgttggatctgtaaaggaaaactcacgcattggaacaagcgtgctgcaggtgactgctcgagatgaagactccggaagggatggagagatccagtactccatcagggatggcagtggtcttggaaggttcagtatagacgacgagagtggggtcatcactgccgcagacattcttgatcgggagacaatggggtcatactggctaacagtgtatgccacagacaggggcgttgttccactctactccaccattgaggtctacattgaagttgaagatgtgaatgacaatgccccgctgacctcagaacctatatattatcctgttgtcatggaaaactctccaaaggacgtatctgtcattcagatccaggctgaagatcctgactccagttccaatgaaaaactgacatacaggattacaagtggaaatcctcagaatttttttgccatcaatatcaaaacagggtcttgctctgttgcccaggctggaatgcagtggcatgatcatagctcactgcaatctcgaactcctggattcaagggatacccctgcctcagcctcttgagtagctgggactataggcatgcaccgccatgcccagctacttttttaaatagttga

SEQ ID NO: 339429 - DNA, 13770 bp, Artificial Sequence
  derived and/or modified sequence
atggacattattatgggccactgcgtgggaaccagaccacccgcatgctgcctcatactactgttatttaagctgcttgcgactgtgagccagggtttacctggcacagggcctctgggctttcactttacacattcaatttacaatgcaaccgtttacgagaatagcgcggcccgcacttacgttaactctcaatcgcgaatgggcataactctgatagatcttagttgggacatcaagtacaggatcgttagtggcgatgaggaagggttcttcaaagcggaggaggtgatcatcgccgatttctgttttcttagaatccgaactaagggaggcaactcagcaattttgaatcgggaaattcaggacaattacctgcttattgttaagggttctgtgcgcggagaggatctggaagcctggacgaaagtcaatatacaggtgctcgacatgaatgatctgagacctctgttcagcccaacaacatattccgtcacaattgccgaaagcactccactgcgtacatcagtcgcacaggtgactgccacggacgctgatataggctcaaatggggaattctattattatttcaaaaataaggtggacctgttctctgtccatcctaccagcggcgttataagtctttcaggtaggctgaactacgacgagaagaatagatacgatttagagattcttgccgtcgaccgcggtatgaagctctatgggaataacggtgtctcctcaacggctaagctctatgtgcacattgaaaggataaacgaacacgctccgactattcacgtcgtcacccatgtgccattctctcttgagaaggaacctacatacgctgtagtcacggtcgacgacctcgacgacggcgccaacggggagatcgaaagtgtttctatcgtcgcaggtgaccccctggaccagttcttcctggccaaggaaggcaagtggctgaacgagtataaaattaaagaacgcaagcagatagattgggaaagtttcccttatggctacaacctcaccctgcaagcaaaagacaagggcagtccacagaagtgctccgcactgaaggctgtgtacatagggaacccgacccgggatacagtacccatccgctttgagaaagaggtatatgacgtttctatctccgagttttcacctccaggtgtggtggtagccattgtgaaactcagtcctgagcccatcgacgtcgaatataagctgtcacctggagaagatgctgtgtatttcaaaattaatcctcggtcaggtctgatcgtaacagcaaggcctctcaataccgtcaagaaggaagtttacaagctcgaggtaaccaataaagaaggggacctcaaggctcaggtgactattagtattgaggatgccaatgaccatacgccagagtttcagcagccactctacgatgcttacgtaaatgaatcagtgcccgtggggacatcagtattgacagttagtgcttccgacaaggataaaggggaaaatgggtacataacttatagtatcgccagcctcaacctgctcccttttgtaattaatcaattcactggggtgattagtacaaccgaggagcttgatttcgagtcctcccctgagatctaccggttcattgtgagagcttcagactggggttccccttaccgtcacgagagtgaggtcaatgtgacaatcagaattggtaacgtgaatgataattccccactattcgagaaggtggcctgccagggagtgatttcatacgactttccagtcggcggtcacatcaccgccgtgtctgccattgacatcgacgagctggagctggtgaaatacaagatcatcagtgggaacgagctcggatttttttatttgaacccagattctggcgtgttacagctgaagaagagcctgactaactcaggaattaagaatgggaatttcgctttgagaattacagctacagacggcgagaatttggctgaccctatgagcatcaatataagtgtactgcatgggaaggtgtccagtaagtccttctcttgccgggagacgagggtcgcccaaaaacttgcagagaaactgctgatcaaagccaaggctaatggtaaactgaacctggaagatggcttcctggacttttattccatcaacaggcaagggccgtactttgataaaagttttccctctgatgtcgctgtgaaggaagacctgcctgttggagctaacatcctgaagatcaaagcctacgacgcggacagcggctttaacgggaaagtgctcttcactataagcgacggaaatacggatagttgttttaatattgacatggagacaggtcagctgaaagtcttaatgccaatggaccgcgaacatactgatctataccttcttaacatcactatttatgatctcggaaacccccagaagagtagctggaggttgttgacaatcaatgtggaagacgccaatgacaacagcccggttttcattcaggattcttactctgtgaacattctagagagttccggtatcgggaccgagatcatacaagtggaagcgagggacaaggacttgggatctaatggggaggttacttattcagtgttgacagacactcagcagtttgcaatcaatagttccactggcattgtgtatgtagccgatcagctggacagggagagcaaggcaaattacagtcttaagatcgaagccagagataaggctgaaagcggacagcaactgttcagtgtcgtcacgttgaaggtcttcctggatgacgtaaacgattgttcgcctgcatttatcccatcgtcttactctgtgaaagtgttagaggatcttcctgtggggacagtaatagcctggttggagacccatgacccagatctcggcttgggcgggcaggtgaggtactccctggtgaacgattataacggcaggttcgagatagataaagcgtccggggctattaggctgtccaaagagttagactacgaaaagcagcagttctacaacttaaccgtgagagctaaagacaaagggcgcccagtttctttgtcaagcgtcagcttcgtcgaagtagaagtggtggatgttaacgagaatctccacacaccatactttcctgactttgctgttgttgggtctgtcaaggaaaacagccgcataggcacaagtgtgctgcaggtgactgcaagggacgaggattcgggtcgagacggtgaaatccagtacagcattagagacggctccgggctgggcagattctcaatcgatgacgagagtggggtcatcaccgccgcagatatattagatagggagaccatgggcagttattggctcactgtctatgccacggacagaggagtcgtccccctttatagtactatcgaggtgtacattgaagtggaagacgtaaacgacaatgcgccactgacctcagagccaatttattaccccgtggtcatggaaaactcaccgaaagatgtatccgttattcaaatacaggcagaagatcccgactcttcaagcaacgagaagcttacataccggataacttctggcaacccccagaatttcttcgcaatcaacatcaaaacaggccttataactactacaagtcgcaaactggatagggagcaacaagccgaacacttcctagaagtgactgtgaccgacggagggccatcacctaaacagtccacaatatgggttgtagtccaggtgctggacgagaatgataacaaaccacagtttccagagaaggtgtatcaaatcaaactccctgaaagggatcgaaaaaagcggggagagcctatctaccgggcgttcgcattcgacagagacgaaggaccaaatgcagaaatttcttacagcatcgtggacggaaatgatgacggaaagttctttatcgatccaaagaccggcatggtgtcaagcaggaaacagtttacagcggggtcctacgacatcctgactattaaagccgtggacaatggaaggccccagaagagttccacagccagactgcacatcgagtggatcaagaaaccaccccctagccccatccccttgactttcgacgagccattttacaacttcacagtgatggagtctgatagggttactgagatcgtgggagtggtctccgtgcagccagccaacactcctctgtggttcgatatagtgggaggtaacttcgactctgcttttgatgctgagaaaggagttggaaccattgtcatcgcaaaacctctcgatgcagagcagcgctctatctacaacatgagtgtcgaggtgaccgatggcacgaacgtggccgtcacccaggttttcatcaaggtgttggacaacaatgacaatgggccggagttctcacagccaaattatgacgtcacaatctccgaagatgtgctccccgataccgagatcctacagatcgaggcaactgaccgcgacgaaaaacataagctctcctataccgtccacagcagtatcgatagtatcagcatgaggaagttccggatcgacccctctacaggtgtcttgtacaccgctgagcgactagaccacgaggcacaagacaaacatattttgaacataatggtgagggatcaagagtttccttatagaaggaatcttgcacgggtcatcgtgaatgttgaagatgctaatgaccatagcccatactttaccaatcccctgtatgaggcatctgtttttgagtccgctgctctgggaagtgcggtgctgcaggtcactgccttggacaaggataagggggaaaatgccgaattaatttatacaatcgaggccggcaataccggaaatatgttcaagatcgaaccagtcttgggtattattaccatctgcaaggagccagacatgacaaccatgggccaattcgttctgtccattaaagttaccgaccaggggtccccccccatgtctgctaccgcaatcgtgcgcatttccgtcaccatgtccgataactcccatccaaaattcatccacaaagattaccaggcggaggtgaatgagaatgtcgacattggtacttctgtaattctgataagtgcaatatcacagtccacactcatatacgaagtgaaagatggagacatcaatggcatatttaccatcaacccttacagtggggtaatcactacacagaaagccctggattacgagagaacttcatcttaccagctgatcatacaggcgacaaacatggctggcatggcttccaatgccaccgttaatatccagatcgtcgatgagaatgataatgcacccgtcttcctatttagccagtacagtggttccctcagcgaagccgcaccaataaattcaatagtcaggtccttggataactcccccctggtgatcagagccactgatgctgattcaaacagaaacgcccttttggtatatcagatcgtagaaagtaccgctaaaaagtttttcactgtggacagctcaactggcgctatccggaccatcgcaaatctggatcacgaaaccatcgcgcatttccattttcacgtgcatgtccgggattccggttctccccagctcactgccgagagcccagttgaggtgaatattgaagttaccgacgtaaacgataaccctcctgtctttacccaggcagtttttgagaccatcctgctcttgcccacatacgtcggggttgaagtactgaaagtgtctgctactgatcccgattctgaagtgcctccggagcttacctattcactgatggaaggcagtctggatcacttcctcatcgactcaaactcaggggtgctcacaattaaaaacaataatctcagtaaggaccactacatgctaattgtaaaagtctctgacgggaagttctatagtacatcaatggtgacgatcatggttaaagaggcgatggattccggactgcattttactcaatcattctatagcacaagtatcagcgaaaataacaccaacatcacaaaagtggcaattgtgaatgcagtcgggaaccgcctcaacgagcctctcaagtacagcatcctcaatcctggaaataagtttaagatcaagagcactagtggcgttattcagacaaccggcgtgcctttcgacagagaggagcaggagctgtatgaactagttgttgaggcgagcagagaactggatcatttgagggtcgcaagggtggtggtcagagtgaatatagaggacatcaatgataatagccccgttttcgtcggactcccatactatgcagccgtgcaggtggacgccgaacccggcacgttaatttaccaagtcactgctatcgacaaagacaaaggccccaacggtgaggttacatacgtcctccaagatgactacggacattttgagatcaatccaaattctggcaatgtcatattgaaggaggcctttaactctgatttgagcaatatagaatacggcgtgaccattctggctaaagatggcggcaaaccttcgctatctacctctgttgaactgcccatcaccatcgtgaacaaagccatgccagttttcgacaagccattttacacggcctcggtgaacgaggatatacggatgaatacgcctatcctctctatcaatgcaacatccccggagggccagggcatcatctacatcataatcgacggcgaccccttcaaacagttcaatatcgactttgacacgggagtgcttaaggtggtctctcctctggattacgaggttacttccgcttataaacttacaatacgagcctccgacgccctgaccggagcacgggcagaagtgacggtggacctgctggttaacgacgtcaatgacaacccccctatttttgaccagcccacctataacaccacactgtccgaagctagcttgattgggacacctgtgcttcaggtggtgtctatcgacgctgacagcgagaataataagatggtgcactatcaaatcgtccaggatacttataactccaccgattacttccatattgatagctcctcaggactgatactgaccgcaaggatgctggatcacgagctggtgcagcactgcactctgaaagtgaggtctatcgactcgggttttccgtccctgtcctccgaagtgctggttcacatctatataagcgacgtcaatgataacccaccagtcttcaaccagcttatttacgaatcttacgtctccgaacttgcaccgcgcggacattttgtcacctgcgtgcaagcctctgatgctgattcttccgacttcgaccgactcgagtacagcatcctaagtgggaacgacaggacatccttcctgatggactcaaagtctggcgtcataacattaagcaatcacaggaagcagagaatggagcccctgtattccctcaacgtcagtgtctctgacggcctgttcacaagtactgcccaagttcacatccgcgtgttgggcgccaatctgtattcccccgctttttcccagagcacctatgtggccgaagtacgcgaaaatgtggctgccgggacaaaggtcattcacgtgcgagccactgatggcgaccccgggacctacggtcagatctcttatgcgattatcaacgactttgccaaagataggttcctgatcgatagcaatggacaagtgataactaccgagcgacttgaccgggaaaatcctctcgagggcgatgtgagcatatttgtgagagccctcgacggaggtggccgaacaacgttttgcactgtcagagtgatcgttgtggacgagaatgacaatgctccacagttcatgactgtggagtatagggcttcggtgcgcgcagatgtgggccggggacatctggtaacacaggtgcaggcaatagatcccgacgacggtgcaaacagccggatcacttacagcctctatagcgaggcctctgtaagcgtggccgatctcttggagattgatcccgacaacggctggatggtgaccaagggaaattttaatcagcttaaaaacacggtgctgtcttttttcgtcaaagcggtggacggggggatcccagtcaagcatagcctgattccagtctatatacacgtgttaccccccgaaacgttcctcccctccttcacacaatcccagtacagctttacaattgctgaggatacggctatcgggtcaactgttgacacattgcgaatcttgccatctcagaatgtgtggttttctaccgtgaacggcgagagaccagagaataacaaagggggcattttcgttatagagcaggagacaggcacgatcaaactggacaaaagacttgaccgggaaacctctcccgcatttcactttaaggtggcggccacaatccctctggataaagtggatatagtgtttacggtggatgtcgacattaaggtgttggatctgaatgacaacaagccggtgtttgagacatcaagttatgacacaatcatcatggaggggatgcccgtcggcaccaaactcacccaggtgcgggctatcgatatggattggggagctaacgggcaggtgacttattccctccactccgatagtcaaccggaaaaagtcatggaagcattcaatattgattctaacactggctggattagtacactcaaggatctggatcatgaaactgacccaacctttaccttctctgtggtggcgtcggacctgggggaagcatttagcctgagctctacagctttagtctccgtacgcgtgacagacattaacgacaatgcccctgttttcgcacaggaggtttaccgagggaatgtcaaagagtctgacccacccggggaggtcgtggccgtgctcagtacttgggaccgcgacacctcagacgtcaatcgccaggtcagttaccacataacagggggaaatccccgggggaggtttgccctgggcttagtccagtctgaatggaaagtgtacgttaagcggccactggatagggaggaacaggacatctacttcctgaacattacagctaccgatgggttgtttgttacacaagcaatggtggaggtttcagtgagtgacgtgaatgacaattcccccgtgtgcgaccaggtcgcatacactgccttgttgccggaggacataccctcaaataagatcatccttaaggtgtccgcaaaagacgccgatataggctccaatggctacattaggtacagtctgtacggtagcgggaacagcgaattctttcttgatcctgaatctggggagttgaaaaccttggccctactcgatagagagagaattcctgtgtatagtctgatggccaaggccacagatgggggtggccgtttttgccagagcaatattcatttgattctggaagacgtcaatgacaaccctcctgtctttagctcagatcattacaacacctgcgtttatgaaaatactgccactaaggcgctgctgacccgcgtccaagcggttgaccccgatatcggcattaacaggaaagtggtttactctctcgccgattccgccggtggagtttttagtatcgactcaagcagcggcatcattatcttggaacagcctctcgatcgggagcagcagtcgtcctataacatcagtgtgagggcaaccgatcagagtccaggccagagcctgtcctccctcaccactgtgaccatcacagtgctggacattaatgacaatccccccgttttcgaacggcgcgactatctggtgaccgtccccgaggacactagtcctgggactcaggtactggctgttttcgccacttccaaggatattggtaccaacgccgagatcacttatctgattcggagcggtaatgaacagggcaagtttaaaattaatcccaaaacaggcggcatctctgtgtcggaggttctggattatgaactgtgcaagagattctacctggtggtggaggcgaaagatggtggcacacccgccctgagtgccgtggccaccgtgaacatcaacctgaccgatgtgaacgacaacccacccaaatttagtcaagatgtctacagcgccgtaatatccgaagacgcccttgtgggcgactctgtcattctgctgatcgcagaagatgtggactcgcaacccaatggtcaaattcatttcagtattgtgaacggcgatagagacaatgaatttaccgtggatcccgtgttgggattggtgaaggttaaaaaaaaactagatagagagcgggtctctggttatagtctgctggtgcaagctgtcgattccggaatccccgccatgagctccacagcaactgtcaatattgatataagtgacgttaacgataactctcccgtgttcacacctgctaactatactgcggtgatccaggagaataagcccgttgggacaagcatcctgcaactcgtggtgacggacagagactctttccacaatgggcccccattttctttttccatcctgagcggtaacgaagaggaagagttcgtactggaccctcatggaattctccgtagtgctgtcgtgttccagcacacggaatccctggagtatgtgttgtgtgtgcaggccaaagactccgggaaaccccagcaggtttcgcatacatatatccgagtgagagtgatcgaggaaagcacccataagccgactgcaatacccctggaaatcttcatagtgacaatggaagatgactttcccggaggcgtgatagggaagatccacgcaaccgatcaagatatgtacgacgtgcttacgtttgccttaaagtccgagcagaagagtctgtttaaggtcaatagccacgatggcaagatcattgcactgggtggacttgattctggaaagtacgtgctaaacgtgagtgtgtccgacgggagatttcaggtgcccatcgacgtcgtggtccacgtggagcagctcgtccatgaaatgctgcagaataccgttactatccgcttcgaaaacgtctcccccgaagactttgtcgggctgcacatgcacggcttcaggcgcacactccggaacgcggtgttaacccagaaacaggactcgttgcgtattatctctatccagccggtcgccgggaccaaccagctggatatgttgtttgcagtcgaaatgcactcgtctgaattttacaaacccgcgtacctaatccagaagctgtcaaatgccaggaggcatcttgagaatataatgcggatatcagctatcttagaaaagaactgtagcggtctggactgtcaggaacagcactgcgagcagggcctgagtctggattcgcacgcacttatgacatattccacagctagaatcagctttgtctgtcctcggttttatagaaacgttcggtgtacctgcaacggcggcctgtgtccaggttccaacgatccctgtgtcgagaagccctgccctggggacatgcagtgtgtatcttatgaggcatcccgtagacctttcctctgccagtgccctcctgggaaattgggcgagtgttcgggtcatacttctctgtcctttgccggtaattcctatataaaatataggctctccgaaaacagtaaggaggaggattttaaactggcactcaggctgcgcaccctgcagtcaaacggcatcattatgtacacaagggctaacccctgcattatcctcaaaatagtggacggaaaactgtggtttcagctggactgcggctcgggccccgggattctgggtatttcaggccgcgctgtgaacgacggatcctggcattcagtctttttggagctaaaccggaactttacatccctcagcctagatgactcttatgtggagcgtcgtagagcccccctctattttcaaaccctgtcaactgagtcttctatttattttggcgccctggtgcaggctgacaatattcgctccctcacagacactagagtcacacaggtattgtcaggtttccagggctgtctggacagcgtaattttaaacaacaacgagctgccccttcagaacaagagatcttcattcgctgaggttgtgggtctcacggagctcaagttaggatgtgtgctgtacccagacgcttgtaagcggagcccgtgtcagcatggaggctcctgcaccggtctgccatccggcgggtaccagtgtacatgtctaagtcagttcactgggcggaattgcgagtccgaaatcaccgcatgcttccctaacccctgccggaatggcggctcatgcgacccgatcggaaacacgttcatatgtaattgcaaggccggtttgaccggcgtgacatgcgaagaagatattaatgagtgtgaacgggaggagtgtgaaaatggaggctcttgtgtgaacgtgttcggtagcttcttgtgcaactgcaccccggggtacgtgggccaatactgcggtctgcggcccgtggtggttcccaacatccaagccggacactcgtatgttgggaaggaggaattgatcggaatcgctgtggtcttattcgttatatttatcctggtagtgctgttcattgttttccgaaagaaggtgtttcggaagaactacagtcgaaataatatcacgctggtgcaggatccagccaccgcagcccttctgaacaagtccaacggaatcccctttaggaacttgcgcggttctggagatgggaggaacgtgtaccaggaagtggggccgccccaagtacctgtgcgacccatggcatacacgccgtgcttccagagtgattcaaggtccaatcttgataagattgtggacggcctcggaggggaacatcaggaaatgaccacttttcacccagaatccccacgtatactgacagcacgacggggagtggtggtctgttcagtggcacccaatctgccagccgtgtcgccttgtaggtctgactgcgactccatcagaaagaacggctgggatgccggaacagaaaacaaaggcgtggatgatccaggagaggttacgtgtttcgccggttctaataaaggcagcaattctgaggtccagtctctgtcttcctttcagagtgactcaggagatgataacgcatcaatcgtgacggtcattcaactggtgaataatgtcgtggacaccatcgagaatgaagtctcggtgatggaccagggacagaattataaccgtgcctaccactgggatacctccgattggatgcccggtgcacgcctttctgacattgaggaggttcccaactatgagaaccaggatggtgggtcggcacaccagggttctactagggaactggagtccgattactatcttggaggttacgacatagatagtgagtaccccccgcctcatgaagaggaattcctgagtcaggatcagctcccaccaccgctgcccgaagactttcccgaccaatacgaggcgctgccccccagccagcccgtgagcctcgcttccaccctgagccctgactgtcgaagaaggccccagtttcatccttcccagtatctaccaccacaccctttccctaacgaaacagatttagtcggccctccagcctcttgcgagttttcgacctttgccgtctcgatgaaccagggcaccgaacccacaggccctgccgactccgtgtcattatccctgcacaactcccgcggtaccagttcctctgacgtgtcagccaattgtgggtttgacgattctgaagttgctatgagtgactacgagtctgtcggtgaactatcacttgcctctctccatattccgtttgttgaaacccagcaccagacccaggtctag

SEQ ID NO: 339430 - DNA, 13770 bp, Artificial Sequence
  derived and/or modified sequence
atggacatcatcatgggccactgtgtgggcacccggcccccagcctgctgcctgatcctgctgctcttcaagctgctggccaccgtgtcccagggcctgcccggcaccggccccctgggcttccacttcacccacagcatctacaatgccaccgtgtatgagaacagcgctgcccggacctacgtgaacagccagagcaggatgggcatcaccctgattgacctgtcctgggacatcaagtacagaattgtgtctggagatgaggagggcttcttcaaggccgaggaggtgatcatcgctgacttctgcttcctgcgcatccgcaccaagggcggcaacagcgccatcctgaaccgggagatccaggacaactacctgctgattgtgaagggctctgtgcggggggaggacctggaggcctggaccaaggtgaacatccaggtgctggacatgaatgacctgcggcccctcttcagccccaccacctacagcgtgaccatcgccgagagcacccccctgcggacctctgtggcccaggtgacagccacagatgctgacatcggcagcaatggagagttctactactacttcaagaacaaggtggacctcttctctgtgcaccccaccagcggggtcatcagcctgagcggccgcctgaactatgatgagaagaacagatatgacctggagatcctggccgtggaccggggcatgaagctgtatggcaacaacggggtgagcagcacagccaagctgtatgtgcacatcgagcgcatcaatgagcacgcccccaccatccacgtggtgacccacgtgcccttcagcctggagaaggagcccacctatgctgtggtgacagtggatgacctggatgatggagccaatggagaaattgagagcgtgtccatcgtggccggggaccccctggaccagttcttcctggccaaggagggcaagtggctgaatgagtacaagatcaaggagaggaagcagattgactgggagagcttcccctacggctacaacctgaccctgcaggccaaggacaagggcagcccccagaagtgcagcgccctgaaggctgtgtacatcggcaaccccacccgggacacagtgcccatccgctttgagaaggaggtgtatgatgtgtccatcagcgagttcagccccccaggagtggtggtggccatcgtgaagctgagccctgagcccattgatgtggagtacaagctgagccctggagaagatgctgtgtacttcaagatcaaccccaggagcggcctgattgtgacagcccggcccctgaacacagtgaagaaggaggtgtacaagctggaggtgaccaacaaggagggggacctgaaggcccaggtgaccatcagcattgaagatgccaatgaccacaccccagagttccagcagcccctgtatgatgcctacgtgaatgaatctgtgcctgtgggcacctctgtgctgactgtgtctgccagtgacaaggacaagggagaaaatggctacatcacctacagcatcgccagcctgaacctgctgccctttgtgatcaaccagttcaccggggtcatcagcaccacagaggagctggactttgagagcagccctgagatctaccgcttcatcgtgcgggccagtgactggggcagcccctacagacatgagagcgaggtgaatgtgaccatcagaattggaaatgtgaatgacaacagccccctgtttgagaaggtggcctgccagggcgtcatctcctatgacttccctgtgggcggccacatcacagctgtgtctgccattgatattgatgagctggagctggtgaagtacaagatcatctctggaaatgagctgggcttcttctacctgaacccagacagcggcgtgctgcagctgaagaagagcctgaccaacagcggcatcaagaatggaaactttgccctgcgcatcacagccacagatggagagaacctggccgaccccatgagcatcaacatctctgtgctgcacggcaaggtgagcagcaagagcttcagctgccgggagaccagggtggcccagaagctggccgagaagctgctgatcaaggccaaggccaacgggaagctgaacctggaggatggcttcctggacttctacagcatcaaccggcagggcccctactttgacaagagcttccccagtgatgtggccgtgaaggaggacctgcctgtgggcgccaacatcctgaagatcaaggcctatgatgctgacagcggcttcaacgggaaggtgctcttcaccatcagtgatggcaacacagacagctgcttcaacatcgacatggagaccggccagctgaaggtgctgatgcccatggaccgggagcacacagacctgtacctgctgaacatcaccatctatgacctgggcaacccccagaagagctcctggaggctgctgaccatcaacgtggaggatgccaatgacaacagccctgtgttcatccaggacagctacagcgtgaacatcctggagagcagcggcatcggcacagagatcatccaggtggaggcccgggacaaggacctgggcagcaatggagaggtgacctacagcgtgctgacagacacccagcagtttgccatcaacagcagcactggaattgtgtatgtggccgaccagctggaccgggagagcaaggccaactacagcctgaagattgaggcccgggacaaggccgagagcggccagcagctgttctctgtggtgaccctgaaggtgttcctggatgatgtgaatgactgcagccctgccttcatccccagcagctacagcgtgaaggtgctggaggacctgcctgtgggcaccgtgattgcctggctggagacccatgaccctgacctgggcctgggcggccaggtgcgctacagcctggtgaatgactacaacggccgctttgaaattgacaaggccagcggggccatccggctgagcaaggagctggactatgagaagcagcagttctacaacctgactgtgcgggccaaggacaagggccggcctgtgtccctgagctctgtgtcctttgtggaggtggaggtggtggatgtgaatgaaaacctgcacaccccctacttcccagactttgctgtggtgggctctgtgaaggagaacagccgcatcggcacctctgtgctgcaggtgacagccagagatgaggacagcggcagagatggagagatccagtacagcatcagagatggcagcggcctgggccgcttcagcattgatgatgaaagtggagtcatcacagctgctgacatcctggaccgggagaccatgggcagctactggctgactgtgtatgccacagaccggggcgtggtgcccctgtacagcaccatcgaggtgtacatcgaggtggaggatgtgaatgacaatgcccccctgaccagcgagcccatctactaccctgtggtgatggagaacagccccaaggatgtgtctgtcatccagatccaggctgaagatcctgacagcagcagcaatgagaagctgacctaccgcatcaccagcggcaacccccagaacttctttgccatcaacatcaagacaggcctcatcaccaccaccagcaggaagctggaccgggagcagcaggccgagcacttcctggaggtgacagtgacagatggcggccccagccccaagcagagcaccatctgggtggtggtgcaggtgctggatgaaaatgacaacaagccccagtttcctgagaaggtgtaccagatcaagctgcctgagcgggacaggaagaagagaggagagcccatctaccgggcctttgcctttgacagagatgagggccccaatgctgagatctcctacagcatcgtggatggaaatgatgatggcaagttcttcatcgaccccaagacaggcatggtgagcagcaggaagcagttcaccgctggcagctatgacatcctgaccatcaaggctgtggacaatggccggccccagaagagcagcacagcccggctgcacatcgagtggatcaagaagcccccacccagccccatccccctgacctttgatgagcccttctacaacttcaccgtgatggagagtgacagagtgacagagatcgtgggcgtggtgtctgtgcagcctgccaacacccccctgtggtttgatattgtgggcggcaactttgacagcgcctttgatgctgagaagggcgtgggcaccatcgtgattgccaagcccctggatgctgagcagaggagcatctacaacatgtctgtggaggtgacagatggcaccaacgtggccgtgacccaggtgttcatcaaggtgctggacaacaatgacaatggacctgagttcagccagcccaactatgatgtgaccatcagtgaagatgtgctgcctgacacagagatcctgcagatcgaggccacagacagagatgagaagcacaagctgagctacacagtgcacagcagcattgacagcatctccatgaggaagttcagaattgaccccagcactggagtgctgtacacagctgagcggctggaccacgaggcccaggacaagcacatcctgaacatcatggtgcgggaccaggagttcccctacagaagaaacctggcccgggtgattgtgaatgtggaggatgccaatgaccacagcccctacttcaccaaccccctgtatgaggcctctgtgtttgagagcgctgccctgggcagcgctgtgctgcaggtgacagccctggacaaggacaagggagaaaatgctgagctgatctacaccattgaagctggcaacacaggcaacatgttcaagattgagcctgtgctgggcatcatcaccatctgcaaggagccagacatgaccaccatgggccagtttgtgctgagcatcaaggtgacagaccagggcagcccccccatgtctgccacagccatcgtgcgcatctctgtgaccatgtctgacaacagccaccccaagttcatccacaaggactaccaggccgaggtgaatgaaaatgtggacatcggcaccagcgtcatcctgatcagcgccatcagccagagcaccctcatctatgaggtgaaggatggagacatcaatggcatcttcaccatcaacccctacagcggggtcatcaccacccagaaggccctggactatgaaagaaccagcagctaccagctgatcatccaggccaccaacatggccggcatggccagcaatgccaccgtgaacatccagatcgtggatgaaaatgacaatgcccctgtgttcctgttcagccagtacagcggcagcctgtctgaggccgcccccatcaacagcatcgtgcgcagcctggacaacagccccctggtgatccgggccacagatgctgacagcaacagaaatgccctgctggtgtaccagatcgtggagagcacagccaagaagttcttcaccgtggacagcagcactggagccatccgcaccatcgccaacctggaccacgagaccatcgcccacttccacttccacgtgcacgtgcgggacagcggcagcccccagctgacagctgagagccctgtggaggtgaacatcgaggtgacagatgtgaatgacaacccccctgtgttcacccaggccgtgtttgagaccatcctgctgctgcccacctacgtgggcgtggaggtgctgaaggtgtctgccacagatcctgacagcgaggtgcccccagagctgacctacagcctgatggagggcagcctggaccacttcctgattgacagcaacagcggcgtgctgaccatcaagaacaacaacctgagcaaggaccactacatgctgattgtgaaggtgtctgatggcaagttctacagcacctccatggtgaccatcatggtgaaggaggccatggacagcggcctgcacttcacccagagcttctacagcaccagcatcagcgagaacaacaccaacatcaccaaggtggccatcgtgaatgctgtgggcaaccggctgaatgagcccctgaagtacagcatcctgaaccctggcaacaagttcaagatcaagagcaccagcggggtcatccagaccaccggggtgccctttgaccgggaggagcaggagctgtatgagctggtggtggaggccagccgggagctggaccacctgcgggtggcccgggtggtggtgcgggtgaacatcgaggacatcaatgacaacagccctgtgtttgtgggcctgccctactatgctgctgtgcaggtggatgctgagcccggcaccctcatctaccaggtgacagccatcgacaaggacaagggccccaacggggaggtgacctacgtgctgcaggatgattatggccactttgagatcaaccccaacagcggaaatgtcatcctgaaggaggccttcaacagcgacctgagcaacatcgagtatggagtgaccatcctggccaaggatggcggcaagcccagcctgagcacctctgtggagctgcccatcaccatcgtgaacaaggccatgcctgtgtttgacaagcccttctacacagcctctgtgaatgaagacatccgcatgaacacccccatcctgagcatcaatgccaccagccctgagggccagggcatcatctacatcatcattgatggagaccccttcaagcagttcaacatcgactttgacacaggagtgctgaaggtggtgagccccctggactatgaggtgaccagcgcctacaagctgaccatccgggccagtgatgccctgactggagcccgggcagaggtgacagtggacctgctggtgaatgatgtgaatgacaacccccccatctttgaccagcccacctacaacaccaccctgtctgaggccagcctcatcggcacccctgtgctgcaggtggtgtccattgatgctgacagcgagaacaacaagatggtgcactaccagatcgtgcaggacacctacaacagcacagactacttccacatcgacagcagcagcggcctcatcctgacagccaggatgctggaccacgagctggtgcagcactgcaccctgaaggtgcgcagcattgattctggcttccccagcctgagcagcgaggtgctggtgcacatctacatcagtgatgtgaatgacaacccccctgtgttcaaccagctgatctatgagagctatgtgtctgagctggccccccggggccactttgtgacctgtgtgcaggccagtgatgctgacagcagtgactttgaccggctggagtacagcatcctgtctggaaatgacaggaccagcttcctgatggacagcaagagcggggtcatcaccctgagcaaccacaggaagcagaggatggagcccctgtacagcctgaatgtgtctgtgtctgatggcctcttcaccagcacagcccaggtgcacatccgggtgctgggcgccaacctgtacagccctgccttcagccagagcacctacgtggccgaggtgagagaaaatgtggccgccggcaccaaggtgattcatgtgcgggccacagatggagaccccggcacctacggccagatctcctatgccatcatcaatgactttgccaaggaccgcttcctgattgacagcaatggccaggtgatcaccacagagcggctggaccgggagaaccccctggagggagatgtgtccatctttgtgcgggccctggatggcggcggccgcaccaccttctgcaccgtgcgggtgattgtggtggatgaaaatgacaatgccccccagttcatgacagtggagtaccgggcctctgtgcgggcagatgtgggccggggccacctggtgacccaggtgcaggccattgatcctgatgatggagccaacagccgcatcacctacagcctgtacagcgaggcctctgtgtctgtggccgacctgctggagattgatcctgacaatggctggatggtgaccaagggcaacttcaaccagctgaagaacacagtgctgtccttctttgtgaaggctgtggatggcggcatccctgtgaagcacagcctcatccctgtgtacatccacgtgctgcccccagagaccttcctgcccagcttcacccagagccagtacagcttcaccatcgccgaggacacagccatcggcagcacagtggacaccctgcgcatcctgcccagccagaatgtgtggttcagcacagtgaatggagagaggcctgagaacaacaagggcggcatcttcgtcatcgagcaggagaccggcaccatcaagctggacaagaggctggaccgggagaccagccctgccttccacttcaaggtggccgccaccatccccctggacaaggtggacatcgtgttcaccgtggatgtggacatcaaggtgctggacctgaatgacaacaagcctgtgtttgagaccagcagctatgacaccatcatcatggagggcatgcctgtgggcaccaagctgacccaggtgcgggccatcgacatggactggggcgccaacggccaggtgacctacagcctgcacagcgacagccagcctgagaaggtgatggaggccttcaacatcgacagcaacacaggctggatcagcaccctgaaggacctggaccatgaaacagaccccaccttcaccttctctgtggtggccagtgacctgggggaggccttcagcctgagcagcacagccctggtgtctgtgcgggtgacagacatcaatgacaatgcccctgtgtttgcccaggaggtgtacagaggaaatgtgaaggagagtgaccccccaggagaggtggtggccgtgctgagcacctgggaccgggacaccagtgatgtgaaccggcaggtgtcctaccacatcactggaggcaacccccggggccgctttgccctgggcctggtgcagagcgagtggaaggtgtatgtgaagaggcccctggaccgggaggagcaggacatctacttcctgaacatcacagccacagatggcctgtttgtgacccaggccatggtggaggtgtctgtgtctgatgtgaatgacaacagccctgtgtgtgaccaggtggcctacacagccctgctgcctgaggacatccccagcaacaagatcatcctgaaggtgtctgccaaggatgctgacatcggcagcaatggctacatccgctacagcctgtatggcagcggcaacagcgagttcttcctggaccctgagagcggggagctgaagaccctggccctgctggaccgggagcgcatccctgtgtacagcctgatggccaaggccacagatggcggcggccgcttctgccagagcaacatccacctgatcctggaggatgtgaatgacaacccccctgtgttcagcagtgaccactacaacacctgtgtgtatgagaacacagccaccaaggccctgctgaccagggtgcaggccgtggaccctgacatcggcatcaacaggaaggtggtgtacagcctggccgacagcgctgggggcgtcttcagcattgacagcagcagcggcatcatcatcctggagcagcccctggaccgggagcagcagagcagctacaacatctctgtgcgggccacagaccagagccctggccagagcctgagcagcctgaccaccgtgaccatcaccgtgctggacatcaatgacaacccccctgtgtttgagcggcgggactacctggtgacagtgcctgaggacaccagccctggcacccaggtgctggccgtgtttgccaccagcaaggacatcggcaccaatgctgagatcacctacctgatccgctctggaaatgagcagggcaagttcaagatcaaccccaagacaggaggcatctctgtgtctgaggtgctggactatgagctgtgcaagcgcttctacctggtggtggaggccaaggatggcggcaccccagccctgtctgctgtggccaccgtgaacatcaacctgacagatgtgaatgacaacccccccaagttcagccaggatgtgtacagcgctgtgatcagtgaagatgccctggtgggggacagcgtcatcctgctgattgctgaagatgtggacagccagcccaacggccagatccacttcagcatcgtgaatggagaccgggacaatgagttcaccgtggaccctgtgctgggcctggtgaaggtgaagaagaagctggaccgggagcgggtgtctggctacagcctgctggtgcaggccgtggacagcggcatcccagccatgagcagcacagccaccgtgaacatcgacatcagtgatgtgaatgacaacagccctgtgttcaccccagccaactacacagctgtgatccaggagaacaagcctgtgggcaccagcatcctgcagctggtggtgacagaccgggacagcttccacaacggcccccccttctccttcagcatcctgtctggaaatgaggaggaggagtttgtgctggacccccacggcatcctgcggtctgctgtggtgttccagcacacagagagcctggagtatgtgctgtgtgtgcaggccaaggacagcggcaagccccagcaggtgagccacacctacatccgggtgcgggtcatcgaggagagcacccacaagcccacagccatccccctggagatcttcatcgtgaccatggaggatgacttccctgggggcgtcatcggcaagatccacgccacagaccaggacatgtatgatgtgctgacctttgccctgaagtctgagcagaagagcctcttcaaggtgaacagccatgatggcaagatcatcgccctgggcggcctggacagcggcaagtatgtgctgaatgtgtctgtgtctgatggccgcttccaggtgcccattgatgtggtggtgcacgtggagcagctggtgcatgagatgctgcagaacacagtgaccatccgctttgaaaatgtgtccccagaagattttgtgggcctgcacatgcacggcttccggaggaccctgagaaatgctgtgctgacccagaagcaggacagcctgcgcatcatcagcatccagcctgtggccggcaccaaccagctggacatgctgtttgctgtggagatgcacagcagcgagttctacaagccagcctacctgatccagaagctgagcaatgcccggcggcacctggagaacatcatgaggatcagcgccatcctggagaagaactgcagcggcctggactgccaggagcagcactgtgagcagggcctgagcctggacagccacgccctgatgacctacagcacagcccgcatcagctttgtgtgcccccgcttctacagaaatgtgcgctgcacctgcaatggaggcctgtgccccggcagcaatgacccctgtgtggagaagccctgccctggggacatgcagtgtgtgtcctatgaggccagcagaagacccttcctgtgccagtgccccccaggcaagctgggagaatgttctggccacaccagcctgagctttgctggcaacagctacatcaagtaccgcctgtctgagaacagcaaggaggaggacttcaagctggccctgcggctgcggaccctgcagagcaatggcatcatcatgtacacccgggccaacccctgcatcatcctgaagatcgtggatggcaagctgtggttccagctggactgtggcagcggccctggcatcctgggcatcagcggccgggctgtgaatgatggctcctggcacagcgtcttcctggagctgaacagaaacttcaccagcctgagcctggatgacagctatgtggagaggagaagagcccccctgtacttccagaccctgagcacagagagcagcatctactttggagccctggtgcaggccgacaacatccgcagcctgacagacaccagggtgacccaggtgctgagcggcttccagggctgcctggacagcgtcatcctgaacaacaatgagctgcccctgcagaacaagaggagcagctttgctgaggtggtgggcctgacagagctgaagctgggctgtgtgctgtacccagatgcctgcaagaggagcccctgccagcacggcggcagctgcaccggcctgcccagcggcggctaccagtgcacctgcctgagccagttcaccggcaggaactgtgagagcgagatcacagcctgcttccccaacccctgcagaaatggaggcagctgtgaccccatcggcaacaccttcatctgcaactgcaaggccggcctgactggagtgacctgtgaggaggacatcaatgaatgtgagcgggaggagtgtgaaaatggaggcagctgtgtgaatgtgtttggcagcttcctgtgcaactgcaccccaggctacgtgggccagtactgcggcctgcggcctgtggtggtgcccaacatccaggccggccacagctatgtgggcaaggaggagctgattggaattgctgtggtgctgtttgtgatcttcatcctggtggtgctcttcatcgtgttcaggaagaaggtgttcaggaagaactacagcaggaacaacatcaccctggtgcaggaccctgccacagctgccctgctgaacaagagcaatggcatccccttcaggaacctgcggggcagcggagatggaagaaatgtgtaccaggaggtgggccccccccaggtgcctgtgcggcccatggcctacaccccctgcttccagagcgacagccgcagcaacctggacaagatcgtggatggcctgggcggggagcaccaggagatgaccaccttccaccctgagagcccccgcatcctgacagccaggagaggagtggtggtgtgcagcgtggcccccaacctgcctgctgtgagcccctgccgcagtgactgtgacagcatcaggaagaatggctgggatgctggaacagagaacaagggcgtggatgatcctggagaggtgacctgctttgctggcagcaacaagggcagcaacagcgaggtgcagagcctgagcagcttccagagcgacagcggagatgacaatgccagcatcgtgaccgtcatccagctggtgaacaacgtggtggacaccattgaaaatgaggtgtctgtgatggaccagggccagaactacaacagagcctaccactgggacaccagtgactggatgcctggggcccggctgagtgacatcgaggaggtgcccaactatgagaaccaggacggcggcagcgcccaccagggcagcacccgggagctggagagtgactactacctgggcggctatgacattgattctgagtacccacctcctcatgaggaggagttcctgagccaggaccagctgcccccacccctgcctgaggacttcccagaccagtatgaggccctgccccccagccagcctgtgtccctggccagcaccctgagcccagactgcagaagaagaccccagttccaccccagccagtacctgcccccccaccccttccccaatgaaacagacctggtgggccccccagccagctgtgagttcagcacctttgctgtgtccatgaaccagggcacagagcccaccggccctgctgacagcgtgtccctgagcctgcacaacagccggggcaccagcagcagtgatgtgtctgccaactgtggctttgatgacagcgaggtggccatgtctgactatgaatctgtgggggagctgagcctggccagcctgcacatcccctttgtggagacccagcaccagacccaggtgtag

SEQ ID NO: 339431 - DNA, 13770 bp, Artificial Sequence
  derived and/or modified sequence
atggacatcatcatgggccactgcgtgggcacccggccccccgcctgttgtcttatcctgctactgttcaagctgcttgccacagtaagtcagggactgcctggtacggggccactcggcttccacttcacacactcgatctataacgcgaccgtatacgagaattccgctgcgagaacatacgtgaatagccagtctagaatgggaatcaccctcatcgacctgtcttgggatatcaaataccgcatcgtctcaggcgacgaggaaggcttttttaaggctgaggaagtcatcattgctgatttttgcttcctccggattcggactaagggaggcaacagcgcaatactcaatagagagatccaggacaactatttacttatcgttaagggcagcgtgcgaggagaagacctcgaagcctggaccaaggtgaacatacaggttttggatatgaacgacctgcgtcccctgttttcacccaccacttattccgtaacgatcgccgagagcaccccgcttagaacttctgtggcccaagtgacagcaaccgatgctgacattggatctaatggggagttctattactattttaagaataaggtggacctgttctctgtgcacccgacatcaggcgttatttcgctgtcgggcagattgaactacgacgagaagaatcgctacgacctggagatcctggctgttgaccgggggatgaagctgtacggcaacaatggtgtctcttctaccgctaaactttacgtccatatcgagaggataaacgagcacgcccctactattcatgttgtgacccacgttccgttttccctggaaaaggaaccaacctacgccgtggtgacagtagatgatttagatgacggggccaacggtgagatcgaaagtgtgagtatcgtggccggcgaccccctagatcagttcttcctggcgaaggaaggcaaatggctaaacgagtacaagattaaggagaggaagcagatcgactgggagtcgtttccctacgggtataatttgactctgcaagcaaaggataaaggaagtcctcagaagtgcagtgccttgaaagctgtctacatcgggaaccctacacgggacaccgtcccaataaggtttgagaaagaggtgtatgatgtatctatctcagagttcagccctcctggcgtagtcgtggctatcgtcaagctctcccctgagccaatcgacgtggagtacaagttgtccccaggggaggacgctgtatattttaaaatcaatcctcggtccggccttatcgtaaccgcccgccccctgaatacagtgaaaaaggaagtatacaagctcgaggtcaccaacaaggaaggggacttaaaagcgcaggtgaccatctctatcgaagatgcaaatgatcacacacctgagttccaacagccgctttacgacgcatatgtaaacgagtccgtgcccgtaggcacctcagtgctaaccgtgtccgcctccgataaggacaagggagaaaacggttacattacatattccattgcctcactgaaccttctgccctttgtcattaaccagtttacgggcgtgatttctactaccgaggagctggacttcgagagctcacctgaaatctatcgctttatcgtccgtgcctcggattggggtagcccataccggcacgaaagcgaggtcaacgtcacaatccgcataggaaatgttaatgacaattccccattgtttgaaaaagttgcttgtcagggcgtcatttcctatgacttccccgtgggcggacatatcaccgccgtgagcgccattgatatagatgagcttgaactggttaagtacaagataattagtggcaatgaactgggttttttttacctgaatcccgactctggggtgttgcaactgaaaaagagcctgactaactctgggataaaaaatggtaactttgcactcaggattactgcaaccgacggtgagaatctggcggatcccatgtcgatcaacataagtgtgttgcatggtaaggtcagctccaagagtttttcctgtcgagaaacccgcgtggcacagaagttggccgagaagctgctgatcaaagccaaagcaaatggaaaactgaacctggaggatggcttcctggacttttacagcatcaacagacagggcccctactttgacaaatccttcccatccgatgtcgcagtgaaggaggacctgcccgtgggagccaacattctcaaaattaaggcttatgacgcggatagtggtttcaacggtaaagtgttgttcaccatcagcgacgggaataccgactcttgctttaacatagacatggagaccggacagctgaaagtgctgatgcctatggaccgggaacatacagatctctatctgttgaatatcaccatttacgatctcggaaacccccagaagagcagttggcgattattaacgatcaacgtggaagatgcgaatgataattcccccgtattcatacaggatagctattcagtcaatatcttggagagtagcggtattggaacagaaatcattcaggtcgaagcacgcgacaaggatcttggctcgaacggagaagtcacctacagcgttctgactgacactcaacagttcgctataaattcttccactggaattgtatacgtcgctgaccagctggacagagaaagtaaggcaaattactctctgaagattgaagcccgcgacaaggcagaatctggacagcaactgttttctgtggtgaccttgaaagtctttctagatgacgtgaacgactgttcccccgccttcatccctagttcctattccgtgaaagtccttgaagatctgcctgtggggactgtgatagcatggctggagacgcacgatccagatctcggtctgggaggacaggtcaggtactctctcgtgaacgactacaatggacggtttgaaatcgataaggcgagtggcgctatcaggctgtccaaagagttggattacgaaaagcaacagttctataatctcacggtgagggcgaaagataagggccgacctgtctcccttagcagcgtgagcttcgtcgaggtagaggttgtcgatgtgaatgagaacctgcataccccctatttccccgattttgcagttgttggttctgtgaaagaaaattcccggataggcactagcgtcttacaggtgacagcccgtgatgaagactcaggccgggacggtgaaattcagtactccatcagggacggatctgggctaggccgtttctcaattgacgacgaatccggagtgattacggctgcagacatactggatcgcgaaactatgggtagttattggctgacagtctacgctacggataggggtgtagtcccactgtactctaccatcgaggtgtatatagaagttgaggatgtgaatgacaacgcgccactgacttctgagcctatctactaccctgttgtgatggaaaacagccctaaggatgtctcggtcatccagatccaggctgaggatccagatagcagctcaaatgaaaagttgacctacaggatcacatcaggtaatcctcagaacttctttgcgattaatatcaagactggcctcattaccactacttcccgtaagctagacagagaacagcaagccgaacatttcctggaggtcaccgtgaccgatggggggccaagccctaagcagtccacaatttgggtcgtcgtgcaggttctcgacgagaacgataataagccacagttcccggaaaaggtgtaccagataaagctccccgaacgcgaccgaaaaaagcgaggtgagccaatctatagggcatttgcttttgatagagacgagggcccgaatgccgaaataagttattccatagtcgatggtaacgatgatggcaaattcttcattgatccaaagactgggatggtgagctctcgaaagcagttcactgcaggaagctacgatattcttaccattaaagctgtggacaacggcaggcctcagaaatcctcgactgctaggcttcacatcgagtggatcaagaagcctcccccttcccctatacctctgacgttcgatgaaccgttctacaacttcaccgttatggaatctgacagagtgacagaaattgtgggagtcgtctctgttcagccagctaatacccccctatggttcgacattgtcggtggcaattttgatagcgccttcgacgcagaaaaaggggtcggtacaatcgtgattgccaaacctctggatgctgaacagcggtctatttataacatgagcgtggaagtgactgatgggactaatgtcgccgtgacccaggtgttcatcaaagttctggataacaacgacaatggtcctgagttcagtcagccgaattatgatgtgactatctcagaggacgtgctgccagacactgagatcctgcaaatcgaagccactgatcgggacgagaaacataagttgagctacaccgttcattcctccatcgatagcatcagtatgcgcaaatttcgaattgatccatccacaggtgtgctgtataccgccgagaggctggatcacgaggcacaagacaaacacattctcaacattatggtgcgggatcaggaattcccttatagaaggaacctggcccgagttatagtcaacgtcgaggacgccaatgatcattccccatattttacaaaccccctctacgaagctagtgtatttgagtccgcagctctggggagcgccgtgctgcaggtgacagctttggataaggacaaaggcgagaacgcagaactaatctacacgatcgaagctggaaacacagggaacatgtttaaaattgagccggtgttaggtattatcaccatctgcaaagagcctgacatgacgactatgggccagtttgtgctgagtattaaagtcactgaccaaggttctcccccgatgagcgcaacagctatcgttcgaatctcagtgacaatgagtgataatagccacccaaaatttatccacaaggactaccaagccgaggttaacgaaaatgttgatattggcacgagcgttatactgatttccgcaatatctcaatcgacactgatctatgaagtgaaggacggcgacatcaatgggatcttcacaattaacccttacagtggggtcattaccactcagaaagccctggattatgaaaggacatcaagctatcaattgataatccaggcaaccaatatggcaggaatggcttcaaacgccacagtcaatattcaaatcgttgacgagaatgataatgcccctgtgtttctgttcagtcagtattcaggtagcctcagtgaggcagcaccaataaactccatcgtcaggtctttagacaacagtcctcttgtgatcagagcgacagacgcggattcaaaccgtaatgctctcttagtgtatcagatcgtagagagcacagccaaaaaattcttcaccgtggatagcagcacaggcgctattcgaactattgcgaatctcgaccatgagaccattgcgcacttccatttccatgttcacgtgagagacagcgggagcccgcagttgactgccgagtctcctgttgaggtgaacatcgaggtgacggacgttaatgacaaccctcctgtgtttacacaggccgtgttcgaaacaatcctgctgctgccaacctatgtcggtgtggaagttctgaaagtcagtgctactgaccccgattcggaggtgccacccgaactcacctactccctgatggaaggctcgctcgaccactttcttatcgattcaaatagcggagtcctcaccattaaaaataataatctttctaaggatcactatatgctcatcgttaaggtgtccgatgggaagttttactccacgtctatggttaccatcatggtgaaggaggccatggactcaggcctacacttcactcagagcttctactctacgtccatctctgagaataataccaatatcacaaaggttgcaatcgtgaacgccgtcgggaatcggctcaatgagcctctcaagtattcgattctcaaccccggtaataagttcaaaataaagagtacaagtggcgtcatccaaacaactggagttccctttgaccgggaggagcaagagctatacgagcttgtggtggaggcatcaagggagctggatcatctgagagtggcccgcgtcgtggttagagtcaatattgaggatattaatgataactcccctgttttcgtcggccttccctactatgcagctgtacaggtagatgcagaacccggaacacttatatatcaagtcactgctattgacaaggataaaggtcctaatggcgaagtgacatatgtgctgcaggacgattatgggcatttcgaaattaacccgaattccggtaatgtgattctgaaggaagcatttaactccgatctgtctaacatcgagtatggagtgacaatcctggcaaaagatggcggcaaaccttcactgtctactagtgtggaactgccgatcactatcgtcaataaagcaatgccagtatttgacaagcctttctacactgccagcgtaaacgaggacattcgcatgaacactccaatcctctccatcaatgccactagccccgaagggcaggggattatttatattatcatcgacggggacccctttaaacaattcaacatcgacttcgataccggggtccttaaagtggtgtccccactggactacgaagttactagcgcttataaactgactattcgcgcctcggacgccctgactggagcccgggcagaggtgaccgtggatttgcttgtgaatgatgtcaatgacaatccgcctatcttcgatcagcctacttacaatactacactgagtgaggctagtctcatcggaaccccagtgctgcaggtggtaagtattgacgctgactccgaaaacaataagatggtgcactatcaaatcgtacaggatacctacaactctaccgattattttcacattgacagttcctctggcttaatcttgaccgcaagaatgctggatcacgagctagttcaacattgcacactcaaagtgaggagcatcgattccggctttccctctttaagtagtgaagtcctggttcacatctatatttccgatgtgaacgataatccacctgtgttcaatcagctgatttatgagtcttatgtgagcgagcttgcgccgagagggcactttgttacatgcgtccaggcctctgatgctgactccagtgattttgaccgattagagtatagcatcctttctggaaacgacaggacctcatttctgatggatagcaagtctggggtaataacactgtcaaatcatcggaagcaaagaatggagccgctgtactctctgaatgtgagcgtgtctgacgggctgtttacatccacggctcaggttcatattagggtgctgggggcaaatctgtattcacctgccttcagccagagcacctacgtggccgaggtcagggaaaatgtggctgcaggaactaaggtcatacatgttagggccaccgatggtgatcccggtacatatggccagattagctatgccataattaatgatttcgccaaggatcgttttctaatagactcgaatggtcaagtaattactacagagaggcttgacagagaaaatcccttggagggagatgtgagcattttcgtaagagcactggatggcggcggacggaccacattctgcacagtgcgagtgattgttgtggatgagaatgacaacgcgccccagttcatgactgtcgagtaccgggcatcagtacgagccgacgtcggtagaggccatctggttacccaggtacaggctatagatccggatgacggggccaacagtagaatcacttattccctgtattcagaagccagcgtttctgtcgctgatctcctcgagatcgaccctgataatggttggatggtaaccaaggggaacttcaatcagctgaaaaacacagtgctgagtttctttgtgaaagccgtcgacggcggaattccggtgaaacatagcttaatcccagtgtacatacatgtccttccaccagaaactttcctgccttccttcactcagagtcagtactcctttaccattgcagaggatactgccattggatccacagtcgacacactgcgcatcctgccgagtcagaacgtatggttttcaacagttaacggggagcgcccagagaacaacaagggtgggattttcgtgattgagcaggagacaggcactataaaattagataagaggctggacagggaaaccagtcctgctttccatttcaaagtggccgctactatccctctcgacaaggtagatatcgtgtttacggtagacgtagatatcaaagtgctggatttgaacgataataagccagtctttgaaacctcctcttacgatacaatcattatggagggcatgcctgtgggaacaaagctgacgcaggttagggccatcgatatggattggggggccaacggccaggtcacttattctctccactccgactcacagcccgaaaaggttatggaggcattcaatattgatagcaatacgggctggatttcaaccttaaaggacttagatcacgagactgacccaaccttcacattcagcgtagtggccagcgatctgggtgaggcctttagcctctcatcaacagcactagttagcgtgagggttactgacattaacgacaatgctccggtgttcgcccaggaagtctatcgcggcaacgtgaaggaatcagacccacctggcgaggtagttgcagtactatctacatgggatagagatacctctgacgtgaaccgtcaggtaagctaccacataacaggcggtaatcctcgcggacgtttcgccttaggactcgtccagtctgagtggaaggtttatgtcaagaggcctctggatagagaggagcaggacatctactttctcaatatcacagcgactgacggcctgttcgtcacacaggcgatggtggaggtcagtgtgagcgacgttaatgataacagtcctgtgtgtgaccaggtcgcctacaccgccctcctcccggaggatattccatctaacaaaatcatcctgaaagtctctgctaaagacgctgacattggctccaacggatatatccgatactctttgtacggatcaggtaattcagagtttttcttagacccagagtcaggcgaactcaagactcttgcattgctggatcgggagcgcatcccagtgtactcactgatggcaaaggccacagacgggggaggtagattttgccagagcaacatacatttgattctggaagacgttaacgacaacccgccagtcttcagcagcgaccattataacacttgtgtgtacgagaatactgccacaaaggccctgctgactagggtgcaagccgttgatcctgacatcggcatcaataggaaggtggtctactctctggccgactctgctggcggcgtgttcagtatcgactccagcagcggcattatcatcctggaacagccactcgacagggagcaacagagcagttacaacattagcgtgcgggcaaccgatcagtcccccggccagtctctgtctagcctgacaaccgtgacaatcacggttctggacatcaatgataacccgcccgtctttgagagaagggactacctggttaccgttcctgaggacacaagcccagggactcaggtgctggcggtgtttgcaacctcaaaggatattgggacaaatgccgagattacctatcttattcgcagtggcaatgagcaaggcaaattcaaaatcaacccaaagacggggggcatcagcgttagtgaagttcttgactatgagctgtgcaagagattctatcttgtggtggaagccaaggacggcggtaccccagcactgtccgctgttgctaccgttaatatcaatctcaccgatgttaacgacaacccgcccaaatttagtcaggacgtgtactcagccgtaatctcggaagacgctctcgtgggagatagtgtgatactcttgattgccgaagatgttgattcacagcctaatgggcagatacacttcagcatcgtgaacggcgacagagataacgagttcactgttgaccccgtcctaggcctggtgaaagtgaagaaaaaattggatagagagcgcgttagcggctatagtctcctggtacaggcggttgattctgggatccccgcaatgtcttctaccgctacagtgaacattgatatctcggacgtgaatgacaacagtcccgtgttcacacctgctaattatacggcggtgatccaagaaaataaacccgttggaacatctattctgcagttggtcgtaaccgacagagactccttccacaatggacctccattttcttttagtatcctgtccggaaatgaggaggaagagtttgttctggatccccatggcattctgcggagcgcagttgtgtttcagcacacagagagcctcgaatacgtgttgtgcgtgcaggccaaggattctgggaagccacagcaagtttcccacacctatattagggtccgcgtgatcgaagaaagtacccacaaacccactgcaattcccctggaaattttcatcgtgacaatggaggacgactttcctggcggcgtaataggaaaaatccacgccacagatcaggatatgtacgacgtgctgaccttcgctctaaagtcggagcaaaaatccctttttaaagtcaattcccacgacggaaaaatcatcgcccttggcggcctggattccggaaagtatgtgctgaatgtgtccgtcagcgacgggcgcttccaggtacctattgacgtggttgttcacgtggagcagctggtgcatgagatgttgcaaaacactgtgacaattagatttgaaaatgttagccccgaggatttcgtcgggttgcatatgcacgggtttcgccggactctccgtaacgccgtgttgacgcagaagcaagatagcctccgcatcatttccatccagccagtcgctgggacgaatcagctcgacatgttgttcgcagtggagatgcattctagcgaattctacaaaccagcctacttaatccagaagctatccaatgctcggcgccacctggaaaacataatgaggatatcagccatcctggagaaaaactgctctggactggattgccaggaacaacattgtgagcagggactgagcctcgactcccacgccctgatgacctacagtactgcccgaatttctttcgtgtgccctagattttaccgtaatgtccggtgcacctgtaacggaggcttgtgcccggggagcaacgatccatgcgtggaaaaaccgtgtccaggcgatatgcagtgtgtctcttacgaagcatctcgacggccctttttgtgccaatgcccacccggcaagctgggtgaatgcagcggccatacttccttgtccttcgcaggcaattcctatatcaagtacagattgtccgagaactctaaagaggaggatttcaagttagcgctccggttgcgaaccctgcagtccaacgggattattatgtacacacgcgccaacccatgcattatacttaagattgtggatgggaagttgtggttccagttggattgcggttccgggccaggcatcttgggcataagcggacgggctgtgaatgacggttcctggcactcagtgtttctggaactaaataggaacttcaccagtctgagtttagatgactcttatgtcgagagaagacgggcccctctgtattttcaaacgcttagcaccgagagttctatctacttcggagcactcgtgcaggctgacaacattagatcgctgactgacactcgagtcactcaggtgctgagcggcttccaaggatgcttggactcagtaattctcaacaacaacgaactccctctacagaacaaacgttcatcttttgcggaggtggttggcctgactgagttgaagctaggctgtgtactttacccagacgcctgcaaacgatccccatgtcaacatggtggatcctgcactggtctgccttctgggggataccagtgcacctgtcttagtcagttcacgggcagaaactgcgagtccgagataacagcttgtttccccaacccttgcaggaacggcggaagctgcgacccgattggcaacacgttcatttgcaattgcaaggctggcctgactggggtcacttgtgaagaggacattaatgagtgcgagagagaggagtgcgagaacggtgggagctgtgtgaacgtattcggtagcttcctgtgcaactgtactccgggctacgtggggcagtattgcggactgaggcctgtggtggtgcccaatattcaggccgggcactcgtacgtaggaaaggaagagcttattgggatcgcagtggtactgtttgtgattttcatcctcgtcgtgttatttatcgtcttcaggaagaaagtattccgcaaaaattattctagaaataatattactctggtgcaagacccggccaccgcggcgctgctcaacaagagcaatggcattcccttccgaaacctgagaggcagcggcgacggacggaacgtctaccaggaagtcggacccccacaggttccggtgaggcctatggcctatactccttgtttccaatctgatagcaggtccaacctggacaaaatcgtagacggattgggcggagaacatcaagagatgaccacctttcatcccgaaagtccccggattctcactgcaaggcggggcgtcgttgtttgttcggtggccccaaacctacccgccgtctctccttgtcgttcggactgcgattctattcggaagaacggttgggacgcgggaaccgagaacaaaggtgtcgatgatccgggcgaagttacatgtttcgcaggaagcaataagggatctaacagtgaggtgcagagcctgtccagctttcaaagcgattccggggatgacaacgcttctatcgtgacggtcatccagcttgtcaacaacgtggtcgacacaatcgaaaacgaagtcagtgtaatggaccaaggacagaactataacagggcttaccactgggatacaagcgattggatgcctggtgcaagactgagcgatattgaagaggtgccaaactatgagaatcaggacggcggctctgcacatcaaggatccacccgggagttagaatctgattattacttagggggttacgacatcgattccgagtatccccctccccatgaggaggaatttctcagccaagatcagctcccaccccctcttccagaagatttcccagaccagtatgaggcgctgccaccttcccagccggtttccctggcaagtaccctgtctccagactgtcgtagacggccccagttccatcctagccagtatctgcctccccacccatttccaaacgaaactgacctcgttggaccaccggcaagctgtgagttttcaactttcgccgtttccatgaaccagggcaccgaacccactggacctgccgattcggtgtcactgtccttgcacaattcccgcggcacttcctcttctgacgtgagcgcgaattgcggctttgacgacagcgaggtagcgatgtctgactacgagtcagtcggcgagctgtctctggcatcactgcacatcccatttgttgagacccaacatcagacacaagtgtag

SEQ ID NO: 339432 - DNA, 13770 bp, Artificial Sequence
  derived and/or modified sequence
atggatatcatcatgggccactgtgtgggcactcgacccccagcctgttgtttaatccttctgctatttaagctgctggctaccgttagccagggcctcccaggcactgggcctctggggttccactttactcactccatttacaacgcaacagtgtacgaaaattcagctgcacgcacttatgtcaactctcagagtcgcatgggcatcaccttaattgatctatcctgggacattaaatacagaattgtttcaggagatgaagaggggttcttcaaagccgaggaagtgattatagccgacttttgtttcctgcgcatccgaacaaaggggggaaattcagccatcttgaacagagaaatccaggataactacctgctgatcgttaaggggtctgtaagaggcgaggacctcgaggcatggaccaaggttaacatccaggtgcttgacatgaatgaccttcgccctctgttctcaccaacaacctacagcgtgaccatcgccgagtctaccccactgagaacctccgtcgctcaagtgacagccactgacgcggatattggatccaacggagagttctattactatttcaaaaacaaggtggacctcttctccgtacatccgaccagcggtgtgatctctctgtctggtaggctgaactatgacgagaagaacaggtacgacctggaaatactggccgtcgatagggggatgaaactgtatgggaacaacggagtctcctcaacagcaaagctgtatgtgcacattgagcggattaacgagcacgctcctacaatacatgtggttacacatgttccttttagcctcgagaaggagcccacctacgcagtagtcactgtggatgacctcgacgacggagctaacggcgagattgaatcggtgtcaattgtggcaggagaccccctggaccagttctttctggctaaagaaggaaagtggctcaacgagtataagattaaggagagaaagcagatcgattgggaatcgtttccctatggttacaatctaacactacaagcgaaggacaagggctcacctcaaaaatgttctgccctgaaagcagtgtacattggcaatccgaccagagacaccgtgcctatccggtttgagaaggaggtctacgacgtgagcattagtgaattttcgcccccaggtgtagtcgtagctatcgtcaaactaagtccagaaccaatcgacgtagagtacaagctaagtcccggagaggacgcagtatatttcaagattaacccaagaagtggactcatcgtcacggcacggccactgaataccgtcaagaaagaagtgtacaaactagaggttaccaataaggaaggcgatctcaaggcgcaagttaccatctcaatcgaggatgccaacgaccacacacctgaattccagcagccattatatgacgcctatgtcaatgaatcagtacctgttggcacaagtgtgttgacggtaagtgcttcggacaaagacaagggtgaaaacggctatatcacttacagtattgcaagtcttaacttacttccattcgtaattaaccagtttaccggtgttatctcaactaccgaagaattggacttcgaatcctcacccgagatttaccgctttattgtgagggcctccgactggggaagcccataccgacatgagtctgaggtgaacgtcaccatccgaattggaaacgtgaacgataactcacctttgttcgagaaagttgcttgccaaggtgtgatctcatacgatttccccgtgggaggccacatcacggccgtctccgccatcgacatcgacgaactggagctggtgaagtacaagattatttccggcaacgaattagggttcttttacttaaatccggacagtggcgttctgcagctaaagaagtcgctaacgaatagcggcatcaagaacggaaactttgcgctgaggatcactgcaactgatggtgaaaacctggccgacccaatgagtattaacatcagtgtgcttcacggcaaagtgagcagcaagtccttttcctgcagggaaacccgggtggcacagaagctggctgaaaaacttctgatcaaggccaaagctaatggcaaactgaacctggaggacggcttcctggatttctattctatcaataggcaaggcccatactttgataaaagtttcccgtcagacgtggccgtgaaggaggacctcccagttggggcaaacattctgaaaataaaagcctacgacgcagacagcggctttaatggcaaagtgcttttcaccatttccgatgggaacacagatagctgctttaatatagacatggaaacagggcaactgaaggtcctcatgcccatggaccgagagcacacagacctatatctcctcaatattaccatctacgatctggggaacccacagaagagtagctggagactgctcaccatcaatgtggaagatgccaatgacaactcaccggtgttcatccaagattcctactcagtcaatatactggaaagtagcgggatcggcaccgagattattcaggttgaggccagagataaagacctaggctccaacggtgaggtcacatactcagttctaaccgatacccagcaatttgccattaatagtagcactggaatcgtctatgtggccgatcagctggaccgtgaatcaaaggctaattatagtctgaagatcgaagccagagataaagccgagtccggccagcagctgtttagtgttgtcacgctgaaggtgtttctcgacgacgtgaatgattgtagcccagccttcattccttctagctacagcgtgaaagtcctggaggacttacccgtcggcactgtgattgcatggctcgaaacacacgaccccgacctgggattaggcggacaggtgagatactccctcgttaatgattacaatgggcgattcgaaatcgacaaagcttctggagcaattcggctctcaaaggagctggactacgaaaagcagcagttttataacttgaccgtacgtgccaaagacaaggggcgtccagtgtccttgtctagcgtctccttcgtggaggtcgaggtggtcgacgtcaacgagaacctgcacaccccttactttccggattttgccgttgtgggcagtgtgaaagagaactctcgtatagggacctcagtccttcaagtgacagctagggatgaggactccggcagggatggtgagatccagtatagtattcgcgatgggagtggtctgggtcgtttttccatcgacgatgagagtggggtcatcacggccgcagacattcttgatcgggagacaatggggtcctattggctgaccgtttatgcgaccgatagaggagtagtgccgctttacagcaccatagaagtgtacatcgaggtcgaggatgtcaacgataacgcccctttgactagcgagcccatctactatccagtagtcatggagaactcccccaaggatgttagtgtgatccagatccaagctgaggatcccgattcctctagcaacgagaagctgacataccgaatcacatcaggcaatccgcagaatttcttcgcgatcaacatcaagaccggtctgatcaccacaacctcaaggaaacttgatcgggagcagcaggccgagcatttcttagaggtaactgtgacagatggagggccatcccccaagcagtcgacaatatgggtggtcgtccaggtactggacgagaatgacaataagccccaatttccggaaaaagtatatcaaataaagcttcctgagagagaccggaaaaagcgaggagaacccatctacagagcttttgctttcgaccgcgatgaaggcccaaacgccgagatctcctacagcattgtggacggcaatgacgatggtaagttcttcatcgaccccaaaacgggtatggtctcatcaaggaagcagtttactgctggctcttacgatatcctgaccatcaaggccgtggacaacggcaggccacagaagtcatctacggcccgattgcacatcgaatggatcaaaaagcctcctcctagccctataccgcttaccttcgatgagcctttctataattttactgtcatggaatctgatcgcgttaccgagatagtcggcgtggtgtccgtccagcccgcaaatactcccctgtggttcgacatagtcggcggaaattttgatagcgctttcgatgccgaaaagggggtggggacaattgtgatcgctaaaccactcgatgcggagcagagaagtatttataacatgagtgttgaagtgacagacggtaccaacgtggccgtcactcaggtgtttattaaggtcctcgataacaacgacaacgggcctgagtttagccagccgaactatgacgtcaccatctccgaggatgtgttacccgatacagaaattctacagatagaggccactgaccgggatgagaagcataagttatcatacacagtacattcctccatagatagtatctcaatgcgaaaattccgaatcgacccaagcaccggggtactgtataccgctgaacgactggaccacgaggctcaggacaaacacatccttaacatcatggttagggatcaagagttcccatatcggcgaaatctggcgcgtgtgattgtaaacgtggaagacgctaacgatcattcaccctacttcacaaatccgctatacgaggcctccgtgtttgagagcgccgctctcggctccgcagtcttacaggtcaccgccttagataaggataagggcgaaaacgctgaattgatatataccatcgaggcaggcaatactgggaacatgtttaaaatcgaacctgtcctggggattatcactatctgtaaagaacccgacatgacaactatgggacaatttgttctgtccatcaaagtcacagaccagggatcaccccctatgtctgccacagcgatcgtgagaatctctgttacgatgtctgataattcacaccctaagttcatccacaaggattaccaagctgaagtgaatgagaatgtcgacattggaacgagcgtgatattgatcagcgccatcagtcagtcgaccctgatctacgaagtaaaagatggcgacatcaacggaatttttacgataaacccatactcaggggttattacaacacagaaggccctggactacgaacgcacttcttcttatcagctgattattcaagccacaaatatggcaggaatggcatccaacgctactgtgaacatccagatcgtcgatgaaaatgacaatgccccagtctttctctttagccagtactccggttctctgagcgaggccgctccaatcaactcaatcgtcagatctctggataactccccactggtcatccgcgcaaccgacgcagactccaataggaacgctttgttagtgtaccaaattgtggagtctacagccaagaagttcttcactgtggattcctctactggcgcaatacggaccattgcaaacctggatcatgagacaattgcccactttcatttccacgttcatgtacgggacagcggcagtccacaactgactgctgagagccctgtagaggtgaatatcgaagtcacagatgtcaatgataaccctccagtgtttactcaggcagtgttcgagaccattcttcttttaccgacatatgttggagttgaggttctgaaagtaagtgcgactgacccggatagcgaagtacctcctgagttgacctattcattgatggaaggatctctggaccactttctgatcgactcaaattcaggcgtcctaactatcaaaaacaataacctttctaaagaccattacatgctgatcgtgaaggtcagtgatggaaagttctacagtaccagcatggttacaatcatggtcaaggaggctatggactccggactccactttacacagtctttttactccacctcgatttccgagaataatactaacatcactaaggtggccatcgtgaacgctgtgggcaatcggctgaatgagccgctgaaatattctatcctcaatccaggcaacaaatttaaaatcaaaagcacttcaggagtcatccaaaccactggagttcccttcgatagggaggagcaagaactatatgaacttgtggtggaagctagcagggagctggaccacctgcgtgtcgcacgtgttgtggtgcgagtgaacattgaagatataaacgacaactcccccgtctttgtgggcctgccttactatgctgcagtgcaggttgatgccgaacccggaacgttaatctaccaggtgacggcgatagacaaggataaggggccaaatggtgaagtaacatatgtcttgcaagatgactacggacactttgaaattaatcccaactccggcaatgtcatcctgaaggaggcttttaacagcgatttgagtaatatagagtatggggtgaccattcttgctaaggatggaggcaagccttctttaagcacgagcgtggagctgccaatcacgatcgtgaataaggccatgcctgtgttcgacaaaccattctacactgcatccgttaatgaggacattcgaatgaacaccccaatcctgtccatcaacgctactagccccgagggacaggggataatttatataatcatcgatggtgaccctttcaagcagttcaacatcgatttcgacacaggagtgctgaaggtagtgtctcccttggactatgaagtaacaagtgcgtataagcttactattcgtgccagtgacgccctgacaggcgcacgtgcggaggtgaccgtggacctgttggtcaatgatgtgaatgacaatccgcctattttcgaccagccaacgtataataccaccctctctgaggcaagcctaatcgggactccagtgctgcaagttgtgtctatcgacgccgatagcgaaaacaataagatggtgcattatcaaatcgtccaggacacctacaattctacagattacttccacatcgattcctcttcgggcctcatcttaacagccagaatgctcgatcacgagttagtgcagcactgcacactgaaggtgagaagcatcgattctgggttcccctccctgagcagtgaggtcctcgtccacatttatatttctgatgtgaatgacaatcccccagttttcaatcagctgatctatgagtcgtacgtaagtgagctcgctcctaggggccatttcgttacctgcgtgcaggcttctgacgctgatagctccgactttgaccggctggagtacagcatactgagcggaaacgaccggacttctttcttgatggactcaaaatcgggcgtcatcacactaagcaatcacaggaaacagcggatggaaccgctgtatagcttaaatgttagcgtctccgacggcctctttactagtaccgctcaggttcacatccgagtcctaggcgctaatttgtacagtcctgcattttctcagtcaacatatgttgcagaggtaagggagaacgtggcagctggtacaaaagttatacacgtacgcgctaccgacggcgatcccggaacatacggtcagatcagctacgctattatcaacgacttcgccaaggaccgatttcttatcgactccaacggacaagttatcactacagagaggctcgatagggaaaacccactggagggggatgtgtcaatatttgtgagagctctggatggcggtgggaggactaccttttgcaccgtcagggtgatcgtagttgatgaaaatgataatgcccctcagtttatgacagtggagtaccgggcttcagtccgcgctgacgttgggcgtggccatctggtcacccaggtgcaagccatcgaccccgatgacggcgctaactcacgcattacatactctctttattctgaggcctcggtcagcgtcgcggatctgctcgaaattgatccggataatgggtggatggtcactaaggggaacttcaatcagctcaaaaacactgtcctgtccttcttcgtgaaagccgtcgatggaggcatccctgtgaagcattctctcatccctgtctacatacatgtacttcccccagagaccttcttaccgagctttactcagtcacagtactcttttacaatcgcggaagataccgccattggcagtacagttgatactctaagaattttaccttcccagaacgtgtggttttcgaccgttaacggggagcgccctgagaataacaagggcggaatcttcgtcattgagcaggaaactgggacgataaaactggataaacgcctggaccgtgagacctccccagccttccatttcaaggttgctgcgacaatccctctcgataaggtggatattgtttttacggtggatgttgacataaaggtgctcgacctgaatgataacaaaccggtgtttgaaactagctcttatgataccatcatcatggaaggcatgcccgtcggtacaaagctgacccaagtccgcgcaatagacatggactggggggctaatggccaggtcacctattcgctccattcagattcacagcccgaaaaggttatggaggcttttaacatcgattccaacaccgggtggatttccactttgaaggacctggaccacgagacagatccaaccttcacgttttctgtagttgcctctgacttaggcgaggcattttctctcagcagtaccgccctcgtgagcgtcagagtgactgatataaatgataatgccccagtttttgcacaggaggtctatcgcggaaacgtcaaggagagcgaccctcctggagaggtggtcgcagtgctctcaacctgggaccgagacacgtctgacgtaaaccggcaagtctcctatcatattactggtggtaatccgagaggcaggtttgcgcttgggctggtgcagagcgaatggaaggtctacgttaagaggccgttggatcgtgaggaacaggacatatacttcctgaatattaccgcaacagatggtttatttgttacgcaggccatggtagaagtgagcgtctccgatgtgaacgacaattctcccgtctgtgatcaggtggcatacacggctcttttacctgaagacattccctccaacaagatcattctcaaggtgagtgcaaaggatgcagacattggttcaaacggctatatccgctattccctgtacgggagcggcaactcggaattttttctagatccagagtcaggggagctaaaaactcttgctctgctggacagagaacgaatccccgtctactctttgatggcaaaggcaacagatggcggaggacgattctgccagagcaatatccacctaatcctggaggatgtaaatgacaaccctcccgtcttctcatctgatcattacaacacatgcgtgtatgaaaataccgcgaccaaagcgctactcactagggtccaggcagtcgaccctgatatcggtattaatcggaaggtagtctatagcctcgccgactcggcaggtggtgtattttcaatcgacagcagctccggtatcattattcttgagcagccgctcgacagggagcaacagagcagttacaatatctccgtgagggccactgaccagagtccgggacagagcctgtcttccctaacaactgtgacaattacagttttagacattaacgacaatccccctgtatttgagcgaagggactatctcgtgaccgtccctgaggacacatcaccagggacacaggtgctcgctgtctttgccacctcaaaggacatcggcacaaatgccgaaattacatacctcatccgatccgggaatgaacaaggaaaatttaaaatcaaccccaaaacggggggtatcagcgtctccgaggtcttagattatgagttgtgtaaaagattttacttggtcgttgaggcaaaggatggaggcacacccgctctttctgcagtagctaccgtgaatatcaatcttaccgacgttaacgataatcctccaaagtttagtcaggatgtatattctgcagtaatcagcgaggacgcactcgtgggcgatagcgtgattctgttaatagccgaagatgttgacagtcaacctaacggacagatccacttctccattgtgaatggtgatcgagacaacgaatttactgtcgacccggtgctgggcctcgtgaaggtcaagaagaagctggatcgcgaacgtgtcagcggctattctctcctggttcaggccgtcgattccgggatccccgctatgtcatcaacagctaccgtgaatatagatatatccgacgtgaacgacaattccccagtgttcactccggctaattacaccgccgtgattcaagagaacaaaccagtgggaacaagcatcctacagctcgtggtgacagatcgtgattcgttccataatggaccaccgtttagcttcagtattctctctggtaacgaggaagaggagtttgtcttggatccacacggtatcttgaggagtgcggtggtctttcagcacacagagagcttagaatatgtactgtgcgttcaagccaaggactctggaaaaccacaacaggtgtctcatacatacatcagagtgcgagtgatcgaagaatcaactcataagccaactgccatccctcttgagatcttcattgtcaccatggaagacgatttccccggtggtgtgattggaaaaattcatgctacagaccaggatatgtacgacgtgcttacattcgctttgaagagtgaacagaagagcctgtttaaagtcaactcacatgacgggaaaatcattgcgctcggcggactggactcaggcaagtatgtcctgaacgtaagcgtgtccgatggtcgctttcaggttccgattgatgtggtggtgcacgtggagcagctggtccacgagatgctgcaaaatacggtcaccatcagattcgaaaacgtcagtccagaggactttgtgggactacacatgcacggttttagacgaactttgagaaacgctgtgttgactcaaaaacaggactccctacgaatcatttcgatccagccagtcgcagggacgaatcagctcgacatgttgtttgccgtggagatgcattcctccgaattttataaaccagcctatcttatccagaagctttccaatgctcgcaggcacttggagaacataatgcgcatatccgctatactcgaaaagaactgctccggcctggattgccaggaacaacattgtgagcaaggactgtctctggactctcatgcactgatgacatactcaaccgctcgaatctctttcgtctgtcctcgattctataggaatgttcgctgcacctgcaacggaggactgtgtcccggatcaaatgacccatgtgtggagaaaccatgtccaggcgatatgcaatgcgtttcttatgaagcaagtcggagaccattcctatgccagtgtccccctggtaagctgggtgaatgctctggtcacactagcctgagcttcgccggtaattcctacatcaaatatcggctttcagagaacagcaaagaagaggattttaaactggccctgcggctgaggaccttgcagtcaaatggcattatcatgtacacacgggcaaatccctgcatcatcctgaagattgtggacgggaagctttggttccagctcgattgcggttcgggccctggaattcttggaatcagcggtcgagctgtgaacgacggctcctggcatagcgtgttcttggaattaaataggaacttcacaagtttgagtcttgacgactcatatgttgaacgacgcagagcccctttgtatttccagaccctttcgacagagtcttccatatatttcggcgctttggtccaggcggacaatatccgcagtctgacagatactcgcgtcacccaggtgctatccggatttcagggatgtctggacagtgtgatacttaataataatgagttgccactgcagaataaaagaagcagtttcgctgaagtggtggggctgactgagttgaaactagggtgcgtgttgtacccagatgcatgtaaacgctctccttgccagcatggtggctcatgtactgggctcccatccggaggttaccagtgcacttgcctatcccagtttaccggaagaaattgcgagagtgagattactgcctgctttcccaacccctgccgaaacgggggaagttgtgatccaattggtaatacttttatctgcaactgcaaagccggtctcactggagtgacctgcgaagaagacatcaacgagtgtgagcgggaggaatgtgaaaacggcggaagttgtgtcaacgtgtttggatccttcctctgtaattgtacacccggatacgtgggccagtattgtggcttgcgcccagtagtggtccctaatatccaagctgggcatagctatgtagggaaggaggagttaatagggatagccgtggtgttattcgtgatttttatcctggtggtcctcttcattgtgttcaggaagaaagtgtttagaaagaattactctcgcaataacatcactcttgttcaggatccagccacagctgctctcttgaacaaaagcaatggcatccccttccgtaacctcagagggtcgggcgatggacgaaatgtttatcaagaggtcggcccaccccaggttcctgttagacccatggcttatactccctgtttccaatccgactctagaagcaacttagacaaaatcgtggacggattagggggagagcatcaggaaatgaccaccttccatcccgagtcaccgaggatcctaaccgctcggaggggggttgtcgtctgctccgttgcccctaatcttcccgcagtgagtccttgccgctccgactgcgatagtatacggaagaacgggtgggacgccggaactgaaaacaaaggggtcgatgacccaggggaagttacctgctttgccggatctaacaagggtagcaattcagaggtgcaaagcctcagcagcttccagtcggatagcggagatgataatgcatccattgttaccgtcatacagctggtgaataatgtggtggatacaattgagaacgaagttagcgtgatggatcaggggcagaactacaatagggcctaccattgggacaccagtgactggatgccgggtgcccgactctctgacatcgaggaggtgcctaactacgaaaaccaggatggtggctctgcccatcagggcagtactcgggaactagaaagtgactattatcttggcggatacgatatcgactctgagtacccaccaccgcatgaggaggagttcctatcacaggaccagttaccgcctccattgcctgaggacttccccgaccagtacgaggcgctgcccccttcccaaccagtcagcttggcttcgactctaagcccggattgtcggaggcggcctcaattccatccttcccagtacctcccgcctcacccatttcccaacgagacggaccttgtcggaccaccggcttcctgtgagttctccacatttgctgtgtctatgaatcaaggtacagagccgacaggcccagcagactctgtttccctgagtttgcacaattctcggggaaccagctccagcgacgtgagtgcaaactgcgggttcgacgactctgaagtggctatgagcgattacgagtcagtgggcgagctgagcctcgcttctttgcacattccctttgtcgagactcaacaccagactcaggtctat

SEQ ID NO: 339433 - DNA, 13770 bp, Artificial Sequence
  derived and/or modified sequence
atggacatcatcatgggccactgcgtgggcaccagaccccccgcctgctgcctgatcctgctgctgttcaagctgctggccaccgtgagccagggcctgcccggcaccggccccctgggcttccacttcacccacagcatctacaacgccaccgtgtacgagaacagcgccgccagaacctacgtgaacagccagagcagaatgggcatcaccctgatcgacctgagctgggacatcaagtacagaatcgtgagcggcgacgaggagggcttcttcaaggccgaggaggtgatcatcgccgacttctgcttcctgagaatcagaaccaagggcggcaacagcgccatcctgaacagagagatccaggacaactacctgctgatcgtgaagggcagcgtgagaggcgaggacctggaggcctggaccaaggtgaacatccaggtgctggacatgaacgacctgagacccctgttcagccccaccacctacagcgtgaccatcgccgagagcacccccctgagaaccagcgtggcccaggtgaccgccaccgacgccgacatcggcagcaacggcgagttctactactacttcaagaacaaggtggacctgttcagcgtgcaccccaccagcggcgtgatcagcctgagcggcagactgaactacgacgagaagaacagatacgacctggagatcctggccgtggacagaggcatgaagctgtacggcaacaacggcgtgagcagcaccgccaagctgtacgtgcacatcgagagaatcaacgagcacgcccccaccatccacgtggtgacccacgtgcccttcagcctggagaaggagcccacctacgccgtggtgaccgtggacgacctggacgacggcgccaacggcgagatcgagagcgtgagcatcgtggccggcgaccccctggaccagttcttcctggccaaggagggcaagtggctgaacgagtacaagatcaaggagagaaagcagatcgactgggagagcttcccctacggctacaacctgaccctgcaggccaaggacaagggcagcccccagaagtgcagcgccctgaaggccgtgtacatcggcaaccccaccagagacaccgtgcccatcagattcgagaaggaggtgtacgacgtgagcatcagcgagttcagcccccccggcgtggtggtggccatcgtgaagctgagccccgagcccatcgacgtggagtacaagctgagccccggcgaggacgccgtgtacttcaagatcaaccccagaagcggcctgatcgtgaccgccagacccctgaacaccgtgaagaaggaggtgtacaagctggaggtgaccaacaaggagggcgacctgaaggcccaggtgaccatcagcatcgaggacgccaacgaccacacccccgagttccagcagcccctgtacgacgcctacgtgaacgagagcgtgcccgtgggcaccagcgtgctgaccgtgagcgccagcgacaaggacaagggcgagaacggctacatcacctacagcatcgccagcctgaacctgctgcccttcgtgatcaaccagttcaccggcgtgatcagcaccaccgaggagctggacttcgagagcagccccgagatctacagattcatcgtgagagccagcgactggggcagcccctacagacacgagagcgaggtgaacgtgaccatcagaatcggcaacgtgaacgacaacagccccctgttcgagaaggtggcctgccagggcgtgatcagctacgacttccccgtgggcggccacatcaccgccgtgagcgccatcgacatcgacgagctggagctggtgaagtacaagatcatcagcggcaacgagctgggcttcttctacctgaaccccgacagcggcgtgctgcagctgaagaagagcctgaccaacagcggcatcaagaacggcaacttcgccctgagaatcaccgccaccgacggcgagaacctggccgaccccatgagcatcaacatcagcgtgctgcacggcaaggtgagcagcaagagcttcagctgcagagagaccagagtggcccagaagctggccgagaagctgctgatcaaggccaaggccaacggcaagctgaacctggaggacggcttcctggacttctacagcatcaacagacagggcccctacttcgacaagagcttccccagcgacgtggccgtgaaggaggacctgcccgtgggcgccaacatcctgaagatcaaggcctacgacgccgacagcggcttcaacggcaaggtgctgttcaccatcagcgacggcaacaccgacagctgcttcaacatcgacatggagaccggccagctgaaggtgctgatgcccatggacagagagcacaccgacctgtacctgctgaacatcaccatctacgacctgggcaacccccagaagagcagctggagactgctgaccatcaacgtggaggacgccaacgacaacagccccgtgttcatccaggacagctacagcgtgaacatcctggagagcagcggcatcggcaccgagatcatccaggtggaggccagagacaaggacctgggcagcaacggcgaggtgacctacagcgtgctgaccgacacccagcagttcgccatcaacagcagcaccggcatcgtgtacgtggccgaccagctggacagagagagcaaggccaactacagcctgaagatcgaggccagagacaaggccgagagcggccagcagctgttcagcgtggtgaccctgaaggtgttcctggacgacgtgaacgactgcagccccgccttcatccccagcagctacagcgtgaaggtgctggaggacctgcccgtgggcaccgtgatcgcctggctggagacccacgaccccgacctgggcctgggcggccaggtgagatacagcctggtgaacgactacaacggcagattcgagatcgacaaggccagcggcgccatcagactgagcaaggagctggactacgagaagcagcagttctacaacctgaccgtgagagccaaggacaagggcagacccgtgagcctgagcagcgtgagcttcgtggaggtggaggtggtggacgtgaacgagaacctgcacaccccctacttccccgacttcgccgtggtgggcagcgtgaaggagaacagcagaatcggcaccagcgtgctgcaggtgaccgccagagacgaggacagcggcagagacggcgagatccagtacagcatcagagacggcagcggcctgggcagattcagcatcgacgacgagagcggcgtgatcaccgccgccgacatcctggacagagagaccatgggcagctactggctgaccgtgtacgccaccgacagaggcgtggtgcccctgtacagcaccatcgaggtgtacatcgaggtggaggacgtgaacgacaacgcccccctgaccagcgagcccatctactaccccgtggtgatggagaacagccccaaggacgtgagcgtgatccagatccaggccgaggaccccgacagcagcagcaacgagaagctgacctacagaatcaccagcggcaacccccagaacttcttcgccatcaacatcaagaccggcctgatcaccaccaccagcagaaagctggacagagagcagcaggccgagcacttcctggaggtgaccgtgaccgacggcggccccagccccaagcagagcaccatctgggtggtggtgcaggtgctggacgagaacgacaacaagccccagttccccgagaaggtgtaccagatcaagctgcccgagagagacagaaagaagagaggcgagcccatctacagagccttcgccttcgacagagacgagggccccaacgccgagatcagctacagcatcgtggacggcaacgacgacggcaagttcttcatcgaccccaagaccggcatggtgagcagcagaaagcagttcaccgccggcagctacgacatcctgaccatcaaggccgtggacaacggcagaccccagaagagcagcaccgccagactgcacatcgagtggatcaagaagcccccccccagccccatccccctgaccttcgacgagcccttctacaacttcaccgtgatggagagcgacagagtgaccgagatcgtgggcgtggtgagcgtgcagcccgccaacacccccctgtggttcgacatcgtgggcggcaacttcgacagcgccttcgacgccgagaagggcgtgggcaccatcgtgatcgccaagcccctggacgccgagcagagaagcatctacaacatgagcgtggaggtgaccgacggcaccaacgtggccgtgacccaggtgttcatcaaggtgctggacaacaacgacaacggccccgagttcagccagcccaactacgacgtgaccatcagcgaggacgtgctgcccgacaccgagatcctgcagatcgaggccaccgacagagacgagaagcacaagctgagctacaccgtgcacagcagcatcgacagcatcagcatgagaaagttcagaatcgaccccagcaccggcgtgctgtacaccgccgagagactggaccacgaggcccaggacaagcacatcctgaacatcatggtgagagaccaggagttcccctacagaagaaacctggccagagtgatcgtgaacgtggaggacgccaacgaccacagcccctacttcaccaaccccctgtacgaggccagcgtgttcgagagcgccgccctgggcagcgccgtgctgcaggtgaccgccctggacaaggacaagggcgagaacgccgagctgatctacaccatcgaggccggcaacaccggcaacatgttcaagatcgagcccgtgctgggcatcatcaccatctgcaaggagcccgacatgaccaccatgggccagttcgtgctgagcatcaaggtgaccgaccagggcagcccccccatgagcgccaccgccatcgtgagaatcagcgtgaccatgagcgacaacagccaccccaagttcatccacaaggactaccaggccgaggtgaacgagaacgtggacatcggcaccagcgtgatcctgatcagcgccatcagccagagcaccctgatctacgaggtgaaggacggcgacatcaacggcatcttcaccatcaacccctacagcggcgtgatcaccacccagaaggccctggactacgagagaaccagcagctaccagctgatcatccaggccaccaacatggccggcatggccagcaacgccaccgtgaacatccagatcgtggacgagaacgacaacgcccccgtgttcctgttcagccagtacagcggcagcctgagcgaggccgcccccatcaacagcatcgtgagaagcctggacaacagccccctggtgatcagagccaccgacgccgacagcaacagaaacgccctgctggtgtaccagatcgtggagagcaccgccaagaagttcttcaccgtggacagcagcaccggcgccatcagaaccatcgccaacctggaccacgagaccatcgcccacttccacttccacgtgcacgtgagagacagcggcagcccccagctgaccgccgagagccccgtggaggtgaacatcgaggtgaccgacgtgaacgacaacccccccgtgttcacccaggccgtgttcgagaccatcctgctgctgcccacctacgtgggcgtggaggtgctgaaggtgagcgccaccgaccccgacagcgaggtgccccccgagctgacctacagcctgatggagggcagcctggaccacttcctgatcgacagcaacagcggcgtgctgaccatcaagaacaacaacctgagcaaggaccactacatgctgatcgtgaaggtgagcgacggcaagttctacagcaccagcatggtgaccatcatggtgaaggaggccatggacagcggcctgcacttcacccagagcttctacagcaccagcatcagcgagaacaacaccaacatcaccaaggtggccatcgtgaacgccgtgggcaacagactgaacgagcccctgaagtacagcatcctgaaccccggcaacaagttcaagatcaagagcaccagcggcgtgatccagaccaccggcgtgcccttcgacagagaggagcaggagctgtacgagctggtggtggaggccagcagagagctggaccacctgagagtggccagagtggtggtgagagtgaacatcgaggacatcaacgacaacagccccgtgttcgtgggcctgccctactacgccgccgtgcaggtggacgccgagcccggcaccctgatctaccaggtgaccgccatcgacaaggacaagggccccaacggcgaggtgacctacgtgctgcaggacgactacggccacttcgagatcaaccccaacagcggcaacgtgatcctgaaggaggccttcaacagcgacctgagcaacatcgagtacggcgtgaccatcctggccaaggacggcggcaagcccagcctgagcaccagcgtggagctgcccatcaccatcgtgaacaaggccatgcccgtgttcgacaagcccttctacaccgccagcgtgaacgaggacatcagaatgaacacccccatcctgagcatcaacgccaccagccccgagggccagggcatcatctacatcatcatcgacggcgaccccttcaagcagttcaacatcgacttcgacaccggcgtgctgaaggtggtgagccccctggactacgaggtgaccagcgcctacaagctgaccatcagagccagcgacgccctgaccggcgccagagccgaggtgaccgtggacctgctggtgaacgacgtgaacgacaacccccccatcttcgaccagcccacctacaacaccaccctgagcgaggccagcctgatcggcacccccgtgctgcaggtggtgagcatcgacgccgacagcgagaacaacaagatggtgcactaccagatcgtgcaggacacctacaacagcaccgactacttccacatcgacagcagcagcggcctgatcctgaccgccagaatgctggaccacgagctggtgcagcactgcaccctgaaggtgagaagcatcgacagcggcttccccagcctgagcagcgaggtgctggtgcacatctacatcagcgacgtgaacgacaacccccccgtgttcaaccagctgatctacgagagctacgtgagcgagctggcccccagaggccacttcgtgacctgcgtgcaggccagcgacgccgacagcagcgacttcgacagactggagtacagcatcctgagcggcaacgacagaaccagcttcctgatggacagcaagagcggcgtgatcaccctgagcaaccacagaaagcagagaatggagcccctgtacagcctgaacgtgagcgtgagcgacggcctgttcaccagcaccgcccaggtgcacatcagagtgctgggcgccaacctgtacagccccgccttcagccagagcacctacgtggccgaggtgagagagaacgtggccgccggcaccaaggtgatccacgtgagagccaccgacggcgaccccggcacctacggccagatcagctacgccatcatcaacgacttcgccaaggacagattcctgatcgacagcaacggccaggtgatcaccaccgagagactggacagagagaaccccctggagggcgacgtgagcatcttcgtgagagccctggacggcggcggcagaaccaccttctgcaccgtgagagtgatcgtggtggacgagaacgacaacgccccccagttcatgaccgtggagtacagagccagcgtgagagccgacgtgggcagaggccacctggtgacccaggtgcaggccatcgaccccgacgacggcgccaacagcagaatcacctacagcctgtacagcgaggccagcgtgagcgtggccgacctgctggagatcgaccccgacaacggctggatggtgaccaagggcaacttcaaccagctgaagaacaccgtgctgagcttcttcgtgaaggccgtggacggcggcatccccgtgaagcacagcctgatccccgtgtacatccacgtgctgccccccgagaccttcctgcccagcttcacccagagccagtacagcttcaccatcgccgaggacaccgccatcggcagcaccgtggacaccctgagaatcctgcccagccagaacgtgtggttcagcaccgtgaacggcgagagacccgagaacaacaagggcggcatcttcgtgatcgagcaggagaccggcaccatcaagctggacaagagactggacagagagaccagccccgccttccacttcaaggtggccgccaccatccccctggacaaggtggacatcgtgttcaccgtggacgtggacatcaaggtgctggacctgaacgacaacaagcccgtgttcgagaccagcagctacgacaccatcatcatggagggcatgcccgtgggcaccaagctgacccaggtgagagccatcgacatggactggggcgccaacggccaggtgacctacagcctgcacagcgacagccagcccgagaaggtgatggaggccttcaacatcgacagcaacaccggctggatcagcaccctgaaggacctggaccacgagaccgaccccaccttcaccttcagcgtggtggccagcgacctgggcgaggccttcagcctgagcagcaccgccctggtgagcgtgagagtgaccgacatcaacgacaacgcccccgtgttcgcccaggaggtgtacagaggcaacgtgaaggagagcgacccccccggcgaggtggtggccgtgctgagcacctgggacagagacaccagcgacgtgaacagacaggtgagctaccacatcaccggcggcaaccccagaggcagattcgccctgggcctggtgcagagcgagtggaaggtgtacgtgaagagacccctggacagagaggagcaggacatctacttcctgaacatcaccgccaccgacggcctgttcgtgacccaggccatggtggaggtgagcgtgagcgacgtgaacgacaacagccccgtgtgcgaccaggtggcctacaccgccctgctgcccgaggacatccccagcaacaagatcatcctgaaggtgagcgccaaggacgccgacatcggcagcaacggctacatcagatacagcctgtacggcagcggcaacagcgagttcttcctggaccccgagagcggcgagctgaagaccctggccctgctggacagagagagaatccccgtgtacagcctgatggccaaggccaccgacggcggcggcagattctgccagagcaacatccacctgatcctggaggacgtgaacgacaacccccccgtgttcagcagcgaccactacaacacctgcgtgtacgagaacaccgccaccaaggccctgctgaccagagtgcaggccgtggaccccgacatcggcatcaacagaaaggtggtgtacagcctggccgacagcgccggcggcgtgttcagcatcgacagcagcagcggcatcatcatcctggagcagcccctggacagagagcagcagagcagctacaacatcagcgtgagagccaccgaccagagccccggccagagcctgagcagcctgaccaccgtgaccatcaccgtgctggacatcaacgacaacccccccgtgttcgagagaagagactacctggtgaccgtgcccgaggacaccagccccggcacccaggtgctggccgtgttcgccaccagcaaggacatcggcaccaacgccgagatcacctacctgatcagaagcggcaacgagcagggcaagttcaagatcaaccccaagaccggcggcatcagcgtgagcgaggtgctggactacgagctgtgcaagagattctacctggtggtggaggccaaggacggcggcacccccgccctgagcgccgtggccaccgtgaacatcaacctgaccgacgtgaacgacaacccccccaagttcagccaggacgtgtacagcgccgtgatcagcgaggacgccctggtgggcgacagcgtgatcctgctgatcgccgaggacgtggacagccagcccaacggccagatccacttcagcatcgtgaacggcgacagagacaacgagttcaccgtggaccccgtgctgggcctggtgaaggtgaagaagaagctggacagagagagagtgagcggctacagcctgctggtgcaggccgtggacagcggcatccccgccatgagcagcaccgccaccgtgaacatcgacatcagcgacgtgaacgacaacagccccgtgttcacccccgccaactacaccgccgtgatccaggagaacaagcccgtgggcaccagcatcctgcagctggtggtgaccgacagagacagcttccacaacggcccccccttcagcttcagcatcctgagcggcaacgaggaggaggagttcgtgctggacccccacggcatcctgagaagcgccgtggtgttccagcacaccgagagcctggagtacgtgctgtgcgtgcaggccaaggacagcggcaagccccagcaggtgagccacacctacatcagagtgagagtgatcgaggagagcacccacaagcccaccgccatccccctggagatcttcatcgtgaccatggaggacgacttccccggcggcgtgatcggcaagatccacgccaccgaccaggacatgtacgacgtgctgaccttcgccctgaagagcgagcagaagagcctgttcaaggtgaacagccacgacggcaagatcatcgccctgggcggcctggacagcggcaagtacgtgctgaacgtgagcgtgagcgacggcagattccaggtgcccatcgacgtggtggtgcacgtggagcagctggtgcacgagatgctgcagaacaccgtgaccatcagattcgagaacgtgagccccgaggacttcgtgggcctgcacatgcacggcttcagaagaaccctgagaaacgccgtgctgacccagaagcaggacagcctgagaatcatcagcatccagcccgtggccggcaccaaccagctggacatgctgttcgccgtggagatgcacagcagcgagttctacaagcccgcctacctgatccagaagctgagcaacgccagaagacacctggagaacatcatgagaatcagcgccatcctggagaagaactgcagcggcctggactgccaggagcagcactgcgagcagggcctgagcctggacagccacgccctgatgacctacagcaccgccagaatcagcttcgtgtgccccagattctacagaaacgtgagatgcacctgcaacggcggcctgtgccccggcagcaacgacccctgcgtggagaagccctgccccggcgacatgcagtgcgtgagctacgaggccagcagaagacccttcctgtgccagtgcccccccggcaagctgggcgagtgcagcggccacaccagcctgagcttcgccggcaacagctacatcaagtacagactgagcgagaacagcaaggaggaggacttcaagctggccctgagactgagaaccctgcagagcaacggcatcatcatgtacaccagagccaacccctgcatcatcctgaagatcgtggacggcaagctgtggttccagctggactgcggcagcggccccggcatcctgggcatcagcggcagagccgtgaacgacggcagctggcacagcgtgttcctggagctgaacagaaacttcaccagcctgagcctggacgacagctacgtggagagaagaagagcccccctgtacttccagaccctgagcaccgagagcagcatctacttcggcgccctggtgcaggccgacaacatcagaagcctgaccgacaccagagtgacccaggtgctgagcggcttccagggctgcctggacagcgtgatcctgaacaacaacgagctgcccctgcagaacaagagaagcagcttcgccgaggtggtgggcctgaccgagctgaagctgggctgcgtgctgtaccccgacgcctgcaagagaagcccctgccagcacggcggcagctgcaccggcctgcccagcggcggctaccagtgcacctgcctgagccagttcaccggcagaaactgcgagagcgagatcaccgcctgcttccccaacccctgcagaaacggcggcagctgcgaccccatcggcaacaccttcatctgcaactgcaaggccggcctgaccggcgtgacctgcgaggaggacatcaacgagtgcgagagagaggagtgcgagaacggcggcagctgcgtgaacgtgttcggcagcttcctgtgcaactgcacccccggctacgtgggccagtactgcggcctgagacccgtggtggtgcccaacatccaggccggccacagctacgtgggcaaggaggagctgatcggcatcgccgtggtgctgttcgtgatcttcatcctggtggtgctgttcatcgtgttcagaaagaaggtgttcagaaagaactacagcagaaacaacatcaccctggtgcaggaccccgccaccgccgccctgctgaacaagagcaacggcatccccttcagaaacctgagaggcagcggcgacggcagaaacgtgtaccaggaggtgggccccccccaggtgcccgtgagacccatggcctacaccccctgcttccagagcgacagcagaagcaacctggacaagatcgtggacggcctgggcggcgagcaccaggagatgaccaccttccaccccgagagccccagaatcctgaccgccagaagaggcgtggtggtgtgcagcgtggcccccaacctgcccgccgtgagcccctgcagaagcgactgcgacagcatcagaaagaacggctgggacgccggcaccgagaacaagggcgtggacgaccccggcgaggtgacctgcttcgccggcagcaacaagggcagcaacagcgaggtgcagagcctgagcagcttccagagcgacagcggcgacgacaacgccagcatcgtgaccgtgatccagctggtgaacaacgtggtggacaccatcgagaacgaggtgagcgtgatggaccagggccagaactacaacagagcctaccactgggacaccagcgactggatgcccggcgccagactgagcgacatcgaggaggtgcccaactacgagaaccaggacggcggcagcgcccaccagggcagcaccagagagctggagagcgactactacctgggcggctacgacatcgacagcgagtacccccccccccacgaggaggagttcctgagccaggaccagctgcccccccccctgcccgaggacttccccgaccagtacgaggccctgccccccagccagcccgtgagcctggccagcaccctgagccccgactgcagaagaagaccccagttccaccccagccagtacctgcccccccaccccttccccaacgagaccgacctggtgggcccccccgccagctgcgagttcagcaccttcgccgtgagcatgaaccagggcaccgagcccaccggccccgccgacagcgtgagcctgagcctgcacaacagcagaggcaccagcagcagcgacgtgagcgccaactgcggcttcgacgacagcgaggtggccatgagcgactacgagagcgtgggcgagctgagcctggccagcctgcacatccccttcgtggagacccagcaccagacccaggtgtag

SEQ ID NO: 339434 - protein, 154 aa, Artificial Sequence
  derived and/or modified sequence
MHPEPLLNSTQSAPHHFPDSFQATPFCFNQSLIPGSPSNSSILSGSLDYSYSPVQLPSYAPENYNSPASLDTRTCGYPPEDHSYQHLSSHAQYSCFSSATTSICYCASCEAEDLDALQAAEYFYPSTDCVDFAPSAAATSDFYKRETNCDICYS

SEQ ID NO: 339435 - protein, 107 aa, Artificial Sequence
  derived and/or modified sequence
MHPEPLLNSTQSAPHHFPDSFQATPFCFNQSLIPGSPSNSSILSGSLDYSYSPVQLPSYAPENYNSPASLDTRTCGYPPEDHSYQHLSSHAQYSCFSSATTSICYCA

SEQ ID NO: 339436 - DNA, 1414 bp, Artificial Sequence
  derived and/or modified sequence
actatctccaggcgtccaggctgaacgcgcggtcaccctcggccgccgcacccagcgcacttcccggcgcgattcctggacgcacactgcagggtagtggtcagggccggagccgccccggactcctgcggccacctccaccttgaaagctcgcccggctcggcttggcctaacagccagtccccaacctactcactgcggcttttcggggcccggggctgaggctgcccctgctcccagcgctcaggggtccctcccagcgaacccctcttgagcgcgcccgccacctcccgcgagccggggcagtccgaccgggccccgccagccccggggcggcccctaccgaagggcggcctcccggcggagtgcagggtcatcgggagccccggacggctttccccagctcgcgctgcgcggactcgccccggagcctcagtgcgcctcggagaaacgcctgccccagaaagggaggggaaaaaccgaaggtgtatcaaggtgtccgagtgaagatcacagtgaaggagctgctgcagcaaagacgggcacaccaggcggcctccgggggaacccggtccggaggcagcagtgtccacctttcagacccagttgcaccatcttctgcaggactgtattttgagcctgaaccaatttcttccacgcccaattatttgcaacggggagaattttccagttgtgtttcatgtgaagaaaactcaagctgcctcgaccagatctttgattcctaccttcagacagagatgcacccggagcctttgctcaattccacacaaagtgctccacaccatttcccagacagcttccaggccacccctttctgctttaaccagagcctgatcccaggatcaccttcaaattcctccattctctctggctccttagactacagttactcgccagtgcagctgccttcatatgctccagagaattacaattcccctgcttctctggacaccagaacctgtggctaccccccagaagaccattcctaccaacacttgtcctcacacgcccagtacagctgcttctcctcggccaccacctccatctgctactgcgcatcgtgtgaggcagaggacttggatgctctccaggcagcagagtacttctacccgagcacagactgtgtggactttgccccctcagcagccgccaccagtgatttctataagagggaaacaaactgtgacatctgctatagttaatagaaattacagtaattcagaacatggcatgggtatatctatttttctaccacgtctagatgacactgcaaaatatgcaacttggtaacacaatatcccaagcacagtttacatgtcactatttccaattttctgatgctaagcattcatatgaagtcctcagacccggtcacagcgccactcctactttg

SEQ ID NO: 339437 - DNA, 823 bp, Artificial Sequence
  derived and/or modified sequence
tcccacgtatccactgttgtgtcctgagacacgcggtgcggaccctgcgcgcccagaagctgctacggggggagctagaggctcacagtgagcctgggacgggggcagagcgcaccgactgcactgagccgagctgtggcggtccctgcgcggaccccgaggggcgcccgctgcccgcggagtccggagccgatcggggaacggggtggtggggctgcgaaaaaccgaaggtgtatcaaggtgtccgagtgaagatcacagtgaaggagctgctgcagcaaagacgggcacaccaggcggcctccgggggaacccggtccggaggcagcagtgtccacctttcagacccagttgcaccatcttctgcaggactgtattttgagcctgaaccaatttcttccacgcccaattatttgcaacggggagaattttccagttgtgtttcatgtgaagaaaactcaagctgcctcgaccagatctttgattcctaccttcagacagagatgcacccggagcctttgctcaattccacacaaagtgctccacaccatttcccagacagcttccaggccacccctttctgctttaaccagagcctgatcccaggatcaccttcaaattcctccattctctctggctccttagactacagttactcgccagtgcagctgccttcatatgctccagagaattacaattcccctgcttctctggacaccagaacctgtggctaccccccagaagaccattcctaccaacacttgtcctcacacgcccagtacagctgcttctcctcggccaccacctccatctgctactgcgc

SEQ ID NO: 339438 - protein, 405 aa, Artificial Sequence
  derived and/or modified sequence
MSSPALTAGASGKVMDFNNGTYLVSFTLFWEGQVSLSLLLIHPSEGASALWRARNQGYDKIIFKGKFVNGTSHVFTECGLTLNSNAELCEYLDDRDQEAFYCMKPQHMPCEALTYMTTRNREVSYLTDKENSLFHRSKVGVEMMKDRKHIDVTNCNKREKIEETCQVGMKPPVPGGYTLQGKWITTFCNQVQLDTIKINGCLKGKLIYLLGDSTLRQWIYYFPKVVKTLKFFDLHETGIFKKHLLLDAERHTQIQWKKHSYPFVTFQLYSLIDHDYIPREIDRLSGDKNTAIVITFGQHFRPFPIDIFIRRAIGVQKAIERLFLRSPATKVIIKTENIREMHIETERFGDFHGYIHYLIMKDIFKDLNVGIIDAWDMTIAYGTDTIHPPDHVIGNQINMFLNYIC

SEQ ID NO: 339439 - protein, 547 aa, Artificial Sequence
  derived and/or modified sequence
MSSNTMLQKTLLILISFSVVTWMIFIISQNFTKLWSALNLSISVHYWNNSAKSLFPKTSLIPLKPLTETELRIKEIIEKLDQQIPPRPFTHVNTTTSATHSTATILNPRDTYCRGDQLDILLEVRDHLGQRKQYGGDFLRARMSSPALTAGASGKVMDFNNGTYLVSFTLFWEGQVSLSLLLIHPSEGASALWRARNQGYDKIIFKGKFVNGTSHVFTECGLTLNSNAELCEYLDDRDQEAFYCMKPQHMPCEALTYMTTRNREVSYLTDKENSLFHRSKVGVEMMKDRKHIDVTNCNKREKIEETCQVGMKPPVPGGYTLQGKWITTFCNQVQLDTIKINGCLKGKLIYLLGDSTLRQWIYYFPKVVKTLKFFDLHETGIFKKHLLLDAERHTQIQWKKHSYPFVTFQLYSLIDHDYIPREIDRLSGDKNTAIVITFGQHFRPFPIDIFIRRAIGVQKAIERLFLRSPATKVIIKTENIREMHIETERFGDFHGYIHYLIMKDIFKDLNVGIIDAWDMTIAYGTDTIHPPDHVIGNQINMFLNYIC

SEQ ID NO: 339440 - DNA, 1644 bp, Artificial Sequence
  derived and/or modified sequence
atgtcctccaacacgatgcttcagaagacattgctgatccttattagcttctccgttgtcacttggatgatctttataatcagccagaacttcaccaagctgtggtccgccctcaacctgagtatcagcgtgcactactggaacaattcggcaaaatccctcttccctaagacctcccttattcccctcaaaccactgactgaaactgagctgcgtattaaggaaataatcgaaaagcttgatcagcagataccccctcgcccttttacccatgttaacacaaccactagtgccacacactctaccgcgactattctgaatcctcgggacacctactgtcgcggagaccagttagatattctattggaggttcgggaccaccttggccagagaaaacaatatggaggcgacttcctacgagccagaatgtcatctcctgcgctgaccgcaggtgcgagcggcaaagtgatggacttcaacaatgggacctaccttgtctcctttacactgttctgggaaggacaggtgtcactaagtctgctgctgatccacccttccgagggcgcttccgccctttggagagcaaggaaccagggctacgataagataatattcaagggaaaatttgtgaacggtactagtcacgtttttacagagtgcggcctgactttaaacagcaatgcagaactgtgcgagtacttggacgatcgcgatcaggaggcgttctattgcatgaaacctcagcatatgccctgcgaggctctcacctacatgaccacccgcaaccgagaagtgtcctacctgactgataaggagaatagtctattccaccgcagtaaggttggtgtcgaaatgatgaaagataggaagcacattgacgtgaccaactgtaacaagagggagaagattgaggagacttgtcaggtcgggatgaagccacctgtgcctgggggatacactctgcagggtaaatggataaccacattctgtaaccaagtgcagctggacactatcaaaatcaatgggtgtctgaagggcaagctcatctacttattgggcgactctaccctgcgccaatggatttactacttccccaaagtggtaaagactttgaagtttttcgatctgcatgagaccgggattttcaaaaagcatctgttgctggacgccgagcggcatactcagattcagtggaaaaaacattcctatccctttgttacttttcaactctacagtttgattgaccacgattacataccacgcgaaattgacaggctgtctggtgacaagaacaccgccatcgtgattacattcggacagcattttagaccctttccgatagatatttttatcaggcgtgccatcggagtgcaaaaagccatcgagaggttgttccttaggtcccccgctactaaagtgattatcaagactgagaatatacgggagatgcacattgaaactgagaggtttggcgactttcacggctacattcactacttgattatgaaagatatctttaaggatctgaacgtgggaatcattgacgcttgggatatgactatcgcatacgggactgataccattcaccctcctgaccacgtcatcggaaaccagatcaacatgttcttaaattatatttgctag

SEQ ID NO: 339441 - DNA, 1896 bp, Artificial Sequence
  derived and/or modified sequence
atgtcctcaaatacaatgcttcaaaaaacgctgctgatcttgatctctttttcagtagtaacctggatgatttttataatttctcagaacttcacaaagctttggtctgctctaaacttatccatctctgtccattactggaacaactccgcaaagtccttattccctaaaacatcactgataccattaaagccactaacagagactgaactcagaataaaggaaatcatagagaaactagatcagcagatcccacccagacctttcacccatgtgaacaccaccaccagtgccacacacagcacagccaccatcctcaaccctcgagatacatactgcaggggagaccagctggacatcctactggaggtgagggaccacttgggacagaggaagcaatatggtggggatttcctgagggccaggatgtcctccccagcactgacggcaggtgcttcaggaaaggtgatggacttcaacaatggcacctacctggtcagcttcactctgttctgggagggccaggtctccctgtctctgctgctcatccaccccagtgaaggggcgtcggctctctggagggcaaggaaccaaggctatgataaaattattttcaaaggcaaatttgttaatggcacctctcatgtcttcactgaatgtggcctgaccctaaactcaaatgctgaactctgtgaatatctggatgacagagaccaagaagccttctattgtatgaagcctcaacacatgccctgtgaggctctgacctacatgaccacccggaatagagaggtatcttatcttacagacaaggaaaacagccttttccacaggtccaaagtgggagttgaaatgatgaaggatcgtaaacacattgatgtcactaattgtaacaagagagaaaaaatagaagagacatgccaagttggaatgaagcctcctgtccctggtggttatactttacaaggaaaatggataacaacattttgcaaccaggttcagttagacacaattaagataaatggctgtttgaaaggcaaactcatttacctcctgggagactctacactacgtcagtggatctactacttccccaaagttgtaaaaacactgaagttttttgatcttcatgaaactggaatctttaagaaacatttgcttctggatgcagaaagacacactcagattcaatggaaaaaacatagctatcccttcgtcactttccagctctactctctgatagatcatgattatatccctcgggaaattgaccggctatcaggtgacaaaaacacagccatcgtcatcacctttggccagcactttagaccatttcccattgacatttttattcgcagggccatcggtgttcaaaaggctattgaaagactgttcctaagaagcccagccactaaagtgattattaagacagaaaacatcagggagatgcacatagagacagagaggtttggagacttccatggttatattcactatcttatcatgaaggatattttcaaagacctcaacgtgggcatcattgatgcctgggacatgaccattgcatatggcactgacactatccacccacctgatcatgtgattggaaatcagattaacatgttcttaaactacatttgctaagggataaatactatacaaaatcactaggaaccaatctctgcacataatcccacatgtattgtaaagtaagttttactcattttaggaactaaggaaaataaatttaaaagaatctgtttggggaggaaggctatgtaaggacaatgacaactgataagggatgcaaaaccaagagaatcattcatgaagaatgactataccatgcctggttctgatgctcgtttaaaatattaaaaaagttttttaaaagcc

SEQ ID NO: 339442 - DNA, 1644 bp, Artificial Sequence
  derived and/or modified sequence
atgagttcaaacactatgctccagaagaccctgttaatattaatctcattttcagtagtgacttggatgattttcatcatctcacagaactttaccaagctgtggtccgccctaaacttatcaatctctgttcactattggaataattcagcgaagagtctcttccctaaaacaagcctaatccccctaaagccgttaactgaaactgagctgcggattaaggaaataattgagaagctcgatcagcagatccctccaagaccatttacccacgtaaatacaacgacttccgcaacgcattccaccgctacaatcttgaaccctagagacacatattgtcgtggggaccagctggatatcctcctcgaggtgcgagaccacctgggacaacgaaaacagtatggcggagattttttaagggcaaggatgtcatctcccgcattgacagccggggcttctggcaaagtgatggacttcaataacggaacttacctggtatccttcactcttttttgggaaggacaggtctccctttcactactgctgattcacccttccgagggagccagcgcactctggcgggcccgaaatcaagggtacgataaaataattttcaaaggaaagtttgtgaatggtacctcccatgtcttcaccgagtgtggactgaccctgaacagcaatgcggagctttgcgagtatttagatgaccgcgatcaagaggccttttattgtatgaaaccccagcacatgccatgtgaggctctgacttatatgacgacccgcaatcgagaagtctcatatctgacagacaaggagaacagcctcttccaccggagcaaagtgggcgtggaaatgatgaaagataggaagcatattgacgttactaactgtaacaagcgagaaaaaattgaggagacatgtcaagtcggaatgaagccccccgtccccggaggctatacgctgcaggggaagtggataacaacattttgtaaccaggtgcagctcgacacaatcaagataaacggatgcctcaagggcaagctcatttatttacttggtgactccacattgagacagtggatctactattttcccaaggttgttaagactctgaagtttttcgacttgcacgagaccggcatattcaagaagcatttactgctggacgccgaaagacacactcagatacaatggaagaagcattcctatccattcgtgacttttcagctgtactcattaatagaccatgattatattccccgagagattgaccgcctttcaggtgacaagaatactgcaatagtgatcacgttcggacagcatttccgtccctttcccattgacatattcattcgccgggccatcggtgttcagaaggcaatagagagactgtttctgagatctcctgcaacgaaggtgatcataaaaactgagaatattagggagatgcacattgagacagaacggtttggcgactttcatggatatattcattacctcataatgaaagacatcttcaaagatctgaatgttggcataatcgacgcctgggatatgacaatagcatatggaacagacacaattcaccctcccgatcacgtgatcggcaaccagattaatatgtttcttaattatatatgctag

SEQ ID NO: 339443 - DNA, 1644 bp, Artificial Sequence
  derived and/or modified sequence
atgagttccaataccatgcttcagaagacacttcttattctgattagtttttccgtggtaacatggatgatctttattatttcccaaaattttacaaaactatggagtgccctgaacctttctatctctgttcattattggaataatagcgcaaaatcccttttccccaagacatccttgatccccttaaagcctctgaccgagacggagctgagaattaaagagattatcgagaaattggaccagcaaatacctccccgcccctttactcacgttaacacaacaaccagtgccacccattccaccgctacaatcttgaaccctagagacacatattgtcgtggggaccagctggatatcctcctcgaggtgcgagaccacctgggacaacgaaaacagtatggcggagattttttaagggcaaggatgtcatctcccgcattgacagccggggcttctggcaaagtgatggacttcaataacggaacttacctggtatccttcactcttttttgggaaggacaggtctccctttcactactgctgattcacccttccgagggagccagcgcactctggcgggcccgaaatcaagggtacgataagattatcttcaaaggcaaatttgtgaacggtaccagccacgtgtttactgagtgtggactaactcttaattcaaatgctgaattatgcgaatatctggatgatagagaccaagaggccttttattgtatgaaaccccagcatatgccatgcgaggcattgacatatatgacgaccagaaatcgcgaagtctcatatcttaccgacaaagaaaactcattattccataggtcaaaggtaggagtcgaaatgatgaaggaccgcaagcatatcgatgtaacaaattgcaataagagagaaaagattgaagagacctgccaggtgggaatgaagccacccgtccccggagggtatacactgcagggtaaatggataactaccttctgtaaccaggtccaactggataccattaaaatcaacggctgcctcaaaggaaaactcatttacctgctaggtgactctacgctccgtcaatggatctactatttcccaaaagttgttaagactctgaaattttttgaccttcatgaaaccggcatttttaagaaacatctgctcctcgacgcagaacgacacacacagattcagtggaaaaaacactcatacccattcgttactttccagctgtattcactcattgatcacgactacattcccagagaaatagatcgactctccggagataaaaataccgccattgtaataaccttcggccagcacttcagaccgtttcctattgacatctttatccgccgcgccatcggcgtccagaaggccattgaacggctgttcttacgcagtcccgccactaaggtgatcatcaaaaccgagaacattagggaaatgcacatagaaacagaacgatttggggacttccacggctatattcattacctgattatgaaagacattttcaaagacctgaacgtggggataattgacgcatgggacatgacaatcgcatacgggactgatactatccatccaccagatcacgtcatcgggaatcagattaacatgtttctaaactacatttgctag

SEQ ID NO: 339444 - DNA, 1888 bp, Artificial Sequence
  derived and/or modified sequence
gccagttaagaactcacaggtacttttccagccacccagataggagagatcattaaaacagtgcattctgtgctacctgacacctattggctttggtctgctctaaacttatccatctctgtccattactggaacaactccgcaaagtccttattccctaaaacatcactgataccattaaagccactaacagagactgaactcagaataaaggaaatcatagagaaactagatcagcagatcccacccagacctttcacccatgtgaacaccaccaccagtgccacacacagcacagccaccatcctcaaccctcgagatacatactgcaggggagaccagctggacatcctactggaggtgagggaccacttgggacagaggaagcaatatggtggggatttcctgagggccaggatgtcctccccagcactgacggcaggtgcttcaggaaaggtgatggacttcaacaatggcacctacctggtcagcttcactctgttctgggagggccaggtctccctgtctctgctgctcatccaccccagtgaaggggcgtcggctctctggagggcaaggaaccaaggctatgataaaattattttcaaaggcaaatttgttaatggcacctctcatgtcttcactgaatgtggcctgaccctaaactcaaatgctgaactctgtgaatatctggatgacagagaccaagaagccttctattgtatgaagcctcaacacatgccctgtgaggctctgacctacatgaccacccggaatagagaggtatcttatcttacagacaaggaaaacagccttttccacaggtccaaagtgggagttgaaatgatgaaggatcgtaaacacattgatgtcactaattgtaacaagagagaaaaaatagaagagacatgccaagttggaatgaagcctcctgtccctggtggttatactttacaaggaaaatggataacaacattttgcaaccaggttcagttagacacaattaagataaatggctgtttgaaaggcaaactcatttacctcctgggagactctacactacgtcagtggatctactacttccccaaagttgtaaaaacactgaagttttttgatcttcatgaaactggaatctttaagaaacatttgcttctggatgcagaaagacacactcagattcaatggaaaaaacatagctatcccttcgtcactttccagctctactctctgatagatcatgattatatccctcgggaaattgaccggctatcaggtgacaaaaacacagccatcgtcatcacctttggccagcactttagaccatttcccattgacatttttattcgcagggccatcggtgttcaaaaggctattgaaagactgttcctaagaagcccagccactaaagtgattattaagacagaaaacatcagggagatgcacatagagacagagaggtttggagacttccatggttatattcactatcttatcatgaaggatattttcaaagacctcaacgtgggcatcattgatgcctgggacatgaccattgcatatggcactgacactatccacccacctgatcatgtgattggaaatcagattaacatgttcttaaactacatttgctaagggataaatactatacaaaatcactaggaaccaatctctgcacataatcccacatgtattgtaaagtaagttttactcattttaggaactaaggaaaataaatttaaaagaatctgtttggggaggaaggctatgtaaggacaatgacaactgataagggatgcaaaaccaagagaatcattcatgaagaatgactataccatgcctggttctgatgctcgtttaaaatattaaaaaagttttttaaaagcca

SEQ ID NO: 339445 - DNA, 1644 bp, Artificial Sequence
  derived and/or modified sequence
atgagcagcaacaccatgctgcagaagaccctgctgatcctgatcagcttcagcgtggtgacctggatgatcttcatcatcagccagaacttcaccaagctgtggagcgccctgaacctgagcatcagcgtgcactactggaacaacagcgccaagagcctgttccccaagaccagcctgatccccctgaagcccctgaccgagaccgagctgagaatcaaggagatcatcgagaagctggaccagcagatcccccccagacccttcacccacgtgaacaccaccaccagcgccacccacagcaccgccaccatcctgaaccccagagacacctactgcagaggcgaccagctggacatcctgctggaggtgagagaccacctgggccagagaaagcagtacggcggcgacttcctgagagccagaatgagcagccccgccctgaccgccggcgccagcggcaaggtgatggacttcaacaacggcacctacctggtgagcttcaccctgttctgggagggccaggtgagcctgagcctgctgctgatccaccccagcgagggcgccagcgccctgtggagagccagaaaccagggctacgacaagatcatcttcaagggcaagttcgtgaacggcaccagccacgtgttcaccgagtgcggcctgaccctgaacagcaacgccgagctgtgcgagtacctggacgacagagaccaggaggccttctactgcatgaagccccagcacatgccctgcgaggccctgacctacatgaccaccagaaacagagaggtgagctacctgaccgacaaggagaacagcctgttccacagaagcaaggtgggcgtggagatgatgaaggacagaaagcacatcgacgtgaccaactgcaacaagagagagaagatcgaggagacctgccaggtgggcatgaagccccccgtgcccggcggctacaccctgcagggcaagtggatcaccaccttctgcaaccaggtgcagctggacaccatcaagatcaacggctgcctgaagggcaagctgatctacctgctgggcgacagcaccctgagacagtggatctactacttccccaaggtggtgaagaccctgaagttcttcgacctgcacgagaccggcatcttcaagaagcacctgctgctggacgccgagagacacacccagatccagtggaagaagcacagctaccccttcgtgaccttccagctgtacagcctgatcgaccacgactacatccccagagagatcgacagactgagcggcgacaagaacaccgccatcgtgatcaccttcggccagcacttcagacccttccccatcgacatcttcatcagaagagccatcggcgtgcagaaggccatcgagagactgttcctgagaagccccgccaccaaggtgatcatcaagaccgagaacatcagagagatgcacatcgagaccgagagattcggcgacttccacggctacatccactacctgatcatgaaggacatcttcaaggacctgaacgtgggcatcatcgacgcctgggacatgaccatcgcctacggcaccgacaccatccacccccccgaccacgtgatcggcaaccagatcaacatgttcctgaactacatctgctag

SEQ ID NO: 339446 - DNA, 1644 bp, Artificial Sequence
  derived and/or modified sequence
atgagcagcaacactatgctgcagaagacactgctgattttgatatcattcagtgtggttacatggatgatttttataatctcacagaattttacaaaactttggagcgctctgaacttgtccatcagtgttcactactggaataactcagcgaagtccttgttcccaaaaacctcccttattcctctcaagcctctgacggaaaccgagttgagaataaaggaaattatcgaaaagctggatcagcagattccaccacgccccttcacacatgttaatacgaccacctcggccacacacagcacggctactatcctgaatcccagagacacctattgtcggggagatcaattagatatactgctagaggttcgcgatcacctgggccagaggaaacagtacgggggtgactttttacgcgccagaatgtcctccccagctctgaccgctggagcctcaggaaaggtcatggacttcaataatgggacgtacctggtctccttcacgttattttgggagggacaggtctcactctccctgctactcattcacccgtccgagggcgcctctgctctttggcgggctagaaaccaggggtacgataagattatctttaaaggcaagttcgtcaacgggacatcccatgtttttacagagtgtggactgactcttaatagcaatgcagagttgtgtgagtatctggatgacagagatcaggaggccttttactgtatgaaaccccagcacatgccatgtgaggctctgacctatatgacaaccaggaatcgcgaagtcagctatctgaccgacaaggagaattccctgttccatagaagtaaagtgggggtcgagatgatgaaagacagaaaacatatagatgtgaccaactgtaataagcgagaaaaaatagaagagacatgtcaggtggggatgaaaccgcccgtcccaggaggctacaccctacagggcaagtggatcaccacattttgtaatcaagtgcaactggatactataaagatcaacggctgcctcaaaggaaaattaatttacctccttggggactcgaccctgagacagtggatttactatttcccaaaagtggtcaagaccctgaagtttttcgatctgcacgaaacaggcatattcaagaaacaccttctgttggacgctgaaagacacacacagattcagtggaaaaaacatagctacccatttgtgaccttccagctttacagcctgatcgaccacgattacattccccgggagatcgaccgactgagtggcgataagaataccgccatagtcatcaccttcggccagcatttccgaccattcccaattgacatctttattcgtcgggctatcggtgtgcagaaggctatcgaacgtcttttcctgaggagccctgccactaaagtgattattaagacggagaacatcagagagatgcacatcgagaccgagaggtttggtgactttcacgggtacatccactacctgatcatgaaagacattttcaaggatttaaatgtgggcattatcgacgcgtgggacatgacaattgcctatggcactgacaccatccaccctccggaccacgtgataggcaatcagatcaacatgtttctgaattacatctgctag

SEQ ID NO: 339447 - DNA, 1644 bp, Artificial Sequence
  derived and/or modified sequence
atgagcagcaacaccatgctgcagaagaccctgctgatcctgatctccttctctgtggtgacctggatgatcttcatcatcagccagaacttcaccaagctgtggagcgccctgaacctgagcatctctgtgcactactggaacaacagcgccaagagcctcttccccaagaccagcctcatccccctgaagcccctgacagaaacagagctgcgcatcaaggagatcatcgagaagctggaccagcagatccccccccggcccttcacccacgtgaacaccaccaccagcgccacccacagcacagccaccatcctgaacccccgggacacctactgccgcggggaccagctggacatcctgctggaggtgcgggaccacctgggccagaggaagcagtatggaggagacttcctgcgggccaggatgagcagccctgccctgacagctggggccagcggcaaggtgatggacttcaacaacggcacctacctggtgtccttcaccctcttctgggagggccaggtgtccctgagcctgctgctgatccaccccagcgagggcgccagcgccctgtggagggccaggaaccagggctatgacaagatcatcttcaagggcaagtttgtgaatggcaccagccacgtgttcacagaatgtggcctgaccctgaacagcaatgctgagctgtgtgagtacctggatgaccgggaccaggaggccttctactgcatgaagccccagcacatgccctgtgaggccctgacctacatgaccaccaggaaccgggaggtgtcctacctgacagacaaggagaacagcctcttccacaggagcaaggtgggcgtggagatgatgaaggacaggaagcacattgatgtgaccaactgcaacaagcgggagaagattgaggagacctgccaggtgggcatgaagccccctgtgcctgggggctacaccctgcagggcaagtggatcaccaccttctgcaaccaggtgcagctggacaccatcaagatcaatggctgcctgaagggcaagctgatctacctgctgggggacagcaccctgcggcagtggatctactacttccccaaggtggtgaagaccctgaagttctttgacctgcatgaaacaggcatcttcaagaagcacctgctgctggatgctgagcggcacacccagatccagtggaagaagcacagctacccctttgtgaccttccagctgtacagcctgattgaccatgactacatcccccgggagattgaccggctgagcggggacaagaacacagccatcgtcatcaccttcggccagcacttccggcccttccccatcgacatcttcatccggcgggccatcggcgtgcagaaggccatcgagcggctcttcctgcggagccctgccaccaaggtgatcatcaagacagagaacatccgggagatgcacattgaaacagaaagatttggagacttccacggctacatccactacctgatcatgaaggacatcttcaaggacctgaatgtgggcatcattgatgcctgggacatgaccatcgcctatggaacagacaccatccaccccccagaccacgtgattggcaaccagatcaacatgttcctgaactacatctgctag

SEQ ID NO: 339448 - DNA, 1644 bp, Artificial Sequence
  derived and/or modified sequence
atgagcagcaacaccatgctgcagaagaccctgctgatcctgatctcttttagcgttgtgacatggatgatttttatcatcagtcagaactttaccaagttgtggagtgctctaaacctgagcatttcagtccattattggaataattctgctaaatctctctttcccaagacctccttaatccccctgaagccactgaccgagacagaactgaggattaaagagatcatcgaaaaacttgatcagcagatccccccaagaccatttactcacgtgaacacgacgacatcagccactcactctacagccactatcctcaacccgcgcgacacttactgcagaggcgaccagctggatatactgctggaggttcgagatcatttgggacaaaggaagcagtacggcggtgatttcctacgggcccgaatgtcctccccagcactcaccgctggcgcctccgggaaagtcatggattttaataacggaacttacctggtgtcattcacactcttctgggaaggacaagtaagcctgagcctgctcttgatacacccaagtgagggagcatctgccctttggcgtgcccgcaatcagggctacgataagatcattttcaaagggaagtttgtgaatgggacctctcatgtatttacggagtgtggcctgaccctcaacagcaatgctgaactttgcgagtatctcgacgatagagatcaggaggccttctactgcatgaaaccacagcacatgccctgcgaagcactgacgtacatgaccacacgaaatcgagaggttagttacctgacagataaagagaactcgctgtttcacaggagcaaggtgggtgtggaaatgatgaaagaccgaaagcacatcgacgtgaccaattgtaacaaacgcgaaaagattgaagaaacatgtcaggtgggtatgaagccacccgttccgggcgggtacaccctccagggaaaatggatcacaaccttctgcaatcaagtgcaattggataccataaaaattaatggctgcctgaaggggaagctcatctaccttctcggtgatagtacacttcggcagtggatttattatttccccaaggtggtcaaaacattgaagttctttgacctgcacgagaccggcatctttaagaaacacctgctcctagacgctgagcgacatactcagatccagtggaaaaaacattcataccctttcgtaaccttccagctgtactctctgattgatcacgactatattccgagagagatagatcgtctgtcgggagacaaaaacactgccatagttatcacttttggccagcactttaggccatttcctatcgatatattcattcggcgcgccataggtgttcagaaagctatcgaacggctatttctgagaagtcctgccacaaaggttattataaagaccgagaatattcgggaaatgcacattgagacggagcgatttggcgattttcatggatacatccattacctgatcatgaaggacatctttaaagacctaaatgtcggtatcatcgacgcatgggacatgaccatcgcatacgggaccgacacgatccatccgccagaccatgtgatcggcaaccagattaatatgtttctcaattacatctgctag

SEQ ID NO: 339449 - RNA, 1644 nt, Artificial Sequence
  derived and/or modified sequence
augaguucaaacacuaugcuccagaagacccuguuaauauuaaucucauuuucaguagugacuuggaugauuuucaucaucucacagaacuuuaccaagcugugguccgcccuaaacuuaucaaucucuguucacuauuggaauaauucagcgaagagucucuucccuaaaacaagccuaaucccccuaaagccguuaacugaaacugagcugcggauuaaggaaauaauugagaagcucgaucagcagaucccuccaagaccauuuacccacguaaauacaacgacuuccgcaacgcauuccaccgcuacaaucuugaacccuagagacacauauugucguggggaccagcuggauauccuccucgaggugcgagaccaccugggacaacgaaaacaguauggcggagauuuuuuaagggcaaggaugucaucucccgcauugacagccggggcuucuggcaaagugauggacuucaauaacggaacuuaccugguauccuucacucuuuuuugggaaggacaggucucccuuucacuacugcugauucacccuuccgagggagccagcgcacucuggcgggcccgaaaucaaggguacgauaaaauaauuuucaaaggaaaguuugugaaugguaccucccaugucuucaccgaguguggacugacccugaacagcaaugcggagcuuugcgaguauuuagaugaccgcgaucaagaggccuuuuauuguaugaaaccccagcacaugccaugugaggcucugacuuauaugacgacccgcaaucgagaagucucauaucugacagacaaggagaacagccucuuccaccggagcaaagugggcguggaaaugaugaaagauaggaagcauauugacguuacuaacuguaacaagcgagaaaaaauugaggagacaugucaagucggaaugaagccccccguccccggaggcuauacgcugcaggggaaguggauaacaacauuuuguaaccaggugcagcucgacacaaucaagauaaacggaugccucaagggcaagcucauuuauuuacuuggugacuccacauugagacaguggaucuacuauuuucccaagguuguuaagacucugaaguuuuucgacuugcacgagaccggcauauucaagaagcauuuacugcuggacgccgaaagacacacucagauacaauggaagaagcauuccuauccauucgugacuuuucagcuguacucauuaauagaccaugauuauauuccccgagagauugaccgccuuucaggugacaagaauacugcaauagugaucacguucggacagcauuuccgucccuuucccauugacauauucauucgccgggccaucgguguucagaaggcaauagagagacuguuucugagaucuccugcaacgaaggugaucauaaaaacugagaauauuagggagaugcacauugagacagaacgguuuggcgacuuucauggauauauucauuaccucauaaugaaagacaucuucaaagaucugaauguuggcauaaucgacgccugggauaugacaauagcauauggaacagacacaauucacccucccgaucacgugaucggcaaccagauuaauauguuucuuaauuauauaugcuag

SEQ ID NO: 339450 - RNA, 1644 nt, Artificial Sequence
  derived and/or modified sequence
augaguuccaauaccaugcuucagaagacacuucuuauucugauuaguuuuuccgugguaacauggaugaucuuuauuauuucccaaaauuuuacaaaacuauggagugcccugaaccuuucuaucucuguucauuauuggaauaauagcgcaaaaucccuuuuccccaagacauccuugauccccuuaaagccucugaccgagacggagcugagaauuaaagagauuaucgagaaauuggaccagcaaauaccuccccgccccuuuacucacguuaacacaacaaccagugccacccauuccaccgcuacaaucuugaacccuagagacacauauugucguggggaccagcuggauauccuccucgaggugcgagaccaccugggacaacgaaaacaguauggcggagauuuuuuaagggcaaggaugucaucucccgcauugacagccggggcuucuggcaaagugauggacuucaauaacggaacuuaccugguauccuucacucuuuuuugggaaggacaggucucccuuucacuacugcugauucacccuuccgagggagccagcgcacucuggcgggcccgaaaucaaggguacgauaagauuaucuucaaaggcaaauuugugaacgguaccagccacguguuuacugaguguggacuaacucuuaauucaaaugcugaauuaugcgaauaucuggaugauagagaccaagaggccuuuuauuguaugaaaccccagcauaugccaugcgaggcauugacauauaugacgaccagaaaucgcgaagucucauaucuuaccgacaaagaaaacucauuauuccauaggucaaagguaggagucgaaaugaugaaggaccgcaagcauaucgauguaacaaauugcaauaagagagaaaagauugaagagaccugccaggugggaaugaagccacccguccccggaggguauacacugcaggguaaauggauaacuaccuucuguaaccagguccaacuggauaccauuaaaaucaacggcugccucaaaggaaaacucauuuaccugcuaggugacucuacgcuccgucaauggaucuacuauuucccaaaaguuguuaagacucugaaauuuuuugaccuucaugaaaccggcauuuuuaagaaacaucugcuccucgacgcagaacgacacacacagauucaguggaaaaaacacucauacccauucguuacuuuccagcuguauucacucauugaucacgacuacauucccagagaaauagaucgacucuccggagauaaaaauaccgccauuguaauaaccuucggccagcacuucagaccguuuccuauugacaucuuuauccgccgcgccaucggcguccagaaggccauugaacggcuguucuuacgcagucccgccacuaaggugaucaucaaaaccgagaacauuagggaaaugcacauagaaacagaacgauuuggggacuuccacggcuauauucauuaccugauuaugaaagacauuuucaaagaccugaacguggggauaauugacgcaugggacaugacaaucgcauacgggacugauacuauccauccaccagaucacgucaucgggaaucagauuaacauguuucuaaacuacauuugcuag

SEQ ID NO: 339451 - protein, 155 aa, Artificial Sequence
  derived and/or modified sequence
MFCPLKLILLPVLLDYSLGLNDLNVSPPELTVHVGDSALMGCVFQSTEDKCIFKIDWTLSPGEHAKDEYVLYYYSNLSVPIGRFQNRVHLMGDILCNDGSLLLQDVQEADQGTYICEIRLKGESQVFKKAVVLHVLPEEPKELMVHVGGLIQMGC

SEQ ID NO: 339452 - DNA, 468 bp, Artificial Sequence
  derived and/or modified sequence
atgttttgtccccttaaactgatccttctgcctgtgctcctcgactacagcctcggtctgaacgatctgaacgtgtcacctccagaactaacggttcacgtcggagattcagcattgatggggtgtgtcttccaatccacggaggataaatgtattttcaagatcgattggactttgtcccctggcgagcatgcaaaggacgaatacgtcctctactattattctaatttatctgtccctatcggaagattccagaaccgcgttcacctgatgggggatatcctgtgcaatgacgggtcccttcttctacaggacgttcaggaagccgaccagggaacttacatatgcgagattagattaaaaggcgagtctcaggtgtttaagaaggccgtggtactgcatgtgctgcctgaggaaccaaaagagctgatggtgcacgtgggggggctgattcagatgggatgttag

SEQ ID NO: 339453 - DNA, 663 bp, Artificial Sequence
  derived and/or modified sequence
atgggctgcgtattccagtccacagaagataagtgtattttcaagatcgactggaccctgagtcctggggagcatgccaaagatgaatacgtgctctattattactcaaatttgagtgttcctattggcagatttcagaaccgtgtgcacctcatgggtgatatactgtgtaatgatggctctttactcctgcaagacgttcaagaggcggatcaaggaacatacatctgcgagatcagactgaagggcgagtcccaggtttttaaaaaggcggtagtcctgcacgtgctgcctgaggagccgaaagagctcatggtccacgtgggcgggctgatacaaatgggctgtgtttttcagagtaccgaagtgaagcatgtcacaaaagtagagtggattttctccggccggagagctaaggaggaaattgtctttagatactatcacaaactacggatgtcggtggaatattcacagtcgtgggggcacttccagaacagggtcaatttggttggcgatatcttcaggaatgatggatcaattatgctgcaaggtgttcgcgagtccgatggcggcaactacacctgcagtatccacctaggtaacttagtcttcaaaaaaactatcgtccttcacgtgagccctgaggagcctaggaagtggtag

SEQ ID NO: 339454 - DNA, 574 bp, Artificial Sequence
  derived and/or modified sequence
gtagacctaaaaacatctgagagcctagaagtgcacagcagtgtgcagatagattgagaggacttggctctgcaggtggacaacactctatttgaaagttgagagcagcatgttttgcccactgaaactcatcctgctgccagtgttactggattattccttgggcctgaatgacttgaatgtttccccgcctgagctaacagtccatgtgggtgattcagctctgatgggatgtgttttccagagcacagaagacaaatgtatattcaagatagactggactctgtcaccaggagagcacgccaaggacgaatatgtgctatactattactccaatctcagtgtgcctattgggcgcttccagaaccgcgtacacttgatgggggacatcttatgcaatgatggctctctcctgctccaagatgtgcaagaggctgaccagggaacctatatctgtgaaatccgcctcaaaggggagagccaggtgttcaagaaggcggtggtactgcatgtgcttccagaggagcccaaagagctcatggtccatgtgggtggattgattcagatgggatgt

SEQ ID NO: 339455 - DNA, 951 bp, Artificial Sequence
  derived and/or modified sequence
ctgtttgcatctctgcaaccacttcagaaggcacgtgtttggtttgctctgagcctaacctagagtgctcgcagcagtctttcagttgagcttggggactgcagctgtggggagatttcagtgcattgcctcccctgggtgctcttcatcttggatttgaaagttgagagcagcatgttttgcccactgaaactcatcctgctgccagtgttactggattattccttgggcctgaatgacttgaatgtttccccgcctgagctaacagtccatgtgggtgattcagctctgatgggatgtgttttccagagcacagaagacaaatgtatattcaagatagactggactctgtcaccaggagagcacgccaaggacgaatatgtgctatactattactccaatctcagtgtgcctattgggcgcttccagaaccgcgtacacttgatgggggacatcttatgcaatgatggctctctcctgctccaagatgtgcaagaggctgaccagggaacctatatctgtgaaatccgcctcaaaggggagagccaggtgttcaagaaggcggtggtactgcatgtgcttccagaggagcccaaagagctcatggtccatgtgggtggattgattcagatgggatgtgttttccagagcacagaagtgaaacacgtgaccaaggtagaatggatattttcaggacggcgcgcaaaggaggagattgtatttcgttactaccacaaactcaggatgtctgtggagtactcccagagctggggccacttccagaatcgtgtgaacctggtgggggacattttccgcaatgacggttccatcatgcttcaaggagtgagggagtcagatggaggaaactacacctgcagtatccacctagggaacctggtgttcaagaaaaccattgtgctgcatgtcagcccggaagagcctcgaaagtgg

SEQ ID NO: 339456 - DNA, 468 bp, Artificial Sequence
  derived and/or modified sequence
atgttctgccccctgaagctgatcctgctgcctgtgctgctggactacagcctgggcctgaatgacctgaatgtgtccccacctgagctgactgtgcacgtgggggacagcgccctgatgggctgtgtgttccagagcacagaggacaagtgcatcttcaagattgactggaccctgagccctggagagcacgccaaggatgaatatgtgctgtactactacagcaacctgtctgtgcccatcggccgcttccagaacagagtgcacctgatgggagacatcctgtgcaatgatggcagcctgctgctgcaggatgtgcaggaggccgaccagggcacctacatctgtgagatccggctgaagggggagagccaggtgttcaagaaggctgtggtgctgcacgtgctgcctgaggagcccaaggagctgatggtgcacgtgggcggcctcatccagatgggctgctag

SEQ ID NO: 339457 - DNA, 663 bp, Artificial Sequence
  derived and/or modified sequence
atgggctgtgtgttccagagcacagaggacaagtgcatcttcaagattgactggaccctgagccctggagaacatgccaaggatgaatatgtgctgtactactacagcaacctgtctgtgcccatcggccgcttccagaacagagtgcacctgatgggagacatcctgtgcaatgatggcagcctgctgctgcaggatgtgcaggaggccgaccagggcacctacatctgtgagatccggctgaagggggagagccaggtgttcaagaaggctgtggtgctgcacgtgctgcctgaggagcccaaggagctgatggtgcacgtgggcggcctcatccagatgggctgtgtgttccagagcacagaggtgaagcacgtgaccaaggtggagtggatcttcagcggccggcgggccaaggaggagatcgtgttccgctactaccacaagctgaggatgtctgtggagtacagccagagctggggccacttccagaacagagtgaacctggtgggggacatcttcagaaatgatggcagcatcatgctgcagggcgtgcgggagagtgatggcggcaactacacctgcagcatccacctgggcaacctggtgttcaagaagaccatcgtgctgcacgtgtccccagaggagcccaggaagtggtag

SEQ ID NO: 339458 - DNA, 468 bp, Artificial Sequence
  derived and/or modified sequence
atgttctgccccctgaagctgatcctgctgcccgtgctgctggactactctttagggctgaatgatctgaacgtgtcccctcctgagctgactgtgcacgtgggcgactctgccttaatgggatgcgttttccaatccaccgaggacaaatgtatcttcaagattgactggactctgtctcctggtgaacacgccaaagacgaatatgtcctgtattactattcaaatctgagcgtgcctatcggccgctttcagaatcgtgtacaccttatgggagacattctgtgcaacgatgggagtctcctcctgcaggatgtgcaggaggctgaccaaggcacttacatctgcgagatccggctgaagggcgagagccaggtctttaaaaaagctgttgtcctgcacgtcctgcctgaagagccgaaagaactgatggtccatgttggtggactgatccagatgggctgttag

SEQ ID NO: 339459 - DNA, 663 bp, Artificial Sequence
  derived and/or modified sequence
atgggctgcgtgttccagagcaccgaggacaagtgcatcttcaagatagactggactttgtctccaggcgagcatgcgaaggacgagtatgtcctttattattactcaaatctatctgtgcctatcggacggtttcagaacagagtacatctaatgggagacattctgtgcaacgacgggtctctcctactccaagacgtgcaggaggccgatcaggggacatacatatgcgagatcaggctgaagggggagtcacaggtgttcaagaaggcagtggtattgcacgttctcccagaggagcctaaggagttaatggtacacgtgggcggcctgatccagatgggatgcgtctttcagagcaccgaggttaagcacgtgacgaaagttgaatggatcttttctgggagaagggccaaagaagaaattgtattcaggtattatcacaagctcaggatgtcagtggaatactcccaatcctggggccactttcagaaccgcgtcaatcttgtgggtgacatctttcgcaacgacgggtccatcatgcttcagggggttcgagaaagcgacggtggaaactacacgtgctccattcatttaggaaacctggtattcaaaaaaacaatcgtattgcatgtgtcacccgaagagcctaggaaatggtag

SEQ ID NO: 339460 - DNA, 468 bp, Artificial Sequence
  derived and/or modified sequence
atgttctgccctctgaagttaatattacttcctgtgcttctcgactatagtttaggtctgaacgatcttaatgtctcaccccctgagcttaccgtgcatgtgggggactctgcccttatgggttgcgtgttccagagtaccgaggacaaatgcattttcaagatcgattggacactgtcgcccggtgaacacgctaaggatgagtacgtgctctactactattcaaacctttccgtcccgatcggcaggttccagaatcgtgtgcacctcatgggcgacatcctctgcaatgatggctctcttttgttgcaggatgtccaggaggccgatcagggcacctacatctgcgagattagactcaagggcgagtcacaggtcttcaaaaaagccgtggtactgcacgtcctcccggaggagccaaaagaacttatggtgcacgtgggaggcctgattcagatgggctgctag

SEQ ID NO: 339461 - DNA, 663 bp, Artificial Sequence
  derived and/or modified sequence
atggggtgtgtgttccagtctactgaagacaagtgcatctttaagatcgactggacattatcaccaggcgagcacgccaaggatgagtatgtcctgtattattactcgaatctcagtgtgccaatcgggcgattccagaatcgtgtccacctgatgggagatatcctttgcaatgacggaagcctattgctgcaggacgtgcaggaggctgatcagggaacttacatctgcgagataaggttgaagggcgagagccaggttttcaagaaggcagtggtgctccatgtgctgcccgaagagccaaaagagctgatggtgcatgtcggcggactgattcagatggggtgtgtcttccagtcgacagaagtcaagcacgttactaaggttgagtggatatttagcggcaggagagcaaaggaggagattgtgttccgctactaccacaaactccgaatgtccgtggaatactcacaaagctggggccacttccagaatagggttaatctagttggagacatctttagaaacgacggttcaatcatgctgcagggcgtaagagagtcagacggaggcaactacacatgcagcattcacttaggtaatcttgtcttcaagaagactattgtgctgcacgttagcccagaagagcctagaaaatggtag

SEQ ID NO: 339462 - DNA, 468 bp, Artificial Sequence
  derived and/or modified sequence
atgttctgccccctgaagctgatcctgctgcccgtgctgctggactacagcctgggcctgaacgacctgaacgtgagcccccccgagctgaccgtgcacgtgggcgacagcgccctgatgggctgcgtgttccagagcaccgaggacaagtgcatcttcaagatcgactggaccctgagccccggcgagcacgccaaggacgagtacgtgctgtactactacagcaacctgagcgtgcccatcggcagattccagaacagagtgcacctgatgggcgacatcctgtgcaacgacggcagcctgctgctgcaggacgtgcaggaggccgaccagggcacctacatctgcgagatcagactgaagggcgagagccaggtgttcaagaaggccgtggtgctgcacgtgctgcccgaggagcccaaggagctgatggtgcacgtgggcggcctgatccagatgggctgctag

SEQ ID NO: 339463 - DNA, 663 bp, Artificial Sequence
  derived and/or modified sequence
atgggctgcgtgttccagagcaccgaggacaagtgcatcttcaagatcgactggaccctgagccccggcgagcacgccaaggacgagtacgtgctgtactactacagcaacctgagcgtgcccatcggcagattccagaacagagtgcacctgatgggcgacatcctgtgcaacgacggcagcctgctgctgcaggacgtgcaggaggccgaccagggcacctacatctgcgagatcagactgaagggcgagagccaggtgttcaagaaggccgtggtgctgcacgtgctgcccgaggagcccaaggagctgatggtgcacgtgggcggcctgatccagatgggctgcgtgttccagagcaccgaggtgaagcacgtgaccaaggtggagtggatcttcagcggcagaagagccaaggaggagatcgtgttcagatactaccacaagctgagaatgagcgtggagtacagccagagctggggccacttccagaacagagtgaacctggtgggcgacatcttcagaaacgacggcagcatcatgctgcagggcgtgagagagagcgacggcggcaactacacctgcagcatccacctgggcaacctggtgttcaagaagaccatcgtgctgcacgtgagccccgaggagcccagaaagtggtag

SEQ ID NO: 339464 - protein, 329 aa, Artificial Sequence
  derived and/or modified sequence
MENQAHNTMGTSPCEAELQELMEQIDIMVSNKKMDWERKMRALETRLDLRDQELANAQTCLDQKGQEVGLLRQKLDSLEKCNLAMTQNYEGQLQSLKAQFSKLTNNFEKLRLHQMKQNKVPRKELPHLKEEIPFELSNLNQKLEEFRAKSREWDKQEILYQTHLISLDAQQKLLSEKCNQFQKQAQSYQTQLNGKKQCLEDSSSEIPRLICDPDPNCEINERDEFIIEKLKSAVNEIALSRNKLQDENQKLLQELKMYQRQCQAMEAGLSEVKSELQSRDDLLRIIEMERLQLHRELLKIGECQNAQGNKTRLESSYLPSIKEPERKIK

SEQ ID NO: 339465 - DNA, 990 bp, Artificial Sequence
  derived and/or modified sequence
atggagaaccaggcccacaacaccatgggcaccagcccctgcgaggccgagctgcaggagctgatggagcagatcgacatcatggtgagcaacaagaagatggactgggagagaaagatgagagccctggagaccagactggacctgagagaccaggagctggccaacgcccagacctgcctggaccagaagggccaggaggtgggcctgctgagacagaagctggacagcctggagaagtgcaacctggccatgacccagaactacgagggccagctgcagagcctgaaggcccagttcagcaagctgaccaacaacttcgagaagctgagactgcaccagatgaagcagaacaaggtgcccagaaaggagctgccccacctgaaggaggagatccccttcgagctgagcaacctgaaccagaagctggaggagttcagagccaagagcagagagtgggacaagcaggagatcctgtaccagacccacctgatcagcctggacgcccagcagaagctgctgagcgagaagtgcaaccagttccagaagcaggcccagagctaccagacccagctgaacggcaagaagcagtgcctggaggacagcagcagcgagatccccagactgatctgcgaccccgaccccaactgcgagatcaacgagagagacgagttcatcatcgagaagctgaagagcgccgtgaacgagatcgccctgagcagaaacaagctgcaggacgagaaccagaagctgctgcaggagctgaagatgtaccagagacagtgccaggccatggaggccggcctgagcgaggtgaagagcgagctgcagagcagagacgacctgctgagaatcatcgagatggagagactgcagctgcacagagagctgctgaagatcggcgagtgccagaacgcccagggcaacaagaccagactggagagcagctacctgcccagcatcaaggagcccgagagaaagatcaagtag

SEQ ID NO: 339466 - DNA, 1031 bp, Artificial Sequence
  derived and/or modified sequence
attaaaaatcaagaaatataaaccagatgtagcagtttcttgacatggagaaccaagcccataatacgatgggaacttctccttgtgaggctgagcttcaggaattaatggaacaaattgacatcatggtaagcaacaagaaaatggattgggaaagaaagatgcgggctttggagacacgattagatcttcgggatcaagaattggcaaatgcacaaacttgtttggatcagaaaggtcaagaggtagggttacttcgacagaaattggacagtctggaaaaatgtaatttagcaatgactcagaattatgaaggacaactacaaagcctaaaggctcaattttccaaactaacaaataactttgaaaaactgagattacatcagatgaaacaaaacaaagttccacgaaaagaattaccacaccttaaagaagaaataccctttgaactgagcaatttgaaccagaaattagaggaatttagagcaaagtcaagagaatgggacaagcaagagatattatatcagactcatctgatttctttagatgctcaacaaaaattattatctgagaagtgtaatcagtttcagaaacaggcacaaagttaccaaactcaactaaatggtaaaaaacagtgcttagaagacagcagctctgaaattcctcgtttgatatgtgacccagatcccaattgtgaaatcaatgaaagagatgagttcattattgaaaaactgaaatcagctgtaaatgagatagcactaagcaggaataaattacaagatgaaaatcagaagctcttgcaagaactgaaaatgtaccaaagacagtgccaggccatggaagcaggtctctcagaggtaaaaagtgagttacagtcacgtgatgatctcttgagaattatagaaatggaacgattgcaattacacagagaattattaaaaataggagagtgccaaaatgctcaaggaaataaaacaagacttgaatcatcttatttgccttctattaaagaaccagaaaggaaaataaaa

SEQ ID NO: 339467 - DNA, 990 bp, Artificial Sequence
  derived and/or modified sequence
atggagaatcaggcccacaatacaatgggaacatccccctgcgaagccgagttacaggagctgatggaacaaatcgacataatggtatccaataaaaagatggactgggagaggaagatgagagccttggagacaagactagatttaagagaccaggagctggccaacgctcagacctgtctggaccagaaaggacaggaggtgggactgctccggcagaaactggattcccttgagaagtgtaacctcgccatgactcagaactacgagggacagcttcaatccttgaaggcccagttttctaagctgacaaataactttgagaaactgcggctgcatcagatgaaacagaataaggtaccgagaaaggagctgccgcatcttaaagaggagattccctttgaactcagcaatctcaaccagaaactggaggagttccgggctaagagccgcgagtgggataaacaagagattctatatcagactcacctgatcagtctggatgctcaacaaaagctgctgtctgaaaagtgcaaccagttccagaaacaagctcaaagttatcagacacagttgaatggcaagaaacagtgtctggaagactcttctagtgagattcctaggctcatatgcgaccccgacccaaattgcgagatcaacgagagggacgaattcatcatcgaaaaactgaaatcagctgtgaatgagattgctctctctcgcaataagctgcaggacgagaatcagaaactcctccaggagctgaaaatgtaccagcggcagtgtcaggctatggaagctgggttgtcggaagttaagtcagagctccaaagccgcgacgacctcctgcgcattattgagatggaaagactgcagctgcaccgcgagttgcttaagatcggcgaatgtcagaacgcacaaggcaacaagactcgattagagtccagctatttgccatccatcaaggaacccgagcgtaaaataaaatag

SEQ ID NO: 339468 - DNA, 990 bp, Artificial Sequence
  derived and/or modified sequence
atggagaaccaggcccacaacaccatgggcaccagcccctgtgaggccgagctgcaggagctgatggagcagattgacatcatggtgagcaacaagaagatggactgggagaggaagatgagggccctggagacccggctggacctgcgggaccaggagctggccaatgcccagacctgcctggaccagaagggccaggaggtgggcctgctgcggcagaagctggacagcctggagaagtgcaacctggccatgacccagaactatgagggccagctgcagagcctgaaggcccagttcagcaagctgaccaacaactttgagaagctgcggctgcaccagatgaagcagaacaaggtgcccaggaaggagctgccccacctgaaggaggagatcccctttgagctgagcaacctgaaccagaagctggaggagttccgggccaagagccgggagtgggacaagcaggagatcctgtaccagacccacctgatcagcctggatgcccagcagaagctgctgtctgagaagtgcaaccagttccagaagcaggcccagagctaccagacccagctgaatggcaagaagcagtgcctggaggacagcagcagcgagatccccaggctcatctgtgaccctgaccccaactgtgagatcaatgaaagagatgagttcatcatcgagaagctgaagtctgctgtgaatgaaattgccctgagcaggaacaagctgcaggatgagaaccagaagctgctgcaggagctgaagatgtaccagaggcagtgccaggccatggaggccggcctgtctgaggtgaagtctgagctgcagagcagagatgacctgctgcgcatcatcgagatggagcggctgcagctgcaccgggagctgctgaagatcggggagtgccagaatgcccagggcaacaagacccggctggagagcagctacctgcccagcatcaaggagcctgagaggaagatcaagtag

SEQ ID NO: 339469 - DNA, 990 bp, Artificial Sequence
  derived and/or modified sequence
atggagaaccaggcccacaacaccatgggcaccagcccctgcgaggctgagctccaagaacttatggaacagatcgatatcatggtgagcaataaaaaaatggattgggaacgcaagatgcgcgcactagaaactcggctcgatctccgagaccaagagctggccaacgcgcaaacttgtttagaccagaagggccaggaagtcgggctgttgaggcagaagctggatagtctggagaagtgtaaccttgcaatgacacagaattatgaaggccagctgcagtcactcaaggctcagttcagtaagcttaccaataattttgagaagttgcgtctgcaccagatgaaacagaacaaagtcccaagaaaagagcttcctcacttgaaggaggagatcccatttgaactgtcgaatcttaaccagaagttggaggagtttcgtgcaaagagccgggaatgggataagcaggaaatactgtaccagactcatttgatttccctggacgctcagcaaaaactactgagtgaaaaatgcaaccagttccagaagcaagcccagtcttatcagacccagttaaacggcaaaaagcagtgtttggaggactcttccagcgaaattccacgactgatctgtgacccagatcctaattgcgagataaatgagcgggatgagtttattattgagaaactaaagtccgccgtgaacgagatcgcattaagccggaacaagctgcaagatgagaaccagaaactgctgcaggaacttaagatgtaccagcgtcagtgtcaggccatggaggcaggcctttctgaagtgaagtctgagctgcagtctcgggacgatctactcagaatcatcgagatggagcggctgcagcttcacagagagctgctgaagataggtgagtgccaaaatgcccagggaaacaaaactaggctggagtcctcttatctgccaagcatcaaagaacccgagcgaaaaatcaaatag

SEQ ID NO: 339470 - DNA, 990 bp, Artificial Sequence
  derived and/or modified sequence
atggagaatcaggcacataacactatggggacctccccctgtgaagcagaactgcaagaactcatggagcagattgatatcatggtctctaacaagaaaatggattgggagaggaagatgcgggctctcgaaacccgacttgatcttagggaccaggagctggctaacgcccagacttgtctggatcagaaggggcaagaagttggcctcctacgccagaaacttgatagcttggagaagtgtaacttggctatgactcagaactacgagggacagctgcagagtctcaaggctcaattctcaaaattaacgaataatttcgagaaactccggttacaccagatgaagcaaaacaaagtcccaaggaaggagctgcctcatttgaaagaagaaatcccattcgagctctctaacctgaaccagaagctcgaagagttccgggctaaatcccgcgaatgggataagcaggagatactgtaccagactcaccttatctcgttggatgcccagcagaagctcctctctgagaagtgcaaccagttccaaaagcaggcacagagttaccagactcagctgaatggaaagaaacaatgcttagaagactcctcatctgaaattcctcgccttatctgcgaccccgaccccaattgtgaaattaatgagcgggacgagttcatcatcgagaagctcaaatctgcagttaatgaaattgcattaagtcgcaacaaactgcaagacgagaatcagaagttactacaggaacttaagatgtaccaacggcagtgtcaggcgatggaagccggactcagcgaggtaaaatcagaattacaatcccgtgatgacttacttcgtatcatcgagatggagaggctacagttgcatagagagttacttaaaatcggggaatgtcagaacgcccagggaaataagacacgactggagagctcttatctgccctccataaaagagcccgagcgcaagattaaatag

SEQ ID NO: 339471 - DNA, 564 bp, Artificial Sequence
  derived and/or modified sequence
atgagtacagctcgtactgagaacccagttatcatgggccttagtagccagaacggccagcttcgagggcccgtgaagcctaccgggggcccaggaggaggaggtacgcagacacagcagcagatgaaccagctcaaaaatactaacactattaacaatggcacccagcaacaggcacaatcgatgaccacaactatcaagccaggcgacgattggaagaaaacccttaaactcccccccaaagacctgcgcattaagacatcagatgtcaccagcaccaaaggcaacgagttcgaagattactgtcttaaacgagagttattaatgggcatattcgagatgggatgggagaaaccctcccctattcaggaggagtcaatccctattgccttgtctggtcgcgacatcctggcccgagcaaaaaacggcaccggaaaaagcggggcctatctgatcccactactggagcggctagacttaaagaaggataatatccaagccatggttatagtgcctaccagggagttagcactccaggtctctcagatctgcactgtgtgttag

SEQ ID NO: 339472 - DNA, 564 bp, Artificial Sequence
  derived and/or modified sequence
atgagcacagccaggacagaaaatcctgtgatcatgggcctgagcagccagaatggccagctgcggggccctgtgaagcccaccggcggccctgggggcggcggcacccagacccagcagcagatgaaccagctgaagaacaccaacaccatcaacaacggcacccagcagcaggcccagagcatgaccaccaccatcaagccaggagatgactggaagaagaccctgaagctgccccccaaggacctgcgcatcaagaccagtgatgtgaccagcaccaagggaaatgaatttgaggactactgcctgaagcgggagctgctgatgggcatctttgagatgggctgggagaagcccagccccatccaggaggagagcatccccatcgccctgagcggccgggacatcctggcccgggccaagaatggcaccgggaagagcggggcctacctgatccccctgctggagcggctggacctgaagaaggacaacatccaggccatggtgattgtgcccacccgggagctggccctgcaggtgtcccagatctgcaccgtgtgctag

SEQ ID NO: 339473 - DNA, 564 bp, Artificial Sequence
  derived and/or modified sequence
atgagcaccgcccggaccgagaaccccgtgatcatgggcctgagctctcagaatggtcagctgcgggggccagtgaagcctacaggaggacccggcggtggcggtacgcaaacacaacagcagatgaaccagcttaagaacactaataccattaacaatgggactcagcaacaggcccagtccatgactactacaatcaagcccggtgacgattggaagaagacactcaagctgccccccaaagacctcaggatcaaaaccagcgacgtaacaagcactaagggcaacgaatttgaggactattgcctcaagagggagctcctgatgggtatattcgagatgggttgggagaaacccagcccgatccaggaggagtccataccaatcgccctctccgggcgggacatattagcaagggccaaaaacgggactggcaaatctggcgcctatttaatacctctcctagagagactcgacttgaaaaaagataacattcaggccatggtcatcgtgcccacaagagagctggctttgcaagtgtctcagatatgtaccgtgtgttag

SEQ ID NO: 339474 - DNA, 564 bp, Artificial Sequence
  derived and/or modified sequence
atgtctaccgccaggacggaaaaccccgtgattatggggctctcctcccagaatggtcaacttcgcggacctgttaagccgaccggagggccaggcggtggtggaacccaaacacagcagcagatgaatcagcttaagaacaccaatacgattaataatgggacccaacagcaggcacagagcatgacaaccacaattaaaccaggcgacgactggaagaaaactctgaagctcccacccaaagacctgcgaatcaagacatcggatgtcacgtccacaaaaggaaatgagtttgaggactactgcctgaaacgggagctgctcatgggaattttcgagatgggctgggaaaagccttcccctatccaggaggagtcaatacctatcgctctatccggacgcgatatcttggcgagagccaaaaatggcaccggtaaaagtggcgcttacctcattcctctccttgaacgcctagacctgaaaaaggacaacattcaggccatggttatcgtgcccactcgtgaactggccctccaagtgtcccagatttgtaccgtctgttag

SEQ ID NO: 339475 - DNA, 564 bp, Artificial Sequence
  derived and/or modified sequence
atgagcaccgccagaaccgagaaccccgtgatcatgggcctgagcagccagaacggccagctgagaggccccgtgaagcccaccggcggccccggcggcggcggcacccagacccagcagcagatgaaccagctgaagaacaccaacaccatcaacaacggcacccagcagcaggcccagagcatgaccaccaccatcaagcccggcgacgactggaagaagaccctgaagctgccccccaaggacctgagaatcaagaccagcgacgtgaccagcaccaagggcaacgagttcgaggactactgcctgaagagagagctgctgatgggcatcttcgagatgggctgggagaagcccagccccatccaggaggagagcatccccatcgccctgagcggcagagacatcctggccagagccaagaacggcaccggcaagagcggcgcctacctgatccccctgctggagagactggacctgaagaaggacaacatccaggccatggtgatcgtgcccaccagagagctggccctgcaggtgagccagatctgcaccgtgtgctag

SEQ ID NO: 339476 - DNA, 2883 bp, Artificial Sequence
  derived and/or modified sequence
tcagccaggcggcgacttcggcggcgccacgagagcgggcagcggaggagattgacgtgagtgaattcagatataactcaagcttgttagagggctttttaaaaataaaaagttgattccgtgcaagagagcaagttactgctgcttaccgttcagagacttacaggtgcttgcctgcattgcaataaaggactcatttattgagcaagacttatatttatctcttcattttggagagcctaataaactgttattacagtttctctactgactttcaaaagttttgaagtttgaaagacctttgcaattaaaacagcatgagcacggccagaacagagaaccctgttataatgggtctgtccagtcaaaatggtcagctgagaggccctgtgaaacccactggtggccctggaggagggggcacacagacacagcaacagatgaaccagctgaaaaacaccaacacaatcaataatggcactcagcagcaagcacagagtatgaccaccactattaaacctggtgatgactggaaaaagactttaaaactccctccaaaggatctaagaatcaaaacttcggatgtgacctccacaaaaggaaatgagtttgaagattactgtttgaaacgggagttactgatgggaatttttgaaatgggctgggaaaagccatctcctattcaggaggagagcattcccattgctttatctggtagggatatcttagctagagcaaaaaatggaacaggcaagagcggtgcctacctcattcccttacttgaacggctagacctgaagaaggacaatatacaagcaatggtgattgttcccactagagaacttgctctacaggtcagtcaaatttgcactgtgtgctgactgaacattagttgcactaactgctggtttttaaaaaatgttttctggggaaaggggacaaggaaggaaaagaaagaagagaaggggagaaaccctaaaaagagaagaatcttaatgaacacacaagcttgtcaatgatttcaaaattctccaacagctgactctcgtgcatttcaacttctccctgattcctcatccgttttttaagcctgaagagcttattacttatttgtgcgaagtgccttatgctatgagaccattcagaatatcatcttttagacacagcccgaggaatcaacaatagtaactctttctttccgtttttttttctttttcttttaaaaaatgtcttcttattttggtttcaggttgaagtctcttccctttctacccagtactcgagcccagggctagaagttgaaactcactagtaatgttaaacaccattttttttttctttttggggaggagttgatatgcaactgcagttcatccgcactgtaaatacatgtatttaaaaaaacaatcccaagtaaaaatttcttctgggctgagtagataaaaaacatcatcgctcccaaaggaaagagcagtctatcattgcaggagccatatgacaagcctttgtgctctatagcagacactaaagactgggttacatatgcctccagtagtagtatggcacttgatgtgtagacatgtcagagcttggccctctttcctctgtggcaaagcgtgtcccatagaaaattgggtgtgtatacttgtataactttgtaaataagttttttttctgggttcatatatatatatatatatacatatatatatatttttttttggatgaaggttgctgggattaaggggattagagtgattatgggagcagctaaagatgagaggggctcagttttacgcaacactaaattctagaaagtactttggcctcgtgctgtagagagcagatttctatggtaccctgtgttagtaaaggggcccagaaatctgggatgtactgtttgctgccacactgtctcatctagtacctttggagtaggtttaccagagagagcaaggaagcttcaaaacattgataattcaacatttattttgagaagctctgattttgcttcttccccctttctaaaagtttgaggaatatttcaagctctgcaacagggggcaaagattaatctaccttgcagtgtaggaattctattgagtggcagtgtcattgagcagtatatatataaagcacagatttgcatttcagaatattagccagtaccagctttggtaatgttagcagttctggagcttaattttctgtggatcatttcctgtagtgtgtaaatgtgttgccctctgcccgctttgatacataaacttttgcaggaatgggcaacctgagagctgttaactttcatgctacagaaagctgcttgccattctcttgcattgtgacaagaattgttacctgtcattttgcactgtaaattgctggcagatgctttacagtcaatagtgttgctttaaattgtgcccctcccaacatgcttgatgtttggcctgatctccaggcaaaaggagtgagatgaatcaaaaccagtgaacttttttttttaatgtttttaattcccttttaacccagtgtactaggtcaatcaggaggcatctggaaagggggggaaaaaagcaaaaaacaaaattaaaaaaaattgatttccatattttatttttcaaaaccctaaaatattacaaaataagtcccgcatatactttaatgttttaactcttttggacaaaggaatcaattacttgaagttgcttttttgactctgcctacttctgagcaaactatttgcgactcacccacaattgccttggagatcaaaatcctacagatgcctcctgatgggacatagccctaactccttaacaactgtagcaagaactgcacggtacaaacccaaaaaagaacaagctcatctatttggaaccc

SEQ ID NO: 339477 - DNA, 678 bp, Artificial Sequence
  derived and/or modified sequence
atgtggcgcgtgtgcgcaaggagagcgcagaacgtcgccccttgggcaggtcttgaagcaaggtggactgctctgcaagaggtccccggaactccccgagtcactagtagaagcgggccagcccctgcaaggcgcaacagcgttaccaccgggtacggcggagtcagggcattgtgcggctggacacctagctccggtgctactccacggaatagattgctgctgcaacttctgggatctcccggccgaaggtattattctctcccaccccatcaaaaggtgcctttgccttccctttcacccactatgcaggcaggaaccatcgctcgatgggagaaaaaagaaggggacaaaatcaatgagggcgacctcattgccgaggtcgagactgataaagcaaccgtgggaaaacctgaggacattgaagctttcaagaactatacactagactcttccgccgctcctactcctcaagctgctccagctccaacaccggccgcaacagcatctccgccgaccccctctgcacaggctcccgggtcctcctaccccccacatatgcaggtgctgctgcccgcgctgagtccgacaatgaccatgggcacggtgcagcgctgggagaagaaagttggtgagaaattgtccgagggcgacttgttagctgagatgagcctatag

SEQ ID NO: 339478 - DNA, 678 bp, Artificial Sequence
  derived and/or modified sequence
atgtggagggtgtgtgcccggcgggcccagaatgtggccccctgggccggcctggaggcccgctggacagccctgcaggaggtgcccggcaccccccgggtgaccagccgcagcggccctgccccagccaggagaaattctgtgaccaccggctacggcggcgtgcgggccctgtgtggctggacccccagcagcggggccacccccaggaaccggctgctgctgcagctgctgggcagccctggaagacgctactacagcctgcccccccaccagaaggtgcccctgcccagcctgagccccaccatgcaggccggcaccatcgcccgctgggagaagaaggagggggacaagatcaatgaaggagacctgattgctgaggtggagacagacaaggccaccgtgggcaagccagaagatattgaggccttcaagaactacaccctggacagcagcgctgcccccaccccccaggccgccccagcccccaccccagctgccacagccagcccccccaccccatctgcccaggcccctggcagcagctacccaccccacatgcaggtgctgctgcctgccctgagccccaccatgaccatgggcaccgtgcagcgctgggagaagaaggtgggggagaagctgtctgagggggacctgctggccgagatgagcctgtag

SEQ ID NO: 339479 - DNA, 678 bp, Artificial Sequence
  derived and/or modified sequence
atgtggcgggtgtgcgcccggcgggcccagaacgtggccccctgggctggtctggaggcaaggtggacggcacttcaggaagtccctggcaccccccgtgtgactagccgctcaggcccagcacccgcacggagaaattcagtgactactggttatggcggggtgagggccctctgcgggtggacccccagcagcggagctacacctcgcaaccgtctgctcctccagctgctgggatcccctggtcgtagatactattcactgcccccccaccaaaaggtcccgttgcccagtctcagcccaactatgcaggctggtaccatcgctaggtgggaaaaaaaggagggcgacaaaataaacgaaggcgatttgattgccgaggtggagacagacaaagccacagtcggaaagccggaagatattgaagcatttaagaattataccctggacagttccgctgctccaaccccccaggccgctccagcaccaactccagctgccacagcttcgcctccaacgccctctgcgcaagcccccgggtctagttaccctccacatatgcaggttcttcttcctgcactcagcccgactatgaccatgggtacggtccagcgttgggaaaagaaagtcggggaaaagcttagtgaaggagacttactcgcggagatgagcttatag

SEQ ID NO: 339480 - DNA, 678 bp, Artificial Sequence
  derived and/or modified sequence
atgtggagagtttgcgccaggcgagctcaaaatgttgccccatgggctgggctggaagcccgatggactgccctgcaggaagttcccggtaccccaagggtgacctcacgctctggtcctgcacccgctcgacgcaactccgtgacaaccggatatgggggagttcgggctctctgcggctggactccatcgtctggagccaccccgcgaaaccgcctgctcctgcaactccttggttcccctggcagacgatactattcactgccccctcaccagaaagtaccactgcctagcctttcccctaccatgcaagccggaacaattgccagatgggagaaaaaggagggggataagatcaatgagggggacctgatagctgaggtcgagaccgacaaggcaactgtaggcaaaccagaagacatagaggcttttaaaaactatactttggactcatctgcggctccgaccccccaggccgctcccgctcctacccccgctgctacagcaagtcctccaaccccaagcgcccaggcgcctggttccagctaccccccacacatgcaggtccttctgccagccctgagtcctaccatgaccatgggtaccgtccaaagatgggagaaaaaggttggtgagaaactgagtgagggcgacctgttggctgagatgtctttatag

SEQ ID NO: 339481 - DNA, 678 bp, Artificial Sequence
  derived and/or modified sequence
atgtggagagtgtgcgccagaagagcccagaacgtggccccctgggccggcctggaggccagatggaccgccctgcaggaggtgcccggcacccccagagtgaccagcagaagcggccccgcccccgccagaagaaacagcgtgaccaccggctacggcggcgtgagagccctgtgcggctggacccccagcagcggcgccacccccagaaacagactgctgctgcagctgctgggcagccccggcagaagatactacagcctgcccccccaccagaaggtgcccctgcccagcctgagccccaccatgcaggccggcaccatcgccagatgggagaagaaggagggcgacaagatcaacgagggcgacctgatcgccgaggtggagaccgacaaggccaccgtgggcaagcccgaggacatcgaggccttcaagaactacaccctggacagcagcgccgcccccaccccccaggccgcccccgcccccacccccgccgccaccgccagcccccccacccccagcgcccaggcccccggcagcagctaccccccccacatgcaggtgctgctgcccgccctgagccccaccatgaccatgggcaccgtgcagagatgggagaagaaggtgggcgagaagctgagcgagggcgacctgctggccgagatgagcctgtag

SEQ ID NO: 339482 - DNA, 984 bp, Artificial Sequence
  derived and/or modified sequence
atgatcttcctgggcttcgccgacgacgtgctgaacctgagatggagacacaagctgctgctgcccaccgccgccagcctgcccctgctgatggtgtacttcaccaacttcggcaacaccaccatcgtggtgcccaagcccttcagacccatcctgggcctgcacctggacctgggcatcctgtactacgtgtacatgggcctgctggccgtgttctgcaccaacgccatcaacatcctggccggcatcaacggcctggaggccggccagagcctggtgatcagcgccagcatcatcgtgttcaacctggtggagctggagggcgactgcagagacgaccacgtgttcagcctgtacttcatgatccccttcttcttcaccaccctgggcctgctgtaccacaactggtaccccagcagagtgttcgtgggcgacaccttctgctacttcgccggcatgaccttcgccgtggtgggcatcctgggccacttcagcaagaccatgctgctgttcttcatgccccaggtgttcaacttcctgtacagcctgccccagctgctgcacatcatcccctgccccagacacagaatccccagactgaacatcaagaccggcaagctggagatgagctacagcaagttcaagaccaagagcctgagcttcctgggcaccttcatcctgaaggtggccgagagcctgcagctggtgaccgtgcaccagagcgagaccgaggacggcgagttcaccgagtgcaacaacatgaccctgatcaacctgctgctgaaggtgctgggccccatccacgagagaaacctgaccctgctgctgctgctgctgcaggtgagaatgggcatcgagttcatccccccctgcctgcccttctgcgtgatcctgacccccgtgcacttcagcctgcagatcctgggcagcgccatcaccttcagcatcagataccagctggtgagactgttctacgacgtgtag

SEQ ID NO: 339483 - DNA, 984 bp, Artificial Sequence
  derived and/or modified sequence
atgatattcctgggcttcgctgatgacgtactaaacctaaggtggaggcacaagctgctcctgcctactgccgcatctctgcccctgctcatggtctacttcactaattttggcaataccacaattgtcgtgccaaaaccttttcgtccgatcctggggctacacttggatctgggcatactctattatgtgtatatggggcttctcgcagtgttctgcacaaatgccattaacattctcgcaggcattaacggactggaggctgggcaaagcctggtcattagcgcttccatcatcgttttcaatctcgtggagctggaaggcgactgcagagatgatcatgtatttagcctatacttcatgatcccattttttttcactaccttaggattgctttaccataattggtatccatcaagggtatttgttggcgatacattctgttattttgcggggatgacatttgccgtggttgggattctcggacatttcagtaagactatgctgcttttttttatgcctcaggtttttaattttctgtattccttaccccaactgttgcatattattccctgtccacgccacaggatcccacggctgaatattaagaccggaaaacttgaaatgtcttactctaagtttaaaactaaatccctcagttttcttggcacatttatacttaaagttgccgagtctcttcagctggtgacagtgcaccaaagtgagactgaagatggtgagttcacagaatgcaacaacatgacactcataaatctgcttttaaaggtcctgggaccaattcacgagcggaacctcaccctgctattactcctgctgcaagtccgcatgggcatagagtttatcccgccttgcctgcctttctgtgttattctgacacccgtccacttttccctacagattctcggatcggctatcaccttctccataaggtatcaacttgtccgtctgttttatgatgtctag

SEQ ID NO: 339484 - DNA, 984 bp, Artificial Sequence
  derived and/or modified sequence
atgatcttcctgggctttgctgatgatgtgctgaacctgcgctggaggcacaagctgctgctgcccacagctgccagcctgcccctgctgatggtgtacttcaccaactttggaaacaccaccatcgtggtgcccaagcccttccggcccatcctgggcctgcacctggacctgggcatcctgtactacgtgtacatgggcctgctggccgtgttctgcaccaatgccatcaacatcctggccggcatcaatggcctggaggccggccagagcctggtgatcagcgccagcatcatcgtgttcaacctggtggagctggagggggactgcagagatgaccacgtgttcagcctgtacttcatgatccccttcttcttcaccaccctgggcctgctgtaccacaactggtaccccagccgggtgtttgtgggggacaccttctgctactttgctggcatgacctttgctgtggtgggcatcctgggccacttcagcaagaccatgctgctcttcttcatgccccaggtgttcaacttcctgtacagcctgccccagctgctgcacatcatcccctgccccaggcaccgcatcccccggctgaacatcaagacaggcaagctggagatgagctacagcaagttcaagaccaagagcctgtccttcctgggcaccttcatcctgaaggtggccgagagcctgcagctggtgacagtgcaccagagcgagacagaagatggagagttcacagagtgcaacaacatgaccctcatcaacctgctgctgaaggtgctgggccccatccacgagaggaacctgaccctgctgctgctgctgctgcaggtgaggatgggcatcgagttcatccccccctgcctgcccttctgtgtgatcctgacccctgtgcacttcagcctgcagatcctgggcagcgccatcaccttcagcatccgctaccagctggtgcggctcttctatgatgtgtag

SEQ ID NO: 339485 - DNA, 984 bp, Artificial Sequence
  derived and/or modified sequence
atgatcttcctgggcttcgccgacgacgtgctgaacctgcggtggagacataaactgctcctgccaacagccgcatctctgcctctgctcatggtgtatttcaccaactttggtaacacaacaattgtagttccaaagcctttccggcccattctagggctgcatctcgatcttggcattctatactacgtgtacatgggattgctcgctgtgttctgcaccaatgctattaatatactagctggcattaacgggctggaggcgggacagtcgcttgtcatctcagccagcataatcgtgtttaacctagtagagctggaaggagattgtagggacgatcacgtgtttagtttgtatttcatgatcccgttcttctttaccaccttgggcctgctctatcacaactggtatccgagtcgagtatttgtcggcgacaccttttgttatttcgccggaatgacatttgcggtagtcgggatcctcggacattttagcaagacaatgctgctgttttttatgccacaagttttcaactttctgtacagcctaccacaattgctacatatcatcccgtgccctagacacagaattcctaggttaaacattaaaacagggaagctagaaatgagctacagcaaattcaagaccaaatcactgagcttcctcggcacatttatccttaaagtggccgaaagtctgcagctggtgacagtgcatcagagcgagaccgaggatggtgagtttaccgagtgtaataacatgaccctgattaatctgttgttgaaggtactggggccaattcatgagcgcaacctcacattgcttctcctgctgctccaggttagaatgggcattgagtttatcccgccatgtttaccattttgcgtgattttgacgcccgtgcacttttcactacagattcttggatcggctattacatttagcatcagataccagcttgtgcgcctgttttatgacgtctag

SEQ ID NO: 339486 - DNA, 984 bp, Artificial Sequence
  derived and/or modified sequence
atgatttttctggggtttgcagacgatgtcttgaacctgagatggaggcataagctgcttttgccaaccgctgccagcctccctttgcttatggtgtacttcaccaacttcggaaatacaacgattgttgtccccaaacctttccgccctatcctggggctccacctcgacttgggcattctatactatgtgtatatgggactgctggccgtgttctgcacaaatgccatcaacattctggccggtatcaacgggttggaggccggacaatcccttgtgatatctgctagtattatcgtatttaacctggtggaactcgagggtgactgtagagatgatcatgtcttctctttgtattttatgatcccgttcttttttaccacgttagggcttttgtatcacaactggtaccctagcagagtcttcgttggggacaccttctgttatttcgccggaatgacttttgccgttgtgggcatcttgggtcattttagtaagacaatgcttctgtttttcatgcctcaggtcttcaattttctgtattctttgccgcaactcctgcacatcataccttgcccacggcacagaattcctaggctgaacattaaaacaggtaaattagagatgtcttactcaaaattcaaaactaagtctttgtcttttcttggcacatttatccttaaagttgccgaaagccttcagctcgtgacggtgcatcaatctgagacggaagatggcgagtttaccgagtgcaataatatgactctgataaaccttctcctgaaagtgctcggccctattcatgaaagaaatcttacgttactgttgctcctcctgcaagtgagaatgggcatcgagttcatccctccttgtcttcctttttgcgtgatcctgacacctgtccatttctcactgcagatattaggcagtgcgattaccttttctattcggtatcagctagtccggctgttctacgacgtttag

SEQ ID NO: 339487 - protein, 354 aa, Artificial Sequence
  derived and/or modified sequence
MKAAVDLKPTLTIIKTEKVDLELFPSPDMECADVPLLTPSSKEMMSQALKATFSGFTKEQQRLGIPKDPRQWTETHVRDWVMWAVNEFSLKGVDFQKFCMNGAALCALGKDCFLELAPDFVGDILWEHLEILQKEDVKPYQVNGVNPAYPESRYTSDYFISYGIEHAQCVPPSEFSEPSFITESYQTLHPISSEELLSLKYENDYPSVILRDPLQTDTLQNDYFAIKQEVVTPDNMCMGRTSRGSGPIQLWQFLLELLTDKSCQSFISWTGDGWEFKLSDPDEVARRWGKRKNKPKMNYEKLSRGLRYYYDKNIIHKTAGKRYVYRFVCDLQSLLGYTPEELHAMLDVKPDADE

SEQ ID NO: 339488 - DNA, 1065 bp, Artificial Sequence
  derived and/or modified sequence
atgaaggccgccgtggacctgaagcccaccctgaccatcatcaagaccgagaaggtggacctggagctgttccccagccccgacatggagtgcgccgacgtgcccctgctgacccccagcagcaaggagatgatgagccaggccctgaaggccaccttcagcggcttcaccaaggagcagcagagactgggcatccccaaggaccccagacagtggaccgagacccacgtgagagactgggtgatgtgggccgtgaacgagttcagcctgaagggcgtggacttccagaagttctgcatgaacggcgccgccctgtgcgccctgggcaaggactgcttcctggagctggcccccgacttcgtgggcgacatcctgtgggagcacctggagatcctgcagaaggaggacgtgaagccctaccaggtgaacggcgtgaaccccgcctaccccgagagcagatacaccagcgactacttcatcagctacggcatcgagcacgcccagtgcgtgccccccagcgagttcagcgagcccagcttcatcaccgagagctaccagaccctgcaccccatcagcagcgaggagctgctgagcctgaagtacgagaacgactaccccagcgtgatcctgagagaccccctgcagaccgacaccctgcagaacgactacttcgccatcaagcaggaggtggtgacccccgacaacatgtgcatgggcagaaccagcagaggcagcggccccatccagctgtggcagttcctgctggagctgctgaccgacaagagctgccagagcttcatcagctggaccggcgacggctgggagttcaagctgagcgaccccgacgaggtggccagaagatggggcaagagaaagaacaagcccaagatgaactacgagaagctgagcagaggcctgagatactactacgacaagaacatcatccacaagaccgccggcaagagatacgtgtacagattcgtgtgcgacctgcagagcctgctgggctacacccccgaggagctgcacgccatgctggacgtgaagcccgacgccgacgagtag

SEQ ID NO: 339489 - DNA, 1065 bp, Artificial Sequence
  derived and/or modified sequence
atgaaagcagcggtcgacctgaagcctaccctcaccatcattaagaccgaaaaggtcgatctggaactctttccatcccccgacatggaatgtgccgacgttccattgcttactcccagcagcaaggaaatgatgtcccaggcactcaaagctacttttagtgggtttaccaaggaacagcagcgcctaggcatccccaaagatccaaggcagtggaccgagacccatgttagggactgggtcatgtgggccgtgaatgagttttcactgaagggggtggactttcaaaagttttgcatgaacggtgcagcactctgcgcccttgggaaggattgcttcctggaactcgctccagacttcgtcggagatattctctgggagcacctcgaaatccttcaaaaagaggacgtgaaaccgtaccaagtcaatggagtgaatcccgcataccccgagagccgatatacgtccgactactttatcagctatggaatagagcacgcacagtgtgtgccacctagcgaattcagtgaaccttcgtttataactgaatcttatcagacattacatccaatctctagcgaggagttgctgagcctaaaatatgaaaacgactatccgtccgtgattctacgggatcctttgcagactgacacccttcagaatgactacttcgccattaaacaggaagtggttacacccgataatatgtgcatgggtagaacctcccgggggagcggaccaatccagctttggcagttcctcttggagctgctcaccgataaatcctgtcagagcttcatctcttggacaggggacggctgggaattcaaactttcagatcccgatgaagtcgcgcggaggtggggaaaacgaaagaacaagcctaaaatgaattatgaaaagctcagtcggggattgcgctactattatgacaagaatattattcataaaactgcaggtaaaagatatgtatatcgcttcgtctgtgatctgcagagcctcttaggctacacacccgaagaactgcacgcaatgctggatgtgaagcctgatgctgatgaatag

SEQ ID NO: 339490 - DNA, 1065 bp, Artificial Sequence
  derived and/or modified sequence
atgaaggcagctgtggatctaaagcccactctcaccataatcaagacagagaaagtggatcttgaattgttccctagccccgatatggaatgcgcggatgtgccactccttacaccttcaagtaaggagatgatgagtcaagcattgaaagctactttttctgggtttaccaaggaacagcagcgtcttggcatacctaaagatcccagacagtggactgagacccatgtgagagactgggtaatgtgggcagtgaatgagttctctttgaaaggggtcgatttccaaaagttttgcatgaacggcgccgctctgtgcgccttaggaaaggactgttttttggaactggctcctgacttcgtgggcgacattctgtgggaacatctggagattcttcagaaagaggacgtgaagccataccaggttaacggagttaatccggcctatccagagagccgatatacaagcgactacttcattagctatggcattgaacatgcccaatgtgtcccaccatctgagttctctgagccaagctttataaccgagtcataccaaaccctacacccgatctcgagcgaagaactgcttagtctcaagtacgagaatgattacccaagcgtgatacttcgggatcccctgcagacggacactctccaaaacgactattttgctattaagcaggaggtcgtgactcccgacaacatgtgcatggggagaacaagcagaggttcgggtccaatccagttgtggcagttcctgctcgaactattgacagacaagtcctgccagtccttcatatcctggactggagacggctgggagtttaaactctcggatccggacgaagttgcccgacgatggggaaagcggaagaataaacccaagatgaactatgaaaagttgtcacggggcttgagatactattacgataagaatatcatccataagactgccgggaaaagatatgtgtaccggtttgtttgtgacttgcagagtctcttgggttatacacccgaagaactccatgccatgttggacgttaagcccgacgccgatgagtag

SEQ ID NO: 339491 - DNA, 1065 bp, Artificial Sequence
  derived and/or modified sequence
atgaaggctgctgtggacctgaagcccaccctgaccatcatcaagacagagaaggtggacctggagctgttccccagcccagacatggagtgtgctgatgtgcccctgctgacccccagcagcaaggagatgatgagccaggccctgaaggccaccttcagcggcttcaccaaggagcagcagaggctgggcatccccaaggacccccggcagtggacagagacccacgtgcgggactgggtgatgtgggccgtgaatgagttcagcctgaagggcgtggacttccagaagttctgcatgaatggagctgccctgtgtgccctgggcaaggactgcttcctggagctggccccagactttgtgggggacatcctgtgggagcacctggagatcctgcagaaggaggatgtgaagccctaccaggtgaatggagtgaacccagcctacccagagagccgctacaccagtgactacttcatctcctatggcatcgagcacgcccagtgtgtgcccccatctgagttcagcgagcccagcttcatcacagagagctaccagaccctgcaccccatcagcagcgaggagctgctgagcctgaagtatgaaaatgactaccccagcgtcatcctgcgggaccccctgcagacagacaccctgcagaatgactactttgccatcaagcaggaggtggtgaccccagacaacatgtgcatgggccgcaccagccggggcagcggccccatccagctgtggcagttcctgctggagctgctgacagacaagagctgccagagcttcatctcctggacaggagatggctgggagttcaagctgagtgaccctgatgaggtggcccggcgctggggcaagaggaagaacaagcccaagatgaactatgagaagctgagccggggcctgcgctactactatgacaagaacatcatccacaagacagctgggaagagatatgtgtacagatttgtgtgtgacctgcagagcctgctgggctacaccccagaggagctgcacgccatgctggatgtgaagccagatgctgatgaatag

SEQ ID NO: 339492 - DNA, 1065 bp, Artificial Sequence
  derived and/or modified sequence
atgaaggccgccgtggacctgaagcccaccctgaccatcatcaagaccgagaaagtggatctcgaactattcccttccccggacatggagtgtgctgacgtgcctctgctcactccttcttcaaaggagatgatgagccaggccttgaaagcaaccttttctggatttaccaaggagcagcagcggcttggcatacccaaagatcctaggcagtggaccgagactcatgttcgcgattgggtgatgtgggccgtcaacgaattttctcttaagggtgtcgattttcagaaattttgtatgaacggagctgccttatgcgctctcggaaaggactgctttctggagcttgcacccgatttcgtgggagacatcctctgggagcatctcgagatactgcagaaggaggatgtgaaaccataccaggtcaacggcgtgaaccctgcgtacccagagtccaggtacaccagcgattactttattagctacggcattgaacatgctcagtgtgtccccccttcagagttcagcgagccttccttcatcaccgaaagctatcaaacgctgcatcctatctcatctgaggagctcttgagtctgaaatacgaaaacgactacccatccgtgattctgcgggacccactacaaaccgacacactgcagaatgactattttgcaatcaagcaggaggtggtgaccccagataacatgtgtatgggtaggacatcaagaggatccggccctattcagttatggcaattcctgctggagctcctaactgataaatcgtgtcaatcctttatcagctggaccggtgatggatgggagttcaagctcagcgaccccgacgaggttgccagaaggtggggaaagagaaagaacaagccgaagatgaattatgagaagctcagccgggggctgagatattactatgacaagaatatcattcataagaccgctgggaaaagatatgtatacaggttcgtgtgcgacctgcagagcctcctgggctatactcctgaggagctgcacgccatgctggacgtcaagccggatgccgacgagtag

SEQ ID NO: 339493 - DNA, 1065 bp, Artificial Sequence
  derived and/or modified sequence
atgaaggccgccgtggacctgaagcccaccctgaccatcatcaagacagaaaaggtagacttagagctcttcccttcgcctgacatggaatgcgcagatgtgcccttactgactccaagctctaaggagatgatgagccaggccctcaaagccactttcagtggttttaccaaggagcaacagcggctcggaatccccaaggatccacggcagtggactgaaacccatgtgagagactgggttatgtgggcagttaacgaattctctcttaagggcgtagatttccagaagttttgcatgaatggcgccgccctttgcgccctgggtaaagactgcttcctcgagctagcaccagattttgtgggtgatatcctgtgggagcacttggagattctccaaaaagaagacgtcaaaccataccaggtcaatggagtgaacccagcctaccccgaaagtagatatacttccgactacttcatctcttacggcatagagcacgcccagtgcgtgcctccatcagaatttagcgagccttcatttattactgagtcatatcagactctgcatcctatcagttcagaggaactcctttctctgaagtacgagaatgactatccatctgtgatcctgcgtgaccctctgcagactgataccctgcagaacgattatttcgcaattaagcaggaagtggtcacgcctgacaatatgtgtatgggaagaacatctcggggatcaggtccaatccagctctggcaattccttttagagctactgaccgacaagagttgtcagtcttttatctcctggactggagacggatgggaatttaaactgagtgatccggacgaggtggccaggcgctggggaaaacgaaagaacaagccaaaaatgaattacgagaagctgtcacggggacttcggtactattacgacaaaaacattatccacaagaccgcaggtaagcggtacgtctatagatttgtgtgcgatctccagtctctgctgggctatactcccgaggagttgcatgccatgctagacgtgaagccagacgctgatgagtag

SEQ ID NO: 339494 - DNA, 1065 bp, Artificial Sequence
  derived and/or modified sequence
atgaaggccgctgttgacctgaaacctaccttgaccattattaaaactgagaaggttgacctcgagctctttccttctccagacatggagtgtgctgacgtgcccttgctgaccccaagctctaaggagatgatgagccaggctctcaaggctacatttagtggatttaccaaggagcagcaaaggcttggtatcccaaaggacccgaggcagtggactgaaacacatgtgagagattgggtgatgtgggccgtgaatgaattcagtctgaagggagtggattttcagaaattctgcatgaacggagctgctctgtgcgctttggggaaagattgttttctcgagctggcaccggacttcgtcggcgacatcctctgggaacatttggagatcctgcagaaggaggatgtgaaaccttaccaagttaacggggtgaaccccgcatacccagagtcacgctacacctctgactattttatatcttatggaatcgagcacgcccagtgcgtgcccccttccgagttttcagaacccagcttcattacagaatcgtaccagaccctgcatcccataagtagtgaagagttgctcagcctaaagtacgagaacgactacccctctgtcatcctgcgcgatccattacagaccgacaccctccagaatgactactttgccattaaacaggaagttgtaacacctgataacatgtgcatgggcaggacctctagagggagcgggcctatccagctgtggcagtttctgctggaactgctgacagacaaatcctgtcagtccttcatttcctggaccggtgacggctgggagtttaagctaagtgaccctgacgaggttgctaggcgctggggaaaacgaaagaataaacctaagatgaattatgagaagctgtctcgtggcctgcgatactactatgataagaatatcatccacaagaccgctggaaagagatacgtatacagatttgtgtgtgatctgcagtctctcctggggtacactccagaagaattgcacgccatgctggatgtgaaaccagatgcagatgagtag

SEQ ID NO: 339495 - DNA, 1065 bp, Artificial Sequence
  derived and/or modified sequence
atgaaagcagccgttgaccttaaaccaactctgaccattattaagacagagaaggtcgatctcgagctgtttcctagtcctgacatggaatgtgccgatgtgcctctgttgacccccagttcaaaggaaatgatgtcccaagccctcaaggccactttttccggttttacaaaggagcagcaaagattaggcatccccaaggaccctaggcagtggacggagacccacgtgcgcgattgggttatgtgggccgtgaatgagttcagtctgaagggcgtggattttcaaaagttctgcatgaacggggctgcactgtgtgccctggggaaggattgtttcctcgagttggctcccgatttcgtgggcgacatactgtgggaacacttggaaattctgcagaaagaggatgtcaaaccctatcaagtgaatggggtgaaccctgcatatcccgaaagtcgctacacttccgactactttataagctatggcatcgaacatgcccagtgcgtgcctccctcagaattttcagagcccagctttatcaccgaatcttatcagacattgcaccccatctcctcagaggaacttcttagtctgaagtacgagaacgactacccatccgtcatcctccgggaccccctgcaaactgataccctgcaaaatgattactttgccataaagcaggaggtcgtaacaccggataatatgtgcatgggaagaaccagccgcggatccggtcctatccagctctggcagtttctgctggagctccttaccgataaatcctgtcaaagttttatctcttggactggggatgggtgggaatttaagctcagcgatcctgacgaagtggcaaggcggtggggaaagcgaaaaaataaaccaaagatgaattacgagaagctctctcgagggctgcgctactattatgacaaaaatattatccacaagactgccggaaagaggtatgtatacagattcgtttgcgaccttcagagcctgcttggctatactccagaggagcttcacgcaatgttagacgttaagccagacgctgatgaatag

SEQ ID NO: 339496 - DNA, 4981 bp, Artificial Sequence
  derived and/or modified sequence
gagatcgagagcgaacgaggcagccgccggcggagaggagggagcgggcgagggccgggcaggaggagcgggcgcggcgcgggcgaggctgggacccgagcgcgctcacttcgccgcaaagtgccaacttcccctggagtgccgggcgcgcaccgtccgggcgcgggggaaagaaaggcagcgggaatttgagatttttgggaagaaagtcggatttcccccgtccccttccccctgttactaatcctcattaaaaagaaaaacaacagtaactgcaaacttgctaccatcccgtacgtcccccactcctggcaccatgaaggcggccgtcgatctcaagccgactctcaccatcatcaagacggaaaaagtcgatctggagcttttcccctccccggatatggaatgtgcagatgtcccactattaactccaagcagcaaagaaatgatgtctcaagcattaaaagctactttcagtggtttcactaaagaacagcaacgactggggatcccaaaagacccccggcagtggacagaaacccatgttcgggactgggtgatgtgggctgtgaatgaattcagcctgaaaggtgtagacttccagaagttctgtatgaatggagcagccctctgcgccctgggtaaagactgctttctcgagctggccccagactttgttggggacatcttatgggaacatctagagatcctgcagaaagaggatgtgaaaccatatcaagttaatggagtcaacccagcctatccagaatcccgctatacctcggattacttcattagctatggtattgagcatgcccagtgtgttccaccatcggagttctcagagcccagcttcatcacagagtcctatcagacgctccatcccatcagctcggaagagctcctctccctcaagtatgagaatgactacccctcggtcattctccgagaccctctccagacagacaccttgcagaatgactactttgctatcaaacaagaagtcgtcaccccagacaacatgtgcatggggaggaccagtcgtggtagtggaccaatccagctatggcagtttcttctggaattactcactgataaatcctgtcagtcttttatcagctggacaggagatggctgggaattcaaactttctgacccagatgaggtggccaggagatggggaaagaggaaaaacaaacctaagatgaattatgagaaactgagccgtggcctacgctactattacgacaaaaacatcatccacaagacagcggggaaacgctacgtgtaccgctttgtgtgtgacctgcagagcctgctggggtacacccctgaggagctgcacgccatgctggacgtcaagccagatgccgacgagtgatggcactgaaggggctggggaaaccctgctgagaccttccaaggacagccgtgttggttggactctgaattttgaattgttattctattttttattttccagaactcattttttaccttcaggggtgggagctaagtcagttgcagctgtaatcaattgtgcgcagttgggaaaggaaagccaggacttgtggggtgggtgggaccagaaattcttgagcaaattttcaggagagggagaagggccttctcagaagcttgaaggctctggcttaacagagaaagagactaatgtgtccaatcatttttaaaaatcatccatgaaaaagtgtcttgagttgtggacccattagcaagtgacattgtcacatcagaactcatgaaactgatgtaaggcaattaatttgcttctgtttttaggtctgggagggcaaaaaagaggtgggtgggatgaaacatgttttggggggggatgcactgaaaatctgagaactatttacctatcactctagttttgaagcaaagatggacttcagtggggaggggccaaaaccgttgttgtgttaaaatttattttattaaattttgtgccagtattttttttcttaaaaatcgtcttaagctctaaggtggtctcagtattgcaatatcatgtaagtttgtttttatttgccggctgaggattctgtcacaatgaaagaaaactgtttatatagaccccattggaaaagcaaaacgctctcactgagatcagggatcccaaattcatgggacttatataagaaggacaattaatgctgatttgggtacaggggaattatgtgtgtgaatgtcatctacaattaaaaaaaattagcacatccctttacttacttgttatcagtggattctcggggtttggacttaatgttgagctaagaagcattaagtctttgaactgaatgtattttgcatccctggttttggacgacagtaaacgtaggagcactgttgaagtcctggaagggagatcgaaggaggaagattgacttggttctttcttagtcctatatctgtagcatagatgacttggaataaaagctgtatgcatgggcattacccctcaggtcctaagaaataagtcctgaatgcatgtcgttccaaactaacactctgtaatttttcttttatgtcttattttccaagagtcctccattttttgcaccccctcaccgccaactctgttattcagtagagagaagtgtacggctttctgattggtgagtgaaaaagtaacttgagacacgacctaagttgaagagtttagacttgctgagttttagaagtgatggaaattaagagagcatttcaataaaatgtgacttggctgtctttggaagagaagtgcaaggctttcctttgaagaatttaaattagtccggtaggatgtcaggtgagactgtgtatgcaaaatgaatggcacaggtgatgccagggcctcttgcttgggtctgatgtcttggcacagggtaagtgaaggttaattccagaagagaggaatgacttgaaggcaaaggaaactaaggaaggaggttcagtgaggaaaataaggttgtccatgagatttgaatagatttttagttcccccaaggtttaaatacaaacatagtcaagcaaggtagtcatctttctgctggttgtgagggggaatctgaaaatggagttttagaggaaaagtcaacatctaactagtgaggaaaagtgcctaatacaattagaatctccctcactctatagttgcccagttgaaaggataaggaggaggggtggcttttatggacttccatgagagaaggaaagaaatatttcaggtaagcttctcagggctggccctttttgggatttggatgagaaattggaagtactaactactttctagcatatctttaagaaaattgattgttatttactcccagatcctcttgcagacccagaattatcaggaacatagctctgtgattcatgagtgtccccatactgatgaattggagcatccatatggaaagcaaaggcagaattatcccagctgtattattttgatcttttggatgcaggtgccttaatgaagctctcaaaatattttaggagctgctcagggagtgttgggtggaactgtttggactacattgttttctcttagattatgtgatttttgttgggcactggcaaaaggtgtgtgtgtgaatgtgtgcatgtgtgtgaatgttgtgtgtgtgtgtgtgtgtgtgtgtgtgtgtgtgtgtgtgtgtgtttgcagacatgcaaaactgcagctgaaataataccttagatttctaggtaagtctttccacatttcaataatgggtaagagtagaaccagggccgggtatcaattattgcttgctgtttgcaaccaggcataaaatcactttctcaaatcatccaccgttcctattaaatttatgccggaaactctccttctgtgagtataactcctgcagttcctatagcagataagatataagaaagtgcctcctagtgctcctccgcccgcttgtttgctaaaattccctttctctctaagtccaccattttcaagatttgtagatagtgtattagttaagacagctttgtcgatctggccagatgttttttctcctttgtccaaaggccagagaccatcccaggaagagtggtgggtggtttatacactggaaatgttgcgtttatgctttttaaaaacacacgttaacttcagaggaaggatgggcaaatctggtctagctgggtgaaacccttattttcccagagatgccttaacctttgttggttttggctttagggttcagagtcacttttgttcccttctccattctggagagggacttcccctacatagagccctgatttttgtggctgtggggattggaggtagcattcaaagatcagatgtgcttttcctcactttggagatgaacactctgggttttacagcattaacctgcctaaccttcatggtgagaaatacaccatctctcttctagtcatgctgtgcatgccgcttactctgttggggtctatataaatttgttgaactcttacctacattccaaagaagtttcaaggaaccataaatatatgtatacatatacatatataaaatatatatattaaaataaaattatcaggaatactgcctcagttattgaacttttttttttaagaatactttttttttaagctgagaagtatagggatgaaaaagatgttatattgtgtttgactattttccaacttgtattttcatataatttatattttttaaaagctgaaaatttagaagcaagatgaaaaaaaggaaaagcaggtgctttttaaaaatcagaactgaggtagcttagagatgtagcgatgtaagtgtcgatgtttttttaaaaaaaaatgcaaaaaaattcttatggcggagttttttgtttgtttattttagtagctgatgctggcacatcattttgctggagagttttttatatactgtagcctgatttcatattgtattttaaactgtgtgaaattaaaaacaaagaatttcattcataatgct

SEQ ID NO: 339497 - DNA, 1494 bp, Artificial Sequence
  derived and/or modified sequence
ttcgccgcaaagtgccaacttcccctggagtgccgggcgcgcaccgtccgggcgcgggggaaagaaaggcagcgggaatttgagatttttgggaagaaagtcggatttcccccgtccccttccccctgttactaatcctcattaaaaagaaaaacaacagtaactgcaaacttgctaccatcccgtacgtcccccactcctggcaccatgaaggcggccgtcgatctcaagccgactctcaccatcatcaagacggaaaaagtcgatctggagcttttcccctccccggatatggaatgtgcagatgtcccactattaactccaagcagcaaagaaatgatgtctcaagcattaaaagctactttcagtggtttcactaaagaacagcaacgactggggatcccaaaagacccccggcagtggacagaaacccatgttcgggactgggtgatgtgggctgtgaatgaattcagcctgaaaggtgtagacttccagaagttctgtatgaatggagcagccctctgcgccctgggtaaagactgctttctcgagctggccccagactttgttggggacatcttatgggaacatctagagatcctgcagaaagaggatgtgaaaccatatcaagttaatggagtcaacccagcctatccagaatcccgctatacctcggattacttcattagctatggtattgagcatgcccagtgtgttccaccatcggagttctcagagcccagcttcatcacagagtcctatcagacgctccatcccatcagctcggaagagctcctctccctcaagtatgagaatgactacccctcggtcattctccgagaccctctccagacagacaccttgcagaatgactactttgctatcaaacaagaagtcgtcaccccagacaacatgtgcatggggaggaccagtcgtggcagtggaccaatccagctatggcagtttcttctggaattactcactgataaatcctgtcagtcttttatcagctggacaggagatggctgggaattcaaactttctgacccagatgaggtggccaggagatggggaaagaggaaaaacaaacctaagatgaattatgagaaactgagccgtggcctacgctactattacgacaaaaacatcatccacaagacagcggggaaacgctacgtgtaccgctttgtgtgtgacctgcagagcctgctggggtacacccctgaggagctgcacgccatgctggacgtcaagccagatgccgacgagtgatggcactgaaggggctggggaaaccctgctgagaccttccaaggacagccgtgttggttggactctgaattttgaattgttattctattttttattttccagaactcattttttaccttcaggggtgggagctaagtcagttgcagctgtaatcaattgtgcgcagttgggaaaggaaagccaggacttgtggggtgggtgggaccagaaattcttgagcaa

SEQ ID NO: 339498 - protein, 385 aa, Artificial Sequence
  derived and/or modified sequence
MRSSLAPGVWFFRAFSRDSWFRGLILLLTFLIYACYHMSRKPISIVKSRLHQNCSEQIKPINDTHSLNDTMWCSWAPFDKDNYKELLGGVDNAFLIAYAIGMFISGVFGERLPLRYYLSAGMLLSGLFTSLFGLGYFWNIHELWYFVVIQVCNGLVQTTGWPSVVTCVGNWFGKGKRGFIMGIWNSHTSVGNILGSLIAGIWVNGQWGLSFIVPGIITAVMGVITFLFLIEHPEDVDCAPPQHHGEPAENQDNPEDPGNSPCSIRESGLETVAKCSKGPCEEPAAISFFGALRIPGVVEFSLCLLFAKLVSYTFLYWLPLYIANVAHFSAKEAGDLSTLFDVGGIIDVPVQLHWPGRDCQLHSDADHLWGPGQWPIRAHHHCCLC

SEQ ID NO: 339499 - DNA, 1158 bp, Artificial Sequence
  derived and/or modified sequence
atgagaagcagcctggcccccggcgtgtggttcttcagagccttcagcagagacagctggttcagaggcctgatcctgctgctgaccttcctgatctacgcctgctaccacatgagcagaaagcccatcagcatcgtgaagagcagactgcaccagaactgcagcgagcagatcaagcccatcaacgacacccacagcctgaacgacaccatgtggtgcagctgggcccccttcgacaaggacaactacaaggagctgctgggcggcgtggacaacgccttcctgatcgcctacgccatcggcatgttcatcagcggcgtgttcggcgagagactgcccctgagatactacctgagcgccggcatgctgctgagcggcctgttcaccagcctgttcggcctgggctacttctggaacatccacgagctgtggtacttcgtggtgatccaggtgtgcaacggcctggtgcagaccaccggctggcccagcgtggtgacctgcgtgggcaactggttcggcaagggcaagagaggcttcatcatgggcatctggaacagccacaccagcgtgggcaacatcctgggcagcctgatcgccggcatctgggtgaacggccagtggggcctgagcttcatcgtgcccggcatcatcaccgccgtgatgggcgtgatcaccttcctgttcctgatcgagcaccccgaggacgtggactgcgcccccccccagcaccacggcgagcccgccgagaaccaggacaaccccgaggaccccggcaacagcccctgcagcatcagagagagcggcctggagaccgtggccaagtgcagcaagggcccctgcgaggagcccgccgccatcagcttcttcggcgccctgagaatccccggcgtggtggagttcagcctgtgcctgctgttcgccaagctggtgagctacaccttcctgtactggctgcccctgtacatcgccaacgtggcccacttcagcgccaaggaggccggcgacctgagcaccctgttcgacgtgggcggcatcatcgacgtgcccgtgcagctgcactggcccggcagagactgccagctgcacagcgacgccgaccacctgtggggccccggccagtggcccatcagagcccaccaccactgctgcctgtgctag

SEQ ID NO: 339500 - DNA, 1158 bp, Artificial Sequence
  derived and/or modified sequence
atgaggagcagtcttgcacctggcgtatggttctttagagcttttagtcgtgactcctggttccgcggacttatcctcttactaacatttcttatatatgcctgttaccacatgtcccgtaagccgatctccatcgtcaaatcacgcttgcatcagaactgcagcgagcagatcaaaccgattaatgacacccactctctgaatgatacgatgtggtgcagctgggccccgttcgacaaggataactataaggaattgttgggcggagtggataacgcgtttctcattgcgtatgccatcggaatgttcatctcaggggtgtttggagagaggttacccctccgctattacctgtctgcagggatgctgctctctgggctgttcacaagcctgttcgggctgggttacttttggaacatccatgaactctggtattttgtggttatccaggtgtgtaacggcttggtacagaccaccggatggcctagcgtggtcacatgtgtgggcaactggtttggaaaggggaagagaggtttcatcatgggaatttggaactcccacacatccgttggcaatatactggggtccctcatcgcaggtatttgggtcaacggccagtgggggctgtctttcattgtccctggcatcataacagccgtgatgggggttatcacctttttattcctgatcgaacatcccgaggacgtggactgtgctccaccccagcaccacggggagccggccgaaaaccaggacaaccctgaggaccccggtaacagcccttgttcaattagagagtcaggcctagagactgtggccaagtgctcaaagggtccttgtgaggagcctgccgcaattagctttttcggtgctctgcggattccgggggtggtggaatttagcctgtgcttgctgttcgccaagctggttagctatacgtttctgtattggctcccactttatattgcaaatgtggctcatttcagcgccaaagaggcaggggatttgagcactctgtttgatgttggcggtatcatcgatgtacccgttcagcttcactggcccgggagggactgtcagctacactctgacgccgatcatctgtggggcccaggccaatggccgatccgggctcaccatcattgttgtctttgctag

SEQ ID NO: 339501 - DNA, 1158 bp, Artificial Sequence
  derived and/or modified sequence
atgaggagcagcctggcccctggggtgtggttcttccgggccttcagccgggacagctggttccggggcctcatcctgctgctgaccttcctgatctatgcctgctaccacatgagcaggaagcccatcagcatcgtgaagagccggctgcaccagaactgcagcgagcagatcaagcccatcaatgacacccacagcctgaatgacaccatgtggtgctcctgggccccctttgacaaggacaactacaaggagctgctgggcggcgtggacaatgccttcctgattgcctatgccatcggcatgttcatctctggagtgtttggagagcggctgcccctgcgctactacctgtctgctggcatgctgctgagcggcctcttcaccagcctgtttggcctgggctacttctggaacatccacgagctgtggtactttgtggtgatccaggtgtgcaatggcctggtgcagaccaccggctggcccagcgtggtgacctgtgtgggcaactggtttgggaagggcaagaggggcttcatcatgggcatctggaacagccacacctctgtgggcaacatcctgggcagcctgattgctggcatctgggtgaatggccagtggggcctgtccttcatcgtgcccggcatcatcacagctgtgatgggcgtcatcaccttcctgttcctgattgagcacccagaagatgtggactgtgccccaccccagcaccacggggagcctgctgagaaccaggacaacccagaagatcctggcaacagcccctgcagcatccgggagagcggcctggagaccgtggccaagtgcagcaagggcccctgtgaggagcctgctgccatctccttctttggagccctgcgcatccctggggtggtggagttcagcctgtgcctgctgtttgccaagctggtgtcctacaccttcctgtactggctgcccctgtacatcgccaacgtggcccacttcagcgccaaggaggccggggacctgagcaccctgtttgatgtgggcggcatcattgatgtgcctgtgcagctgcactggccaggccgggactgccagctgcacagtgatgctgaccacctgtggggccctggccagtggcccatccgggcccaccaccactgctgcctgtgctag

SEQ ID NO: 339502 - DNA, 1158 bp, Artificial Sequence
  derived and/or modified sequence
atgcggagcagcctggcccccggcgtgtggttcttccgggccttctcaagagatagttggttcaggggcctaatactcctcctcaccttcctcatttacgcttgctatcacatgagtcgtaagccaatatccatcgttaaaagccgtctccatcaaaactgtagcgagcagattaaacctatcaacgacactcactccttgaatgatacaatgtggtgctcttgggctccattcgataaagacaattacaaggagctgctgggaggtgtggataatgcgtttctaatcgcgtacgctattgggatgtttatttccggggtattcggagaacggctccccctgcggtactatttaagcgcagggatgctgctttctgggctctttacttccctgttcggacttgggtacttctggaacatacacgagttatggtactttgttgtcatccaggtgtgcaacggtctcgtacagaccacgggatggcccagcgtcgtgacttgtgtgggaaattggtttggcaagggtaaacgcggtttcatcatgggtatttggaactcccatacctctgtggggaatatactcggaagtctcatagccgggatctgggtgaatggtcaatggggactaagcttcattgtcccaggcataataaccgcagttatgggagtcataacattcctctttcttatcgagcacccggaggacgtcgactgtgcgcctccacaacaccacggtgaaccagctgagaatcaggacaacccagaggatccaggaaacagtccatgcagcattagggagagtggccttgagacagtagctaaatgcagtaagggcccatgcgaagagcccgccgccatttcgttttttggagctctgcggatccccggtgtcgtggagtttagcctgtgcttactgtttgcaaaactggtatcctatacctttctgtactggctgcctctttatatcgctaacgtggcgcatttttctgcgaaagaggccggagacctcagtacactttttgacgtaggcggcattatcgatgttcctgttcagttgcactggcctggccgtgattgtcagctccatagcgacgcagaccatctgtggggcccaggacagtggcctatcagggcccaccaccactgctgcctttgttag

SEQ ID NO: 339503 - DNA, 1158 bp, Artificial Sequence
  derived and/or modified sequence
atgcgaagcagtttagctcccggtgtgtggttcttccgggcattcagtcgagattcatggttcagagggctgatactcctgctgacctttctcatttacgcttgttatcacatgagtaggaagcccatcagcattgtgaagtctagacttcaccagaattgctccgagcagatcaaaccaataaatgatacccactcgctgaacgataccatgtggtgttcctgggcaccctttgacaaggacaattataaagaacttctggggggagtagacaatgctttcctgatcgcatacgctatcggaatgtttatctccggcgttttcggtgaaaggcttcctctgcggtattacctctctgctgggatgcttctgtccgggctctttacatctctgtttggcttgggatacttctggaatatacatgagttgtggtactttgtggtaattcaggtctgcaacggcttagtgcagaccacaggttggcccagcgtcgtaacatgtgttggtaactggtttggcaaaggaaagcgcggatttattatgggtatttggaacagccatacctcggtgggcaatattctcgggtccctgatcgctggcatctgggtgaacggacaatggggattatccttcattgtcccaggaataattaccgcagtcatgggagtcattacattcctctttttaatagaacaccccgaggacgtcgattgcgccccaccgcaacaccacggggagccagcagaaaaccaggataacccagaagaccccggtaactcgccatgctccatacgcgagtcaggtctggaaactgttgcgaagtgctctaaagggccatgcgaagaacccgctgccatctctttcttcggtgctctcaggatcccaggagtcgtcgagtttagtttatgcctcttgttcgctaagctcgtgagttatactttcctgtactggcttcctctgtacatagcaaacgtagcccatttttccgccaaagaggctggtgacctgtccacccttttcgacgtcggcggtataatcgatgtaccagtacagcttcattggcctgggcgagattgtcagcttcattccgatgccgatcacctttggggcccaggacagtggcctatccgggctcatcaccactgttgcctgtgctag

SEQ ID NO: 339504 - DNA, 2772 bp, Artificial Sequence
  derived and/or modified sequence
agtggcggggaagcaaagcacaggagcgctgtggtgccagcggccgggctagggacgactggcgggtttgcgctggacccgaccccgagggcgggcgcaagggggcgggcgctgccgtactcaggccgcggggccagggcgggccggccggcggggcatttaaaccccgctgacagccagtccagcccgggacacgcgcccagctctgtagcctcctccgtcgactcagccttaggtaccggtcaggcaaaatgcggtcctccctggctccgggagtctggttcttccgggccttctccagggacagctggttccgaggcctcatcctgctgctgaccttcctaatttacgcctgctatcacatgtccaggaagcctatcagtatcgtcaagagccgtctgcaccagaactgctcggagcagatcaaacccatcaatgatactcacagtctcaatgacaccatgtggtgcagctgggccccatttgacaaggacaactataaggagttactagggggcgtggacaacgccttcctcatcgcctatgccatcggcatgttcatcagtggggtttttggggagcggcttccgctccgttactacctctcagctggaatgctgctcagtggccttttcacctcgctctttggcctgggatatttctggaacatccacgagctctggtactttgtggtcatccaggtctgtaatggactcgtccagaccacaggctggccctctgtggtgacctgtgttggcaactggttcgggaaggggaagcgggggttcatcatgggcatctggaattcccacacatctgtgggcaacatcctgggctccctgatcgccggcatctgggtgaacgggcagtggggcctgtcgttcatcgtgcctggcatcattactgccgtcatgggcgtcatcaccttcctcttcctcatcgaacacccagaagatgtggactgcgcccctcctcagcaccacggtgagccagctgagaaccaggacaaccctgaggaccctgggaacagtccctgctctatcagggagagcggccttgagactgtggccaaatgctccaaggggccatgcgaagagcctgctgccatcagcttctttggggcgctccggatcccaggcgtggtcgagttctctctgtgtctgctgtttgccaagctggtcagttacaccttcctctactggctgcccctctacatcgccaatgtggctcactttagtgccaaggaggctggggacctgtctacactcttcgatgttggtggcatcatagatgttcctgtacaactacattggccaggacgggattgccagctccatagtgatgctgatcatctgtgggggcctggtcaatggcccatacgcgctcatcaccactgctgtctctgctgatctggggactcacaagagcctgaagggcaacgccaaagccctgtccacggtcacggccatcattgacggcaccggctccataggtgcggctctggggcctctgctggctgggctcatctcccccacgggctggaacaatgtcttctacatgctcatctctgccgacgtcctagcctgcttgctcctttgccggttagtatacaaagagatcttggcctggaaggtgtccctgagcagaggcagcgggtataaagaaatatgaggccccaattggaacagcagcatggagggtcccagttgggtccccaacgtgctccccatgggcaagacaatggaaacttccacaagcagggaaggcaaaccctctttattgaacattagccagcccagcccagaccccagggctgcctaaggacacagagattctccatgggaaggggactgccaagcatgaggaaatagaagattcaggggcctgagctctggaagctgcaagcaaaagggatgggactagggctgagttgtgtctccattttgataaggaaaggatatgctcagactcttgcttgttcagattccaagacagaaggcttcacaaggccaacgcctggaaaatgggcatctctccttcccatgttaagctttaacctctgtaatctgcctgtatctataggtgggcatctcactccaccaaaggagcccagcctctctttgtccctctatccatgcaacagtcttctctgtgcatttccccaagctgggccctcttctactctccatttaggcctgttgataactccattacccgcccatcactgctgttcctccagggccagcactcgggcgaggcaggggagctgccttcggtacataatttgaaggggcactccctcttgggcacatgccggccctgagtgcctcccttgcctcactctgatcctggccccataatgtcctcagtggaaggtgatgggggccggtgctgtggggagagtagaaagaggggttggcatgactaaaaataccagtatgtgtattaagtattttgagaatgaaatgccaaggagtgcctactatatgccagctctaggaatggagtagacagtggacacaagaaggacttacgccctgagcacaggtgccaatggtgacaagactggcaagacgtgagggcatgaatggttcattcaggcagctgctgcagatgtggtcacctggtgccatctgctgctcccttttccacttttctatgtcctccttccaccccaagtcccggatcactcgctgttttctggctagctcttggcatctccatctgagcctaaagttgcccactggcaccaatagattctgtttgacctgc

SEQ ID NO: 339505 - protein, 317 aa, Artificial Sequence
  derived and/or modified sequence
MWLAREGIVAPLPGEWKPCQDITGDIYYFNFANGQSMWDHPCDEHYRSLVIQERAKLSTSGAIKKKKKKKEKKDKKDRDPPKSSLETQPEEGLLPPSSFLCSLSPPSAPGLADLDLDQEMQAISEGSYNKGKSPGMLGDTPWRFMGALPRKLQPLSKGQPSQIHQVFADMEKILGRAPAQCRRELGDQQGLEKLQKATEKIYLGFSDPETEELEMRSRQQKLGTPAPQNTGLLQNMQDVVESRNQASVHSKLSEAIKGLPLKGEQHSHSLAKLSPTGPGGDKGQSPIPMWICCRLRASNCRNTSAAWRLKLKRSSTC

SEQ ID NO: 339506 - protein, 841 aa, Artificial Sequence
  derived and/or modified sequence
MGARAAGTSSGGGPRPCLARGLSASPFPAKQQHPQAGASPAELQQRAYYRARQDAASQPGLGFLISPSSCSSWGPGSFTRSCGYPTLCSSWISKREPGELSGVWTSAWRTHAAFTGSQDLCLYKGLGSIYEDKTALSLLGLGEETNEEDEEESDNQSVHSSSEPLRNLHLDIGALGGDFEYEESLRTSQPEEKKDVSLDSDAAGPPTPCKPSSPGADSSLSSAVGKGRQGSGARPGLPEKEENEKSEPKICRNLVTPKADPTGSEPAKASEKEAPEDTVDAGEEGSRREEAAKEPKKKASALEEGSSDASQELEISEHMKEPQLSDSIASDPKSFHGLDFGFRSRISEHLLDVDVLSPVLGGACRQAQQPLGIEDKDDSQSSQDELQSKQSKGLEERYHRLSPPLPHEERAQSPPRSLATEEEPPQGPEGQPEWKEAEELGEDSAASLSLQLSLQRRSTEPVAPPEQLSEAALKAMEEAVAQVLEQDQRHLLESKQEKMQQLREKLCQEEEEEILRLHQQKEQSLSSLRERLQKAIEEEEARMREEESQRLSWLRAQVQSSTQADEDQIRAEQEASLQKLREELESQQKAERASLEQKNRQMLEQLKEEIEASEKSEQAALNAAKEKALQQLREQLEGERKEAVATLEKEHSAELERLCSSLEAKHREVVSSLQKKIQEAQQKEEAQLQKCLGQVEHRVHQKSYHVAGYEHELSSLLREKRQEVEGEHERRLDKMKEEHQQVMAKAREQYEAEERKQRAELLGHLTGELERLQRAHERELETVRQEQHKRLEDLRRRHREQERKLQDLELDLETRAKDVKARLALLEVQVRDLQESLTSES

SEQ ID NO: 339507 - DNA, 2526 bp, Artificial Sequence
  derived and/or modified sequence
atgggcgccagagccgccggcaccagcagcggcggcggccccagaccctgcctggccagaggcctgagcgccagccccttccccgccaagcagcagcacccccaggccggcgccagccccgccgagctgcagcagagagcctactacagagccagacaggacgccgccagccagcccggcctgggcttcctgatcagccccagcagctgcagcagctggggccccggcagcttcaccagaagctgcggctaccccaccctgtgcagcagctggatcagcaagagagagcccggcgagctgagcggcgtgtggaccagcgcctggagaacccacgccgccttcaccggcagccaggacctgtgcctgtacaagggcctgggcagcatctacgaggacaagaccgccctgagcctgctgggcctgggcgaggagaccaacgaggaggacgaggaggagagcgacaaccagagcgtgcacagcagcagcgagcccctgagaaacctgcacctggacatcggcgccctgggcggcgacttcgagtacgaggagagcctgagaaccagccagcccgaggagaagaaggacgtgagcctggacagcgacgccgccggcccccccaccccctgcaagcccagcagccccggcgccgacagcagcctgagcagcgccgtgggcaagggcagacagggcagcggcgccagacccggcctgcccgagaaggaggagaacgagaagagcgagcccaagatctgcagaaacctggtgacccccaaggccgaccccaccggcagcgagcccgccaaggccagcgagaaggaggcccccgaggacaccgtggacgccggcgaggagggcagcagaagagaggaggccgccaaggagcccaagaagaaggccagcgccctggaggagggcagcagcgacgccagccaggagctggagatcagcgagcacatgaaggagccccagctgagcgacagcatcgccagcgaccccaagagcttccacggcctggacttcggcttcagaagcagaatcagcgagcacctgctggacgtggacgtgctgagccccgtgctgggcggcgcctgcagacaggcccagcagcccctgggcatcgaggacaaggacgacagccagagcagccaggacgagctgcagagcaagcagagcaagggcctggaggagagataccacagactgagcccccccctgccccacgaggagagagcccagagcccccccagaagcctggccaccgaggaggagcccccccagggccccgagggccagcccgagtggaaggaggccgaggagctgggcgaggacagcgccgccagcctgagcctgcagctgagcctgcagagaagaagcaccgagcccgtggccccccccgagcagctgagcgaggccgccctgaaggccatggaggaggccgtggcccaggtgctggagcaggaccagagacacctgctggagagcaagcaggagaagatgcagcagctgagagagaagctgtgccaggaggaggaggaggagatcctgagactgcaccagcagaaggagcagagcctgagcagcctgagagagagactgcagaaggccatcgaggaggaggaggccagaatgagagaggaggagagccagagactgagctggctgagagcccaggtgcagagcagcacccaggccgacgaggaccagatcagagccgagcaggaggccagcctgcagaagctgagagaggagctggagagccagcagaaggccgagagagccagcctggagcagaagaacagacagatgctggagcagctgaaggaggagatcgaggccagcgagaagagcgagcaggccgccctgaacgccgccaaggagaaggccctgcagcagctgagagagcagctggagggcgagagaaaggaggccgtggccaccctggagaaggagcacagcgccgagctggagagactgtgcagcagcctggaggccaagcacagagaggtggtgagcagcctgcagaagaagatccaggaggcccagcagaaggaggaggcccagctgcagaagtgcctgggccaggtggagcacagagtgcaccagaagagctaccacgtggccggctacgagcacgagctgagcagcctgctgagagagaagagacaggaggtggagggcgagcacgagagaagactggacaagatgaaggaggagcaccagcaggtgatggccaaggccagagagcagtacgaggccgaggagagaaagcagagagccgagctgctgggccacctgaccggcgagctggagagactgcagagagcccacgagagagagctggagaccgtgagacaggagcagcacaagagactggaggacctgagaagaagacacagagagcaggagagaaagctgcaggacctggagctggacctggagaccagagccaaggacgtgaaggccagactggccctgctggaggtgcaggtgagagacctgcaggagagcctgaccagcgagagctag

SEQ ID NO: 339508 - DNA, 2526 bp, Artificial Sequence
  derived and/or modified sequence
atgggcgctcgggctgctggcaccagctcaggcggcggtccccgtccctgcctcgcaagaggtctgagtgcctctccctttccagcaaagcaacaacacccccaggcaggagcatctccagcagaattgcaacaacgggcctactatagagcgaggcaggacgccgccagccaacccgggctcggcttcctgatcagcccctctagctgtagttcttggggcccgggatcgttcactcggagctgtggatatcccaccttatgctcctcatggatttctaagcgtgagccaggagaattaagcggcgtttggacgagtgcttggcgaacccatgctgcattcacagggagccaagacctttgtctttacaaaggtctcggcagcatctacgaggacaaaactgccctctctctgctgggcctgggggaagaaaccaatgaggaggatgaagaggagagcgataatcagtcggtccactcaagtagtgagcctcttagaaatctgcacctggatatcggcgctttagggggggatttcgaatacgaagagtctctcaggacttcacaaccagaagagaaaaaagatgtaagcctggatagtgatgcagccggtcctcccacaccatgtaagcccagctcgcccggggctgatagcagcctgagttctgccgtcggcaaaggacggcagggatcaggagctcggcccgggttgccagagaaagaggaaaacgagaaaagcgagcctaaaatttgcagaaaccttgtgactcctaaagccgatcctaccggatccgagccagctaaagcttccgaaaaagaggcccctgaggacaccgtggacgccggagaagagggatctcgaagagaggaggccgctaaagagccgaaaaagaaagcatcagccctcgaagaggggtcctctgatgcctcgcaagagctcgaaatctcagagcacatgaaggagcctcagctctccgattcaatagcttccgatcctaaatccttccatggtctggatttcggttttaggtccaggatatcagagcatctgctagatgtcgatgtcctaagccccgttctgggcggagcctgtagacaggctcagcagccgctgggcattgaggataaagatgattcccagtcctcccaagacgaactgcaatctaaacagagtaaagggttggaagagaggtaccatcgcctctctccccccttgccacatgaggagagggcgcagagcccaccaaggtccctagccacagaggaagaacccccacagggtccagaagggcagcctgagtggaaggaagcggaagagctcggcgaggactctgccgcatcattatcgctacaactgtccctgcaaaggagatccactgaaccggtggcaccacccgagcagttgagtgaggctgctctgaaggcaatggaggaggctgttgcccaggtccttgaacaggaccagagacatctcctggagagcaagcaggagaagatgcagcagcttagagaaaaattgtgtcaagaggaagaggaagagattctccgtctccatcagcagaaggaacaatcactgagttccctgagagaaagactacagaaggcaatagaagaagaggaggctaggatgagggaggaggaatctcaacgccttagctggctaagagcccaggtgcagtccagtacacaggctgacgaagaccaaattagagctgaacaggaggcttcactgcagaagctgcgcgaggagctggagagccagcagaaagccgagcgcgcttcccttgagcagaagaaccggcagatgttggagcagctgaaggaggagattgaggcatccgagaaatccgagcaggccgcattaaacgctgctaaagaaaaggccttacagcagctccgcgagcaattggagggcgaacgcaaagaagctgtggcgacactggaaaaagagcactctgcagagttggaaaggctgtgctcgtctctggaggcgaagcatcgcgaggttgtctcctctttgcagaagaagattcaggaggcacagcagaaagaagaggctcagctccagaagtgtctgggccaggtcgagcatcgcgtgcatcagaagtcataccacgttgccgggtatgagcacgagcttagttccctcctgcgggaaaaacgccaggaggttgagggtgagcacgagcgacgccttgataaaatgaaagaggaacaccagcaggtgatggccaaggcgcgcgagcagtatgaggcagaggaacgcaaacaacgcgcagagttactcggccacctcacgggggaactggaaagacttcagcgtgcacacgaacgagaactcgagaccgtgaggcaggaacagcacaaaagacttgaagatctaagacgcaggcatagagagcaagaacgcaaactgcaagacttggaattggacttggaaactcgagcaaaagacgtgaaagctcggttggccctactcgaagtccaggtgcgagatctccaggaatcgctgacatcggagtcttag

SEQ ID NO: 339509 - DNA, 2526 bp, Artificial Sequence
  derived and/or modified sequence
atgggagccagagctgctggaacatcctcaggaggtggccctcgcccctgcttggcaagaggcctctcagcaagcccatttccagccaagcagcagcaccctcaggcaggggctagtccagcagagctccagcagagggcttactacagagccaggcaagatgcagcatctcaaccaggccttgggttcctcattagccccagttcatgttcctcttgggggcctggctcctttacgaggtcttgtggataccccaccctctgctcttcgtggatctcaaagcgtgagcctggggagctcagtggagtctggacgtcagcttggagaactcatgctgccttcacagggtctcaagacctctgcttatacaaagggttgggctccatatatgaggacaagactgctctcagcctcttgggtttaggagaagaaaccaatgaggaggatgaggaggaaagtgacaaccagagtgtccacagctcaagtgagcctcttaggaacctacacctggacattggggcactggggggtgactttgagtatgaggagtctctgagaacaagccagccagaggagaagaaggatgtttctctggattcagatgctgccggtccccctactccctgcaagccctccagcccaggtgcagacagcagtctgagcagtgctgttggcaaagggcgacagggaagtggagcaagacctggtcttccagaaaaagaggaaaatgagaagagtgaacctaagatttgcaggaatctggtgacccccaaggcagaccctacaggcagtgagcctgccaaagcctctgaaaaggaagcaccagaggacacagtagatgcaggagaggagggttccaggagggaagaggcagccaaggagccaaagaagaaggcttctgctctggaagagggcagttcagacgccagccaagaactggaaattagtgaacacatgaaggaaccacagctctcagactccatagcttctgaccccaagtccttccatggcctggacttcggttttcgcagccggatctcggagcacctgctggatgttgatgtgctttccccagtcctgggtggagcttgtcggcaggcccagcaaccactgggaatagaagacaaggatgacagccagtccagccaagatgagctgcagagcaagcagtccaaaggcctggaggagaggtaccataggttatctcctccacttccacacgaggagcgggcccagagtccccctcgcagcctggccactgaagaagagcctccccagggccccgaggggcagcccgagtggaaggaggcagaggagcttggggaggactctgcagccagcctcagcctgcagctgtccctccagaggcgatccacagagcctgtggctcccccagagcagctctcagaggctgcactaaaggccatggaagaggcagtggcccaagtactcgagcaagaccagaggcacctgctggaatccaagcaagagaagatgcagcaactgcgggagaagctgtgccaagaggaggaagaggagatcctccggcttcaccagcagaaagagcaatctctcagttccttgagggagcggctgcagaaagccattgaggaggaggaggcccggatgagagaggaggaaagccagaggctatcctggctccgagctcaggtccagtccagcacacaagcagatgaggaccaaatcagggctgagcaagaggcttccctgcagaaactgagagaagagttggagtctcaacagaaggctgagagggccagcttggaacagaaaaataggcaaatgctggagcagctcaaggaagagatagaggcttcggagaagagcgagcaggctgccctgaatgctgcaaaggagaaggctctgcagcagctgagggagcagctggaaggggagaggaaagaagctgtggcaacgctggagaaggagcacagtgctgagctggagcggctctgctcctcattggaggccaagcaccgggaggtggtctccagcctccagaagaagatacaggaagctcaacagaaagaggaggcccagctgcagaagtgccttgggcaagtggagcacagagttcaccagaagtcttatcacgtggctgggtatgagcacgagctcagcagtctcctgcgagagaagcgccaggaagtggaaggggagcatgagaggaggttggacaagatgaaggaggagcaccagcaagtgatggctaaggccagagagcagtatgaagctgaggagaggaagcagcgggctgagcttctggggcacctgaccggagagctggagcgcctgcagagggcccatgaacgagaactggagactgtgaggcaggagcaacacaagcgtcttgaggacttgcggcgccggcacagggagcaggaaaggaagctccaggatttagagttggaccttgaaaccagagctaaagatgtcaaggccagattggctctgctggaggtccaggtgagggatctgcaggagtccttgacctcagagtcatag

SEQ ID NO: 339510 - DNA, 2526 bp, Artificial Sequence
  derived and/or modified sequence
atgggcgcccgggccgccggcaccagcagcggcggcggcccccggccctgcctggcccggggcctgagcgccagccccttccctgccaagcagcagcacccccaggccggggccagccctgctgagctgcagcagagggcctactaccgggcccggcaggatgctgccagccagcccggcctgggcttcctgatcagccccagcagctgcagctcctggggccctggcagcttcaccaggagctgtggctaccccaccctgtgcagctcctggatcagcaagcgggagcctggagagctgtctggagtgtggaccagcgcctggaggacccacgccgccttcaccggcagccaggacctgtgcctgtacaagggcctgggcagcatctatgaggacaagacagccctgagcctgctgggcctgggggaggagaccaatgaggaggatgaggaggagagtgacaaccagagcgtgcacagcagcagcgagcccctgaggaacctgcacctggacatcggggccctgggcggggactttgaatatgaggagagcctgcggaccagccagcctgaggagaagaaggatgtgtccctggacagtgatgctgctggcccccccaccccctgcaagcccagcagccctggagctgacagcagcctgagcagcgctgtgggcaagggccggcagggcagcggggcccggcccggcctgcctgagaaggaggagaatgagaagtctgagcccaagatctgcaggaacctggtgacccccaaggctgaccccaccggcagcgagcccgccaaggccagcgagaaggaggcccctgaggacacagtggatgctggggaggagggcagcagaagagaggaggccgccaaggagcccaagaagaaggccagcgccctggaggagggcagcagtgatgccagccaggagctggagatcagcgagcacatgaaggagccccagctgagtgacagcatcgccagtgaccccaagagcttccacggcctggactttggcttccgcagccgcatcagcgagcacctgctggatgtggatgtgctgagccctgtgctgggcggggcctgccggcaggcccagcagcccctgggcatcgaggacaaggatgacagccagagcagccaggatgagctgcagagcaagcagagcaagggcctggaggagcgctaccaccggctgagcccccccctgccccatgaggagcgggcccagagcccccccaggagcctggccacagaggaggagcccccccagggccctgagggccagcctgagtggaaggaggccgaggagctgggggaggacagcgctgccagcctgagcctgcagctgagcctgcagaggaggagcacagagcctgtggcccctcctgagcagctgtctgaggccgccctgaaggccatggaggaggccgtggcccaggtgctggagcaggaccagaggcacctgctggagagcaagcaggagaagatgcagcagctgcgggagaagctgtgccaggaggaggaggaggagatcctgcggctgcaccagcagaaggagcagagcctgagcagcctgcgggagcggctgcagaaggccatcgaggaggaggaggccaggatgagggaggaggagagccagaggctgtcctggctgcgggcccaggtgcagagcagcacccaggctgatgaggaccagatccgggcagagcaggaggccagcctgcagaagctgcgggaggagctggagagccagcagaaggccgagcgggccagcctggagcagaagaaccggcagatgctggagcagctgaaggaggagattgaggccagcgagaagtctgagcaggccgccctgaatgctgccaaggagaaggccctgcagcagctgcgggagcagctggagggggagaggaaggaggccgtggccaccctggagaaggagcacagcgctgagctggagcggctgtgcagcagcctggaggccaagcaccgggaggtggtgagcagcctgcagaagaagatccaggaggcccagcagaaggaggaggcccagctgcagaagtgcctgggccaggtggagcaccgggtgcaccagaagagctaccacgtggccggctatgaacatgagctgagcagcctgctgcgggagaagaggcaggaggtggagggggagcacgagcggcggctggacaagatgaaggaggagcaccagcaggtgatggccaaggcccgggagcagtatgaggccgaggagaggaagcagagagctgagctgctgggccacctgaccggggagctggagcggctgcagagggcccacgagcgggagctggagaccgtgcggcaggagcagcacaagaggctggaggacctgcggcggcggcaccgggagcaggagaggaagctgcaggacctggagctggacctggagacccgggccaaggatgtgaaggcccggctggccctgctggaggtgcaggtgcgggacctgcaggagagcctgaccagcgagagctag

SEQ ID NO: 339511 - DNA, 2526 bp, Artificial Sequence
  derived and/or modified sequence
atgggcgcccgggccgccggcaccagcagcggcggcggcccccggccttgcctggccagggggctgtctgccagcccgttcccagccaaacagcagcatccgcaggccggggcctcgcccgccgagctgcagcagcgcgcatattacagagcccgacaggatgctgcatcccagccagggctgggcttcctgatttccccctcaagttgttcctcctgggggccagggtcatttacaaggtcgtgtggttatcctactctctgcagttcatggatcagtaaaagggagccaggggaactctctggcgtgtggacgagcgcttggcgaacccacgccgctttcacaggatcccaggacctgtgtctgtacaaaggtctcgggtctatatacgaagacaaaactgcattgagcctactcggattaggtgaagaaacgaatgaggaagacgaagaagagtctgataatcagagtgtgcatagctccagtgaacccttgcggaacctccatttggacatcggtgccctgggcggggattttgagtacgaggagtccctgcgcacaagccagcctgaagaaaagaaggacgtcagcctcgattccgacgctgctggcccgcccaccccctgcaagcccagctctcctggggcggactcgtctctgtcttccgccgtggggaagggtcgccagggctcaggtgctcgtccaggcctgccagaaaaagaagagaacgagaaaagcgaaccaaaaatctgtaggaacctggtgacccccaaagccgaccccaccggctctgagcctgccaaagcgtctgagaaagaggccccggaagatactgtggacgccggcgaagaagggagtcgaagagaggaagccgccaaggagcctaaaaaaaaagcctctgcactagaggagggcagcagcgatgctagtcaggaactggagatcagcgagcacatgaaggagccccagctctccgacagcatcgcctccgatcctaagtccttccacggcttagattttggatttcgaagccgaattagcgaacatcttcttgacgtggacgtgctaagcccagtgttgggaggagcatgtcggcaggcacagcaaccgctgggaatcgaggataaggacgatagccagagtagtcaggatgaactccagtctaaacagtctaaaggactggaagagcgctatcaccggctgtcaccgccactgccccatgaagaacgggcacagagtcctcctcggagcctcgctactgaggaggaaccacctcagggtccagagggtcagcccgagtggaaggaagcagaggagctgggggaagattccgccgcttctttaagcctgcaactaagtttacaacgcaggtcaacagaacccgttgctcctcctgaacaactgtcagaggctgcattgaaggcgatggaggaggccgtggcgcaagttcttgagcaggaccagcgacatcttctggagagcaaacaggaaaagatgcagcaactaagggaaaagctatgtcaggaagaagaagaggaaatcctgaggctgcatcagcaaaaagaacagtccctgtcttccctgagagagagactgcagaaagcaatagaggaagaggaagcccgcatgcgagaagaggaaagccagcgcctttcttggctccgcgcacaggtacagagtagtactcaggctgatgaggatcagatccgcgccgagcaggaggccagcctacagaaactccgggaagaactcgaatcacagcagaaagctgaaagagccagcttggaacaaaagaatcgccagatgctcgaacagctcaaggaggaaatcgaggcttctgaaaaaagcgaacaggcggcactgaacgccgccaaggagaaggcactccagcagctcagagagcagctcgaaggagaaaggaaagaggccgtcgcaaccctggagaaagagcactcagcagagctggagagactatgcagcagcctcgaggctaagcatcgagaagtagtatccagcctgcagaagaagatccaggaggcccaacaaaaagaagaggcacagctgcaaaagtgtctagggcaggtggaacatagggttcaccagaagagttaccatgtggctggttacgagcatgaactgtcttccctcctgcgcgaaaagcggcaagaagttgaaggcgagcacgagcgtcgcctggataaaatgaaagaggaacatcaacaggttatggcaaaagcccgggaacagtatgaggccgaagagaggaagcaacgcgccgagctgctaggacacctgaccggcgagctggagcgtctgcagagggctcacgagcgggagctggaaaccgttcgccaggagcagcacaagcgattggaagacttgaggcgacgtcaccgtgagcaggaacgcaaacttcaggacctcgagttggacttggagaccagggccaaggatgttaaggcaaggctggccctgctggaagtacaagtccgcgacctccaagaatcccttacgtctgaaagttag

SEQ ID NO: 339512 - DNA, 2526 bp, Artificial Sequence
  derived and/or modified sequence
atgggtgcccgtgccgcagggacgagttctggcggtggtcctcgaccatgtctcgcccgaggcctctctgcgtccccttttcctgcaaaacagcaacacccccaggcgggagcttcgcccgctgaacttcagcagagggcttactacagggcccgacaggatgctgcttcccaacctgggctgggcttcctgatctcccccagcagttgcagttcatggggcccaggttcgttcacgcggtcttgtggctaccctacactgtgtagctcctggataagtaaacgcgaacctggagagctgagcggagtctggactagcgcttggaggacacacgccgcttttaccggttcgcaggatttatgtttgtataaggggttgggatccatttatgaggacaaaactgcactgtcccttttgggactgggtgaagaaaccaacgaagaggacgaggaagaatcggacaatcaaagtgtgcactcctcatctgagcctctgagaaatctgcatctcgacatcggagccctcggaggcgacttcgaatatgaggagtctttgaggaccagtcagcccgaggagaaaaaggacgtgtccctggactccgacgcagccggaccacctactccttgcaaacccagttccccaggggcagactcttcactcagctccgcagtggggaaggggaggcagggttccggcgcaagaccgggactacccgaaaaagaggaaaatgaaaagagtgagccaaagatttgccggaatctggtgacgcctaaggcagaccccaccggtagtgagcccgcaaaagcgtcggagaaggaggcccctgaggatacagtcgatgccggagaggaaggctcacgtcgggaagaagccgctaaagagcccaagaagaaggcgtcagcccttgaagagggctcctccgatgcctcccaggagcttgagatctctgaacacatgaaggaaccccagttgtctgacagtatagcatcagaccccaagagcttccatggactggatttcgggtttaggtccaggatctctgaacatctgctggatgttgacgtgttgagccccgtgttaggcggtgcctgccgccaggcacaacagcccctcggaatcgaagacaaggatgattcacagtcttcacaagatgagcttcagtcgaagcagtcaaaagggctcgaagagcggtaccaccgcctgtcacctccactgcctcacgaagagcgggcacagagtccccctcgttctctcgccacagaggaagaaccccctcaaggcccagaggggcaaccagagtggaaagaggctgaagagctgggggaggacagcgcggcaagcctgtcactgcaactctctctgcagcggcgttcaacagagcctgtggctcctcctgaacagctatctgaggcggcacttaaagccatggaggaggccgtcgcccaggtgttggagcaggatcagcgccatttacttgaaagcaagcaggagaagatgcagcagctccgcgaaaaattatgtcaagaggaggaagaagagatcctgagattgcaccagcagaaagaacagagcctgtctagtctgagagagcgattacagaaagcaattgaggaggaagaagccagaatgcgcgaagaggaatctcaacggctctcatggctacgggcacaagtccagagtagcacccaggcagatgaggaccaaatacgtgcagaacaggaagcgtccttgcagaagttgcgcgaggagctggaatcccaacagaaagcagaacgggcttccctcgaacaaaaaaaccgtcagatgctcgaacagttgaaggaggagatagaagctagtgaaaagtccgagcaggctgccctgaatgctgcgaaggagaaagcacttcagcagctacgagaacagcttgaaggagaaagaaaggaggccgtggcgacccttgagaaggagcattctgctgagttggagcgcctgtgctcctctcttgaggcaaagcatcgggaggtggtgtcatccctgcagaaaaagatacaggaggcccagcagaaagaggaggcccagctgcagaaatgcctggggcaggtggaacaccgtgtgcatcagaaaagctaccacgtggcgggatacgagcatgagttgagcagtctgttacgggagaagcggcaggaagttgaaggggaacacgaaaggcggctcgacaaaatgaaagaagaacaccagcaggttatggcgaaagctagagagcagtacgaagctgaggagcggaagcaaagggcggagctcctcggtcacctgacaggagagctggaacgcctgcagcgagctcatgagagagagttagagaccgtgaggcaggaacagcataaaaggctggaagatttgagaagaaggcacagagaacaggaacggaagctgcaagacctggaattagacttggagactagggcgaaggatgttaaagccaggctggcattgctcgaggtgcaagtcagggacttacaggaatcactgacgtcagagtcctag

SEQ ID NO: 339513 - DNA, 348 bp, Artificial Sequence
  derived and/or modified sequence
atggccggcagacccctgagaatcggcgaccagctggtgctggaggaggactacgacgagacctacatccccagcgagcaggagatcctggagttcgccagagagatcggcatcgaccccatcaaggagcccgagctgatgtggctggccagagagggcatcgtggcccccctgcccggcgagtggaagccctgccaggacatcaccggcgacatctactacttcaacttcgccaacggccagagcatgtgggaccacccctgcgacgagcactacagaagcctggtgatccaggagagagccaagctgagcaccagcggcgccatcaagaagaagaagaagaagtag

SEQ ID NO: 339514 - DNA, 366 bp, Artificial Sequence
  derived and/or modified sequence
atggccggcagacccctgagaatcggcgaccagctggtgctggaggaggactacgacgagacctacatccccagcgagcaggagatcctggagttcgccagagagatcggcatcgaccccatcaaggagcccgagctgatgtggctggccagagagggcatcgtggcccccctgcccggcgagtggaagccctgccaggacatcaccggcgacatctactacttcaacttcgccaacggccagagcatgtgggaccacccctgcgacgagcactacagaagcctggtgatccaggagagagccaagctgagcaccagcggcgccatcaagaagaagaagaagaagaaggagaagaaggacaagtag

SEQ ID NO: 339515 - DNA, 954 bp, Artificial Sequence
  derived and/or modified sequence
atgtggctggccagagagggcatcgtggcccccctgcccggcgagtggaagccctgccaggacatcaccggcgacatctactacttcaacttcgccaacggccagagcatgtgggaccacccctgcgacgagcactacagaagcctggtgatccaggagagagccaagctgagcaccagcggcgccatcaagaagaagaagaagaagaaggagaagaaggacaagaaggacagagacccccccaagagcagcctggagacccagcccgaggagggcctgctgccccccagcagcttcctgtgcagcctgagcccccccagcgcccccggcctggccgacctggacctggaccaggagatgcaggccatcagcgagggcagctacaacaagggcaagagccccggcatgctgggcgacaccccctggagattcatgggcgccctgcccagaaagctgcagcccctgagcaagggccagcccagccagatccaccaggtgttcgccgacatggagaagatcctgggcagagcccccgcccagtgcagaagagagctgggcgaccagcagggcctggagaagctgcagaaggccaccgagaagatctacctgggcttcagcgaccccgagaccgaggagctggagatgagaagcagacagcagaagctgggcacccccgccccccagaacaccggcctgctgcagaacatgcaggacgtggtggagagcagaaaccaggccagcgtgcacagcaagctgagcgaggccatcaagggcctgcccctgaagggcgagcagcacagccacagcctggccaagctgagccccaccggccccggcggcgacaagggccagagccccatccccatgtggatctgctgcagactgagagccagcaactgcagaaacaccagcgccgcctggagactgaagctgaagagaagcagcacctgctag

SEQ ID NO: 339516 - DNA, 348 bp, Artificial Sequence
  derived and/or modified sequence
atggctggaaggcccctgcggataggtgaccagctggtcctcgaggaagattatgacgagacctacataccgagcgagcaggaaattctcgaattcgctcgggagattggtattgatcctatcaaggagccagaactgatgtggctcgcccgagaaggtatcgtggctccacttcctggcgaatggaaaccctgccaggatattaccggtgatatctattactttaattttgctaacggccagagtatgtgggaccacccatgtgacgagcattaccggagtcttgtgatccaggagcgagccaagctttcgacaagcggagccattaagaaaaagaagaagaaatag

SEQ ID NO: 339517 - DNA, 348 bp, Artificial Sequence
  derived and/or modified sequence
atggccggacgacctcttcggatcggagaccagctagttttagaggaagattacgacgagacttatataccatctgaacaggagattctggagtttgctagggagatcggaatcgaccccatcaaagagccggagctgatgtggctggcgagagagggcattgtggcccctctgccgggtgagtggaagccctgccaagacatcacaggcgatatatactacttcaacttcgccaatggtcagtccatgtgggatcacccatgcgatgagcactaccgttctcttgtaatccaggaaagggccaaactgtccacctctggagccattaagaaaaagaagaagaaatag

SEQ ID NO: 339518 - DNA, 366 bp, Artificial Sequence
  derived and/or modified sequence
atggccgggagacctttgcgcatcggcgaccagctcgtgctggaagaggactatgatgaaacatacattcctagtgaacaggagatcctggaattcgcgcgggaaatagggatcgatccaattaaagaacccgagcttatgtggcttgctagagaggggatagttgcccccttacctggcgaatggaagccatgccaggacattaccggcgatatctactactttaatttcgccaatgggcagtccatgtgggatcacccttgcgatgagcattatagaagtctcgtaattcaagagcgcgctaagctgtctacttccggagcaataaaaaagaagaaaaagaagaaggagaagaaggataagtag

SEQ ID NO: 339519 - DNA, 954 bp, Artificial Sequence
  derived and/or modified sequence
atgtggctcgcgcgcgaggggattgtcgccccactgccaggtgagtggaagccttgtcaggatattaccggggacatctactattttaacttcgccaatgggcagtctatgtgggaccacccgtgcgatgagcactatcgcagcctcgtaatccaggagagagctaagttaagtacatcgggcgcaatcaagaagaaaaagaaaaagaaagaaaagaaggataagaaggatcgagatccacccaaatctagtctggagacacagcccgaggaagggctgttgccaccctctagcttcctttgctccttatcaccccctagtgcccccggcctggcagacctcgaccttgaccaggagatgcaggccatcagcgaaggtagctataacaagggtaaatctcctggcatgttaggggacactccatggcggtttatgggagccctgccacgaaaattgcagccactgtcaaagggacaaccatctcagatccaccaagtgtttgcagatatggaaaaaatcctcgggcgagcaccagctcaatgcaggcgcgagctaggcgatcagcaaggtttggaaaagcttcagaaggcaaccgagaagatataccttggcttttccgatcccgagacagaagagctggagatgcggtctaggcagcagaaactaggcacccctgctccccagaacacgggcctcctgcagaacatgcaggatgtagttgagtcccgcaaccaagcttccgtccattcgaaactttccgaggccatcaagggactgcctctgaaaggagagcagcactcgcactctttggctaaactcagtcctacaggacccggtggcgataaaggccagagtccaattccaatgtggatttgctgtcgactgcgggcatcaaactgtcgcaacacatccgctgcatggcggcttaaactgaagagatcctcaacgtgttag

SEQ ID NO: 339520 - DNA, 348 bp, Artificial Sequence
  derived and/or modified sequence
atggccggccggcccctgcgcatcggggaccagctggtgctggaggaggactatgatgagacctacatccccagcgagcaggagatcctggagtttgcccgggagatcggcatcgaccccatcaaggagcctgagctgatgtggctggcccgggagggcatcgtggcccccctgcctggagagtggaagccctgccaggacatcactggagacatctactacttcaactttgccaacggccagagcatgtgggaccacccctgtgatgagcactaccgcagcctggtgatccaggagcgggccaagctgagcaccagcggggccatcaagaagaagaagaagaagtag

SEQ ID NO: 339521 - DNA, 366 bp, Artificial Sequence
  derived and/or modified sequence
atggccggccggcccctgcgcatcggggaccagctggtgctggaggaggactatgatgagacctacatccccagcgagcaggagatcctggagtttgcccgggagatcggcatcgaccccatcaaggagcctgagctgatgtggctggcccgggagggcatcgtggcccccctgcctggagagtggaagccctgccaggacatcactggagacatctactacttcaactttgccaacggccagagcatgtgggaccacccctgtgatgagcactaccgcagcctggtgatccaggagcgggccaagctgagcaccagcggggccatcaagaagaagaagaagaagaaggagaagaaggacaagtag

SEQ ID NO: 339522 - DNA, 954 bp, Artificial Sequence
  derived and/or modified sequence
atgtggctggcccgggagggcatcgtggcccccctgcctggagagtggaagccctgccaggacatcactggagacatctactacttcaactttgccaacggccagagcatgtgggaccacccctgtgatgagcactaccgcagcctggtgatccaggagcgggccaagctgagcaccagcggggccatcaagaagaagaagaagaagaaggagaagaaggacaagaaggaccgggacccccccaagagcagcctggagacccagcctgaggagggcctgctgccccccagcagcttcctgtgcagcctgagccccccatctgcccctggcctggccgacctggacctggaccaggagatgcaggccatcagcgagggcagctacaacaagggcaagagccctggcatgctgggggacaccccctggaggttcatgggcgccctgcccaggaagctgcagcccctgagcaagggccagcccagccagatccaccaggtgtttgctgacatggagaagatcctgggccgggccccagcccagtgccggcgggagctgggggaccagcagggcctggagaagctgcagaaggccacagagaagatctacctgggcttcagtgaccctgagacagaggagctggagatgaggagccggcagcagaagctgggcaccccagccccccagaacacaggcctgctgcagaacatgcaggatgtggtggagagcaggaaccaggcctctgtgcacagcaagctgtctgaggccatcaagggcctgcccctgaagggggagcagcacagccacagcctggccaagctgagccccaccggccctggaggagacaagggccagagccccatccccatgtggatctgctgccgcctgcgggccagcaactgcaggaacaccagcgctgcctggaggctgaagctgaagaggagcagcacctgctag

SEQ ID NO: 339523 - DNA, 348 bp, Artificial Sequence
  derived and/or modified sequence
atggccggccggcccctgcggatcggcgaccagctggtgctggaggaggactatgatgagacctatattccctcggaacaggagatcctcgagtttgctagggagataggaatagaccccattaaggagccagaacttatgtggctggcacgtgaggggatcgtcgcacccctgcctggagaatggaaaccatgtcaagacatcacaggcgacatttattactttaacttcgcaaacggacagtccatgtgggaccacccatgtgacgaacactacagatcattggtcatccaggagcgagctaaactgtctacatccggcgcgatcaagaaaaaaaagaagaagtag

SEQ ID NO: 339524 - DNA, 348 bp, Artificial Sequence
  derived and/or modified sequence
atggccggccggcccctgcggatcggcgaccagctggtgctggaggaggattatgacgagacctatatacccagtgagcaagaaatactggaatttgcaagagagattgggatcgaccccatcaaggaacccgagctcatgtggttagcgagagaaggaatagtggcacctctgcctggcgaatggaagccgtgtcaagacattacgggggatatttattactttaacttcgcaaatggccaaagcatgtgggatcacccttgcgatgaacactataggtcccttgtcatacaggaaagagcaaaactcagcacgagtggagccattaaaaaaaagaaaaagaagtag

SEQ ID NO: 339525 - DNA, 366 bp, Artificial Sequence
  derived and/or modified sequence
atggccggccggcccctgcggatcggcgaccagctggtgctggaggaggactatgacgagacttacatcccttctgagcaggaaattctcgagtttgccagggagattgggatcgaccccatcaaggaaccagagctcatgtggctcgcccgcgaagggattgtggctcctttgcccggcgagtggaaaccttgtcaggatatcacaggtgacatttattacttcaacttcgccaatggacagagtatgtgggaccatccttgtgacgagcattaccggtccctggttattcaggagagggccaaactgagcaccagtggcgctataaagaaaaaaaaaaaaaagaaggagaagaaggacaaatag

SEQ ID NO: 339526 - DNA, 954 bp, Artificial Sequence
  derived and/or modified sequence
atgtggctggcccgggagggcatcgtggcccccctgcccggcgagtggaagccctgccaagatataacgggagatatctactactttaactttgcaaatgggcagtcaatgtgggaccacccatgtgacgagcactaccgctcgctggttatccaggagcgggcaaaattgtccacatctggcgccatcaagaaaaagaaaaagaaaaaagagaaaaaggataaaaaggatcgcgatccaccaaaaagttctctggagacccagccagaagaaggcctcttaccacctagttcattcctttgtagtctgtcacctcctagtgcgcccgggctcgcggatctcgatctggaccaggagatgcaggccatcagtgagggtagctataacaagggcaaatccccaggaatgctcggcgacacaccatggagattcatgggggctctgccgcgtaagctacagccactaagtaagggtcaaccgtcacagatacaccaggtgtttgcggatatggaaaaaattctgggacgcgcgcctgcccagtgtcggcgagaactgggtgatcagcagggtctcgagaaattgcagaaagcaactgagaaaatctatcttggattttcagatccggagaccgaggaacttgagatgcgctctcgtcagcaaaaactgggcaccccagccccgcaaaatacagggttactgcagaatatgcaggacgttgttgaatcgcgtaatcaggcctcggtccactccaagttgtctgaagcaatcaaaggtttacctctgaagggcgaacagcacagccattctctcgccaaactcagcccgaccgggccagggggggacaagggacaaagccctattccaatgtggatctgctgcaggctaagggccagtaattgcaggaatacgtctgccgcatggcgcctcaaactgaagcgcagttctacgtgctag

SEQ ID NO: 339527 - DNA, 348 bp, Artificial Sequence
  derived and/or modified sequence
atggccggacgcccactgaggatcggcgaccagcttgtactggaggaagattacgacgagacatacattccctcagagcaggagattctggagttcgccagggagatcggaatcgaccccattaaggaacctgagttaatgtggctcgcacgagagggaatcgtcgccccactgccaggcgagtggaagccctgtcaggatatcacaggggatatctactatttcaatttcgccaatggacaaagcatgtgggaccatccttgcgacgagcattatagaagcctcgtgattcaggaacgggctaagctttccacaagcggcgctataaagaaaaaaaagaagaagtag

SEQ ID NO: 339528 - DNA, 348 bp, Artificial Sequence
  derived and/or modified sequence
atggcgggaaggcctctaagaatcggtgaccagttagtgttggaggaggactacgatgagacttacatcccaagtgagcaggagattctcgagttcgcccgtgaaatcggaatcgaccccatcaaagagccggagctcatgtggctcgcgagggaaggcattgtggcgcctctccccggtgagtggaaaccttgccaggatatcacgggcgatatctactactttaattttgcaaatggtcagagtatgtgggatcacccttgtgacgagcactatcgatcgctcgtcatccaggaaagggcaaaactcagtacatccggagctatcaagaagaagaaaaaaaaatag

SEQ ID NO: 339529 - DNA, 366 bp, Artificial Sequence
  derived and/or modified sequence
atggctggccgtcccctgaggatcggggatcagttagttttggaagaggattatgacgaaacctacatcccatctgagcaagaaattctggagtttgcgcgagaaatcggaatagatcccattaaagagccggaactgatgtggctagctagagaggggatcgttgcccctttgccaggggagtggaagccctgccaggatatcactggggacatctactattttaattttgccaacgggcagtccatgtgggatcatccttgtgacgagcattatagaagcctggtgatccaggaacgggcaaaactatctacaagcggcgcaatcaaaaaaaaaaagaaaaagaaggaaaagaaggacaagtag

SEQ ID NO: 339530 - DNA, 954 bp, Artificial Sequence
  derived and/or modified sequence
atgtggctcgcgagggaaggcatagttgccccacttcccggtgaatggaagccatgtcaagacattactggtgacatttattatttcaactttgcgaacgggcagtcaatgtgggaccatccctgcgatgaacattaccggtctctggtgatccaggagcgggcaaagttgagcacctcaggcgcaattaaaaagaagaaaaaaaagaaggagaagaaggacaagaaggatcgcgacccgccaaaaagctcgcttgaaacacagccggaggaagggctgttgccaccttcttcattcctctgcagtctcagtcctcccagtgctcccggattggccgacctcgacctggaccaggagatgcaggctatatcagaagggagctataacaagggcaagtctcccggaatgcttggagacactccatggcggttcatgggggctcttcctaggaagcttcaacctctgagcaaagggcaacctagtcaaattcaccaagtgttcgccgacatggagaaaatccttgggcgagccccagcacaatgtcgcagggaactcggagaccaacaaggactggaaaagctgcagaaggcaaccgaaaaaatctatctcggcttctctgaccccgagacagaggaactcgagatgcggagtcgccagcagaaactgggcacacctgccccacagaacaccgggctgctgcagaacatgcaagatgttgttgagagcaggaaccaggcatctgtgcactctaagctgagcgaagcaatcaaaggactgccacttaagggcgaacaacattcccactccctagcgaagctgagccctacagggccaggcggagataagggacagtcacccatcccaatgtggatatgctgtcgcctgcgggcaagcaactgtcgcaacacctcagccgcatggagactcaagctgaagcgatccagtacttgctag

SEQ ID NO: 339531 - DNA, 616 bp, Artificial Sequence
  derived and/or modified sequence
gatcagattcaaggtgacacgcaccagcatacacagaaccacagggctgcccgggcccggactgccccacagaggcggcagatgcacacagaggtcagccacagcaccccacatggagggctgctcacccacagaggtgcagagggtgccacctccaccagccaccttgaaggagaaataactttatttggactgagagctggagaatgagaataggacctgagagtatattgggctaaggaggagaggtgtttgagcccagatgagtcatggctggacgacccctccgcataggagatcagctggttctggaagaagattatgatgagacctacattcctagtgagcaagaaattcttgaatttgcccgggagattggtattgatcccatcaaggaaccagaactgatgtggctggcgcgagagggcatcgtggccccactgcctggagagtggaaaccatgccaggacatcacaggtgacatttactatttcaacttcgccaacgggcagtctatgtgggaccatccatgtgacgaacactatcggagcttggtgatccaagagcgggcaaagctgtcaacttctggggccattaagaagaagaaaaaaaaaaa

SEQ ID NO: 339532 - DNA, 585 bp, Artificial Sequence
  derived and/or modified sequence
gcgctcgagtgtgggcggggactgagggaagaagtgaaaatcggactgccaggcgacagttcctccgtttgaaatctcgccggctcctgagcgggccaccgggcccgggctgggggtctggcgggagaaataactttatttggactgagagctggagaatgagaataggacctgagagtatattgggctaaggaggagaggtgtttgagcccagatgagtcatggctggacgacccctccgcataggagatcagctggttctggaagaagattatgatgagacctacattcctagtgagcaagaaattcttgaatttgcccgggagattggtattgatcccatcaaggaaccagaactgatgtggctggcgcgagagggcatcgtggccccactgcctggagagtggaaaccatgccaggacatcacaggtgacatttactatttcaacttcgccaacgggcagtctatgtgggaccatccatgtgacgaacactatcggagcttggtgatccaagagcgggcaaagctgtcaacttctggggccattaagaagaagaaaaaaaaaaaggaaaagaaagacaaga

SEQ ID NO: 339533 - DNA, 492 bp, Artificial Sequence
  derived and/or modified sequence
ggactgagggaagaagtgaaaatcggactgccaggcgacagttcctccgtttgaaatctcgccggctcctgagcgggccaccgggcccgggctgggggtctggcgggtgtttgagcccagatgagtcatggctggacgacccctccgcataggagatcagctggttctggaagaagattatgatgagacctacattcctagtgagcaagaaattcttgaatttgcccgggagattggtattgatcccatcaaggaaccagaactgatgtggctggcgcgagagggcatcgtggccccactgcctggagagtggaaaccatgccaggacatcacaggtgacatttactatttcaacttcgccaacgggcagtctatgtgggaccatccatgtgacgaacactatcggagcttggtgatccaagagcgggcaaagctgtcaacttctggggccattaagaagaagaaaaaaaaaaaggaaaagaaagacaagaa

SEQ ID NO: 339534 - DNA, 1217 bp, Artificial Sequence
  derived and/or modified sequence
gatgcgctcgagtgtgggcggggactgagggaagaagtgaaaatcggactgccaggcgacagttcctccgtttgaaatctcgccggctcctgagcgggccaccgggcccgggctgggggtctggcgggagaaataactttatttggactgagagctggagaatgagaataggacctgagagtatattgggctaaggaggagagaaattcttgaatttgcccgggagattggtattgatcccatcaaggaaccagaactgatgtggctggcgcgagagggcatcgtggccccactgcctggagagtggaaaccatgccaggacatcacaggtgacatttactatttcaacttcgccaacgggcagtctatgtgggaccatccatgtgacgaacactatcggagcttggtgatccaagagcgggcaaagctgtcaacttctggggccattaagaagaagaaaaaaaaaaaggaaaagaaagacaagaaggacagagacccccccaaaagttcgctggaaacgcagcctgaggagggacttctgcctccttcatcctttctctgcagcttgtctcctccgtcagcacctgggcttgctgatctggacctagatcaagagatgcaggctataagtgagggatcctataacaaaggaaagagcccaggcatgctgggtgacactccctggcgtttcatgggtgcccttcccagaaagctgcagccactctccaaaggccaaccttcccaaatccaccaggtctttgctgacatggagaaaatcttaggcagggccccagcccaatgcaggagagaattaggtgatcagcagggtctggagaaactccagaaggcgacagagaaaatctacctggggttttcagatcctgaaacagaagagctggaaatgagaagcaggcagcagaaactgggcactccagcccctcagaacactgggcttctccaaaatatgcaggatgtggtagaaagcaggaaccaggcctctgtccactcaaagctttctgaagccatcaaaggcctgccactgaaaggggagcagcacagccacagcttagccaaactgagccccactggccctggaggggacaagggccaaagccccattcccatgtggatctgctgcaggctcagagccagcaactgcagaaacacttcagcagcctggaggctgaagctcaaaagaagcagcacctgttgagaga

SEQ ID NO: 339535 - DNA, 1260 bp, Artificial Sequence
  derived and/or modified sequence
atgacagcctccgggagtccagactacggacagcctcacaagataaatccgctgccgcctcaacaggagtggatcaaccagcccgtccgtgtgaacgtaaagcgcgagtatgaccatatgaatgggtcccgggagtcaccagtggattgcagcgtgtccaagtgcagtaaactcgtgggaggcggcgaaagcaaccccatgaattataacagctacatggacgagaagaacggtccacctcccccgaacatgaccacaaacgaacggcgcgtcattgttcctgcagacccaaccctgtggacacaagagcacgtgagacagtggttggagtgggccatcaaagagtactccctgatggaaatcgacacatccttcttccagaacatggacggcaaagaactgtgcaagatgaacaaagaggattttctgagggccacaacactgtacaatactgaagtgctgctgtcacatctaagttacctcagagaatccagccttttggcttacaatacaacttctcatacggaccagtccagccgtttaagtgtaaaggaagatccctcttacgacagcgttaggcgaggtgcctggggcaacaatatgaattcaggtttaaacaaatccccccccctgggaggggctcagacaatctcaaagaacaccgagcagcgaccccagcctgacccctatcaaattctagggcccacttcatcgcggctggcaaatccagggtctgggcaaatccaattatggcagttcctactggagctcctgtcggattctgcaaacgcttcttgcattacttgggagggaactaatggggaatttaagatgaccgaccccgatgaagtggccagacggtggggtgaaagaaagagcaaacccaatatgaactatgataaactgtcacgcgctctgcggtactactatgacaaaaatataatgacaaaagtgcatggtaaacgatacgcttataagtttgactttcacggtatcgcccaagccttgcagccccacccaactgaatctagtatgtacaagtacccctctgacatctcatacatgccatcctatcacgcacaccagcaaaaggttaactttgtaccgcctcacccctcaagcatgccagtgacctcttcctccttctttggcgcagccagccagtactggacctctccaaccgggggtatataccccaaccccaacgtccctcgtcatccaaacacacatgttccttcacacttaggatcctactactag

SEQ ID NO: 339536 - DNA, 1260 bp, Artificial Sequence
  derived and/or modified sequence
atgacagccagcggcagcccagactatggccagccccacaagatcaaccccctgcccccccagcaggagtggatcaaccagcctgtgcgggtgaatgtgaagcgggagtatgaccacatgaatggcagccgggagagccctgtggactgcagcgtgtccaagtgcagcaagctggtgggcggcggggagagcaaccccatgaactacaacagctacatggatgagaagaatggacctcctccacccaacatgaccaccaatgaaagaagagtcatcgtgcctgctgaccccaccctgtggacccaggagcacgtgcggcagtggctggagtgggccatcaaggagtacagcctgatggagattgacaccagcttcttccagaacatggatggcaaggagctgtgcaagatgaacaaggaggacttcctgcgggccaccaccctgtacaacacagaggtgctgctgagccacctgagctacctgcgggagagcagcctgctggcctacaacaccaccagccacacagaccagagcagccggctgtctgtgaaggaggaccccagctatgattctgtgagaagaggagcctggggcaacaacatgaacagcggcctgaacaagagcccccccctgggcggggcccagaccatcagcaagaacacagagcagaggccccagcctgacccctaccagatcctgggccccaccagcagccggctggccaaccctggcagcggccagatccagctgtggcagttcctgctggagctgctgagtgacagcgccaatgccagctgcatcacctgggagggcaccaatggagagttcaagatgacagatcctgatgaggtggcccggcgctggggcgagaggaagagcaagcccaacatgaactatgacaagctgagccgggccctgcgctactactatgacaagaacatcatgaccaaggtgcacggcaagagatatgcctacaagtttgacttccacggcatcgcccaggccctgcagccccaccccacagagagctccatgtacaagtaccccagcgacatctcctacatgcccagctaccacgcccaccagcagaaggtgaactttgtgcccccccaccccagctccatgcctgtgaccagcagcagcttctttggagctgccagccagtactggaccagccccaccggcggcatctaccccaaccccaacgtgcccaggcaccccaacacccacgtgcccagccacctgggcagctactactag

SEQ ID NO: 339537 - DNA, 1260 bp, Artificial Sequence
  derived and/or modified sequence
atgaccgccagcggcagccccgactacggccagccccacaagatcaatcctctccctcctcaacaggaatggatcaaccagcccgttagagttaatgtgaagcgcgagtacgaccacatgaatggctcgcgcgagtcgccggttgattgttctgttagtaagtgtagcaagttagtgggaggcggcgaatctaatccaatgaactataatagctacatggacgaaaaaaacggacctcccccacctaatatgaccactaacgagcgacgggtaatagttccagccgacccaacactgtggacacaggaacacgtgagacagtggctcgaatgggcgatcaaagaatattcattgatggagattgatacttctttcttccaaaatatggatggtaaagaactgtgcaaaatgaacaaagaggatttcctaagagccacaaccctctataacacagaggtcctcctctcacatctcagttacctgcgagagtcgagcctgctggcctataatactacttcccatactgaccagagttctagactgtctgtgaaagaagatccatcttatgattctgtccgccgaggggcatggggtaataacatgaattcaggactcaacaaatcacctccattgggtggcgcccaaacaataagcaagaacacggaacagcggccccagcctgatccctatcagatccttggtcccactagttctcgactcgctaatcctgggagcggacagattcagctgtggcagtttttactcgaactgctaagcgatagcgccaatgcttcgtgtatcacatgggagggtacaaacggcgagttcaagatgactgaccccgacgaggtcgcccgccgttggggggagcgaaagtcaaaacctaacatgaattacgataagctgtccagggcgctacgttactattacgacaagaatataatgacaaaggtgcatggcaaacgctacgcctacaagttcgacttccatggcatcgcccaggcattacagccccatccaacggagagtagcatgtataaatatccttcagatattagttacatgcccagttaccatgcacaccaacagaaggtcaacttcgtgcccccccacccctcttctatgccggtgaccagtagctcattcttcggggctgcttcccaatattggacgagccctacaggagggatttaccccaaccctaacgtgccacgtcaccctaatactcatgtacctagccatcttggaagctactactag

SEQ ID NO: 339538 - DNA, 1260 bp, Artificial Sequence
  derived and/or modified sequence
atgaccgcttcagggagccctgactatggccagcctcacaaaataaatcctcttccgcctcagcaggaatggatcaaccagcccgtgcgtgtgaacgtgaaaagggaatatgaccatatgaatggatcccgcgagtctcccgtggattgctctgttagtaaatgctccaaactcgtgggaggtggagagtcaaaccccatgaactataatagctatatggatgagaagaacggccctcctcccccaaatatgactactaatgagaggcgcgtaatcgtgccggcagatcccaccttgtggactcaggagcatgtgcgacagtggttggaatgggcaattaaagagtattccttgatggaaatagacacttctttcttccaaaacatggatggcaaagaattatgcaagatgaataaggaagatttcttgcgcgcaactactctgtataacacagaggtcctgttgtcccatttgagttatctgcgagaaagctcactgttggcttataataccacctcacacaccgatcagagctccagactgtctgtcaaggaagatccatcttatgatagcgtgcgccgtggagcctggggtaacaacatgaacagcggcttgaacaagagcccccctcttgggggtgcccagacaatctccaaaaacactgagcagcgccctcagcctgatccgtaccaaatcttaggtccaacctcatcacggttagctaatccgggatctggtcaaattcagttgtggcagtttctgcttgagctgctttcggactcagcaaacgctagctgtatcacatgggagggtaccaatggtgagtttaaaatgacagacccagacgaagtcgccaggcgctggggtgagcgaaaatccaagccaaatatgaattatgacaaactcagccgggctctgcggtattactacgataaaaacataatgactaaagttcacggcaagaggtacgcgtacaaattcgactttcatgggatcgcacaggcccttcagccacatcctactgagtcgagtatgtataagtaccctagcgacatctcctacatgccatcttatcacgcgcatcaacagaaggtgaattttgtgccacctcacccatcgagtatgcccgtcacttctagttctttcttcggagcggcttcgcagtattggacgtcacctaccggaggaatctaccctaaccccaatgttcctcggcaccctaacactcatgtgccttcgcacctaggcagctactactag

SEQ ID NO: 339539 - DNA, 1260 bp, Artificial Sequence
  derived and/or modified sequence
atgaccgccagcggcagccccgactacggccagccccacaagatcaaccccctgcccccccagcaggagtggatcaaccagcccgtgagagtgaacgtgaagagagagtacgaccacatgaacggcagcagagagagccccgtggactgcagcgtgagcaagtgcagcaagctggtgggcggcggcgagagcaaccccatgaactacaacagctacatggacgagaagaacggcccccccccccccaacatgaccaccaacgagagaagagtgatcgtgcccgccgaccccaccctgtggacccaggagcacgtgagacagtggctggagtgggccatcaaggagtacagcctgatggagatcgacaccagcttcttccagaacatggacggcaaggagctgtgcaagatgaacaaggaggacttcctgagagccaccaccctgtacaacaccgaggtgctgctgagccacctgagctacctgagagagagcagcctgctggcctacaacaccaccagccacaccgaccagagcagcagactgagcgtgaaggaggaccccagctacgacagcgtgagaagaggcgcctggggcaacaacatgaacagcggcctgaacaagagcccccccctgggcggcgcccagaccatcagcaagaacaccgagcagagaccccagcccgacccctaccagatcctgggccccaccagcagcagactggccaaccccggcagcggccagatccagctgtggcagttcctgctggagctgctgagcgacagcgccaacgccagctgcatcacctgggagggcaccaacggcgagttcaagatgaccgaccccgacgaggtggccagaagatggggcgagagaaagagcaagcccaacatgaactacgacaagctgagcagagccctgagatactactacgacaagaacatcatgaccaaggtgcacggcaagagatacgcctacaagttcgacttccacggcatcgcccaggccctgcagccccaccccaccgagagcagcatgtacaagtaccccagcgacatcagctacatgcccagctaccacgcccaccagcagaaggtgaacttcgtgcccccccaccccagcagcatgcccgtgaccagcagcagcttcttcggcgccgccagccagtactggaccagccccaccggcggcatctaccccaaccccaacgtgcccagacaccccaacacccacgtgcccagccacctgggcagctactactag

SEQ ID NO: 339540 - DNA, 606 bp, Artificial Sequence
  derived and/or modified sequence
atgttcctggtggtggccgtgaacagcctgaccctgtaccagcccagcttccggcccctgctgggagatgcctgctgcctgtgtgtggccgctgctgctggggccctgtgccgggacctgggcccccaccacacccacacccggggccccaatgatggcagctgtggcctgagccgctggaggcaccggcagcacggggacagccctgaggacttcttcctggcccggggggcccacctggccagcacccggggcagaaatgagcacagccccaagggcagcctgcagaagtgcctgctgagcatccgggtgcagaccacccggctgagccacctgcgggccggcgtgaccctgcgctgtgtgctgctgtgtgtgtctgagagccctgtgggcctgcggtctgtggcctgcagcggggacctgctgggggaccccctgaccggcttcctggccttcctggtgtcctgcctgacccccagcggcaccccaggcaacaccagcctgaccaagctgagccccaccagcagcagccagggcctggccctgggccccctgagccccagcagctgtgatgctgccagccccagcatcagcctgggcctgtag

SEQ ID NO: 339541 - DNA, 1119 bp, Artificial Sequence
  derived and/or modified sequence
atggatgctctgaaccgcaaccagattgggcctgggtgccagacacagacgatggttcaaaaggggccgcttgatctgatcgaaacgggcaagggactgaaagtccagacggacaagccccatttagtatccctaggtagcggcagactgagtacagcaatcaccttgcttcccctggaggagggaagaaccgtgatcggctccgccgcccgcgacatatctctgcagggacccggactagcacctgaacattgctatatagagaatttaaggggtaccctcaccctttatccctgcggtaacgcttgcaccatcgatggattgccagtgagacaaccaacgaggctgacacagggatgcatgctttgtctaggccagtccacctttctcaggtttaatcacccggccgaggcaaaatggatgaaaagtatgattcctgccgggggccgagcacccggccctccctatagcccggtgccggagtcagagagcctcgtaaatggaaatcataccccacaaacagccactcggggacccagcgcatgcgccagccattcaagcctagtatcatctattgagaaggaccttcaggagataatggattccctggtacttgaagagcctggagccgctggcaagaaaccggcagctacctcccccctgagtcctatggccaacggtggccggtacctgttgagccccccaacgagtcccggggcaatgtccgtgggctcgtcttatgaaaatacttctcccgctttctccccactgtctagtccagcgtcttcagggagctgcgcttcccacagccctagcggccaggagccagggccgtccgtccctccactggttcccgcccgcagctccagttaccaccttgccttacagcccccacagtctaggcctagcggagccagaagcgagtctcctagactgagtagaaagggtggccacgaacgaccccccagtccaggtctacggggccttctgactgattccccagccgcgaccgtcctggcggaagcacgcagagccacagagtccccacggctggggggccagctgcctgtcgtcgccataagcctctcggagtacccagcagcgcgccgttgcacctag

SEQ ID NO: 339542 - DNA, 744 bp, Artificial Sequence
  derived and/or modified sequence
atggatgcgttgaacagaaaccagatcgggccaggctgtcaaactcagacaatggttcaaaaaggcccactggatctgattgaaaccggcaagggtctgaaagtgcaaaccgataagcctcatctggtgtccctgggatcggggcgactctctaccgcaatcaccctcctgcctctcgaagagggccgaactgtgatcgggtctgccgcccgcgacatctctctccagggacctggcctcgcccccgagcactgctacatcgagaatctgcggggaacactgaccctttacccctgcggtaacgcctgtaccattgatggccttccagtgagacagcccaccagactgacccagggatgtatgttgtgtcttgggcagtccaccttcctgagatttaaccaccccgcggaagcgaaatggatgaagtccatgataccagccggcggacgcgcccccggccccccttactcccctgtgccagcagaaagtgagtcacttgtgaacggtaaccataccccccagactgccaccaggggacctagcgcctgcgcatcgcacagcagtttagtttcatctattgaaaaagatctgcaggagatcatggatagcctggtgctggaggaaccgggcgctgccgggaaaaaacctgctgctaccagcccactttctccgatggctaacggcggacgctacctcctgagcccacctactagccctggacacgtatgcgggctgcagttatag

SEQ ID NO: 339543 - DNA, 1119 bp, Artificial Sequence
  derived and/or modified sequence
atggatgccctgaacagaaaccagatcggccctggctgccagacccagaccatggtgcagaagggccccctggacctgattgaaacaggcaagggcctgaaggtgcagacagacaagccccacctggtgtccctgggcagcggccgcctgagcacagccatcaccctgctgcccctggaggagggccgcaccgtcatcggcagcgctgcccgggacatcagcctgcagggccctggcctggcccctgagcactgctacatcgagaacctgcggggcaccctgaccctgtacccctgtggaaatgcctgcaccattgatggcctgcctgtgcggcagcccacccggctgacccagggctgcatgctgtgcctgggccagagcaccttcctgcgcttcaaccaccctgctgaggccaagtggatgaagtccatgatcccagctgggggccgggcccctggccccccctacagccctgtgcctgagagcgagagcctggtgaatggaaaccacaccccccagacagccacccggggccccagcgcctgtgccagccacagcagcctggtgagcagcattgagaaggacctgcaggagatcatggacagcctggtgctggaggagcccggggctgctgggaagaagccagctgccaccagccccctgagccccatggccaacggcggccgctacctgctgagcccccccaccagccctggggccatgtctgtgggcagcagctatgagaacaccagccctgccttcagccccctgagcagccctgccagcagcggcagctgtgccagccacagccccagcggccaggagcccggccccagcgtgccccccctggtgcctgcccggagcagcagctaccacctggccctgcagcccccccagagccggcccagcggggcccggtctgagagcccccggctgagcaggaaaggaggccacgagaggcctcccagccctggcctgcggggcctgctgacagacagccctgctgccaccgtgctggccgaggcccggcgggccacagagagcccccggctgggcggccagctgcctgtggtggccatcagcctgtctgagtacccagctgcccggcgctgcacctag

SEQ ID NO: 339544 - DNA, 744 bp, Artificial Sequence
  derived and/or modified sequence
atggatgccctgaacagaaaccagatcggccctggctgccagacccagaccatggtgcagaagggccccctggacctgattgaaacaggcaagggcctgaaggtgcagacagacaagccccacctggtgtccctgggcagcggccgcctgagcacagccatcaccctgctgcccctggaggagggccgcaccgtcatcggcagcgctgcccgggacatcagcctgcagggccctggcctggcccctgagcactgctacatcgagaacctgcggggcaccctgaccctgtacccctgtggaaatgcctgcaccattgatggcctgcctgtgcggcagcccacccggctgacccagggctgcatgctgtgcctgggccagagcaccttcctgcgcttcaaccaccctgctgaggccaagtggatgaagtccatgatcccagctgggggccgggcccctggccccccctacagccctgtgcctgctgagagcgagagcctggtgaatggaaaccacaccccccagacagccacccggggccccagcgcctgtgccagccacagcagcctggtgagcagcattgagaaggacctgcaggagatcatggacagcctggtgctggaggagcctggagctgctgggaagaagccagctgccaccagccccctgagccccatggccaatggaggccgctacctgctgagcccccccaccagccctggccacgtgtgtggcctgcagctgtag

SEQ ID NO: 339545 - DNA, 1119 bp, Artificial Sequence
  derived and/or modified sequence
atggacgccctgaaccggaaccagatcggccccggctgccagacccaaactatggtgcagaagggacccttagacctgattgaaactggcaaaggtctgaaggtgcagactgataagccacacttggtctccctcgggtctgggcgcttatctacagctatcacactgctgccactggaggaggggcggaccgtgattggctcagccgcaagagatatttcacttcaaggacccggtctggcccctgagcactgctacattgagaacttgcgtggcacgctgactctgtatccttgtggcaatgcctgcactatcgacggcctgcccgtccggcagccaacccggttaactcagggctgcatgctttgtctcgggcagtcaacatttttaaggttcaatcatcctgccgaggctaagtggatgaaaagcatgattcctgccggcggaagggctccaggcccaccctactctcctgttccagagagcgaaagcctggttaatgggaaccacacccctcaaaccgcaaccaggggtccttccgcttgtgcctcccattcttctctggtgtccagcatcgaaaaagacttgcaggagattatggacagtctggtgttggaagaaccgggggcagctggcaaaaaaccagccgcgacctcacccctgtccccaatggccaatggcggtaggtacctgctgtcaccaccaacctcaccaggggccatgtctgtggggagttcatacgaaaatacaagtccagcattttcgccactctcctcacctgcatccagcgggtcatgcgctagccactctcctagcggacaagaacccggcccttcagttccccccctcgttccggccaggtccagctcctaccacttagccttgcagcctccgcaatcccggccttctggggcccgctctgagtcacctcgcctgtcacgaaagggtggccacgagcgcccgccaagccctggtctgcgcggtctgttgacagacagtccggccgcaaccgtcctggccgaggcacgcagagccactgagtcgcctagactgggcggacagctgccggtggtggctatctcactgagcgaatatcccgccgccaggcgatgtacttag

SEQ ID NO: 339546 - DNA, 744 bp, Artificial Sequence
  derived and/or modified sequence
atggacgccctgaaccggaaccagatcggccccggctgccagacccagacaatggttcaaaaggggcctctggatctcatagagaccgggaaaggtctgaaggtgcagaccgataagccacatttggtgagtcttggtagtgggcggcttagtaccgccattacattactccccctggaggagggccggacagtgataggtagcgccgcaagagacatctcactgcagggccccggccttgctccagagcactgctacattgagaacttgcgcggcactctgacgctctacccctgcggtaatgcctgcaccattgatggtctgcccgtcagacagcccacgcgcctcactcagggctgcatgctatgcttggggcagagtaccttcctgcggtttaatcaccctgccgaggcaaagtggatgaaatcaatgatccctgctggcggcagagctccaggccccccatacagtcccgtgcccgccgagagtgaatcccttgtcaacggtaatcacacaccccagacagctacccggggaccaagtgcctgcgcttcccacagctctctggtgtcaagcatcgagaaagatttgcaggagataatggattccctggtcctggaagagcccggcgctgctggcaaaaagcccgctgctacaagtcctctgagccctatggcaaacggcggccgctacctcttgtctccccctacttcccccggccatgtgtgcgggcttcagctatag

SEQ ID NO: 339547 - DNA, 1315 bp, Artificial Sequence
  derived and/or modified sequence
aggccaccgcgaccgagccgagccaggctaagggaccagtgtctccctgccccccccccacctctaggagctctggagccttaggaccatggacgctctcaataggaaccaaataggccctggatgccagacccagaccatggtgcagaaaggacccttggacctgatcgagacaggcaaagggctgaaagtgcaaacggacaaaccccacctggtgagcctgggcagtgggcgactcagcacagccatcaccctcctgccgctggaggaagggaggacggtgattggctctgcagccagagacatctcactacagggcccaggcctggctccagagcactgctacatcgagaacctgcggggcaccctcaccctctacccctgtggcaatgcctgcactattgatgggctccctgtccggcagcctacccggctcactcagggctgcatgttgtgcctgggtcagtccaccttccttcgctttaaccacccggctgaagccaagtggatgaaaagcatgattccagcagggggccgagcccctgggcccccctacagccctgttcctgaatcagaaagtctggtaaatgggaaccacaccccacagactgcaacacggggaccctctgcctgtgccagccacagttccctggtgagctctattgagaaggacctgcaagagatcatggactcactggtgctagaggagcctggagctgctggcaagaagcctgccgcaacctctccactgtcaccgatggctaatggtgggcgctacctgctgtctcccccaaccagccccggcgccatgtctgtgggctccagctatgagaacacctctccagccttctctccactctcttcaccagccagcagtggaagctgtgccagtcactcacccagtgggcaagagccaggaccttctgtgcccccgctggtacctgcccgttcctccagctaccatctggccctacagcccccacagtcccgcccaagtggtgctcgctccgagagtcctcggctgagcaggaaagggggccatgagaggcctcccagccctggcctccggggtctgctgacagacagccctgcagctactgtcttggcggaggcccggagagccactgagagcccccggctgggtgggcagctgcctgtggtggccatcagcctgagtgaatacccagcagcacgaagatgcacctagcaccaagctccagggagaggtgctagccctggaagaagagcgggctcaggtgctggggcacgtggagcagctcaaggtccgtgtgaaggagctagagcagcagctgca

SEQ ID NO: 339548 - DNA, 1119 bp, Artificial Sequence
  derived and/or modified sequence
atggatgcacttaacagaaaccaaatcggcccaggctgccagacgcagactatggtgcagaagggtcctctggatttgattgagactggaaaaggactcaaggtccagactgacaaaccacatttggtgagcctgggttccgggcgtctctcaactgcaatcaccctattacctctggaggaaggtcgtaccgttataggctcagccgctagggacattagcctgcaagggcctgggctagcgcctgagcactgctacatagaaaatctaaggggcacccttactctttatccatgtggcaacgcatgcaccatcgatggattgccggtgaggcaaccaacgcgcttgacacaaggctgcatgctgtgtctcggacagtcgaccttcctgcggttcaaccacccagctgaggcgaagtggatgaaaagtatgatccccgcaggcggacgcgcacctgggcctccttacagccctgtgcctgagagcgaatctctcgtgaacggaaaccatacgccgcaaaccgcaaccaggggtcccagcgcttgcgcatcccactcaagcttagtctcttccattgaaaaagatctgcaggaaattatggatagcctggtgctggaggagccaggagccgctggaaagaaacccgcagctacttctcctctgtcaccaatggcaaatggagggagatatctcctgagccccccaacgtcccctggtgcaatgtctgtggggagctcctatgagaatactagccctgccttttctcctctgagctcacctgcatcctcaggaagctgcgcctcccatagcccctcgggccaagaaccaggaccctccgtcccccctctcgtgcccgcaagatcatcctcgtatcacctcgctctgcaaccgcctcagtcccgtccatccggtgcacgcagcgaaagtccgaggttgtcgcggaaaggcggtcacgaacgacccccatctcccggactgcgaggactcctcacagattccccagctgcaacagtcctggctgaggctagacgcgcaactgaaagtcccaggctggggggacaattgcccgtggtcgccatttctctgtctgagtacccagcggctagacgctgcacgtag

SEQ ID NO: 339549 - DNA, 744 bp, Artificial Sequence
  derived and/or modified sequence
atggatgccctgaacagaaatcaaatcggtccgggttgtcagacacagacaatggtgcaaaaaggccctctcgatctgatcgagacaggcaagggtctgaaagtgcagacggacaagccgcatttggtatcgctgggctcaggtcgactgagtaccgccattactctgctgcctctcgaggagggcaggacagtgatcggatccgctgctcgagatatttctctacagggccctggtctggccccagagcactgctacatcgaaaacttaagaggtacactcaccctctatccttgcggaaatgcttgtactatcgacggcctccccgttcgtcaacctactagactgacacaaggttgcatgctgtgcctgggacagtccacgtttctccgtttcaaccaccccgctgaggccaaatggatgaagtccatgattcctgcgggtggccgagctccaggtccgccatactccccagtccctgccgagagcgaatccttggtgaatgggaaccatactccacagactgctaccagagggccatcagcatgtgcttcacactccagcttggtgtcatctattgaaaaggacctacaggaaattatggacagccttgtgctggaggagcctggcgcagctggcaagaagcctgcggctacctcccctttgagccccatggcaaacggcggaagataccttctctctcccccaaccagccccggtcacgtatgtgggttacaactgtag

SEQ ID NO: 339550 - DNA, 1119 bp, Artificial Sequence
  derived and/or modified sequence
atggacgccctgaacagaaaccagatcggccccggctgccagacccagaccatggtgcagaagggccccctggacctgatcgagaccggcaagggcctgaaggtgcagaccgacaagccccacctggtgagcctgggcagcggcagactgagcaccgccatcaccctgctgcccctggaggagggcagaaccgtgatcggcagcgccgccagagacatcagcctgcagggccccggcctggcccccgagcactgctacatcgagaacctgagaggcaccctgaccctgtacccctgcggcaacgcctgcaccatcgacggcctgcccgtgagacagcccaccagactgacccagggctgcatgctgtgcctgggccagagcaccttcctgagattcaaccaccccgccgaggccaagtggatgaagagcatgatccccgccggcggcagagcccccggccccccctacagccccgtgcccgagagcgagagcctggtgaacggcaaccacaccccccagaccgccaccagaggccccagcgcctgcgccagccacagcagcctggtgagcagcatcgagaaggacctgcaggagatcatggacagcctggtgctggaggagcccggcgccgccggcaagaagcccgccgccaccagccccctgagccccatggccaacggcggcagatacctgctgagcccccccaccagccccggcgccatgagcgtgggcagcagctacgagaacaccagccccgccttcagccccctgagcagccccgccagcagcggcagctgcgccagccacagccccagcggccaggagcccggccccagcgtgccccccctggtgcccgccagaagcagcagctaccacctggccctgcagcccccccagagcagacccagcggcgccagaagcgagagccccagactgagcagaaagggcggccacgagagaccccccagccccggcctgagaggcctgctgaccgacagccccgccgccaccgtgctggccgaggccagaagagccaccgagagccccagactgggcggccagctgcccgtggtggccatcagcctgagcgagtaccccgccgccagaagatgcacctag

SEQ ID NO: 339551 - DNA, 744 bp, Artificial Sequence
  derived and/or modified sequence
atggacgccctgaacagaaaccagatcggccccggctgccagacccagaccatggtgcagaagggccccctggacctgatcgagaccggcaagggcctgaaggtgcagaccgacaagccccacctggtgagcctgggcagcggcagactgagcaccgccatcaccctgctgcccctggaggagggcagaaccgtgatcggcagcgccgccagagacatcagcctgcagggccccggcctggcccccgagcactgctacatcgagaacctgagaggcaccctgaccctgtacccctgcggcaacgcctgcaccatcgacggcctgcccgtgagacagcccaccagactgacccagggctgcatgctgtgcctgggccagagcaccttcctgagattcaaccaccccgccgaggccaagtggatgaagagcatgatccccgccggcggcagagcccccggccccccctacagccccgtgcccgccgagagcgagagcctggtgaacggcaaccacaccccccagaccgccaccagaggccccagcgcctgcgccagccacagcagcctggtgagcagcatcgagaaggacctgcaggagatcatggacagcctggtgctggaggagcccggcgccgccggcaagaagcccgccgccaccagccccctgagccccatggccaacggcggcagatacctgctgagcccccccaccagccccggccacgtgtgcggcctgcagctgtag

SEQ ID NO: 339552 - DNA, 306 bp, Artificial Sequence
  derived and/or modified sequence
atgggtggtaaaatcaagtcatggaaaaaacggtggttcgtgtttgacaggctgaaaagaaccctgtcctactacgtagacaaacacgagacaaaactgaagggcgtgatctattttcaagccatcgaggaagtctactacgaccatctgcggtctgccgctaaaagtcctaatcctgcactgacattttgcgttaagacacatgaccgactctattacatggtcgcccccagcgccgaggccatgagaatatggatggacgtgattgtgacaggcgcagaggggtatactcagttcatgaactag

SEQ ID NO: 339553 - DNA, 306 bp, Artificial Sequence
  derived and/or modified sequence
atgggcggcaagatcaagtcctggaagaagcgctggtttgtgtttgaccggctgaagaggaccctgagctactacgtggacaagcatgagaccaagctgaagggcgtcatctacttccaggccatcgaggaggtgtactatgaccacctgcggtctgctgccaagagccccaacccagccctgaccttctgtgtgaagacccatgaccggctgtactacatggtggcccccagcgctgaggccatgaggatctggatggatgtgattgtgactggagctgagggctacacccagttcatgaactag

SEQ ID NO: 339554 - DNA, 306 bp, Artificial Sequence
  derived and/or modified sequence
atgggcggcaagatcaagagctggaagaagcggtggttcgtgttcgacagattaaaacgtactctctcttactatgtggataagcatgagaccaagttgaaaggggtgatttacttccaggcaatcgaggaagtctattacgaccaccttaggtccgccgccaagagccccaatcccgcattgaccttctgtgtgaaaacacatgacagactttattacatggttgctccctctgccgaagccatgcgaatctggatggacgtgattgtgactggagccgaaggatacacacagttcatgaattag

SEQ ID NO: 339555 - DNA, 1940 bp, Artificial Sequence
  derived and/or modified sequence
ctgagagcacccagcaggagcacgaagatgcacctagcaccaagctccagggagaggtgctagccctggaagaagagcgggctcaggtgctggggcacgtggagcagctcaaggtccgtgtgaaggagctagagcagcagctgcaggagtcagcccgagaggccgaaatggagcgggcactgctgcagggagagagggaggcagagcgggcactgctgcagaaggagcagaaggcagtggatcagctggtcgagaaggaggtcaagatgcgggagaaacaattttcccaggcacgacccctgacccgctacctgccaatccggaaggaggactttgacctgaagacacatattgagtcatcgggccatggtgttgatacctgcctgcacgtggtgctcagcagcaaggtctgccgtggctacttggtcaagatgggcggcaagattaaatcatggaagaagcgctggtttgtcttcgaccggctcaagcgcaccctttcctattatgtggacaagcatgagacgaagctgaagggagtcatctatttccaggccattgaggaagtgtactacgaccacctgcgcagtgcagccaagagcccgaacccagccctcaccttctgcgtaaagacccatgaccggctgtactacatggtggccccatctgcagaggccatgcgtatctggatggatgtcattgtcacaggggctgagggctacactcagttcatgaactaactgccgtgggcctcctggcagagcacaactggggcttttgtataagaagactttaatattctgtaaggagcttggtcctgtgagtttctgggctctggcctcctgaagaaccagccagaagaagaaaagtagaggtggctttgctgcctcctgggagcccagaacttgcagtaaccctttagggtcctgccccaggcccagccagggctgaggagctgtcacagagagggcctcagctctgacctgacacctgctctccccagcctgttttctcttttctaaaagacaaattatggtaccataagctgccaaagatcccctcctgcctcagacccctttgccaggggctttgggggctgagcagagccacatccagagtggggtaatagctcaggcggcccgcttcccatttctcaaaccccgctctgccccattgttctcctttcccttatactttttattaccttgctcaagggccagagatctcaagtgtcaaccttgaggtcccagctccatcccctagttgcagactcatcaccatggttaccatagtgactgcttcattgccatggttacatactaattgctgcagctctgtggcccagcccactgcttcagctgtgggccatctgagggtacgtgccatcatctctccagcccaggcccctgggcatctcatgctggggggaagggactgaatacctttttccttccccctgcctgtgtcttcagccctgatgcacaggctgccagccccccagtccagccctctcccttccactggtgccttgcttagagccagaagggatgaagccgggggatctatggaacagaggaggagcgatgcagttgggagaggaagctagaagggttatggttggagttctgtacagtgttgagtttccgacagggaaagaggattcctccaatgctcctagagagaaagcctgagcaggagatgatgcagcagaggggaagggccctgtggtgccgccgcccttccttcagcctccgaagggtgatggaaatggagagtggaggaccaggcctccagctgtctggcctcgcccttcacgccttaacactaagcccacctcccctgctctccttcccagcattgagcccttggttgcctgggcccaggctgggggttttcagtatttgtaagcatttcagcagaacaataaagcctttggactacgg

SEQ ID NO: 339556 - DNA, 306 bp, Artificial Sequence
  derived and/or modified sequence
atgggtgggaagattaagagttggaagaagaggtggttcgtttttgacagactgaaacggacgctcagctattacgtggataaacacgagacgaaattaaagggtgtgatttacttccaggcaattgaggaggtgtattacgatcatctgagaagcgctgcaaaaagccccaacccggctctaacattttgcgtaaagactcatgaccgcctttattacatggtggctccttcagccgaggccatgcgcatctggatggatgtgatcgttacaggtgcagaagggtacactcagtttatgaactag

SEQ ID NO: 339557 - DNA, 306 bp, Artificial Sequence
  derived and/or modified sequence
atgggcggcaagatcaagagctggaagaagagatggttcgtgttcgacagactgaagagaaccctgagctactacgtggacaagcacgagaccaagctgaagggcgtgatctacttccaggccatcgaggaggtgtactacgaccacctgagaagcgccgccaagagccccaaccccgccctgaccttctgcgtgaagacccacgacagactgtactacatggtggcccccagcgccgaggccatgagaatctggatggacgtgatcgtgaccggcgccgagggctacacccagttcatgaactag

SEQ ID NO: 339558 - DNA, 603 bp, Artificial Sequence
  derived and/or modified sequence
atgaccagcgccgagaccgccagcagagccgccgagagcggcggcacccccgtgagaccctgcagcagaccccacagagcccccagccccgccgcccccagcagacccggcgcccccgccgccggccccagaaagctgctggtgcccggcctgccctgcctggtgagaggcggctggccctggaccagacccgacagcagccccttcagacccgccgccagacccagaatgagcccccacagaagccccgccgtggccagaagatgcggcagacccagaagaagagaccccagaagaagaagaacccccgccctgcccagaccctggcccggcagaggcggccccggcagaagcctgctgcacagacacctgttcatccagcagctgctgagaacctgctggcccgccctgcccagagacagaacccccgcccccggcggcaccatgcccggcgccgccctggccggccccggcagacaggccagcggcagccccgccccccagagcgagggcgccccccccagaccctggacccccctgcagcccggcctgcaccacagaccccccagcagcagcagcggcctgctgagcagcttcttctag

SEQ ID NO: 339559 - DNA, 603 bp, Artificial Sequence
  derived and/or modified sequence
atgaccagcgctgagacagccagcagagctgctgagagcggcggcacccctgtgcggccctgcagccggccccaccgggcccccagccctgctgcccccagcaggcctggggccccagctgctggccccaggaagctgctggtgcccggcctgccctgcctggtgcggggcggctggccctggaccaggccagacagcagccccttccggcctgctgcccggcccaggatgagcccccacaggagccctgctgtggcccggcgctgtggccggccccggcggcgggaccccaggagaagaaggaccccagccctgccccggccctggccaggccggggcggccctggccgcagcctgctgcaccgccacctgttcatccagcagctgctgcggacctgctggccagccctgccccgggacaggaccccagcccctgggggcaccatgcctggggccgccctggccggccctggccggcaggccagcggcagccctgccccccagagcgagggcgccccaccccggccctggacccccctgcagcccggcctgcaccaccggccccccagcagcagcagcggcctgctgagcagcttcttctag

SEQ ID NO: 339560 - DNA, 603 bp, Artificial Sequence
  derived and/or modified sequence
atgaccagcgccgagaccgccagccgggccgccgagagcggcggcacccctgttagaccgtgttcccggccgcacagagccccctcgccggccgcccccagtcgcccgggcgcgcccgctgctggccccagaaaactcctggtcccgggtctcccttgtctggtccgcggcggttggccgtggacgcgaccagattccagcccattccgcccagctgccaggcccagaatgtcccctcatagatcacccgctgttgcccgcagatgtggtcgcccacgcaggcgtgacccccgccgccgccggaccccggcgctccctcgcccctggccaggccggggcggacctgggcggagcctcctgcaccgtcacctctttattcaacaacttctacgaacatgctggcctgccttgccgcgtgatcgaaccccagcccctggaggaacaatgcctggggccgcactggcaggtccaggaagacaggcctctggttctcctgcacctcagtcagaaggagctcctccacgtccatggacacctctccagccaggcttgcaccatcgcccgccatcctcttcatccggactactgtcttccttcttttag

SEQ ID NO: 339561 - DNA, 1148 bp, Artificial Sequence
  derived and/or modified sequence
gcccgggcggctgcccttgggtgctcccttccctgcccgacacccagaccgaccttgaccgcccacctggcaggagcaggacaggacggccggacgcggccatggccgagctcccggggccctttctctgcggggccctgctaggcttcctgtgcctgagtgggctggccgtggaggtgaaggtacccacagagccgctgagcacgcccctggggaagacagccgagctgacctgcacctacagcacgtcggtgggagacagcttcgccctggagtggagctttgtgcagcctgggaaacccatctctgagtcccatccaatcctgtacttcaccaatggccatctgtatccaactggttctaagtcaaagcgggtcagcctgcttcagaacccccccacagtgggggtggccacactgaaactgactgacgtccacccctcagatactggaacctacctctgccaagtcaacaacccaccagatttctacaccaatgggttggggctaatcaaccttactgtgctggttccccccagtaatcccttatgcagtcagagtggacaaacctctgtgggaggctctactgcactgagatgcagctcttccgagggggctcctaagccagtgtacaactgggtgcgtcttggaacttttcctacaccttctcctggcagcatggttcaagatgaggtgtctggccagctcattctcaccaacctctccctgacctcctcgggcacctaccgctgtgtggccaccaaccagatgggcagtgcatcctgtgagctgaccctctctgtgaccgaaccctcccaaggccgagtggccggagctctgattggggtgctcctgggcgtgctgttgctgtcagttgctgcgttctgcctggtcaggttccagaaagagagggggaagaagcccaaggagacatatgggggtagtgaccttcgggaggatgccatcgctcctgggatctctgagcacacttgtatgagggctgattctagcaaggggttcctggaaagaccctcgtctgccagcaccgtgacgaccaccaagtccaagctccctatggtcgtgtgacttctcccgatccctgagggcggtgagggggaatatcaataattaaagtctgtgggtaccata

SEQ ID NO: 339562 - DNA, 1191 bp, Artificial Sequence
  derived and/or modified sequence
agaccgaccttgaccgcccacctggcaggagcaggacaggacggccggacgcggccatggccgagctcccggggccctttctctgcggggccctgctaggcttcctgtgcctgagtgggctggccgtggaggtgaaggtacccacagagccgctgagcacgcccctggggaagacagccgagctgacctgcacctacagcacgtcggtgggagacagcttcgccctggagtggagctttgtgcagcctgggaaacccatctctgagtcccatccaatcctgtacttcaccaatggccatctgtatccaactggttctaagtcaaagcgggtcagcctgcttcagaacccccccacagtgggggtggccacactgaaactgactgacgtccacccctcagatactggaacctacctctgccaagtcaacaacccaccagatttctacaccaatgggttggggctaatcaaccttactgtgctggttccccccagtaatcccttatgcagtcagagtggacaaacctctgtgggaggctctactgcactgagatgcagctcttccgagggggctcctaagccagtgtacaactgggtgcgtcttggaacttttcctacaccttctcctggcagcatggttcaagatgaggtgtctggccagctcattctcaccaacctctccctgacctcctcgggcacctaccgctgtgtggccaccaaccagatgggcagtgcatcctgtgagctgaccctctctgtgaccgaaccctcccaaggccgagtggccggagctctgattggggtgctcctgggcgtgctgttgctgtcagttgctgcgttctgcctggtcaggttccagaaagagagggggaagaagcccaaggagacatatgggggtagtgaccttcggtgagcaggagggctggggggtggcgcaaggagggaggaaagggcttgagttaaaagcgggtgcctgcaaccctcaaactccgacatcattcagtgtgtttaggggcaggaggtgttgttcagccgtggaatttgctggtggcagcagtgtaacctgtgtatttgagggtacaggcaagcggtacagggtggagtggctggtccacaagctgtggcagggaagctgtttgcaggactgccctgcccctcctcatatttaataaagtttacttttctgttccgaa

SEQ ID NO: 339563 - DNA, 1013 bp, Artificial Sequence
  derived and/or modified sequence
agacttgggctggagccgccctgggtgtcagcggctcggctcccgcgcacgctccggccgtcgcgcagcctcggcacctgcaggtccgtgcgtcccgcggctggcgcccctgactccgtcccggccagggagggccatgatttccctcccggggcccctggtgaccaacttgctgcggtttttgttcctggggctgagtgccctcgatgtcatccgtgggtctttaagcctcaccaacctttcgtcttccatggctggagtctatgtctgcaaggcccacaatgaggtgggcactgcccaatgtaatgtgacgctggaagtgagcacagggcctggagctgcagtggttgctggagctgttgtgggtaccctggttggactggggttgctggctgggctggtcctcttgtaccaccgccggggcaaggccctggaggagccagccaatgatatcaaggtgaggtctcctttaggtctcagtttctctgcccctaaaatggagtggctctggaaatggagagatgctcatttctacagagactcctacctcagtaagtggtgaaatgaaaagcgctgtggacaggaagggtctgcggcctggggctcacactcacagtgaggctccgaggtggggactccccttgccagctctggggtatcaggacgccttccaaagtcagctttccttccgtctctgcagaaggcccaccccaagcccagcgcttttcccaaggccggacagcttcagaccttggggagaagaggaaggaaggaggaagaagggacagagggattgcagaatcggggctggaggagaggagggaggagcacttttttttttttttaacctgcggcgccggcctctcccctgtttgctctgagataccagtctcgctcctgcccagcccgggcggctgcccttgggtgctcccttccctgcccgacacccagaccgaccttgaccgcccacctggcaggagcaggacaggacggccggacgcggccatggccga

SEQ ID NO: 339564 - DNA, 117 bp, Artificial Sequence
  derived and/or modified sequence
atggaggccgccgacgccagcagaagcaacggcagcagccccgaggccagagacgccagaagccccagcggccccagcggcagcctggagaacggcaccaaggccgacggcaagtag

SEQ ID NO: 339565 - DNA, 117 bp, Artificial Sequence
  derived and/or modified sequence
atggaggcggcagatgcttctagatctaatgggagctcccctgaagccagagatgcgaggtccccgagcggtccatccggttcactggaaaacggcaccaaggcggatgggaagtag

SEQ ID NO: 339566 - DNA, 117 bp, Artificial Sequence
  derived and/or modified sequence
atggaggccgcagatgccagccgcagcaatggcagcagccctgaggccagagatgcccggagccccagcggccccagcggcagcctggagaatggcaccaaggcagatggcaagtag

SEQ ID NO: 339567 - DNA, 117 bp, Artificial Sequence
  derived and/or modified sequence
atggaggccgccgacgccagccggagcaacggcagcagccccgaggcaagggatgccagatccccctctggtccatctggatcactcgaaaatgggactaaagccgatgggaagtag

SEQ ID NO: 339568 - DNA, 117 bp, Artificial Sequence
  derived and/or modified sequence
atggaggccgctgatgcaagtaggagtaatgggtcatcaccagaggcacgagacgcccgttctccttctggtccaagcgggagcttggaaaatgggactaaggctgatggtaagtag

SEQ ID NO: 339569 - protein, 517 aa, Artificial Sequence
  derived and/or modified sequence
MPPPGKVPRKENLWLQCEWGSCSFVCSTMEKFFEHVTQHLQQHLHGSGEEEEEEEEDDPLEEEFSCLWQECGFCSLDSSADLIRHVYFHCYHTKLKQWGLQALQSQADLGPCILDFQSRNVIPDIPDHFLCLWEHCENSFDNPEWFYRHVEAHSLCCEYEAVGKDNPVVLCGWKGCTCTFKDRSKLREHLRSHTQEKVVACPTCGGMFANNTKFLDHIRRQTSLDQQHFQCSHCSKRFATERLLRDHMRNHVNHYKCPLCDMTCPLPSSLRNHMRFRHSEDRPFKCDCCDYSCKNLIDLQKHLDTHSEEPAYRCDFENCTFSARSLCSIKSHYRKVHEGDSEPRYKCHVCDKCFTRGNNLTVHLRKKHQFKWPSGHPRFRYKEHEDGYMRLQLVRYESVELTQQLLRQPQEGSGLGTSLNESSLQGIILETVPGEPGRKEEEEEGKGSEGTALSASQDNPSSVIHVVNQTNAQGQQEIVYYVLSEAPGEPPPAPEPPSGGIMEKLQGIAEEPEIQMV

SEQ ID NO: 339570 - DNA, 3161 bp, Artificial Sequence
  derived and/or modified sequence
cggagatggtctgaggtgggagaagagctgaagagacctggagccgacagacgggtgaaggccatgccgcctcctgggaaagttccccgaaaggagaatctgtggctacagtgtgagtgggggtcctgctcctttgtgtgctcaaccatggaaaagttctttgagcatgtcactcagcacctgcagcagcacctgcatggctctggggaggaggaggaagaggaagaggaggatgacccacttgaggaagaattctcctgcttgtggcaggaatgtggcttttgttctctggacagttctgctgacctcatccgccatgtctacttccactgctaccacaccaagctgaaacagtgggggctgcaggccttgcaaagccaggctgaccttggcccctgcatcctggacttccagagccggaacgtcatccctgatatccctgaccacttcctgtgtctgtgggagcactgtgagaattccttcgacaatcctgagtggttttatcggcatgtggaagcacacagtctgtgctgtgaatacgaagcagtcggcaaggacaacccggtggtgctgtgtggctggaaaggctgtacctgcaccttcaaggaccgcagtaaacttcgagagcacctccgcagccatacccaggagaaagtggtagcctgccccacctgtgggggcatgtttgccaacaataccaagttcttagatcacatccgtcgccagacctcattggatcagcagcacttccagtgttctcactgttccaagagatttgccacagagcggctattgcgggaccacatgcgcaaccatgtgaatcactataagtgccctctgtgtgacatgacctgcccgctgccttcctccctccgcaaccacatgcgctttcgtcacagtgaggaccggccctttaaatgtgactgttgtgactacagctgcaagaatcttattgacctccagaagcacctggatacccacagcgaggagccagcctacaggtgtgattttgagaactgcaccttcagtgcccgatccctctgctctatcaagtcccattaccgcaaagtacatgaaggagactctgagccaaggtacaaatgtcatgtgtgtgacaaatgcttcacacggggcaacaacctcaccgtgcaccttcgcaagaagcaccagttcaagtggccctcagggcatccccgttttcggtacaaggaacatgaagatggctatatgcggctgcagctggttcgctacgagagtgtagagctgacacagcaactgctgcggcaaccacaagagggatcgggcctgggaacgtcgctgaacgagagcagcctgcagggcattattctagaaacagtgccaggggagccaggacgtaaggaagaggaagaggagggcaagggtagcgaagggacagccctctcagcctctcaggacaaccccagttctgtcatccacgtggtgaatcagaccaatgcccaaggccagcaagagatcgtctactatgtgctgtctgaagccccaggggagcctcccccagcccctgagccaccttcagggggcatcatggaaaagcttcaaggaatagctgaggagccagagatccagatggtttgaaggccgcagagccagaccatttcttccccaggtcctgaagtttgagccaggcaagtggcagtgcccctagtgggcagccgttgccaatggatgcctttaggagtggtgccgagagcagtgtggtccactctggcctgggtttgcatcattctgcagactctaaagacttcccttttctgccagactacattttgtggggagcctgaggactctggattctttgaggggatcctggatgtgtgtgttcttgttaaagaggctgttatcaggcttaaccataaccctcaagatctgcttgacagtgattaaatccttagctcacatccattcccatctttcgggctccttaggcccaaggatggcatgtgactggtccctgcaagggtcctttctttgtcaccagccaaggcattgataaccaagtagccattttcctcttaaggtttcctctacaaccccaaggactttcatgattatcctcagggacaggattggaggcattgagcgtgtttattaacaaattgtttttggtaataaaataaatgcttggactcttatttatttcttcttacatttggtggcagtttactaggtaatgaggagatacagccacccagaagaggagctgaatagttaggcttgttccccttctggtgactcaggtggtttgttttttgtttgcttaactgtcctgttgtcttctcctcctccccttggtgaaacttcgctattctcagagcgtatgccatttccatggaggtcccaggtgtttggctgtgagtgggcagtagtggtgctatagaatgaacaagaatgggctcactgggaggatagggcagctgaccatggcctcactctgaatactgattagaacccagtgcctctagggtaggggttctttacctgggagtgggaaggaagctggggggtggagaggattgggaagcctcccagggaagggaggcaatcaagtggtccaggaaccaaactagaaaattgtgtgtctgaatgtgcattttcctggggaaaggatctgttttttgctagattatcaaagagattgaaacctcccaaaataagaatcatcatttcgtctggttcagctgcttctcagcaccctgtgtccatttttatggtctactgctatgctggagaggtcaaggaaatagtcttggggacaggaagctgcccaaaaaggatctctgggcctttttttgtaagacctaattctattactagaaaaactaaggctgaatgcagtggttcacgcctgtaatcccaacactttgggaggctgaggcgggcggatcacaaggtcaagagatggagaccatcctggccaacatggtgaaaccccgtctctactaaaaatataaaaatcagctgggcatggtggcacacatctgtagtcccagctactcgggaggctgaggcaggagaattgcttgaacccgggaggctgaggttgcagtgagccgagatcatgccactgcactccagcctggcgacacagtgagactccgtctcaaataaataaataaata

SEQ ID NO: 339571 - DNA, 1554 bp, Artificial Sequence
  derived and/or modified sequence
atgccacctcctggaaaggtgcccagaaaggagaatctgtggctgcaatgtgagtgggggtcctgttcttttgtatgttccactatggaaaaattctttgagcatgtcacccagcatctgcagcagcaccttcacggctccggtgaagaggaggaggaagaagaagaggacgatcccctcgaggaggagtttagctgtttgtggcaggagtgtgggttttgctcccttgattcctcagcagacttaataagacacgtatactttcactgttaccacactaagctcaagcaatggggcctgcaggcactgcaatctcaggccgacctgggtccctgcattcttgactttcagtctagaaatgtcattccagacattccagaccacttcctgtgtctctgggaacactgtgaaaatagcttcgataatcccgagtggttttatcggcacgtcgaggctcactccctttgttgtgagtatgaagccgtggggaaagataatcccgtggtgctatgtggatggaaaggctgtacctgtacatttaaggatcgaagtaagctgcgcgagcacctgcgctcccacacccaggagaaggtggtcgcttgcccaacctgtggcggcatgtttgctaacaatacgaagtttctggaccatatccgccgccagaccagccttgaccaacagcacttccagtgcagccactgtagcaagcgctttgccacggagcggttgcttagagaccacatgcgcaaccacgtaaaccattacaaatgtccactctgtgatatgacctgcccgttaccgtcctcgttacgaaaccatatgaggtttaggcatagcgaagatagacctttcaagtgtgattgctgcgattactcctgcaagaacctgatagacctccagaagcatttagacactcactccgaagaacctgcgtataggtgcgacttcgaaaactgcacattcagtgcgcggagtctttgctcaattaaatcacactacagaaaggtgcatgagggagattccgaaccacgttataaatgtcacgtctgcgacaaatgttttactagaggaaacaacctgactgtccacttgaggaaaaagcaccagtttaagtggccctccggacatccgcggttccgctataaagagcatgaggacggatacatgcggctccaactcgtgcgctacgaatcggtggagttgacacaacaactgctccgtcaaccccaggaagggtctgggctgggaacgagtctgaacgaatcttcactccagggtatcattctggagaccgtgcctggtgagccgggaagaaaggaagaggaggaagagggaaaggggtcagaggggactgcacttagcgcctcccaggataatcccagcagcgtaatacacgtggtgaatcagaccaacgcccagggccagcaggaaatagtatactatgttctgagcgaggcccctggagaaccccccccagccccagagcctccgagcggaggaataatggagaaactacaaggcatcgcagaggaaccagagatccagatggtttag

SEQ ID NO: 339572 - DNA, 1554 bp, Artificial Sequence
  derived and/or modified sequence
atgcctcctcctgggaaggtgcccaggaaagaaaacctgtggctgcagtgtgagtggggcagctgcagctttgtgtgcagcaccatggagaagttctttgaacatgtgacccagcacctgcagcagcacctgcacggcagcggggaggaggaggaggaggaggaggaggatgaccccctggaggaggagttcagctgcctgtggcaggagtgtggcttctgcagcctggacagcagcgctgacctgatcagacatgtgtacttccactgctaccacaccaagctgaagcagtggggcctgcaggccctgcagagccaggccgacctgggcccctgcatcctggacttccagagcagaaatgtcatcccagacatcccagaccacttcctgtgcctgtgggagcactgtgaaaattcctttgacaaccctgagtggttctacagacatgtggaggcccacagcctgtgctgtgaatatgaagctgtgggcaaggacaaccctgtggtgctgtgtggctggaagggctgcacctgcaccttcaaggacaggagcaagctgcgggagcacctgcggagccacacccaggagaaggtggtggcctgccccacctgtggcggcatgtttgccaacaacaccaagttcctggaccacatccggcggcagaccagcctggaccagcagcacttccagtgcagccactgcagcaagagatttgccacagagcggctgctgcgggaccacatgagaaatcatgtgaaccactacaagtgccccctgtgtgacatgacctgccccctgcccagcagcctgaggaaccacatgaggttccgccacagcgaggaccggcccttcaagtgtgactgctgtgactacagctgcaagaacctgattgacctgcagaagcacctggacacccacagcgaggagcccgcctaccgctgtgactttgagaactgcaccttcagcgcccggagcctgtgcagcatcaagagccactacaggaaggtgcatgaaggagacagcgagccccgctacaagtgccacgtgtgtgacaagtgcttcacccggggcaacaacctgactgtgcacctgaggaagaagcaccagttcaagtggcccagcggccacccccgcttccgctacaaggagcatgaagatggctacatgaggctgcagctggtgcgctatgagagcgtggagctgacccagcagctgctgcggcagccccaggagggcagcggcctgggcaccagcctgaatgaaagcagcctgcagggcatcatcctggagaccgtgcctggagagcccggcaggaaggaggaggaggaggagggcaagggcagcgagggcacagccctgagcgccagccaggacaaccccagcagcgtcatccacgtggtgaaccagaccaatgcccagggccagcaggagatcgtgtactacgtgctgtctgaggcccctggagagcccccaccagcccctgagccccccagcggcggcatcatggagaagctgcagggcattgctgaggagcctgagatccagatggtgtag

SEQ ID NO: 339573 - DNA, 1554 bp, Artificial Sequence
  derived and/or modified sequence
atgcccccccccggcaaggtgccccggaaggagaacctgtggctgcaatgtgagtggggttcatgttcgttcgtctgcagcaccatggaaaaattttttgagcatgttacccagcacctgcagcagcacctgcacggctctggagaggaggaagaggaagaggaagaggacgatcccttagaagaggaattcagctgcctttggcaggagtgcggcttttgtagtttagatagcagcgccgatttgatccggcacgtgtattttcattgttatcacaccaagctcaaacaatgggggctgcaggccctccagtctcaggcagatcttggcccttgcatcctcgattttcagagccgtaatgtgatccctgatattcctgatcattttctatgtttgtgggagcactgcgaaaactcttttgataatccagagtggttctaccgacacgtcgaggcccactccctctgctgcgagtacgaggccgtcggaaaggacaatcctgtggtgctgtgtggctggaaaggctgtacctgcacatttaaagataggagcaaactcagggaacatctgcgctctcacacccaggaaaaggtagtggcctgtcctacttgtggaggcatgtttgcaaataacacaaagttccttgaccatatccgccgacaaactagtctcgaccagcagcattttcaatgctcccattgtagcaaaagattcgccactgagcggttgcttcgagaccacatgcggaaccatgtaaatcactataaatgtcccttgtgtgacatgacttgtccactaccttcttcattacgaaaccatatgcgctttcgtcactcagaggacaggccattcaaatgtgactgctgcgattactcctgtaagaatctgattgatctccaaaagcatctcgatactcacagcgaggaacccgcttatcggtgcgacttcgaaaattgcacctttagtgcgaggtcactgtgctcaattaagtcccactatcggaaagtgcacgaaggggacagcgagcctaggtacaaatgtcatgtttgtgataagtgcttcacgagaggcaataaccttacagtgcatctgcggaaaaagcaccaatttaagtggccttcgggacacccccgttttagatataaggaacacgaagatggttatatgaggttgcagctagtgaggtatgaatccgtagagctgacccagcagctcctcaggcagccccaggaaggaagcggtctcggaacctctttgaacgaatctagcctgcaaggcatcatcttggagactgtcccaggagagccaggacgtaaggaggaggaagaggagggcaaaggcagcgaggggacggctctgagtgcctctcaggacaaccctagctccgtgattcatgtcgtgaaccagactaatgcccaggggcagcaagagatcgtgtattatgttctaagcgaagcccccggggagcccccccctgcacctgaaccgccttccggcggaatcatggagaaacttcagggtattgctgaggaacccgaaatacagatggtctag

SEQ ID NO: 339574 - DNA, 1554 bp, Artificial Sequence
  derived and/or modified sequence
atgccccctcctggtaaggtgccaaggaaggaaaatctgtggttacagtgtgagtggggaagttgctcatttgtttgttccaccatggaaaaattttttgaacacgtcacccagcacctacagcagcatctccatggttctggcgaagaggaagaagaggaggaagaggacgaccctctcgaagaggagttcagctgtctgtggcaggagtgtggcttttgctctctggatagtagtgcggatctcattagacatgtgtatttccactgctaccacactaaattgaagcagtggggcctgcaagctctccagtcccaggcagatctgggaccctgtatattagacttccagtctcgcaacgtcatcccggatatacccgaccatttcctgtgcctgtgggagcattgtgaaaactcattcgataaccctgagtggttttacaggcacgttgaggcccattcactctgttgcgagtatgaggccgtagggaaggacaatcccgttgtcctgtgtggatggaaaggctgcacctgtaccttcaaggaccgtagcaagttgagagagcacctcagaagccacacccaagagaaagtcgtggcatgtccgacgtgtggtggaatgtttgcaaacaatacaaaatttttggaccacatacgccgtcagacctcactcgatcagcagcattttcaatgcagtcactgtagtaagcgatttgccactgagagactcttgagggatcatatgaggaaccacgtcaatcattacaaatgcccactgtgcgacatgacctgtccattaccctcctcccttcggaaccacatgcggttccgacactctgaggatagaccctttaagtgcgactgttgcgattattcatgcaaaaacttaatcgatctacaaaagcatttggacacccattccgaggagcccgcttatcggtgcgattttgagaattgcacattttccgccaggtccctgtgttccattaaatctcactaccggaaagttcatgagggagatagtgaaccacggtacaagtgtcacgtttgtgataaatgttttacgcgtggcaataaccttaccgtgcatctgcggaagaagcaccaattcaaatggcctagtggacatcctagatttaggtacaaggaacacgaagacggctacatgcgactgcagctcgttcggtacgagtcagtcgaactgactcagcagctgctgaggcaaccacaggaagggtccggcttgggtacctcactgaacgaatcgtcattgcaaggcattattttggagacggtcccaggagagccgggacgtaaggaagaggaagaagagggaaaggggagcgaaggcactgccttatcagcttcacaggacaacccgagctccgtgatccatgtggtgaatcagacaaacgcgcaggggcagcaggaaattgtgtactacgtgctttcagaggcacccggtgaaccaccgccagcaccagagccgcctagcgggggtataatggagaaactgcagggcattgcagaggaacctgagattcagatggtttag

SEQ ID NO: 339575 - DNA, 1554 bp, Artificial Sequence
  derived and/or modified sequence
atgcccccccccggcaaggtgcccagaaaggagaacctgtggctgcagtgcgagtggggcagctgcagcttcgtgtgcagcaccatggagaagttcttcgagcacgtgacccagcacctgcagcagcacctgcacggcagcggcgaggaggaggaggaggaggaggaggacgaccccctggaggaggagttcagctgcctgtggcaggagtgcggcttctgcagcctggacagcagcgccgacctgatcagacacgtgtacttccactgctaccacaccaagctgaagcagtggggcctgcaggccctgcagagccaggccgacctgggcccctgcatcctggacttccagagcagaaacgtgatccccgacatccccgaccacttcctgtgcctgtgggagcactgcgagaacagcttcgacaaccccgagtggttctacagacacgtggaggcccacagcctgtgctgcgagtacgaggccgtgggcaaggacaaccccgtggtgctgtgcggctggaagggctgcacctgcaccttcaaggacagaagcaagctgagagagcacctgagaagccacacccaggagaaggtggtggcctgccccacctgcggcggcatgttcgccaacaacaccaagttcctggaccacatcagaagacagaccagcctggaccagcagcacttccagtgcagccactgcagcaagagattcgccaccgagagactgctgagagaccacatgagaaaccacgtgaaccactacaagtgccccctgtgcgacatgacctgccccctgcccagcagcctgagaaaccacatgagattcagacacagcgaggacagacccttcaagtgcgactgctgcgactacagctgcaagaacctgatcgacctgcagaagcacctggacacccacagcgaggagcccgcctacagatgcgacttcgagaactgcaccttcagcgccagaagcctgtgcagcatcaagagccactacagaaaggtgcacgagggcgacagcgagcccagatacaagtgccacgtgtgcgacaagtgcttcaccagaggcaacaacctgaccgtgcacctgagaaagaagcaccagttcaagtggcccagcggccaccccagattcagatacaaggagcacgaggacggctacatgagactgcagctggtgagatacgagagcgtggagctgacccagcagctgctgagacagccccaggagggcagcggcctgggcaccagcctgaacgagagcagcctgcagggcatcatcctggagaccgtgcccggcgagcccggcagaaaggaggaggaggaggagggcaagggcagcgagggcaccgccctgagcgccagccaggacaaccccagcagcgtgatccacgtggtgaaccagaccaacgcccagggccagcaggagatcgtgtactacgtgctgagcgaggcccccggcgagcccccccccgcccccgagccccccagcggcggcatcatggagaagctgcagggcatcgccgaggagcccgagatccagatggtgtag

SEQ ID NO: 339576 - DNA, 1189 bp, Artificial Sequence
  derived and/or modified sequence
gaaggcgttcagactcttagctgaacgcggagctgcggcggctatgctgtggagcggctgccggcgtttcggggcgcgcctcggctgcctgcccggcggtctccgggtcctcgtccagaccggccaccggagcttgacctcctgcatcgacccttccatgggacttaatgaagagcagaaagaatttcaaaaagtggcctttgactttgctgcccgagagatggctccaaatatggcagagtgggaccagaagcatgtgtgcctggatgattgatagcttcggaaatgaggaacagaggcacaaattttgcccaccgctctgtaccatggagaagtttgcttcctactgcctcactgaaccaggaagtgggagtgatgctgcctctcttctgacctccgctaagaaacagggagatcattacatcctcaatggctccaaggccttcatcagtggtgctggtgagtcagacatctatgtggtcatgtgccgaacaggaggaccaggccccaagggcatctcatgcatagttgttgagaaggggacccctggcctcagctttggcaagaaggagaaaaaggtggggtggaactcccagccaacacgagctgtgatcttcgaagactgtgctgtccctgtggccaacagaattgggagcgaggggcagggcttcctcattgccgtgagaggactgaacggagggaggatcaatattgcttcctgctccctgggggctgcccacgcctctgtcatcctcacccgagaccacctcaatgtccggaagcagtttggagagcctctggccagtaaccagaaaaagcaagagactttgaagctttggatcacttagaaaaggcgcctccgagatgtcttaccgaggctcctgcaccaggtgctggtctaagcccctcagtcttgtctggttctctgctccctgtgctgcagtacttgcaattcacactggctgatatggcaacaaggctggtggccgcgcggctgatggtccgcaatgcagcagtggctctgcaggaggagaggaaggatgcagtggccttgtgctccatggccaagctctttgctacagatgaatgctttgccatctgcaaccaggccttgcagatgcacgggggctacggctacctgaaggattacgctgttcagcagtacgtgcgggactccagggtccaccag

SEQ ID NO: 339577 - protein, 347 aa, Artificial Sequence
  derived and/or modified sequence
MGNEEPWVQPALEMPKRRDILAIVLIVLPWTLLITVWHQSTLAPLLAVHKDEGSDPRRETPPGADPREYCTSDRDIVEVVRTEYVYTRPPPWSDTLPTIHVVTPTYSRPVQKAELTRMANTLLHVPNLHWLVVEDAPRRTPLTARLLRDTGLNYTHLHVETPRNYKLRGDARDPRIPRGTMQRNLALRWLRETFPRNSSQPGVVYFADDDNTYSLELFEEMRSTRRVSVWPVAFVGGLRYEAPRVNGAGKVVGWKTVFDPHRPFAIDMAGFAVNLRLILQRSQAYFKLRGVKGGYQESSLLRELVTLNDLEPKAANCTKILVWHTRTEKPVLVNEGKKGFTDPSVEI

SEQ ID NO: 339578 - DNA, 1044 bp, Artificial Sequence
  derived and/or modified sequence
atgggaaacgaagaaccttgggtgcagcctgccctggagatgcctaagaggcgggatattctagctatcgtactcattgtgcttccctggacgttactgatcacagtctggcaccagagcacactggctccactgttggctgttcacaaggatgagggcagcgacccaagacgggagacccctcccggagccgaccctcgagaatactgcacttctgatcgggatatcgtggaagtcgtaagaactgagtatgtgtacactcgacctcccccctggtcggacactctaccaaccatacacgtagtgacacctacttactcacggcccgtccagaaggccgagttgactagaatggccaatacactgttgcatgtgccgaatcttcattggttggtggtggaggacgctcctcgccgcacaccattaactgccaggcttcttagagacactgggttaaattatacccatctacatgtcgagactccacgaaattataagctgcgcggtgacgctagggacccaagaatccccaggggcactatgcaaaggaatttggcactcaggtggctcagagagacatttcctagaaacagcagccaacctggggtggtatatttcgccgatgatgacaatacttacagcctggaactgtttgaggagatgagatctactaggagggtgagcgtgtggcccgttgctttcgtcggcggactgagatatgaggccccccgcgtcaatggtgccggcaaggtcgtgggatggaaaactgtcttcgatccacacagaccatttgctattgacatggcaggatttgctgttaatttgagactcatcctccagcgcagtcaggcttacttcaagctgcggggagtcaaaggcggttaccaggaatccagtctgctgagggaactggtgacattgaatgacttggaacccaaggcagccaattgcactaagattctggtgtggcatactagaacagagaagccggtgctggtgaacgagggtaagaagggatttacggacccctccgtagagatctag

SEQ ID NO: 339579 - DNA, 1044 bp, Artificial Sequence
  derived and/or modified sequence
atgggaaatgaggagccctgggtgcagcctgccctggagatgcccaagagaagagacatcctggccatcgtgctgattgtgctgccctggaccctgctgatcaccgtgtggcaccagagcaccctggcccccctgctggccgtgcacaaggatgagggcagtgacccccggcgggagaccccacctggagctgacccccgggagtactgcaccagtgaccgggacatcgtggaggtggtgaggacagaatatgtgtacacccggcccccaccctggagcgacaccctgcccaccatccacgtggtgacccccacctacagcaggcctgtgcagaaggccgagctgaccaggatggccaacaccctgctgcacgtgcccaacctgcactggctggtggtggaggatgcccccaggaggacccccctgacagcccggctgctgcgggacaccggcctgaactacacccacctgcacgtggagaccccaagaaactacaagctgcggggagatgcccgggacccccgcatcccccggggcaccatgcagaggaacctggccctgcgctggctgcgggagaccttccccaggaacagcagccagcccggggtggtgtactttgctgatgatgacaacacctacagcctggagctgtttgaggagatgaggagcaccaggagagtgtctgtgtggcctgtggcctttgtgggcggcctgcgctatgaggccccccgggtgaatggagctgggaaggtggtgggctggaagacagtgtttgacccccaccggccctttgccatcgacatggccggctttgctgtgaacctgcggctcatcctgcagaggagccaggcctacttcaagctgcggggcgtgaagggcggctaccaggagagcagcctgctgcgggagctggtgaccctgaatgacctggagcccaaggccgccaactgcaccaagatcctggtgtggcacaccaggacagagaagcctgtgctggtgaatgaaggcaagaagggcttcacagaccccagcgtggagatctag

SEQ ID NO: 339580 - DNA, 1044 bp, Artificial Sequence
  derived and/or modified sequence
atgggcaacgaggagccctgggtgcagcccgccctggagatgcccaagcgacgcgatatcctggctatcgtgctcatcgttcttccatggaccctcctgatcacagtatggcatcaatctacattggctccactgctcgccgtgcacaaggacgagggtagtgacccacggcgcgaaacaccccccggggcagatcccagagagtattgcacgagcgaccgagatatcgtggaagtcgttcggaccgagtatgtctatacgcggcccccaccgtggagcgataccctgccgacaattcacgtggtgactcctacctattccaggccagtgcagaaggctgagctgaccagaatggctaacacattgctgcatgtgcccaatctccactggctcgtggtggaggatgctccacggaggactccacttacggcccggctactgagagatacgggactgaattatacccacctacatgtggaaaccccaagaaactataagctgcgcggagatgcccgcgatccccgtattccccgggggaccatgcagcggaacctcgctttgaggtggcttagggagactttcccccgtaactcaagccagcccggggttgtttatttcgccgacgatgacaacacttatagcctcgagctctttgaggaaatgaggtccaccagaagagtttcggtttggcccgtggcatttgtgggggggctgagatatgaggcgcctcgcgtcaatggagccggtaaagtcgttggatggaaaactgtcttcgaccctcacagacctttcgccatcgatatggccggcttcgccgtaaacttgaggcttattctgcagcgatctcaggcctatttcaagctgagaggagttaaaggtggttaccaggagagctcactgctacgtgagctggttaccctgaacgacctcgaaccaaaggccgctaactgtaccaaaattttggtctggcatacaagaaccgaaaaacccgtgctagttaacgagggcaagaagggattcaccgatccgtctgtcgaaatctag

SEQ ID NO: 339581 - DNA, 1044 bp, Artificial Sequence
  derived and/or modified sequence
atgggcaatgaggagccatgggtgcagccagctctcgaaatgcccaagcggagggacattctggcaattgtcctcatcgtgttgccttggacccttctgattaccgtgtggcatcagtccactctggccccactgctcgcagtgcataaagatgaggggagtgatccacgaagagagaccccacccggtgccgatcctcgggaatattgcacatccgatagagatattgtagaggtagtgcggaccgagtacgtctatacacgccctcctccttggtcggatacactcccaacgattcacgtggtgacacccacctacagtagacccgtacagaaggccgaactaacccggatggctaataccctgttgcatgtgccaaacctgcattggttagtagtcgaggatgcacccagacgtactcctttgacagccagacttctccgcgacactggccttaattatacccacctccatgttgaaacccctcggaattacaaactccggggtgatgccagggatccgaggattcctcgaggcaccatgcagcgaaacctggctctcagatggctcagggaaacattccctcgaaactcttctcagcctggagtggtttattttgctgatgatgacaacacgtattctctggagcttttcgaagagatgaggagcacacggcgagtgtctgtttggcctgtcgcatttgttggcggactgaggtacgaggcgcctagggtgaatggtgcagggaaggtggtgggttggaagacggtgtttgacccccacaggccattcgccattgacatggctggttttgcggtaaacctccggctgatattgcagcgtagtcaagcttatttcaaactgcggggtgttaaaggcggttaccaggaatcttcgctgttgagggagctggtgacacttaatgacctcgaacccaaggcagctaattgcacaaaaattctggtttggcacaccaggactgagaagccggtcctggtaaacgagggaaagaagggattcacggacccatccgtggagatttag

SEQ ID NO: 339582 - DNA, 3652 bp, Artificial Sequence
  derived and/or modified sequence
ggagggagccgcacgcggcccagggcagcggtctaggggcgccggggccggggcgtaggggccgttgcccgcgatggaccgcaccggagacgctccggactcgtcgccgcaggtgtccaccccccagggttcctgacccctgcccctggacagcgaccccttctcagactccagttgggccggactctccaaacctgcttccgcaatgggtgggttgtgagtgctggtaagacctgctagccaacattcagctgctctgtcctctccatgcctggccggcccggcccatgcctgttcttttctcccctgtgctgccgccgcccgtggccgcccctctcctgaacttaccgccactcaggtaatgaggagccgtgggtgcagccagccttggagatgccgaagagacgggacatcctagcgatcgtcctcatcgtgctgccctggactctgctcatcactgtctggcaccagagcaccctcgcacccctgctcgcggtacataaggatgagggcagtgacccccgacgcgaaacgccgcccggcgccgaccccagggagtactgcacgtctgaccgcgacatcgtggaggtggtgcgcaccgagtacgtgtacacgcggcccccgccatggtccgacacgctgcccaccatccacgtggtgacgcccacctacagccgcccggtgcagaaggccgagctgacgcgcatggccaacacgctgctgcacgtgcccaacctccactggctggtggtggaggatgcgccgcgccggacgccgctgaccgcgcgcctgctgcgcgacaccggcctcaactacacgcacctgcacgtggagacgccccgcaactacaagctgcgcggagacgcccgcgacccacgcatcccgcggggcaccatgcagcgcaacctggccctgcgctggctgcgcgagaccttcccgcgcaactccagccagcctggcgtggtctacttcgccgacgacgacaacacctacagcctggagctcttcgaagagatgcgcagcaccaggagggtgtccgtgtggcccgtcgccttcgtgggtggcctgcggtacgaggccccacgggtgaacggggcagggaaggtggtcggctggaagacggtgtttgacccccaccggccatttgcaatagacatggctggatttgccgtcaacctgcggctcattctgcagcgaagccaggcctacttcaagctgcgaggtgtgaagggaggctaccaggaaagcagcctccttcgagaacttgtcaccctcaacgacctggagcccaaggcagccaactgcaccaagatcctggtgtggcacacacggacagagaagccagtgctggtgaatgagggcaagaagggcttcactgacccctcggtggagatctgagcctcaggatgcaggagcctcctcctcagaccctgttcttggccttccatcctctccccacggctgatggtccctccaaggccgactcctaaggaatcaccatcaccctcctttctattctgggggcttctgagagagcccagcctgatgccagaacaaaggacagagaatttaagcacagaaatcccagacctgttgttctctccatccagcgtgaccagggcccgagagacctgatggccagggtggggtgtccagcaccagccaagctggtgctccagcgcacctccccagagctccccgcactgacggggctgcaggagcaggtgcagtgggcgcccacactggccctgcagtgatgcagggcgggagggagataagaagaccccgcagtcaagtggagcatggccctccctggctccctgtccctgggctcagcacgaccacacaggacacccagccagggaattctgaagaccagagagcagcccacgggcatcacgagcgctctgctcctctcctgggcccctgctcttcccgagagctgcccccaaatcagacatacctctgtggctctcctctggttcacgtttacagagcataaggctgtcttggatcccaacaggcacccagccctgcatggggggagcctgggcctaataggcaccccctgtacctcaggctgtggcgggagcagagtccccccctccggcccctcttcctttaccccttctcctccagcagtggcaaaggggtaggctctagagccagcacaggtcactgcctgacctggactaagaaccccacggccccactgtccacacactgcctccccaccgcccacctcggctgctaggcccctcgcctggactggactggggagggaaagcgccttttcctgcagctcttcagagccacagacctcagggtggagtgagcccatggtgggcagtgggcaaggcggtgggtggtgggcaaggtgggacctcctgcagcctggaaagaggagggaggccaaggccattccctaactccctcctgcccctggtctgaggaggagggactctggagtagcagaggggctgggaaagagggggcaggggctgctgggacactgagcaggagggaggcctgagcacactgctttggaaattattctaaacacaaaaaagggaaagaaaatgttatttctccctaagtcaggagcatgcagagctagcccacctcatgtccagctgtccactttccatcctggagaaagaacagtgtgcctcaaactcctgccctccccaggcctctggggcccactggaaagggctctgaccccctggcccagccgggctctctagtggtgatccggctcattctcctgcaagttggaagcacaattttccccccaagtggaggaaaaggaaagggccccagcctactgaagaggtgtttattttttaactaacagcctcccaccccattaagactcaccaggagaggtctgagggccattcagaacccactcctgagtgggtgggtgggtgggactcagtccagagacctaacattcagaatatagcattggttgcctattttgagatggatttaatctcccacagtattcatgagaccatctgatggaatcagatccctgagccaccttgcaggacgttttccccaacctcttacaccctggatgtcactttggaaaccaagcccttggaagcaagtggggtggcatgggagagaagggaggaggtgggcacaggtggtgagcttatgtgtgggcactctactgcctcacagaagccagccaagtgccaaggtcagcttggctggtctgaggccaccttcttagccaaaaacctagggttcattttcaggactttgataatgaacaacaaaatggggacttctttgggcagatgctaggtcagttgttttcacctaatatcctcttttagctgcatgtatatttatttataattataaccctggtggactgcagccttcatctttattgggaatgagtttgttataaatcagaaatgggtccatgatgaccactgttttccaaacccagtctgttccctgctccctcgctggcaagccccaccacacaggagtgaggccaggggctaggagttctaagaacagaggctggggtgagggtggcacccaggcagctgcatctggtctgttttaatttaactgtatttaatttgctttcaaaattaaaagtcaaatacagtttttaacagtc

SEQ ID NO: 339583 - DNA, 3522 bp, Artificial Sequence
  derived and/or modified sequence
ggagggagccgcacgcggcccagggcagcggtctaggggcgccggggccggggcgtaggggccgttgcccgcgatggaccgcaccggagacgctccggactcgtcgccgcaggtgtccaccccccagggttcctgacccctgcccctggacagcgaccccttctcagactccagttgggccggactctccaaacctgcttccgcaatgggtgggttgtgagtgctggtaatgaggagccgtgggtgcagccagccttggagatgccgaagagacgggacatcctagcgatcgtcctcatcgtgctgccctggactctgctcatcactgtctggcaccagagcaccctcgcacccctgctcgcggtacataaggatgagggcagtgacccccgacgcgaaacgccgcccggcgccgaccccagggagtactgcacgtctgaccgcgacatcgtggaggtggtgcgcaccgagtacgtgtacacgcggcccccgccatggtccgacacgctgcccaccatccacgtggtgacgcccacctacagccgcccggtgcagaaggccgagctgacgcgcatggccaacacgctgctgcacgtgcccaacctccactggctggtggtggaggatgcgccgcgccggacgccgctgaccgcgcgcctgctgcgcgacaccggcctcaactacacgcacctgcacgtggagacgccccgcaactacaagctgcgcggagacgcccgcgacccacgcatcccgcggggcaccatgcagcgcaacctggccctgcgctggctgcgcgagaccttcccgcgcaactccagccagcctggcgtggtctacttcgccgacgacgacaacacctacagcctggagctcttcgaagagatgcgcagcaccaggagggtgtccgtgtggcccgtcgccttcgtgggtggcctgcggtacgaggccccacgggtgaacggggcagggaaggtggtcggctggaagacggtgtttgacccccaccggccatttgcaatagacatggctggatttgccgtcaacctgcggctcattctgcagcgaagccaggcctacttcaagctgcgaggtgtgaagggaggctaccaggaaagcagcctccttcgagaacttgtcaccctcaacgacctggagcccaaggcagccaactgcaccaagatcctggtgtggcacacacggacagagaagccagtgctggtgaatgagggcaagaagggcttcactgacccctcggtggagatctgagcctcaggatgcaggagcctcctcctcagaccctgttcttggccttccatcctctccccacggctgatggtccctccaaggccgactcctaaggaatcaccatcaccctcctttctattctgggggcttctgagagagcccagcctgatgccagaacaaaggacagagaatttaagcacagaaatcccagacctgttgttctctccatccagcgtgaccagggcccgagagacctgatggccagggtggggtgtccagcaccagccaagctggtgctccagcgcacctccccagagctccccgcactgacggggctgcaggagcaggtgcagtgggcgcccacactggccctgcagtgatgcagggcgggagggagataagaagaccccgcagtcaagtggagcatggccctccctggctccctgtccctgggctcagcacgaccacacaggacacccagccagggaattctgaagaccagagagcagcccacgggcatcacgagcgctctgctcctctcctgggcccctgctcttcccgagagctgcccccaaatcagacatacctctgtggctctcctctggttcacgtttacagagcataaggctgtcttggatcccaacaggcacccagccctgcatggggggagcctgggcctaataggcaccccctgtacctcaggctgtggcgggagcagagtccccccctccggcccctcttcctttaccccttctcctccagcagtggcaaaggggtaggctctagagccagcacaggtcactgcctgacctggactaagaaccccacggccccactgtccacacactgcctccccaccgcccacctcggctgctaggcccctcgcctggactggactggggagggaaagcgccttttcctgcagctcttcagagccacagacctcagggtggagtgagcccatggtgggcagtgggcaaggcggtgggtggtgggcaaggtgggacctcctgcagcctggaaagaggagggaggccaaggccattccctaactccctcctgcccctggtctgaggaggagggactctggagtagcagaggggctgggaaagagggggcaggggctgctgggacactgagcaggagggaggcctgagcacactgctttggaaattattctaaacacaaaaaagggaaagaaaatgttatttctccctaagtcaggagcatgcagagctagcccacctcatgtccagctgtccactttccatcctggagaaagaacagtgtgcctcaaactcctgccctccccaggcctctggggcccactggaaagggctctgaccccctggcccagccgggctctctagtggtgatccggctcattctcctgcaagttggaagcacaattttccccccaagtggaggaaaaggaaagggccccagcctactgaagaggtgtttattttttaactaacagcctcccaccccattaagactcaccaggagaggtctgagggccattcagaacccactcctgagtgggtgggtgggtgggactcagtccagagacctaacattcagaatatagcattggttgcctattttgagatggatttaatctcccacagtattcatgagaccatctgatggaatcagatccctgagccaccttgcaggacgttttccccaacctcttacaccctggatgtcactttggaaaccaagcccttggaagcaagtggggtggcatgggagagaagggaggaggtgggcacaggtggtgagcttatgtgtgggcactctactgcctcacagaagccagccaagtgccaaggtcagcttggctggtctgaggccaccttcttagccaaaaacctagggttcattttcaggactttgataatgaacaacaaaatggggacttctttgggcagatgctaggtcagttgttttcacctaatatcctcttttagctgcatgtatatttatttataattataaccctggtggactgcagccttcatctttattgggaatgagtttgttataaatcagaaatgggtccatgatgaccactgttttccaaacccagtctgttccctgctccctcgctggcaagccccaccacacaggagtgaggccaggggctaggagttctaagaacagaggctggggtgagggtggcacccaggcagctgcatctggtctgttttaatttaactgtatttaatttgctttcaaaattaaaagtcaaatacagtttttaacagtcct

SEQ ID NO: 339584 - DNA, 5737 bp, Artificial Sequence
  derived and/or modified sequence
agaggtgttcccagtatggccgatctccataggcatactggcccttaagtcaggactcagttccacgggcccttaagtcaggactcagttccatgggtgctggcccttaagtcaggactcagttccacgggtgctggcccttaagtcaggactcagttccacggaggctgttttgttggcgctcttgcctcgcctctggccctaggtgcccactgagctacactttcctcacataggacatcccttcatcttcgcagagccctatggtaacctccagttgctaaaatggcaggatcgttgaaacttccagctcaacctccctattgtaaagacgaggtcaaggagggcaatcagcatgacccaggtccccgtggagcacctgccggacacgtccaggccgccaccctcccactcccatgtgctgccccagcttctgctccccatctgggaaccaccctccactctcccacagggaagtgcttgcttccctctgaggctctgagggcacccggggagggcagggcacagccttttgtgtctctacttgccgagacgcctgagatctgaggttggtcacagatatggtgcaagtgtcaggatgggagttgtgaccacggcaggcctgggccctacactcacacacactgcccacgccgcgtcctgcctctccacgaagtcccccttgtgcctccacccatctcctcctccagcaccccattcttccccgtgcttgcctccatctcctgggctctcctgggtgtggccaagccactcctgcacctttgtgctgattcttctgcctgacccaaggtcctagaagccattctggggtccttgttagagacagcctgcgaccacagacaaacaccgccctcctccaagccccaggcagaagcagcaggctgcgagaggggaccagtgctggccaaccttgcagccccgtctcagactggggcccagagctgggggcaggtgcagcccacccgctgcctggccccaagcccctgcccagcccaggcatcacatcccacgacctgccccctgccggccagctggcgttctccaggctgggggctctctgtgttctgcttgataactgcctggtaattagctccacgattttgctactatgcttataatagcctccattaaagttatggggttttcaagccataatggcttccagagtaattaatgcacaactgggtttattgctgagtttatttttagaggttttctccctctctccccctcccttttctctcatagatgttttgaccaaaaagactggatgggagcagaaggcaccccacggcacccttgcccacaggccccatcctcccctctcttcccttcccgcccctccttcctgcttcagcctccaagcaggtgctagggccctgcagtgggggcagccattgcagaggagggtggctgtggtccaggccagaggaagcatttggcctgtgtgtgccccttacccaccctgcgcctggcccaggttcgagaggcttggaggcctgggacctcttatcctatgcccccgatgacagcatagagccagatggcctggactcaattccagctccaccatttcctaatggttgacctcaggcaagttactccccttctctggcctcgatgaacccacagggaccacagccatgcctactgcacagggctgctgtgacgttgcaggagcaggtgcatgtgaagagctgagcctcatcttcggacatctctcatgctatagggaagtttgtataaacaacagtgcaagcgggggctgagaggctgccccaaaggaaaggcagtggcccacagggactgagctggcaggacactcatcttctctccttggctttctccatcctggtattagaacctgcaccaacaccaggagcacttgagaaagctccttcgagagtctctgagaacacagaagaaatcttcctggacatttctgaagccccagccaggcccagcctccccatccttcatcagatgtggcctaagatccaaacgtgtcttggccaaagaaccaaaacgtgtcttgacacgcagccccatgcagccccagcagtggcctgggtgtggagggacaggctaaatctgggggatgtggcatgaagtcacttgcatctcagaccacaagacccagcaggcatcccgtgtggggttctaggctctgtccctcactgggccagcaaagaggagtttacgggcggacacagacacacacggcctagaatgtccactaggggaactacgtgcctgtgacgttgaaccccagtgggtcttccactccccggggaatgggtgggggagactctctggatggagtgggcctctgatggcggggtgtgggcaggggatgccggccgtcctgggaaaccacagtgctccttaatggaggggatgccggccgtcccgggaaaccacagtgctccttaatggaagacaaatcctggtcttccacaggcgtcagaactatttggagagaggacccggtgaggagaggaaaacacgctattttggaaactcaggggctaaaaaccctcctcggccatagcactcgactctgcctgaaatggtgagcacacgtgagctggggcaggagcaggcagcatggcccccaggtgaggtactgtccgtatccaacactgggcactgggacgggtgggcacagtgaggctggctgggctgcccgaggctgcctgccctccccaccacccccacgggtccctgctgcatcatgcatggtgctcagcacagaagtgaaaagggaggagaagaggatgtgacagtttccaaggcggtcaggaggtctcttcgcccagtgtccttgccatgtgagagaacggttcccagagatgctaccagtggaccctctgcaggactgaggaatcccagtggctcattctcctcacttgggccccctgctgttctcattttggaggactgtctcccctcaatgtggcagcccctgcggggacccctcttcttgctgctgcccagcccagcacctggtgctctgtcctgcacagagcggtgctccacaaggatgtcctattgacacggaagaggaaggcactctcgtacttccccccagggaccatcccagaaacatctcttctttgtcctcaaaagactgtcaccaaaatgcaaattgaaaccacagtgagatactatctcacaccagtcagaatggctattactaaaaagccaaaaaatattagatgctgatgaggctgcagagaaaaggcaacacgtatactctgttggtgggaatgtaaattagttcagccactatggaaagcaatttggagatctctcaagaacttaaaacagagctgccattctagccagcagtcccattactgggtatgtatccaaaggaaaataaagtgtttcacaaaaaaaacacctgcacctgtatgttcatcgcagcactattcccaatagcaaaggcatggaatcaatctaggtgcccatcagtggtgaactgggtaaagaaaacatggtgcatatacagcaaggaatactacacagccataaaaaaggacaaaatcatggcctttgcagcagcctggatgcagctggaggccattatcctgagcaaattgacacaggaacagaaaaccaaacacgatgcattctcacttatgagtgagagctaaacactgggtactcatgactgtaaacatgagaagaatacacactgaggactctcaaaggaagaacggctgaaaaacgccctgttgggtactatgctcatacctgggcagcgggattcatcatactccagatctcagcatcacatgcaatatgacccataacaaacctgcacatgtgcccccaaatctaaaatgttgaaattatttttaatataataattcgtggtccatatatggttaaaaaaaagaaaaaagagagagagaaaataaaacctctcacccctttatccaggctttgataagtagctggcattttagggctgcacgggagttaccctgtttaattctgagaatgaccttatgaggtagggatccacagtgccccattttatagatgggaaaactgtggcatggagaacggaaatgacttggcaaaggtcttacagcctgtgggtggcacagttgggatttaaacctggtgtctctgcagtctgtgcttctgacccctgcaccctactgactttcataaatggagcagagccatggccctgtgcctgtgggaaggacagagcccattccactctaacaggcagacaaaagaggtcctcaggtgatggacagttgaggctccattgtggaacccccgatgctgtgtgtcccagagcagggcccagccttgctggcatccattcctatacctgggtctctggctatccgcttctgctctctcttgcaggtgtccaccccccagggttcctgacccctgcccctggacagcgaccccttctcagactccagttgggccggactctccaaacctgcttccgcaatgggtaatgaggagccgtgggtgcagccagccttggagatgccgaagagacgggacatcctagcgatcgtcctcatcgtgctgccctggactctgctcatcactgtctggcaccagagcaccctcgcacccctgctcgcggtacataaggatgagggcagtgacccccgacgcgaaacgccgcccggcgccgaccccagggagtactgcacgtctgaccgcgacatcgtggaggtggtgcgcaccgagtacgtgtacacgcggcccccgccatggtccgacacgctgcccaccatccacgtggtgacgcccacctacagccgcccggtgcagaaggccgagctgacgcgcatggccaacacgctgctgcacgtgcccaacctccactggctggtggtggaggatgcgccgcgccggacgccgctgaccgcgcgcctgctgcgcgacaccggcctcaactacacgcacctgcacgtggagacgccccgcaactacaagctgcgcggagacgcccgcgacccacgcatcccgcggggcaccatgcagcgcaacctggccctgcgctggctgcgcgagaccttcccgcgcaactccagccagcctggcgtggtctacttcgccgacgacgacaacacctacagcctggagctcttcgaagagatgcgcagcaccaggagggtgtccgtgtggcccgtcgccttcgtgggtggcctgcggtacgaggccccacgggtgaacggggcagggaaggtggtcggctggaagacggtgtttgacccccaccggccatttgcaatagacatggctggatttgccgtcaacctgcggctcattctgcagcgaagccaggcctacttcaagctgcgaggtgtgaagggaggctaccaggaaagcagcctccttcgagaacttgtcaccctcaacgacctggagcccaaggcagccaactgcaccaagatcctggtgtggcacacacggacagagaagccagtgctggtgaatgagggcaagaagggcttcactgacccctcggtggagatctgagcctcaggatgcagggcagatgtgggcaggagtggagggcgtcgtcaccacagtccccttcccactgggccacctgaaagtatccaggcattaactttcacccacgcagctgggtccttctgccaccagactcttcagagggtgtcaccttccaaacatcttgctgatttttctgctggcagtgacg

SEQ ID NO: 339585 - DNA, 1271 bp, Artificial Sequence
  derived and/or modified sequence
agactccagttgggccggactctccaaacctgcttccgcaatgggtaatgaggagccgtgggtgcagccagccttggagatgccgaagagacgggacatcctagcgatcgtcctcatcgtgctgccctggactctgctcatcactgtctggcaccagagcaccctcgcacccctgctcgcggtacataaggatgagggcagtgacccccgacgcgaaacgccgcccggcgccgaccccagggagtactgcacgtctgaccgcgacatcgtggaggtggtgcgcaccgagtacgtgtacacgcggcccccgccatggtccgacacgctgcccaccatccacgtggtgacgcccacctacagccgcccggtgcagaaggccgagctgacgcgcatggccaacacgctgctgcacgtgcccaacctccactggctggtggtggaggatgcgccgcgccggacgccgctgaccgcgcgcctgctgcgcgacaccggcctcaactacacgcacctgcacgtggagacgccccgcaactacaagctgcgcggagacgcccgcgacccacgcatcccgcggggcaccatgcagcgcaacctggccctgcgctggctgcgcgagaccttcccgcgcaactccagccagcctggcgtggtctacttcgccgacgacgacaacacctacagcctggagctcttcgaagagatgcgcagcaccaggagggtgtccgtgtggcccgtcgccttcgtgggtggcctgcggtacgaggccccacgggtgaacggggcagggaaggtggtcggctggaagacggtgtttgacccccaccggccatttgcaatagacatggctggatttgccgtcaacctgcggctcattctgcagcgaagccaggcctacttcaagctgcgaggtgtgaagggaggctaccaggaaagcagcctccttcgagaacttgtcaccctcaacgacctggagcccaaggcagccaactgcaccaagatcctggtgtggcacacacggacagagaagccagtgctggtgaatgagggcaagaagggcttcactgacccctcggtggagatctgagcctcaggatgcagggcagatgtgggcaggagtggagggcgtcgtcaccacagtccccttcccactgggccacctgaaagtatccaggcattaactttcacccacgcagctgggtccttctgccaccagactcttcagagggtgtcaccttccaaacatcttgctgatttttctgctggcagtgacg

SEQ ID NO: 339586 - DNA, 1044 bp, Artificial Sequence
  derived and/or modified sequence
atgggcaacgaggagccctgggtgcagcccgccctggagatgcccaagagaagagacatcctggccatcgtgctgatcgtgctgccctggaccctgctgatcaccgtgtggcaccagagcaccctggcccccctgctggccgtgcacaaggacgagggcagcgaccccagaagagagaccccccccggcgccgaccccagagagtactgcaccagcgacagagacatcgtggaggtggtgagaaccgagtacgtgtacaccagaccccccccctggagcgacaccctgcccaccatccacgtggtgacccccacctacagcagacccgtgcagaaggccgagctgaccagaatggccaacaccctgctgcacgtgcccaacctgcactggctggtggtggaggacgcccccagaagaacccccctgaccgccagactgctgagagacaccggcctgaactacacccacctgcacgtggagacccccagaaactacaagctgagaggcgacgccagagaccccagaatccccagaggcaccatgcagagaaacctggccctgagatggctgagagagaccttccccagaaacagcagccagcccggcgtggtgtacttcgccgacgacgacaacacctacagcctggagctgttcgaggagatgagaagcaccagaagagtgagcgtgtggcccgtggccttcgtgggcggcctgagatacgaggcccccagagtgaacggcgccggcaaggtggtgggctggaagaccgtgttcgacccccacagacccttcgccatcgacatggccggcttcgccgtgaacctgagactgatcctgcagagaagccaggcctacttcaagctgagaggcgtgaagggcggctaccaggagagcagcctgctgagagagctggtgaccctgaacgacctggagcccaaggccgccaactgcaccaagatcctggtgtggcacaccagaaccgagaagcccgtgctggtgaacgagggcaagaagggcttcaccgaccccagcgtggagatctag

SEQ ID NO: 339587 - protein, 334 aa, Artificial Sequence
  derived and/or modified sequence
MPKRRDILAIVLIVLPWTLLITVWHQSTLAPLLAVHKDEGSDPRRETPPGADPREYCTSDRDIVEVVRTEYVYTRPPPWSDTLPTIHVVTPTYSRPVQKAELTRMANTLLHVPNLHWLVVEDAPRRTPLTARLLRDTGLNYTHLHVETPRNYKLRGDARDPRIPRGTMQRNLALRWLRETFPRNSSQPGVVYFADDDNTYSLELFEEMRSTRRVSVWPVAFVGGLRYEAPRVNGAGKVVGWKTVFDPHRPFAIDMAGFAVNLRLILQRSQAYFKLRGVKGGYQESSLLRELVTLNDLEPKAANCTKILVWHTRTEKPVLVNEGKKGFTDPSVEI

SEQ ID NO: 339588 - DNA, 606 bp, Artificial Sequence
  derived and/or modified sequence
atgttcctggtggtggccgtgaacagcctgaccctgtaccagcccagcttcagacccctgctgggcgacgcctgctgcctgtgcgtggccgccgccgccggcgccctgtgcagagacctgggcccccaccacacccacaccagaggccccaacgacggcagctgcggcctgagcagatggagacacagacagcacggcgacagccccgaggacttcttcctggccagaggcgcccacctggccagcaccagaggcagaaacgagcacagccccaagggcagcctgcagaagtgcctgctgagcatcagagtgcagaccaccagactgagccacctgagagccggcgtgaccctgagatgcgtgctgctgtgcgtgagcgagagccccgtgggcctgagaagcgtggcctgcagcggcgacctgctgggcgaccccctgaccggcttcctggccttcctggtgagctgcctgacccccagcggcacccccggcaacaccagcctgaccaagctgagccccaccagcagcagccagggcctggccctgggccccctgagccccagcagctgcgacgccgccagccccagcatcagcctgggcctgtag

SEQ ID NO: 339589 - DNA, 1005 bp, Artificial Sequence
  derived and/or modified sequence
atgccaaagcgtagggatatcctcgctatagtattaatcgtgctgccgtggacactgctgatcaccgtgtggcatcaatcaactttagccccactcctggccgtgcacaaggatgagggcagcgacccccggagagagactccccctggagccgatcctagagaatactgcactagcgacagagacattgtcgaggtggttagaacagaatacgtgtatactaggccacctccttggtcagacacacttcccacaattcacgttgtaacccccacgtattctcgtcccgtccaaaaagccgaattaacgcgaatggccaatacgctcctgcatgttcccaatctccattggctggtagtcgaggacgccccccgccggacacccctgacagctagactacttcgcgatacggggctgaactatactcacttgcacgtggaaacgcctcgcaactacaaactgcgaggagatgcacgggaccctaggatcccccgaggaacaatgcagcggaatttagccttgaggtggttaagagagacctttccacggaattcctcccaacccggggtggtgtatttcgctgacgatgataatacgtattcactggaactctttgaagagatgaggagtacgcgccgggtgtctgtgtggcctgtggcattcgtaggaggcctgcgatatgaggcgcccagagtcaatggggccgggaaggtggttggctggaagacagtttttgacccccataggcccttcgcaatagatatggccggtttcgctgttaacctaagacttatcctgcaaagaagtcaggcatatttcaaactgagaggcgtcaagggtggataccaagagagcagtttgcttcgggagctggtcactctgaacgacctagagcctaaggccgcgaactgcactaaaatccttgtgtggcacactcgcacagagaagcccgtgctggtgaatgaggggaaaaaaggattcactgatccatcagtggagatatag

SEQ ID NO: 339590 - DNA, 1005 bp, Artificial Sequence
  derived and/or modified sequence
atgcccaaacgccgggatatccttgccattgtcttaattgttctgccatggacacttctaattaccgtctggcaccagtctacattggctccattactggccgtccacaaagacgagggttcagaccctaggagggagacgccacccggcgcagatccgcgggaatactgcactagtgaccgcgatatcgtggaagtggtccgtaccgaatacgtgtacacaagacctcccccgtggtctgacactctgcctaccatacatgtggtaacaccaacttattctagaccagtgcagaaggccgaactgacacgcatggcaaatacccttcttcatgtccccaatctgcactggctcgtggtggaagacgcccctagaaggacgcccctgactgcccgcctgctccgcgataccggactgaactacacccatctgcacgtcgaaaccccaagaaactacaagctgcgcggagacgctcgcgacccacgcattcctcggggcacgatgcaacgaaatctcgcactgagatggctgcgggaaacctttccccgcaattcttcccaaccaggagtcgtctatttcgcagacgatgataatacatatagcctcgagttgtttgaggaaatgaggtctacgcggagggtcagcgtgtggccggtcgcttttgtagggggacttcggtatgaagcgcccagagtgaacggagccggcaaggtggtggggtggaaaactgtttttgatccgcaccgcccgttcgctatcgacatggcaggtttcgccgtgaatctccgcctgatattgcaacggtctcaggcctattttaagcttcgcggcgtcaaaggcggttatcaggagtcatctttactgcgagaattggttacactcaatgacctggagccaaaggcggctaactgtaccaaaattttggtatggcacacgcgcacagaaaaacctgtccttgtgaatgaaggaaagaagggatttaccgatcccagcgtggagatttag

SEQ ID NO: 339591 - DNA, 1005 bp, Artificial Sequence
  derived and/or modified sequence
atgcccaaacgcagggatatattggccatcgtcctgatagttctgccatggaccctactcattacagtctggcaccagtccacactcgctcctctgctggcagtgcacaaagatgaaggaagcgaccctcgccgggaaacaccacctggggccgatcccagagaatattgcacctctgatcgagacatcgtggaagtcgtcaggactgaatatgtgtacactcgcccccccccctggtccgacaccttgccaacaatccatgtggtcacccctacctatagtcggcctgtccagaaggcagagctgacgagaatggcaaataccctgctgcatgtgcccaacctccactggttagttgtggaagatgcaccccgacgaactcccttaaccgctagactgttaagggacacaggactgaactatacacatctccacgtcgagaccccaagaaactataagctaagaggtgatgccagagatccccggatccctcgagggactatgcagcggaatctggccctgcggtggctcagagagacgttcccccgcaacagctcacagccaggcgtggtttattttgccgatgacgacaacacttacagcctagaattgttcgaggagatgcggtctaccaggagagtgagcgtgtggcccgttgcctttgtggggggactgcgatacgaggcacccagggtgaatggagctggcaaagtggtgggatggaaaactgtgtttgaccctcacagaccttttgctatagatatggctggtttcgcagtgaaccttcgcctcatcttgcagaggtcccaagcctactttaagctgcgtggggttaaaggaggctatcaggagtcatccttgctcagggagctagtgacattgaatgacctggaacctaaggccgccaactgtaccaaaattctcgtgtggcatactcgcacagagaaacccgtgctggtgaacgaaggtaagaagggatttacagacccttcagtcgagatttag

SEQ ID NO: 339592 - DNA, 1005 bp, Artificial Sequence
  derived and/or modified sequence
atgcccaagaggcgggacatcctggccatcgtgctgattgtgctgccctggaccctgctgatcaccgtgtggcaccagagcaccctggcccccctgctggccgtgcacaaggatgagggcagtgacccccggcgggagaccccacctggagctgacccccgggagtactgcaccagtgaccgggacatcgtggaggtggtgaggacagaatatgtgtacacccggcccccaccctggagcgacaccctgcccaccatccacgtggtgacccccacctacagcaggcctgtgcagaaggccgagctgaccaggatggccaacaccctgctgcacgtgcccaacctgcactggctggtggtggaggatgcccccaggaggacccccctgacagcccggctgctgcgggacaccggcctgaactacacccacctgcacgtggagacccccaggaactacaagctgcggggagatgcccgggacccccgcatcccccggggcaccatgcagaggaacctggccctgcgctggctgcgggagaccttccccaggaacagcagccagcccggggtggtgtactttgctgatgatgacaacacctacagcctggagctgtttgaggagatgaggagcacccggcgggtgtctgtgtggcctgtggcctttgtgggcggcctgcgctatgaggccccccgggtgaatggagctgggaaggtggtgggctggaagacagtgtttgacccccaccggccctttgccatcgacatggccggctttgctgtgaacctgcggctcatcctgcagaggagccaggcctacttcaagctgcggggcgtgaagggcggctaccaggagagcagcctgctgcgggagctggtgaccctgaatgacctggagcccaaggccgccaactgcaccaagatcctggtgtggcacaccaggacagagaagcctgtgctggtgaatgaaggcaagaagggcttcacagaccccagcgtggagatctag

SEQ ID NO: 339593 - DNA, 1005 bp, Artificial Sequence
  derived and/or modified sequence
atgcccaagcggcgggacatcctggccatcgtgctgatcgtgctgccctggactttgctcatcactgtgtggcaccagtcaactctggcaccactcctggctgttcacaaggacgagggctcagacccacgaagagagacgccccctggtgcagatccaagggagtattgcacaagcgaccgggacatagtagaagtggtgagaactgagtatgtttacacacgccccccaccatggagtgatacacttcctacaatacatgttgtaacacctacctattcacgacctgttcagaaagcagagctcacgagaatggctaatacccttcttcatgtgcctaacttacactggctggttgtggaagacgcacctaggagaaccccacttactgcccgcctcctccgggacacgggactcaactacacccacctgcacgtcgagacgcctcgtaattataagctgcgtggtgacgcgcgggaccccaggatccctagggggaccatgcaacgaaacctcgctctccgatggctacgagaaacttttcctaggaattccagccaaccaggggtcgtgtacttcgcagatgacgacaacacatacagtctcgagttgtttgaggagatgcgctccacccgaagggtttcggtttggcctgtggccttcgtgggcggcctccgttatgaagcaccgagggtgaacggcgccgggaaggttgttggctggaaaaccgtttttgacccccatagaccgtttgcgatcgacatggcaggcttcgctgtgaacctacggttaatcttacagcggtcacaggcctacttcaagcttagaggcgtcaagggcgggtaccaagaatcaagcttgcttcgagaattggtgaccctgaatgacctggagcctaaggccgcaaactgcactaaaatccttgtttggcacaccagaaccgaaaaaccagtgctggtgaacgagggcaagaaaggatttacagaccctagcgtcgagatttag

SEQ ID NO: 339594 - DNA, 1005 bp, Artificial Sequence
  derived and/or modified sequence
atgcccaagcggcgggacatcctggccatcgtgctgatcgtgctgccttggactctgctgatcacggtctggcaccagagcacacttgcccctctgttggctgtccacaaagacgagggctctgatcccagaagagagaccccacctggcgctgatcctagagagtactgtactagcgaccgcgatatagtggaagtagtgcgcactgagtatgtgtacaccagacccccgccatggtcagacaccctgcctacgattcacgttgttaccccgacttatagtagacctgtgcagaaggccgagctgacaagaatggctaatactctcctccatgtccctaatctgcattggctggtggtggaagacgcgcctcgcaggacccccctgacggctagactgctgagggacactggtctgaattatacacacttgcacgtagagacgccgaggaactataagctgagaggagatgcaagggatccccggatcccaagggggacaatgcagcggaaccttgccctgcgttggttgcgggaaacctttccccgcaattcctcccagccaggtgtggtatactttgcggatgacgataacacctacagtctagaactcttcgaggaaatgaggtcaacccggcgggtgtccgtttggcccgtggccttcgtcgggggtctgagatacgaggctccaagggtgaacggggccggcaaggtcgtgggctggaaaactgtgttcgacccccatcggccctttgcaatagatatggcggggttcgctgttaacttaagactcatccttcagagaagccaagcctatttcaagcttagaggggtgaaaggggggtatcaggagtcctcgctgcttcgtgagctggtgaccctcaatgacctagagcccaaggctgcaaactgcaccaagatcttagtttggcacactaggactgaaaagcctgtcttagttaacgaggggaagaaggggtttaccgaccctagcgtcgagatctag

SEQ ID NO: 339595 - DNA, 1005 bp, Artificial Sequence
  derived and/or modified sequence
atgcccaagcggcgggacatcctggccatcgtgctgatcgtgctgccttggacccttttgattaccgtatggcaccaaagcacactggctcccttactggcagtgcacaaggacgagggttccgatccaagaagggaaacgccccccggggcagacccgcgcgaatattgtacttcagaccgggatatagtagaggtcgtacgcacagaatacgtgtatacaagaccccccccctggtccgataccctgccaacaatacatgttgttaccccaacttactccaggccggttcagaaggctgaacttacccgcatggctaatacactgctgcacgtacccaacctacactggctggttgtcgaagacgctccacggcggacaccactgaccgcgagattattaagggacacaggcctcaattatacacacctccacgtagagactcccagaaactataaattaaggggcgatgccagagatcctcgtatcccacgcggaactatgcagcgaaatctggcgctgcggtggttaagagaaacattcccaaggaactcgagtcagcccggggtggtatatttcgcagacgacgacaacacctatagtctggaactgtttgaggagatgagatcaactcgtagggtgtcagtctggccggtggctttcgttggcggactgagatacgaagctccccgcgtgaacggcgctgggaaagtggtgggatggaagactgtgttcgaccctcaccgccctttcgccattgacatggccggattcgcagttaatttgcggctcatcttgcagcggtctcaggcttattttaaactgcggggggtaaaaggcggttatcaggaaagtagtctgctccgcgagctggtgaccctcaatgatcttgagcccaaagccgccaactgtaccaagattctggtatggcataccagaactgagaaaccggtccttgtcaacgaagggaagaagggtttcacagatccctccgtcgaaatttag

SEQ ID NO: 339596 - DNA, 1005 bp, Artificial Sequence
  derived and/or modified sequence
atgccgaaacgccgagacattctggcaatcgtacttattgtgctcccttggaccttgctgatcacagtctggcatcagtcgaccttggcccctctgcttgctgtccataaagacgagggcagtgacccacggcgagaaacccctcctggcgctgaccctcgtgaatattgcacaagcgatcgggatattgtggaggttgtccgcacagaatacgtctatacgcggccacctccatggagcgatacgttgcctacaatccacgtcgtcactcccacctattcgagacctgtgcagaaagccgaactgaccagaatggccaacacattgctgcatgtcccgaacctgcactggctggtggtcgaggacgccccaagacgaactccgctgacagccaggctcctgagagatacaggtctgaactacacccatctgcacgtggaaaccccgagaaattataagcttaggggcgacgcaagggatccacggataccaagaggcacgatgcaacggaacttagctttgcgctggttgcgcgagacctttccgagaaatagtagtcagccaggggttgtgtactttgctgacgatgacaacacatactccctggagctcttcgaggaaatgcggagtactaggcgggtgagcgtgtggcctgtcgcctttgtaggagggttgcggtacgaagccccaagagtgaatggcgctggcaaagttgtcggatggaagacagtgttcgatccacacaggccattcgctatcgatatggcaggctttgctgttaacctgcggttgatacttcagaggtcccaggcctactttaagctcagaggtgtcaaaggtggctaccaggagagctctctcctacgtgagttggtaaccctgaatgatctcgaacctaaggctgccaattgtacgaaaatcttggtctggcacactcgtaccgagaagccagttctcgttaatgagggcaaaaaaggtttcaccgatccaagtgttgagatttag

SEQ ID NO: 339597 - DNA, 1005 bp, Artificial Sequence
  derived and/or modified sequence
atgcccaaaagaagggacattctggctatcgtattaattgtcctgccgtggacacttctgataaccgtgtggcatcaatctaccctcgctcccctactcgccgttcacaaagatgagggctctgatcccagacgcgagacccctcccggagccgaccctcgcgagtactgcacgtcagatcgagacattgttgaggtcgttcggacggaatatgtatatacacgacctcctccgtggtctgatactctgccaactatccacgtggtgacccctacctacagcagacctgttcagaaagctgaactgacaagaatggctaatactctgctgcacgttcccaacctgcactggctcgttgtcgaagatgcacctcgccgaacacccctgacagccaggctgctgagggacaccgggctcaattatactcacctgcacgtggagacccccagaaactataaattacgcggtgatgcacgggaccctcgtattccccgtggcacaatgcagcggaacctggctttgagatggcttagggaaacttttccacgaaacagttctcaacccggagtagtctattttgcagatgacgataatacctattctttggagctcttcgaggagatgagaagcaccagacgcgtttctgtctggcccgtggcattcgtgggcggactcagatatgaggctccacgcgtgaacggagcagggaaggtggtcggatggaaaaccgtgttcgatcctcacagaccattcgccatagacatggccggattcgcagttaacctccgcctcatcttgcagagatctcaggcgtactttaagcttcgcggagttaagggcggatatcaggaaagctcacttctgcgtgagcttgtcactctcaacgacctggagcctaaggcagctaactgcacaaagatcttagtgtggcacacaagaaccgaaaaacccgtcttagtcaacgaagggaaaaaaggatttacagatccatcagtcgaaatttag

SEQ ID NO: 339598 - DNA, 1005 bp, Artificial Sequence
  derived and/or modified sequence
atgcctaagaggagggatattcttgccattgtcctcattgtcctgccgtggactctgctgatcacagtgtggcatcagagtacactggccccactgctcgcggtccacaaggatgaaggatctgaccctagacgtgagacccccccaggtgccgatcccagggagtattgcacgtccgacagagatatagtcgaggtggttcgcactgagtacgtttatacacgtccacctccttggtctgacacactgccaaccatacacgtggtgacccccacctatagccgtcctgtccagaaggctgagcttacaagaatggcaaacacactgttacacgttcccaacttgcattggctggtggtagaagatgctcctcggagaactcctctcaccgccaggctgttgagagatactggcctgaattatacgcacctccacgtcgaaacccccaggaactataaactgaggggcgacgctcgggatcccaggatcccacgaggtacgatgcagcgcaatttggcgctgcgctggctgcgagagacgtttcctcgcaacagcagtcagcccggagtggtgtatttcgccgatgacgacaacacatactccctcgagctattcgaggaaatgagaagtacccgcagagtgtctgtgtggcccgttgcattcgtgggaggacttagatatgaagccccacgcgtcaacggggcaggtaaggtcgttggctggaaaactgtgtttgatccccaccggccatttgcaatcgacatggccggatttgccgtgaacctccgtctgatactgcagcgctctcaggcatattttaagctgcggggagtgaaaggaggctatcaggagagtagtctgctgcgagagcttgtcaccctcaacgacttggagcctaaagctgcaaactgcacaaagattctggtctggcatactcgcaccgagaaacctgtactggtgaacgagggcaagaagggcttcacagacccaagcgttgagatctag

SEQ ID NO: 339599 - DNA, 1005 bp, Artificial Sequence
  derived and/or modified sequence
atgcccaagagaagagacatcctggccatcgtgctgatcgtgctgccctggaccctgctgatcaccgtgtggcaccagagcaccctggcccccctgctggccgtgcacaaggacgagggcagcgaccccagaagagagaccccccccggcgccgaccccagagagtactgcaccagcgacagagacatcgtggaggtggtgagaaccgagtacgtgtacaccagaccccccccctggagcgacaccctgcccaccatccacgtggtgacccccacctacagcagacccgtgcagaaggccgagctgaccagaatggccaacaccctgctgcacgtgcccaacctgcactggctggtggtggaggacgcccccagaagaacccccctgaccgccagactgctgagagacaccggcctgaactacacccacctgcacgtggagacccccagaaactacaagctgagaggcgacgccagagaccccagaatccccagaggcaccatgcagagaaacctggccctgagatggctgagagagaccttccccagaaacagcagccagcccggcgtggtgtacttcgccgacgacgacaacacctacagcctggagctgttcgaggagatgagaagcaccagaagagtgagcgtgtggcccgtggccttcgtgggcggcctgagatacgaggcccccagagtgaacggcgccggcaaggtggtgggctggaagaccgtgttcgacccccacagacccttcgccatcgacatggccggcttcgccgtgaacctgagactgatcctgcagagaagccaggcctacttcaagctgagaggcgtgaagggcggctaccaggagagcagcctgctgagagagctggtgaccctgaacgacctggagcccaaggccgccaactgcaccaagatcctggtgtggcacaccagaaccgagaagcccgtgctggtgaacgagggcaagaagggcttcaccgaccccagcgtggagatctag

SEQ ID NO: 339600 - protein, 1212 aa, Artificial Sequence
  derived and/or modified sequence
MVLLLILSVLLLKEDVRGSAQSSERRVVAHMPGDIIIGALFSVHHQPTVDKVHERKCGAVREQYGIQRVEAMLHTLERINSDPTLLPNITLGCEIRDSCWHSAVALEQSIEFIRDSLISSEEEEGLVRCVDGSSSSFRSKKPIVGVIGPGSSSVAIQVQNLLQLFNIPQIAYSATSMDLSDKTLFKYFMRVVPSDAQQARAMVDIVKRYNWTYVSAVHTEGNYGESGMEAFKDMSAKEGICIAHSYKIYSNAGEQSFDKLLKKLTSHLPKARVVACFCEGMTVRGLLMAMRRLGLAGEFLLLGSDGWADRYDVTDGYQREAVGGITIKLQSPDVKWFDDYYLKLRPETNHRNPWFQEFWQHRFQCRLEGFPQENSKYNKTCNSSLTLKTHHVQDSKMGFVINAIYSMAYGLHNMQMSLCPGYAGLCDAMKPIDGRKLLESLMKTNFTGVSGDTILFDENGDSPGRYEIMNFKEMGKDYFDYINVGSWDNGELKMDDDEVWSKKSNIIRSVCSEPCEKGQIKVIRKGEVSCCWTCTPCKENEYVFDEYTCKACQLGSWPTDDLTGCDLIPVQYLRWGDPEPIAAVVFACLGLLATLFVTVVFIIYRDTPVVKSSSRELCYIILAGICLGYLCTFCLIAKPKQIYCYLQRIGIGLSPAMSYSALVTKTNRIARILAGSKKKICTKKPRFMSACAQLVIAFILICIQLGIIVALFIMEPPDIMHDYPSIREVYLICNTTNLGVVTPLGYNGLLILSCTFYAFKTRNVPANFNEAKYIAFTMYTTCIIWLAFVPIYFGSNYKIITMCFSVSLSATVALGCMFVPKVYIILAKPERNVRSAFTTSTVVRMHVGDGKSSSAASRSSSLVNLWKRRGSSGETLRYKDRRLAQHKSEIECFTPKGSMGNGGRATMSSSNGKSVTWAQNEKSSRGQHLWQRLSIHINKKENPNQTAVIKPFPKSTESRGLGAGAGAGGSAGGVGATGGAGCAGAGPGGPESPDAGPKALYDVAEAEEHFPAPARPRSPSPISTLSHRAGSASRTDDDVPSLHSEPVARSSSSQGSLMEQISSVVTRFTANISELNSMMLSTAAPSPGVGAPLCSSYLIPKEIQLPTTMTTFAEIQPLPAIEVTGGAQPAAGAQAAGDAARESPAAGPEAAAAKPDLEELVALTPPSPFRDSVDSGSTTPNSPVSESALCIPSSPKYDTLIIRDYTQSSSSL

SEQ ID NO: 339601 - DNA, 3639 bp, Artificial Sequence
  derived and/or modified sequence
atggtgctgctgctgatcctgagcgtgctgctgctgaaggaggacgtgagaggcagcgcccagagcagcgagagaagagtggtggcccacatgcccggcgacatcatcatcggcgccctgttcagcgtgcaccaccagcccaccgtggacaaggtgcacgagagaaagtgcggcgccgtgagagagcagtacggcatccagagagtggaggccatgctgcacaccctggagagaatcaacagcgaccccaccctgctgcccaacatcaccctgggctgcgagatcagagacagctgctggcacagcgccgtggccctggagcagagcatcgagttcatcagagacagcctgatcagcagcgaggaggaggagggcctggtgagatgcgtggacggcagcagcagcagcttcagaagcaagaagcccatcgtgggcgtgatcggccccggcagcagcagcgtggccatccaggtgcagaacctgctgcagctgttcaacatcccccagatcgcctacagcgccaccagcatggacctgagcgacaagaccctgttcaagtacttcatgagagtggtgcccagcgacgcccagcaggccagagccatggtggacatcgtgaagagatacaactggacctacgtgagcgccgtgcacaccgagggcaactacggcgagagcggcatggaggccttcaaggacatgagcgccaaggagggcatctgcatcgcccacagctacaagatctacagcaacgccggcgagcagagcttcgacaagctgctgaagaagctgaccagccacctgcccaaggccagagtggtggcctgcttctgcgagggcatgaccgtgagaggcctgctgatggccatgagaagactgggcctggccggcgagttcctgctgctgggcagcgacggctgggccgacagatacgacgtgaccgacggctaccagagagaggccgtgggcggcatcaccatcaagctgcagagccccgacgtgaagtggttcgacgactactacctgaagctgagacccgagaccaaccacagaaacccctggttccaggagttctggcagcacagattccagtgcagactggagggcttcccccaggagaacagcaagtacaacaagacctgcaacagcagcctgaccctgaagacccaccacgtgcaggacagcaagatgggcttcgtgatcaacgccatctacagcatggcctacggcctgcacaacatgcagatgagcctgtgccccggctacgccggcctgtgcgacgccatgaagcccatcgacggcagaaagctgctggagagcctgatgaagaccaacttcaccggcgtgagcggcgacaccatcctgttcgacgagaacggcgacagccccggcagatacgagatcatgaacttcaaggagatgggcaaggactacttcgactacatcaacgtgggcagctgggacaacggcgagctgaagatggacgacgacgaggtgtggagcaagaagagcaacatcatcagaagcgtgtgcagcgagccctgcgagaagggccagatcaaggtgatcagaaagggcgaggtgagctgctgctggacctgcaccccctgcaaggagaacgagtacgtgttcgacgagtacacctgcaaggcctgccagctgggcagctggcccaccgacgacctgaccggctgcgacctgatccccgtgcagtacctgagatggggcgaccccgagcccatcgccgccgtggtgttcgcctgcctgggcctgctggccaccctgttcgtgaccgtggtgttcatcatctacagagacacccccgtggtgaagagcagcagcagagagctgtgctacatcatcctggccggcatctgcctgggctacctgtgcaccttctgcctgatcgccaagcccaagcagatctactgctacctgcagagaatcggcatcggcctgagccccgccatgagctacagcgccctggtgaccaagaccaacagaatcgccagaatcctggccggcagcaagaagaagatctgcaccaagaagcccagattcatgagcgcctgcgcccagctggtgatcgccttcatcctgatctgcatccagctgggcatcatcgtggccctgttcatcatggagccccccgacatcatgcacgactaccccagcatcagagaggtgtacctgatctgcaacaccaccaacctgggcgtggtgacccccctgggctacaacggcctgctgatcctgagctgcaccttctacgccttcaagaccagaaacgtgcccgccaacttcaacgaggccaagtacatcgccttcaccatgtacaccacctgcatcatctggctggccttcgtgcccatctacttcggcagcaactacaagatcatcaccatgtgcttcagcgtgagcctgagcgccaccgtggccctgggctgcatgttcgtgcccaaggtgtacatcatcctggccaagcccgagagaaacgtgagaagcgccttcaccaccagcaccgtggtgagaatgcacgtgggcgacggcaagagcagcagcgccgccagcagaagcagcagcctggtgaacctgtggaagagaagaggcagcagcggcgagaccctgagatacaaggacagaagactggcccagcacaagagcgagatcgagtgcttcacccccaagggcagcatgggcaacggcggcagagccaccatgagcagcagcaacggcaagagcgtgacctgggcccagaacgagaagagcagcagaggccagcacctgtggcagagactgagcatccacatcaacaagaaggagaaccccaaccagaccgccgtgatcaagcccttccccaagagcaccgagagcagaggcctgggcgccggcgccggcgccggcggcagcgccggcggcgtgggcgccaccggcggcgccggctgcgccggcgccggccccggcggccccgagagccccgacgccggccccaaggccctgtacgacgtggccgaggccgaggagcacttccccgcccccgccagacccagaagccccagccccatcagcaccctgagccacagagccggcagcgccagcagaaccgacgacgacgtgcccagcctgcacagcgagcccgtggccagaagcagcagcagccagggcagcctgatggagcagatcagcagcgtggtgaccagattcaccgccaacatcagcgagctgaacagcatgatgctgagcaccgccgcccccagccccggcgtgggcgcccccctgtgcagcagctacctgatccccaaggagatccagctgcccaccaccatgaccaccttcgccgagatccagcccctgcccgccatcgaggtgaccggcggcgcccagcccgccgccggcgcccaggccgccggcgacgccgccagagagagccccgccgccggccccgaggccgccgccgccaagcccgacctggaggagctggtggccctgaccccccccagccccttcagagacagcgtggacagcggcagcaccacccccaacagccccgtgagcgagagcgccctgtgcatccccagcagccccaagtacgacaccctgatcatcagagactacacccagagcagcagcagcctgtag

SEQ ID NO: 339602 - DNA, 4571 bp, Artificial Sequence
  derived and/or modified sequence
acaaaatggtcctttagaaaatacatctgaattgctggctaatttcttgatttgcgactcaacgtaggacatcgcttgttcgtagctatcagaaccctcctgaattttccccaccatgctatctttattggcttgaactcctttcctaaaatggtccttctgttgatcctgtcagtcttacttttgaaagaagatgtccgtgggagtgcacagtccagtgagaggagggtggtggctcacatgccgggtgacatcattattggagctctcttttctgttcatcaccagcctactgtggacaaagttcatgagaggaagtgtggggcggtccgtgaacagtatggcattcagagagtggaggccatgctgcataccctggaaaggatcaattcagaccccacactcttgcccaacatcacactgggctgtgagataagggactcctgctggcattcggctgtggccctagagcagagcattgagttcataagagattccctcatttcttcagaagaggaagaaggcttggtacgctgtgtggatggctcctcctcttccttccgctccaagaagcccatagtaggggtcattgggcctggctccagttctgtagccattcaggtccagaatttgctccagcttttcaacatacctcagattgcttactcagcaaccagcatggatctgagtgacaagactctgttcaaatatttcatgagggttgtgccttcagatgctcagcaggcaagggccatggtggacatagtgaagaggtacaactggacctatgtatcagccgtgcacacagaaggcaactatggagaaagtgggatggaagccttcaaagatatgtcagcgaaggaagggatttgcatcgcccactcttacaaaatctacagtaatgcaggggagcagagctttgataagctgctgaagaagctcacaagtcacttgcccaaggcccgggtggtggcctgcttctgtgagggcatgacggtgagaggtctgctgatggccatgaggcgcctgggtctagcgggagaatttctgcttctgggcagtgatggctgggctgacaggtatgatgtgacagatggatatcagcgagaagctgttggtggcatcacaatcaagctccaatctcccgatgtcaagtggtttgatgattattatctgaagctccggccagaaacaaaccaccgaaacccttggtttcaagaattttggcagcatcgttttcagtgccgactggaagggtttccacaggagaacagcaaatacaacaagacttgcaatagttctctgactctgaaaacacatcatgttcaggattccaaaatgggatttgtgatcaacgccatctattcgatggcctatgggctccacaacatgcagatgtccctctgcccaggctatgcaggactctgtgatgccatgaagccaattgatggacggaaacttttggagtccctgatgaaaaccaattttactggggtttctggagatacgatcctattcgatgagaatggagactctccaggaaggtatgaaataatgaatttcaaggaaatgggaaaagattactttgattatatcaacgttggaagttgggacaatggagaattaaaaatggatgatgatgaagtatggtccaagaaaagcaacatcatcagatctgtgtgcagtgaaccatgtgagaaaggccagatcaaggtgatccgaaagggagaagtcagctgttgttggacctgtacaccttgtaaggagaatgagtatgtctttgatgagtacacatgcaaggcatgccaactggggtcttggcccactgatgatctcacaggttgtgacttgatcccagtacagtatcttcgatggggtgaccctgaacccattgcagctgtggtgtttgcctgccttggcctcctggccaccctgtttgttactgtagtcttcatcatttaccgtgatacaccagtagtcaagtcctcaagcagggaactctgctacattatccttgctggcatctgcctgggctacttatgtaccttctgcctcattgcgaagcccaaacagatttactgctaccttcagagaattggcattggtctctccccagccatgagctactcagcccttgtaacaaagaccaaccgtattgcaaggatcctggctggcagcaagaagaagatctgtaccaaaaagcccagattcatgagtgcctgtgcccagctagtgattgctttcattctcatatgcatccagttgggcatcatcgttgccctctttataatggagcctcctgacataatgcatgactacccaagcattcgagaagtctacctgatctgtaacaccaccaacctaggagttgtcactccacttggatacaatggattgttgattttgagctgcaccttctatgcgttcaagaccagaaatgttccagctaacttcaacgaggccaagtatatcgccttcacaatgtacacgacctgcattatatggctagcttttgtgccaatctactttggcagcaactacaaaatcatcaccatgtgtttctcggtcagcctcagtgccacagtggccctaggctgcatgtttgtgccgaaggtgtacatcatcctggccaaaccagagagaaacgtgcgcagcgccttcaccacatctaccgtggtgcgcatgcatgtaggggatggcaagtcatcctccgcagccagcagatccagcagcctagtcaacctgtggaagagaaggggctcctctggggaaaccttaaggtacaaagacaggagactggcccagcacaagtcggaaatagagtgtttcacccccaaagggagtatggggaatggtgggagagcaacaatgagcagttccaatggaaaatccgtcacgtgggcccagaatgagaagagcagccgggggcagcacctgtggcagcgcctgtccatccacatcaacaagaaagaaaaccccaaccaaacggccgtcatcaagcccttccccaagagcacggagagccgtggcctgggcgctggcgctggcgcaggcgggagcgctgggggcgtgggggccacgggcggtgcgggctgcgcaggcgccggcccaggcgggcccgagtccccagacgccggccccaaggcgctgtatgatgtggccgaggctgaggagcacttcccggcgcccgcgcggccgcgctcaccgtcgcccatcagcacgctgagccaccgcgcgggctcggccagccgcacggacgacgatgtgccgtcgctgcactcggagcctgtggcgcgcagcagctcctcgcagggctccctcatggagcagatcagcagtgtggtcacccgcttcacggccaacatcagcgagctcaactccatgatgctgtccaccgcggcccccagccccggcgtcggcgccccgctctgctcgtcctacctgatccccaaagagatccagttgcccacgaccatgacgacctttgccgaaatccagcctctgccggccatcgaagtcacgggaggcgcgcagcccgcggcaggggcgcaggcggctggggacgcggcccgggagagccccgcggccggtcccgaggctgcggccgccaagccagacctggaggagctggtggctctcaccccgccgtcccccttcagagactcggtggactcggggagcacaacccccaactcgccagtgtccgagtcggccctctgtatcccgtcgtctcccaaatatgacactcttatcataagagattacactcagagctcctcgtcgttgtgaatgtccctggaaagcacgccggcctgcgcgtgcggagcggagccccccgtgttcacacacacacaatggcaagcatagtcgcctggttacggcccagggggaagatgccaagggcaccccttaatggaaacacgagatcagtagtgctatctcatgacaaccgacgaagaaaccgacgacaaatcttttggcagattttcttctagtggccttagaaaacatgggcttttaagaaacacggctgatatctttgagggctgacaaggcgtctcttcaaacagttccataccaagtgctttgctctagggaagcagtgcgtgtgaaacagcgtaacggagggtgaagagcatagttaataagcaactgtaaaaagttttatttgtttactttaattcttttcccagaagagtctttgattcaccaaacatgaatgtacattttctaacaaactcaaaatctgggaccaaaacatcaacttttttctttcttttttctttctttttgttttttctttcctgtaaagaccttgaaaagcagtaacttgggtccagtatttacggaggcgttgtgaatgtgtcccatgcataacacactactggatagtgagtgctgcgctaatgtactacgtagggcttctaccagagattttcctctccaattgggttgtgaaatactcttccaaaagcctgcatcggggattccacctacttatttcagattcacctccattaaccaagaaaaccagtggaagatttcttgactatttcaccatgttgccaatc

SEQ ID NO: 339603 - DNA, 8023 bp, Artificial Sequence
  derived and/or modified sequence
agctcggctgttctgcgcacgctgagcggagggaatgagcttgagatcatcttgggggggaagccggggactggagaggccggctctgccctgctgatccccgtggcccaacttttcggggggctagctagaccgagtctcactgctcgcagcgcagccaacaggggggtttagaagatcatgaccacatggatcatctaactaaatggtacatggggacaaaatggtcctttagaaaatacatctgaattgctggctaatttcttgatttgcgactcaacgtaggacatcgcttgttcgtagctatcagaaccctcctgaattttccccaccatgctatctttattggcttgaactcctttcctaaaatggtccttctgttgatcctgtcagtcttacttttgaaagaagatgtccgtgggagtgcacagtccagtgagaggagggtggtggctcacatgccgggtgacatcattattggagctctcttttctgttcatcaccagcctactgtggacaaagttcatgagaggaagtgtggggcggtccgtgaacagtatggcattcagagagtggaggccatgctgcataccctggaaaggatcaattcagaccccacactcttgcccaacatcacactgggctgtgagataagggactcctgctggcattcggctgtggccctagagcagagcattgagttcataagagattccctcatttcttcagaagaggaagaaggcttggtacgctgtgtggatggctcctcctcttccttccgctccaagaagcccatagtaggggtcattgggcctggctccagttctgtagccattcaggtccagaatttgctccagcttttcaacatacctcagattgcttactcagcaaccagcatggatctgagtgacaagactctgttcaaatatttcatgagggttgtgccttcagatgctcagcaggcaagggccatggtggacatagtgaagaggtacaactggacctatgtatcagccgtgcacacagaaggcaactatggagaaagtgggatggaagccttcaaagatatgtcagcgaaggaagggatttgcatcgcccactcttacaaaatctacagtaatgcaggggagcagagctttgataagctgctgaagaagctcacaagtcacttgcccaaggcccgggtggtggcctgcttctgtgagggcatgacggtgagaggtctgctgatggccatgaggcgcctgggtctagcgggagaatttctgcttctgggcagtgatggctgggctgacaggtatgatgtgacagatggatatcagcgagaagctgttggtggcatcacaatcaagctccaatctcccgatgtcaagtggtttgatgattattatctgaagctccggccagaaacaaaccaccgaaacccttggtttcaagaattttggcagcatcgttttcagtgccgactggaagggtttccacaggagaacagcaaatacaacaagacttgcaatagttctctgactctgaaaacacatcatgttcaggattccaaaatgggatttgtgatcaacgccatctattcgatggcctatgggctccacaacatgcagatgtccctctgcccaggctatgcaggactctgtgatgccatgaagccaattgatggacggaaacttttggagtccctgatgaaaaccaattttactggggtttctggagatacgatcctattcgatgagaatggagactctccaggaaggtatgaaataatgaatttcaaggaaatgggaaaagattactttgattatatcaacgttggaagttgggacaatggagaattaaaaatggatgatgatgaagtatggtccaagaaaagcaacatcatcagatctgtgtgcagtgaaccatgtgagaaaggccagatcaaggtgatccgaaagggagaagtcagctgttgttggacctgtacaccttgtaaggagaatgagtatgtctttgatgagtacacatgcaaggcatgccaactggggtcttggcccactgatgatctcacaggttgtgacttgatcccagtacagtatcttcgatggggtgaccctgaacccattgcagctgtggtgtttgcctgccttggcctcctggccaccctgtttgttactgtagtcttcatcatttaccgtgatacaccagtagtcaagtcctcaagcagggaactctgctacattatccttgctggcatctgcctgggctacttatgtaccttctgcctcattgcgaagcccaaacagatttactgctaccttcagagaattggcattggtctctccccagccatgagctactcagcccttgtaacaaagaccaaccgtattgcaaggatcctggctggcagcaagaagaagatctgtaccaaaaagcccagattcatgagtgcctgtgcccagctagtgattgctttcattctcatatgcatccagttgggcatcatcgttgccctctttataatggagcctcctgacataatgcatgactacccaagcattcgagaagtctacctgatctgtaacaccaccaacctaggagttgtcactccacttggatacaatggattgttgattttgagctgcaccttctatgcgttcaagaccagaaatgttccagctaacttcaacgaggccaagtatatcgccttcacaatgtacacgacctgcattatatggctagcttttgtgccaatctactttggcagcaactacaaaatcatcaccatgtgtttctcggtcagcctcagtgccacagtggccctaggctgcatgtttgtgccgaaggtgtacatcatcctggccaaaccagagagaaacgtgcgcagcgccttcaccacatctaccgtggtgcgcatgcatgtaggggatggcaagtcatcctccgcagccagcagatccagcagcctagtcaacctgtggaagagaaggggctcctctggggaaaccttaaggtacaaagacaggagactggcccagcacaagtcggaaatagagtgtttcacccccaaagggagtatggggaatggtgggagagcaacaatgagcagttccaatggaaaatccgtcacgtgggcccagaatgagaagagcagccgggggcagcacctgtggcagcgcctgtccatccacatcaacaagaaagaaaaccccaaccaaacggccgtcatcaagcccttccccaagagcacggagagccgtggcctgggcgctggcgctggcgcaggcgggagcgctgggggcgtgggggccacgggcggtgcgggctgcgcaggcgccggcccaggcgggcccgagtccccagacgccggccccaaggcgctgtatgatgtggccgaggctgaggagcacttcccggcgcccgcgcggccgcgctcaccgtcgcccatcagcacgctgagccaccgcgcgggctcggccagccgcacggacgacgatgtgccgtcgctgcactcggagcctgtggcgcgcagcagctcctcgcagggctccctcatggagcagatcagcagtgtggtcacccgcttcacggccaacatcagcgagctcaactccatgatgctgtccaccgcggcccccagccccggcgtcggcgccccgctctgctcgtcctacctgatccccaaagagatccagttgcccacgaccatgacgacctttgccgaaatccagcctctgccggccatcgaagtcacgggaggcgcgcagcccgcggcaggggcgcaggcggctggggacgcggcccgggagagccccgcggccggtcccgaggctgcggccgccaagccagacctggaggagctggtggctctcaccccgccgtcccccttcagagactcggtggactcggggagcacaacccccaactcgccagtgtccgagtcggccctctgtatcccgtcgtctcccaaatatgacactcttatcataagagattacactcagagctcctcgtcgttgtgaatgtccctggaaagcacgccggcctgcgcgtgcggagcggagccccccgtgttcacacacacacaatggcaagcatagtcgcctggttacggcccagggggaagatgccaagggcaccccttaatggaaacacgagatcagtagtgctatctcatgacaaccgacgaagaaaccgacgacaaatcttttggcagattttcttctagtggccttagaaaacatgggcttttaagaaacacggctgatatctttgagggctgacaaggcgtctcttcaaacagttccataccaagtgctttgctctagggaagcagtgcgtgtgaaacagcgtaacggagggtgaagagcatagttaataagcaactgtaaaaagttttatttgtttactttaattcttttcccagaagagtctttgattcaccaaacatgaatgtacattttctaacaaactcaaaatctgggaccaaaacatcaacttttttctttcttttttctttctttttgttttttctttcctgtaaagaccttgaaaagcagtaacttgggtccagtatttacggaggcgttgtgaatgtgtcccatgcataacacactactggatagtgagtgctgcgctaatgtactacgtagggcttctaccagagattttcctctccaattgggttgtgaaatactcttccaaaagcctgcatcggggattccacctacttatttcagattcacctccattaaccaagaaaaccagtggaagatttcttgactatttcaccatgttgccaatcaatactggagtagcaaaaaaaatattttctggaatactgttttgtaattccctcactggggtgcattgtagctggaaattctctttataaaaatcattcttgagctccagcctggctatctctttcaagaaacatggccactctttaggaatgctgttgcgtttgcattgccaactaaaatattaaaatatgcattggggcttcttcattcctttattttgagaacctgatgcacaaagagctcctttgttcttttcgagtcccaccactggaagagtggtccatagaccccatgaagacattgtcatgatttgagagactgttgttgaaaggattaacacaatcttaatacactgaaaattttaactgtgtcaagtcagcttagtggagatttagctatgccagtgagcagtgattttaactattcttggctgcttaaacagggcagctatgaactatgacaaatgtagatttttcaaagcaatacaaaatactaaaaaagaggaaccttaatgaatattaaccacacagtctttcttagccattccaaaaagaggcaaagcaattcttattttcttttttaaaataatgattaatatgattttgtgcacttcatactgtcactttttaaaactacagaaaagagatttagagtataacagaaacaagtgtgctttgatagtctcaaataggtagaattcatagttcaagacctgaatccactgtcatctctttcttcctcccattgcagctatcctcaggtaccaaatgttttgatttttaaataaggatagtaataaatggaggaggtgtcctataaatttaaagttcagttgacccagccttatacttaagatagccttatgaaaaatatgtgctgtgaggcagaagtatattttggcagagagaataataaataaaactttttcttttagctcaatatccttactttggtaagtatttttttttatttcacatctacttaacagaaaataaactgagaaatagaagtcagtccattggcataatttatcattcttcactttaaaaaattctaataaatattctgcttgagttttcttttctgctatttgttcttacttgcaactttaagtcaaacctcccaatacaaaacattaaaagctaacattaatgtactaaagtattaatttaaaagaaatcgaacctcccatgctagatttgaaaataacatcatcacagcaccctgatcccaaatattacaccgaggcttttaaaatgtaagtgaaatctagctaagtttcatggtttcattaaaagcaaatgtctgcctctatctgaaaaacaaatggaaatcttttgaggtgttaataccctttggatcctcatcaaaaggatggcattcacctgaggattcctatcttgacttcttaggtattaaaaacctttcttgatatgctctacattttaaaatttgttttataaaatccttatgttgattttcattttattctcaagtacaatacgtttcactctagaccagttgaagaacatgtttaaactttgttcatggtcaaattcattttctatttttttagtaacatatctcttaaaaagcacactaccttataaaaaacttcatcagaaattaaatttaatgcaagtaaattgccatctgatacttccacatgctatcataatcaactgtaataataaaaatgatttatccaattagaaaaggacaagatatatttttctctgtatttctataacttttgccactccattgaatacattgtatgttggacataagattattagtaatgcattcttgagatcttttattttggaatgatgctaactctgtctctttgccaattctaataccaggttccaagtaataactctacagtacaaagagaactgaatattcattctagggctataggatatgaacttcacaattcatttgggtacattctcattgaatttccttcaaaacaatctgttcctggtgcccagtgataattcagtcgggaccagcatgactaaaaggaaggggatatgctaaggctcagcaaagtgaccctaaatgagagatatgtcccaggatggaaagaagaagacgtggtttaaccaagttatactgactaatctaagcagtccactcatccttccattttgggaaaggagtgggggcagcctaagaagaacatatctggattgggaagaaccgtctttctgggctagggatggggaacagaaagggagtatggaaagaaaaattataagagatttgactgaagcaaggaaaaaaagcaaatccccaaacgtgctaatccttgaaagtaactatctttcccaaactactgctgttaccagcaagtgatcaggaagactaggagctatttctgactgtaaatgaattgtataatagctctgctgcagttctgtgacttccaagccaggaattaaatgctctttttaagaataacaaaaaacaaaagcatttcctatgctagtctcccagtaaaatgtacatgttttggagacttcaaaggtattatgtgagttcacatttagcaacagcttattaataaccctcaagctgtcagaatctctatagttaccatttacaattttatactgtgaaaaaatacagatcagtgaaagcataaagacaagtcagaattcactttgaagagggtctgaggcctgggagagtctctactgtctattgaagaatgaggcatgtataaaatagttggttgaatttcactgatcttcccaatgtgaacaaatatactatgtatattgtgtgtatttctagaaatcaatggcagctgctgatggtgttgtaattagaaatctatatagattatagatgttttagaaagatggtgccaatcctaaaagatttgtgtgggctaaaagtgcttgtacttacttttttctgcacttataactgatttggttttaaaattgtgtgcgtgtatctgttctttctctgttgtggcagcttgtactattaaaataatagagaatgttaaattattttgatgtgaactgcaaatgattttttttcataaagtttaacatttttatcagcattgttttgctttgtacttgtataaatatgttttattttagcacttcaaaatatacttgcctgtttctcagttgtctaaatcatgttgtacttggtgtttgtgaagccagttacttttcaaaaaaattaaaaaacctataatatga

SEQ ID NO: 339604 - DNA, 3639 bp, Artificial Sequence
  derived and/or modified sequence
atggtgctcttgctcatcttaagcgtcctactgctaaaagaggatgtgcgcggcagcgcccagtcttcggaacggagggtggtggcccacatgcccggcgatatcattataggagctttattcagcgttcatcatcagcctacggtagacaaagtccatgaacggaagtgtggcgctgtccgcgagcagtatggtatccagcgagttgaagccatgcttcacaccttagaaaggatcaactccgacccaactcttctgcccaacatcaccctcggctgtgaaattcgcgattcgtgttggcatagcgccgttgctctggagcagagcatcgagttcatccgcgatagtcttatatcctccgaggaggaggagggtctggttcggtgcgtggatggctcatcctcaagctttcgcagtaaaaaaccaatcgtgggagtcattggacctggcagctctagcgtggcaatccaggttcagaatctgctgcagctgttcaacatcccccagatcgcatattctgccacgtccatggacttgtcagacaagaccctgtttaagtatttcatgagggtagtgccttcagacgcccaacaagctagagcaatggttgatattgtaaaaaggtacaactggacgtatgtgagtgcagtccacacagaaggaaactatggcgaatcaggaatggaggcttttaaggacatgtccgcgaaagaaggcatatgtatcgcccactcatataagatatatagcaatgccggcgaacaaagcttcgacaagcttctgaaaaagttgacttcacatcttcccaaggcgagggtcgttgcctgcttctgcgaggggatgaccgttcgtggtctgttgatggctatgcgtagactcggcctagctggggaattcctcctgctgggatccgacggttgggcagatcggtacgatgtaaccgatgggtatcaacgcgaggcagttggaggaatcaccataaaactgcagagcccggacgtcaaatggtttgacgattattacttgaagctgagaccagagaccaaccatcggaatccctggttccaggagttctggcaacacagattccagtgccgactcgaaggcttccctcaagaaaattcaaaatataacaaaacctgcaacagcagccttacacttaagacccatcacgtgcaggatagtaagatgggtttcgttatcaacgccatatatagcatggcctatgggttgcacaatatgcagatgtccctctgtccaggctatgcggggctgtgtgacgccatgaagcccattgacggtagaaagctgcttgagagtttaatgaagacaaatttcactggagtgtcgggggatacgatactcttcgatgaaaacggtgacagcccaggaagatatgagattatgaatttcaaggaaatgggcaaagactattttgactatatcaatgtgggatcctgggataatggggagttgaaaatggacgacgatgaggtgtggtcaaagaagtctaacattatccgtagcgtgtgtagtgagccatgtgagaaagggcagatcaaggttatcaggaagggagaggttagctgctgttggacctgtaccccttgtaaggagaacgaatatgtgttcgacgagtacacctgcaaagcctgccaactcggttcatggcccacagatgatctgaccgggtgtgatctgatccctgttcagtatttgcgttggggtgaccccgaaccaatcgcagcagttgtatttgcgtgcttgggcctgttggctaccctcttcgtcaccgtagtgttcatcatctaccgcgacacccccgtcgtgaaatctagcagccgggagctctgctacattatcctggccggaatctgtctggggtacttatgtaccttttgtttaattgccaagccaaaacagatctactgctacctgcagcggatcgggatcggcctatctccagccatgtcatattccgcccttgtgaccaagaccaatcgaattgctcgcatcctcgccggcagcaaaaagaagatctgtactaagaagcccagatttatgtccgcctgtgctcaactggtcattgctttcattctcatttgtatccagttaggtatcatcgtcgccctatttattatggaaccaccggatattatgcatgactatccctccatcagggaggtctatttgatctgcaacacaactaatctgggtgtcgtcacgcctttagggtataacggactgctcatcttgtcatgcactttttacgcctttaagacgcggaacgtccctgcaaacttcaacgaagccaagtacattgctttcactatgtacactacctgtatcatttggttggccttcgtgcccatttacttcggaagcaattacaagattatcaccatgtgtttttctgtgtctctatccgccaccgtggctctcggctgtatgtttgtgccgaaagtgtatatcattctggccaagccagagaggaacgtgagaagtgccttcaccacaagcacggtcgtgcgcatgcatgtgggcgatggtaagtctagtagtgctgctagtaggtcttccagccttgttaacctgtggaagcgaaggggctccagcggtgagacactccgctacaaagaccggaggttggctcaacataagtccgagatcgagtgctttacaccaaaagggagtatgggcaatggaggccgggccaccatgtcatctagcaatgggaagtccgtaacctgggctcaaaacgagaaatcctctcgaggccagcatttatggcagaggctgagcattcatatcaataagaaggagaaccctaatcagactgccgtcatcaagccatttcctaaaagtacagaatccagaggtctgggcgcaggcgcaggcgctgggggatctgccggtggagtaggcgcgaccggaggagccgggtgtgccggcgcgggcccgggtggccctgaatcccctgatgctggtccgaaggccctgtacgatgttgccgaggcagaagaacacttcccagccccagccaggcccaggagcccctcccccatttccaccctgagtcatcgtgccggaagcgcttccaggacggacgatgatgtgccttcattgcacagcgaacctgttgcccgctcctcatcaagtcagggatctttgatggaacaaattagttctgtggtgacaaggtttactgcgaatatctccgagttgaactctatgatgctttcaactgccgcgcccagtcccggtgtgggcgccccactgtgttcctcttatttaattccaaaagaaattcagttgccaacaactatgacaacttttgcagagatacagccactgcctgctattgaggtcactggaggagcccagcctgccgctggagcacaagccgcgggcgacgcagcaagagagtcgccggcagctggcccagaggcagccgcggccaagccagacttggaagagctcgtcgcattgacacctccctcacctttccgcgacagcgtggacagcgggagtactaccccaaattcgcctgtgtcagaaagcgccctctgcattccaagctcacccaaatacgacacactaataatcagagactatacccaaagctcatcaagcctctag

SEQ ID NO: 339605 - DNA, 3639 bp, Artificial Sequence
  derived and/or modified sequence
atggtcctccttctgattctgtctgtgttgctcctgaaagaggatgtcagaggctcagctcaatcgagtgaacgaagggtggtggcccatatgcctggagatatcattattggtgccttgttcagcgtacatcaccaacccacggtagacaaagtccacgaacgcaagtgtggtgcagttcgggagcaatacggcatccagcgggtggaggcaatgttgcacacccttgagcgtatcaatagcgatcccactctcctgccaaatatcacattaggctgcgaaattcgagattcgtgctggcattcagccgttgccttggaacaaagcatcgagttcatccgcgatagcttgatctcttccgaggaggaagaaggcttggtgcggtgcgtcgatgggagctcctcatcttttaggtctaagaaacctattgtgggcgtgatcgggcccgggagctcaagcgtggctatacaggttcagaacctactgcagctgttcaacattcctcaaattgcctattctgcaacctcaatggatctgagtgataaaactttgttcaaatattttatgagggtggtgccttcagatgcacagcaagctagggctatggtggatatcgttaagcggtataactggacttacgtgtcagcggtgcacaccgaaggcaactatggcgaatctggaatggaggcattcaaggacatgagcgctaaggaagggatctgtatcgcacactcctataagatctacagtaatgctggagagcaatctttcgataagttactgaaaaagctgacgtctcacttgcctaaggcacgtgtggttgcttgcttttgcgagggcatgacggtgcgaggtctcttgatggccatgcggcgcttgggcctcgccggagaattcttgttattgggttccgacggctgggccgatcgatacgacgtgacggacggttaccagagagaggctgtgggcggcatcacaattaaactgcagtctcccgatgtcaagtggtttgatgactactatctgaagctgcggcccgaaactaaccaccgtaacccgtggtttcaggaattctggcagcaccggtttcagtgcaggctcgaaggttttcctcaggaaaattctaaatataataagacttgtaatagtagtttgactctgaaaacccaccatgtccaggattctaagatgggctttgtcatcaacgctatttactcaatggcctacggattgcataatatgcaaatgtctctttgccccggctatgcaggcctgtgcgatgccatgaaacctatcgacgggcggaaactgctggagtccttaatgaagactaacttcactggtgtctcaggggacacgatcctctttgatgagaacggagactctcctggccgttatgaaattatgaattttaaggaaatgggcaaagactattttgattatattaatgtgggcagttgggacaacggggagttaaagatggatgatgacgaggtttggtccaagaagagcaatataatccggtcagtgtgttccgagccctgtgaaaagggccagataaaggtgatccgcaaaggcgaggtgtcatgctgctggacctgcacaccttgtaaagaaaacgagtatgtgttcgatgagtacacttgcaaagcctgtcagctggggtcgtggccaacagacgatcttacaggatgcgatctgattcccgtccagtatttgcggtggggcgatcccgagcccatcgcggcagtggtgtttgcatgcctcggcctgctggccacactctttgtaaccgtggtgttcattatctacagggataccccggttgtcaagagcagctcacgtgaactctgttacatcatccttgccgggatttgccttgggtatctgtgtacattctgcctgatcgcgaagcctaaacagatctattgttatcttcagcgaataggcattggcctctctcctgcaatgagctattcagcccttgtaacgaaaaccaatcgcatagcccggatattagccgggagtaagaaaaagatctgcactaagaagcctcgattcatgtccgcttgtgcgcagctggtaattgccttcattttaatatgcatacaactcggcattatcgttgccctgttcatcatggagccccccgatatcatgcatgactatccttcgatcagagaagtttacctgatctgtaacaccactaatctgggggtcgtgactcccctgggctacaacggcctgctgattctaagttgcacattttatgcctttaagacacgcaacgttccagctaatttcaacgaggccaagtatatcgcatttacaatgtacaccacctgcattatttggttagccttcgttcccatctatttcggctccaactataagattattaccatgtgcttctcagttagcctgagcgcaaccgtggcgttgggctgcatgttcgtgccaaaggtgtatatcattctagccaaaccggagcgaaacgttcgctcagcctttaccacctcaaccgtggtgaggatgcatgtgggcgatggaaagtccagctcagccgcatctaggtcttcgagtctagttaacctgtggaaacgcagggggtcgagcggggaaactctaagatataaggaccggagactggcgcagcacaaatcagagatcgagtgtttcacccccaaaggaagcatggggaacggtggcagagcaaccatgagctcctccaacgggaagagcgtgacatgggcgcaaaacgagaagtcttctaggggccaacatctgtggcagaggctgagtatccacatcaacaagaaagagaaccccaaccagactgccgtgatcaagccttttccaaagagcacagagagccgaggactgggtgctggcgctggcgctgggggtagcgctggaggtgtgggagctaccggcggagccgggtgcgccggagcaggcccaggaggtcctgagagtccggacgccgggcctaaagcgctatacgatgtcgccgaggccgaggagcacttccccgccccagctcgtcccagaagcccctctccaatcagcaccctgagtcaccgtgccggcagcgcttcgaggaccgacgatgatgttccgagcctgcacagtgagcccgtggcccgctcaagcagctcccaggggagcctgatggagcagattagctcagttgtcactcgctttacagccaacataagtgaattgaactccatgatgttgtccaccgcggcaccatcccccggcgtaggcgcccctctgtgttcatcatatctcattcccaaggaaatacagctccctactacaatgacgacctttgcggagatccagccgctcccagccatcgaggtgaccggaggggcccagcctgctgctggagcccaagctgccggcgacgcagctcgtgagagccccgccgctggccccgaggcagccgccgccaaaccagatctagaggagcttgtagccctcactcctcctagtcccttcagagactctgtagacagcggatctaccacacctaacagccctgtaagtgagtcggctctgtgcatcccctccagtcctaagtatgacacccttattatcagggattatacgcagtcatcatcttccctctag

SEQ ID NO: 339606 - DNA, 3639 bp, Artificial Sequence
  derived and/or modified sequence
atggtgctgctgctgatcctgtctgtgctgctgctgaaggaggatgtgcggggcagcgcccagagcagcgagaggagagtggtggcccacatgcctggggacatcatcattggagccctcttctctgtgcaccaccagcccaccgtggacaaggtgcatgagaggaaatgtggggctgtgcgggagcagtatggcatccagagggtggaggccatgctgcacaccctggagcgcatcaacagcgaccccaccctgctgcccaacatcaccctgggctgtgagatccgggacagctgctggcacagcgctgtggccctggagcagagcattgagttcatccgggacagcctcatcagcagcgaggaggaggagggcctggtgcgctgtgtggatggcagcagcagcagcttccgcagcaagaagcccatcgtgggcgtgattggccctggcagcagctctgtggccatccaggtgcagaacctgctgcagctgttcaacatcccccagatcgcctacagcgccacctccatggacctgagtgacaagaccctcttcaagtacttcatgagggtggtgcccagtgatgcccagcaggcccgggccatggtggacatcgtgaagcgctacaactggacctacgtgtctgctgtgcacacagagggcaactatggagagagcggcatggaggccttcaaggacatgtctgccaaggagggcatctgcatcgcccacagctacaagatctacagcaatgctggggagcagagctttgacaagctgctgaagaagctgaccagccacctgcccaaggcccgggtggtggcctgcttctgtgagggcatgacagtgcggggcctgctgatggccatgaggcggctgggcctggccggggagttcctgctgctgggcagtgatggctgggccgacagatatgatgtgacagatggctaccagcgggaggccgtgggcggcatcaccatcaagctgcagagcccagatgtgaagtggtttgatgactactacctgaagctgcggcctgagaccaaccacaggaacccctggttccaggagttctggcagcaccgcttccagtgccgcctggagggcttcccccaggagaacagcaagtacaacaagacctgcaacagcagcctgaccctgaagacccaccacgtgcaggacagcaagatgggctttgtgatcaatgccatctacagcatggcctacggcctgcacaacatgcagatgagcctgtgccccggctacgccggcctgtgtgatgccatgaagcccattgatggcaggaagctgctggagagcctgatgaagaccaacttcaccggggtgtctggggacaccatcctgtttgatgaaaatggagacagccctggccgctatgagatcatgaacttcaaggagatgggcaaggactactttgactacatcaacgtgggctcctgggacaatggagagctgaagatggatgatgatgaggtgtggagcaagaagagcaacatcatccgctctgtgtgcagcgagccctgtgagaagggccagatcaaggtgatcagaaaaggagaggtgtcctgctgctggacctgcaccccctgcaaggaaaatgaatatgtgtttgatgagtacacctgcaaggcctgccagctgggctcctggcccacagatgacctgaccggctgtgacctgatccctgtgcagtacctgcgctggggagaccctgagcccatcgctgctgtggtgtttgcctgcctgggcctgctggccaccctgtttgtgacagtggtgttcatcatctacagagacacccctgtggtgaagagcagcagccgggagctgtgctacatcatcctggccggcatctgcctgggctacctgtgcaccttctgcctgattgccaagcccaagcagatctactgctacctgcagagaattggaattggcctgagccctgccatgagctacagcgccctggtgaccaagaccaacagaattgcccgcatcctggccggcagcaagaagaagatctgcaccaagaagccccgcttcatgtctgcctgtgcccagctggtgattgccttcatcctgatctgcatccagctgggcatcatcgtggccctcttcatcatggagcccccagacatcatgcatgactaccccagcatccgggaggtgtacctgatctgcaacaccaccaacctgggcgtggtgacccccctgggctacaacggcctgctgatcctgagctgcaccttctacgccttcaagaccagaaatgtgcctgccaacttcaatgaggccaagtacatcgccttcaccatgtacaccacctgcatcatctggctggcctttgtgcccatctacttcggcagcaactacaagatcatcaccatgtgcttctctgtgtccctgagcgccaccgtggccctgggctgcatgtttgtgcccaaggtgtacatcatcctggccaagccagagagaaatgtgcgcagcgccttcaccaccagcacagtggtgaggatgcacgtgggagatggcaagagcagcagcgctgccagccgcagcagcagcctggtgaacctgtggaagaggcggggcagcagcggggagaccctgcgctacaaggaccggcggctggcccagcacaagtcagaaattgagtgcttcacccccaagggctccatgggaaatggaggccgggccaccatgagcagcagcaatggcaagtctgtgacctgggcccagaatgagaagagcagccggggccagcacctgtggcagaggctgagcatccacatcaacaagaaggagaaccccaaccagacagctgtgatcaagcccttccccaagagcacagagagccggggcctgggcgctggggccggggccggcggcagcgctggaggagtgggcgccactggaggagctggctgtgccggggccggccctgggggccctgagagcccagatgctggccccaaggccctgtatgatgtggccgaggccgaggagcacttccctgccccagcccggcccaggagccccagccccatcagcaccctgagccacagagctggcagcgccagcaggacagatgatgatgtgcccagcctgcacagcgagcctgtggcccggagcagcagcagccagggcagcctgatggagcagatcagctctgtggtgacccgcttcaccgccaacatcagcgagctgaacagcatgatgctgagcacagctgcccccagccctggggtgggcgcccccctgtgcagcagctacctgatccccaaggagatccagctgcccaccaccatgaccacctttgctgagatccagcccctgcctgccatcgaggtgactggaggagcccagcctgctgctggggcccaggccgctggagatgctgcccgggagagccctgctgctggccctgaggccgccgccgccaagccagacctggaggagctggtggccctgaccccacccagccccttccgggacagcgtggacagcggcagcaccacccccaacagccctgtgtctgagagcgccctgtgcatccccagcagccccaagtatgacaccctcatcatccgggactacacccagagcagcagcagcctgtag

SEQ ID NO: 339607 - DNA, 3639 bp, Artificial Sequence
  derived and/or modified sequence
atggtgctgctgctgatcctgagcgtgctgctgctgaaggaggacgtccgtggatctgctcagtcttcggaacgtcgcgtagtggcccacatgcccggggatataatcattggtgctctgttctccgtgcaccatcagcccactgttgataaagttcacgaacgtaagtgcggggccgtgagagaacagtatgggatacaacgcgtagaagccatgctgcatactctggagcgtatcaatagtgatccaaccctgcttccaaacattaccctaggctgtgaaattcgtgattcttgttggcactcagcagtggcgctggagcagagcatcgaattcatccgagacagtttaatctcttccgaggaagaggaaggtctcgtgagatgcgtggacgggtcatccagctcctttaggtcaaaaaagcccatcgtcggggtgatcgggccaggttcctcgagcgttgccatccaggtccaaaacttgttgcagctgttcaacattcctcaaattgcgtatagcgccacttcaatggacttgtcagacaagaccctctttaaatacttcatgagggtggtgccctccgatgcccaacaggcaagagcgatggtcgatatcgtcaaacggtacaattggacttacgtttcagccgtccataccgaggggaattatggagaatcaggaatggaagccttcaaggacatgagcgctaaggaaggtatttgcattgcacactcctataaaatttactccaatgcaggtgaacaatctttcgacaagctgttgaaaaaactcacttcacatttacctaaggctcgggtggtcgcttgtttttgcgaaggcatgacggtaaggggtttgttaatggcaatgaggcgcttgggtctggcgggcgaatttctgctcctaggctccgacggatgggccgacaggtacgacgtaacggatggctaccagcgcgaagccgtcgggggaatcaccataaaacttcaaagccccgatgttaagtggtttgatgactactatctcaagctccggcccgaaaccaaccaccgtaacccgtggtttcaggaattctggcagcacagatttcagtgccgtttagagggatttccacaagaaaattctaaatacaataagacctgcaactcctctttgacactgaagacccaccacgtccaggattctaaaatggggttcgtcattaacgccatctactcgatggcttacgggctgcacaacatgcagatgtctctgtgcccagggtatgccggactgtgcgacgcaatgaagcccatagatggtagaaagctgctggagtccctgatgaagaccaattttacaggagtgagtggggataccatcctgttcgacgagaatggggactcccctggacggtacgagattatgaactttaaggagatgggtaaggactatttcgactacataaacgtgggaagctgggataacggcgagttgaagatggacgacgacgaggtgtggtctaaaaaaagcaacattatccgctctgtgtgcagtgaaccatgcgaaaaaggccagattaaggtcatccgcaaaggtgaagtctcatgctgttggacttgcaccccatgcaaagaaaatgagtacgtgtttgacgagtacacgtgcaaggcctgtcaactaggttcttggcccaccgatgacctgaccggctgcgatctgatccctgtgcaatacttacgctggggcgatcccgagcctattgccgcggtggtgtttgcatgcctgggtctcttggccaccctcttcgtaacagtcgttttcatcatctaccgtgatacgcctgttgttaagagtagtagccgtgagctttgttacattatcctggccggcatctgtcttggttacctgtgtactttctgcctcattgctaagcctaaacagatctactgttacttacaaaggattggcatcgggctgagtccagctatgagctacagcgctctcgttaccaagacaaatcgtattgcaagaattttggccggatccaaaaaaaagatttgtacaaagaagcccaggttcatgtccgcatgcgcccaacttgtgattgcttttatcttgatctgtatccagctcggaattattgttgcacttttcataatggagccacccgatatcatgcatgactacccaagtatccgggaggtgtacctcatctgcaacaccacgaacctgggggtagtcacacctctgggttataacggattgctcatccttagctgtacgttttatgcgtttaaaacccggaacgtgcccgccaatttcaatgaggctaagtatattgcttttactatgtacacaacttgcatcatttggctggcattcgtgccaatctacttcggttcaaattacaagattatcactatgtgctttagcgtgagccttagcgcaacagtagcccttggatgtatgttcgtgcctaaggtgtacatcatactagccaaacccgaaaggaatgtacgatctgcattcacgacatcaaccgtggtgagaatgcatgtgggggacggcaaatcgagctcggccgccagtaggtcctcttcattggtgaacctttggaagcgaagaggctcttccggcgagaccttgcgatacaaagaccggcgccttgcccagcacaaaagcgagatagagtgtttcacgcctaaagggtccatgggcaatggaggcagagccactatgtccagctctaacggcaagtcagtgacctgggcccagaacgagaagtcttctcggggacagcacctgtggcaacgactttctatccacattaacaaaaaggaaaacccaaaccagacagcagtgattaaacccttccccaagtctactgagtcgagaggccttggggccggggcaggggccggcgggagcgccggtggggtgggagccacagggggagctggatgcgctggggcaggaccaggcggaccagagagcccagacgctggacccaaggcgctgtacgacgtcgcagaagccgaagagcattttccagccccagccaggcccagaagcccctctccaatctccaccctgagtcaccgggccggcagtgccagtagaaccgacgatgatgtgcctagcctgcatagcgaacctgtggcacgctcctcaagcagtcaaggctcactgatggaacagatctccagtgttgtaacgaggttcaccgcgaatatatccgagctgaactcaatgatgctctccacagcggccccatcccctggagtgggggcaccgctgtgcagctcatacttaatccccaaagagatacagctgcccacaacgatgacaacatttgccgaaattcaacccctgcccgcaatcgaggttactggaggcgctcagccagccgcaggggcccaggccgccggtgacgccgcgagagaaagccccgccgcaggccctgaggcagccgccgctaagcctgacctggaggagctggttgcattaacacctccatcaccgtttcgggactcggtggactccggcagcaccacaccgaattcgcccgtcagcgaatctgccctctgtattcctagttctcccaagtacgatacactaatcatccgtgactacactcagtcctcttcttcactctag

SEQ ID NO: 339608 - DNA, 3639 bp, Artificial Sequence
  derived and/or modified sequence
atggtgctgctgctgatcctgagcgtgctgctgctgaaggaggacgtgcggggaagcgcccaaagtagcgaacggagagtcgtggcccatatgcccggcgatatcatcatcggcgctctgttttccgttcatcaccagccaacagttgacaaagtgcatgagcgtaagtgtggcgcagttcgggagcagtacggcatccagcgtgtggaagccatgcttcatacactggagaggataaattctgaccccaccctgctgcctaatattacactcggatgcgagattagagatagctgctggcatagcgctgtggctctggagcaatctatcgagttcattcgggacagcctcatctcatcagaagaggaggaaggtctcgttcggtgcgtggacgggtcatcctcatcatttcgatcaaagaaacctatagtgggtgtcatcggccccggatcctcctctgttgccatacaggtgcaaaacctgctgcaactgttcaacatcccccaaatcgcctactccgcgactagcatggatttgtcagacaagactctatttaagtattttatgcgagtagtcccatctgatgcacagcaggccagagctatggtagatattgtcaaacggtataactggacatatgttagcgccgtgcatacagaaggaaactatggcgaatctggcatggaagctttcaaagatatgagcgccaaagaggggatttgtatcgcccactcatacaagatttattcaaacgccggggagcaaagctttgacaagctgttgaagaaattaacgtcccacctccccaaggctagagtggtagcctgtttttgcgaaggcatgacggtgcgcgggctgttgatggccatgagaagacttggtctcgctggggagttcctgttgctgggcagcgatggatgggcggatcgttatgacgtcactgacggctaccagagagaagcggttggcggaatcacaataaagttgcagagtccagatgtgaaatggtttgacgattactatctgaagctgcggcccgagaccaaccacagaaacccctggttccaggagttctggcagcatcgctttcagtgccggttagagggatttccccaggaaaacagcaagtacaataagacttgtaattcgagccttaccctgaaaacgcaccacgtgcaggactccaaaatgggttttgtaatcaatgcaatctattccatggcctacgggctgcataacatgcagatgagtctatgccccggctacgccggactgtgtgacgctatgaagccaatcgatggaaggaagttacttgaatcccttatgaaaacgaacttcacaggcgtgagcggggacactattctatttgacgagaatggcgatagccctggccgatacgagatcatgaactttaaggaaatgggtaaggattatttcgactatattaacgtcggttcttgggataacggagaactgaaaatggacgatgatgaggtgtggtctaagaagtctaacatcatccgttcagtgtgcagtgagccttgtgaaaaaggccaaattaaggtgattagaaagggggaggtcagttgttgctggacgtgcaccccttgtaaagagaacgaatacgtgtttgacgaatacacatgtaaggcctgtcagttgggctcatggcccacggacgatctcaccggctgtgacttaattccagtccagtacctgagatggggagatcccgaacccattgctgcagttgtgttcgcttgcttgggattgctcgctacactcttcgtgactgttgtttttataatctacagggacaccccggttgtaaaaagttcatctcgcgagttatgttatatcattctggcaggaatctgtctgggctatctctgtacattctgcctgattgctaaaccaaaacagatctattgttacttacagaggatcggcattggcctcagcccggccatgtcatacagcgctctcgtgaccaagaccaataggatagcccggatcctggccggcagcaaaaaaaagatttgcacgaagaagcctcggttcatgtcagcttgtgcccaactcgtgatcgccttcatccttatatgtattcagctgggtataatcgtcgcactgtttataatggaaccacccgacattatgcacgactacccatcaatccgggaggtgtacctgatctgtaacacaaccaatctgggcgtcgtgaccccactgggctataacggacttctgatcttgagttgcacattttatgctttcaaaacgcggaatgtcccagccaactttaatgaagccaagtatattgccttcacgatgtacaccacctgcattatctggctggctttcgtccctatctacttcgggagtaattacaaaattattactatgtgtttctcagtctcactttccgcgaccgttgcactcggttgcatgtttgtgcccaaggtttacattatcctggccaagcctgaaaggaacgtgcggtctgctttcacgacaagcacagtagtcagaatgcatgtgggggacgggaaatcaagctccgccgcttcacgttcctcttcgttggtcaacctgtggaagagaagagggtcctcaggagaaaccctgaggtacaaggaccggaggttagcccaacacaagtctgagatcgagtgtttcacccccaagggctcgatgggcaatggtggacgcgcgaccatgtccagcagcaatgggaaatcagtaacgtgggctcagaatgaaaagagcagccgtggccaacacctatggcagagactgagcatccatataaataaaaaggagaatcccaatcagacagcagtgatcaagcccttccctaagtctacagagagtagaggactgggcgccggagccggcgcgggcggttctgccgggggcgttggtgctacagggggtgcaggatgtgccggtgcggggcctggagggccggagagcccagatgccggccccaaggcactgtacgacgtggcagaggccgaggaacattttccagcaccggcccgaccacggtccccgagtcccattagcacgctcagccacagagcgggctccgcctctcgcacagatgacgacgtgccgtcccttcatagcgagcccgttgcgcggtcttcttcatcccaggggtccctcatggagcagatttcgagcgtggttaccagattcacggccaatattagtgaactcaactctatgatgttgagcacagctgccccgtcgcccggggtcggtgcaccattgtgctcctcttacctcatcccgaaggagattcagttacctacaacaatgactacgttcgccgaaatccagcccctgccagctatagaagtcactggcggagcccagccagctgcaggcgcacaagctgcaggagacgccgccagggagagccccgctgccggcccggaggccgccgccgcaaagccagatctggaagagctggtcgccctgacacccccctcgcctttcagagactcagtggatagtggctctactaccccgaactcacccgtttcagaaagcgccctgtgtattccgtcctcacccaagtatgacacactcatcattcgcgattatactcagagctccagctctctgtag

SEQ ID NO: 339609 - DNA, 3639 bp, Artificial Sequence
  derived and/or modified sequence
atggtgctgctgttgattctgtcagtgcttcttcttaaggaggatgttcgcggatcagcacagtcttccgaaaggcgcgtggtggcgcacatgcctggggacattatcattggggcactcttcagtgtccatcatcagccgaccgtagacaaggtgcacgagcggaagtgcggcgctgtacgggaacagtatggcattcaacgggtggaggccatgcttcataccctcgaacggattaactccgacccaacactgctccctaatataactcttggctgcgagatcagagacagttgttggcacagcgctgttgccttggagcaatctattgagttcattcgggatagcctcattagcagcgaggaagaagagggcctggtgcgttgtgtggacgggagctcttcctccttcagaagcaagaaaccaattgtgggcgtgatcggtcccggttccagctcggttgcaatccaggtgcaaaatctgttgcagctgttcaacatccctcagatagcatattcggctacctcaatggatctgagtgataagactttgtttaaatacttcatgcgcgtggtgcccagtgacgctcagcaggcgagagctatggttgacattgtcaaaagatacaactggacatacgtaagtgcggtgcatactgagggaaactatggagagtctggcatggaagccttcaaggatatgtcagccaaggagggtatctgcattgctcacagctataagatttactctaatgctggcgaacagtcatttgataagctcctgaaaaaactaacgtctcatttgcctaaagctcgtgtagttgcttgcttctgcgagggaatgaccgtcaggggacttctgatggcaatgaggcgcctcggcctcgctggagagtttctgctcctggggagcgacggctgggcagacagatacgacgtgacagacggttaccagagggaagcagtcggcggaatcaccattaaactgcaatctccagacgttaaatggtttgacgactactatctcaaactccggccagaaactaaccaccgtaacccatggttccaggaattctggcagcatcggttccaatgcagacttgaaggttttcctcaagaaaattcaaagtacaataagacctgtaactccagcttgaccttgaaaacccaccacgtacaggactcaaagatgggcttcgtgatcaacgctatttactcaatggcttacgggctgcataacatgcagatgagcttgtgtccaggctatgccggattgtgcgacgccatgaaacccatcgatggccgaaagctgctggaatcattgatgaagacaaacttcaccggagtgagcggggataccatcctttttgatgaaaacggagattcgcctggccgatacgagatcatgaacttcaaggaaatggggaaagactacttcgattacatcaacgttggaagttgggacaacggggaactgaagatggacgatgatgaagtgtggtccaaaaaatctaatattatcagaagcgtctgcagtgaaccttgtgagaaagggcagatcaaggtgatccgaaaaggtgaagtctcttgctgctggacctgcaccccctgtaaggagaacgagtacgtgttcgacgagtacacctgtaaggcctgccagctggggtcctggccgacggatgacctcaccggatgtgacctcattcccgtccagtatcttcgctggggtgaccccgagcccatagcagccgtggtctttgcctgtcttggcctcctggctacactctttgtcaccgtcgtcttcatcatctatagagatactcctgttgtcaaaagttcctccagagagctctgctacattatcctcgcagggatctgcctgggctacctgtgtacgttctgtctgatcgccaagcccaagcagatctactgttatcttcaaagaatcggcatcggcctgagccctgccatgtcatatagcgccctcgtgaccaagaccaatcgtatcgcacgtattctcgccggtagcaaaaagaagatctgtactaagaagcctagatttatgtcggcgtgcgcccagcttgtaattgctttcatcctaatctgcattcagcttgggattatcgtcgctctcttcatcatggagcctccagacattatgcacgattacccttccatcagagaggtctacctgatttgcaatacgaccaacctgggtgttgttaccccactggggtacaatggactgcttattctgtcctgtacattctatgccttcaaaacccggaacgtgccagcaaactttaatgaagctaagtatatcgccttcacaatgtacacaacatgtattatatggctggccttcgttccgatctactttggatccaactacaagataatcaccatgtgtttttcagtgagcctgtctgctacagttgccctgggatgtatgtttgtccccaaagtttacatcatcctcgccaagccagagcgcaacgtgaggagcgcttttacaacatctaccgtggtcaggatgcatgttggtgatggaaaatcatctagtgcggctagccggtcaagtagcctggtcaatctgtggaaacgcagggggtcctccggtgagacactgaggtacaaggaccgaaggctggctcagcataaatcagagattgaatgcttcacccccaaggggagtatgggcaacggtgggagggctacaatgagttcatccaatggaaagtcagtaacgtgggctcagaacgagaaatcctccagggggcagcacctctggcagcggctgtcgatacacattaacaagaaagagaatcctaatcagaccgcagtgattaagccctttccaaaatccacagaatccagaggcctcggagccggtgctggggcaggcggatcagctggtggggtcggagctacaggaggggctgggtgtgccggtgcaggtccagggggaccggagtcacctgatgccggacccaaggcattgtacgatgtggcagaagccgaggaacacttcccagctcctgcgagacccagatctccctctcctatatcaaccctgtctcacagggccggttcagcttctagaactgacgatgatgtgccgtccttgcatagtgaacccgtagccagatctagctctagccagggttcactaatggagcaaatcagctcagtcgtgacaaggttcacagcaaacatatcagaactcaactcaatgatgctctccacggccgcaccatctcctggggtgggggctccattatgctcctcctatctgattcctaaggaaatacagctgcctacgacgatgaccaccttcgccgaaattcagcccttacccgcaattgaagtaacgggcggtgcccagcccgcagccggagcacaggcagctggtgacgcagctcgggagtctcctgctgcagggccagaagctgctgcggcaaagccagacctggaggaattggtggcgctgactcctccatctccttttagagactcagttgacagcgggtccactacacccaatagtcccgtctctgagagcgcgttatgcattccatcctcaccaaagtatgacactctcatcatcagggactacacccagagtagcagctccctatag

SEQ ID NO: 339610 - DNA, 3639 bp, Artificial Sequence
  derived and/or modified sequence
atggtgctgttactcatcctttcagtgctccttttaaaggaagatgtcagagggtccgcacagtcatctgaaaggcgagtcgtcgcgcacatgccaggcgacattattattggagccctctttagcgtacatcatcaacctacagttgacaaggtgcacgaaaggaagtgcggcgcagtgagagaacaatacgggatacaacgtgtggaggccatgcttcataccctggagaggattaattccgaccctacacttctacccaatatcacactgggttgcgagatccgggacagctgttggcacagcgcggttgctctggaacagagtattgaattcatccgcgactccctcatctcctccgaagaagaggaaggtctcgtgcggtgcgttgacggcagttcatcatcctttagatcaaaaaagcctatcgttggagtaattggccctggtagtagcagtgtggctattcaggtccaaaatctgctgcagctatttaatattccccagatagcttactctgcaactagtatggacctctccgacaagaccctgttcaagtacttcatgcgcgtggttccttcagatgctcagcaggcacgggcaatggtggacattgttaagagatacaattggacttatgtgagtgccgttcatacggaaggaaactacggcgaaagcgggatggaggctttcaaggacatgagcgcaaaagagggaatctgcatcgcccactcctacaagatttactccaacgcaggtgaacagtcttttgacaagctgctgaagaaactaacctctcatttgcctaaggcacgcgtggtggcctgcttctgtgaaggaatgacagttcgcggtctgttgatggccatgaggcggctcgggttagctggtgagtttcttcttctgggcagtgacggttgggctgacagatacgacgtgacagacggctatcaaagagaggccgtcggtgggatcacaatcaagctgcagagtccagatgtcaaatggtttgacgactattacttgaagctgcgcccagagacaaatcacagaaacccttggtttcaagagttctggcagcaccggtttcagtgccgcttggaaggcttcccccaggaaaactccaaatacaacaagacatgtaactcctcccttacactgaaaactcaccacgttcaggatagcaaaatggggttcgtcataaacgctatatatagcatggcctacggactacataacatgcagatgagtttgtgccctggctatgccggtctatgtgacgctatgaagccgattgacggcagaaagctgttggagagcctgatgaagaccaactttactggagtctcaggcgacaccatcctgtttgatgagaatggcgactcacccggtcggtacgagattatgaactttaaagagatggggaaggattacttcgattatatcaacgtggggagctgggataacggggaactgaaaatggatgatgacgaagtatggtcgaagaagtctaacattatccggagcgtttgcagtgaaccctgcgaaaagggacaaattaaagtcatacgaaaaggcgaggtctcctgttgctggacctgtaccccatgcaaggaaaatgaatacgttttcgacgaatacacatgcaaagcctgtcagcttggctcatggccaacagacgatctcacaggttgtgatctcattccggtccaatatctgcgttggggcgacccagagcccatcgccgctgtcgtgttcgcttgcttaggcctcctggctacgctgttcgtgacggtcgtgtttattatctatcgggatacgccagtcgtaaaatcgtcttcacgtgagctctgttacatcatactcgccggtatatgcctgggctatctgtgtactttttgcctcatcgccaagcctaagcagatttactgctatctccagagaattggaattggcctatctccagccatgagttacagcgcattagtgaccaaaacaaaccgcattgcaaggattctggcagggtctaaaaagaaaatttgcactaaaaaacctagatttatgtccgcctgcgcgcaactggtgatcgcttttatcctcatctgcatccagttgggcataattgtggccctgttcataatggagcctcccgacattatgcatgactatcctagcataagagaggtctacctcatttgcaacactacaaacctgggcgtcgttaccccactgggctacaacggcctgctgattctatcttgtacattctatgcctttaagacacggaatgttccggctaacttcaacgaagctaaatatatcgctttcactatgtataccacgtgtatcatttggttggcttttgttcccatctatttcggttctaactacaagatcatcactatgtgcttcagtgtgagcttaagcgctaccgtggccctgggttgcatgtttgtgcccaaagtgtatattatactggctaaacccgagaggaacgtgcgcagcgccttcacaacatctacagttgtgcggatgcacgttggggacgggaagtcttcgtccgcagcttctcggtcctcctcactggtgaatctgtggaagagacggggatcatcgggtgagactcttagatacaaagatagaagactagcccagcataaaagcgaaatcgagtgcttcacacccaaagggagtatgggcaatggaggcagagcaacaatgtccagtagcaacggcaaatctgttacctgggctcagaatgaaaagtcctccaggggccagcacttatggcagcgcctgagcatccacataaacaaaaaagagaaccccaaccagactgcggtcataaaaccctttccgaaatccaccgagtcccgcggtctcggggctggggctggtgctggcggatcggccggaggtgtaggggctacaggaggagccggatgcgcgggagccggacctggagggccagaaagtcccgacgcgggacctaaggcactgtatgacgttgctgaagccgaggaacattttccggctcccgctaggccacgctctcccagtcctatctccactttaagtcaccgagccggttctgcatccagaaccgacgacgatgtgccctcccttcatagcgaacctgtggcgaggtctagttcttctcaggggtccctaatggaacaaatctcaagcgtggttacacgattcaccgccaatatctcagagttaaacagcatgatgctatctacggcagccccttctccaggcgtgggggcacctctatgctcaagttatctgatccctaaggaaattcagctgcccacaaccatgacaacgttcgcggaaatccagccattgcccgcaatcgaggtcactggcggagcccagcctgccgctggggctcaggccgctggagatgccgctagagagtcccccgctgcgggaccagaagccgctgctgccaagcccgacctggaggagttagtggctcttaccccaccctctccatttagagattcagtggatagcggcagcacgacccccaactctccagtatccgagtccgcactgtgtattccatctagccccaagtacgacacactgataatccgagactacactcagtcatcatctagcctgtag

SEQ ID NO: 339611 - protein, 942 aa, Artificial Sequence
  derived and/or modified sequence
MVLLLILSVLLLKEDVRGSAQSSERRVVAHMPGDIIIGALFSVHHQPTVDKVHERKCGAVREQYGIQRVEAMLHTLERINSDPTLLPNITLGCEIRDSCWHSAVALEQSIEFIRDSLISSEEEEGLVRCVDGSSSSFRSKKPIVGVIGPGSSSVAIQVQNLLQLFNIPQIAYSATSMDLSDKTLFKYFMRVVPSDAQQARAMVDIVKRYNWTYVSAVHTEGNYGESGMEAFKDMSAKEGICIAHSYKIYSNAGEQSFDKLLKKLTSHLPKARVVACFCEGMTVRGLLMAMRRLGLAGEFLLLGSDGWADRYDVTDGYQREAVGGITIKLQSPDVKWFDDYYLKLRPETNHRNPWFQEFWQHRFQCRLEGFPQENSKYNKTCNSSLTLKTHHVQDSKMGFVINAIYSMAYGLHNMQMSLCPGYAGLCDAMKPIDGRKLLESLMKTNFTGVSGDTILFDENGDSPGRYEIMNFKEMGKDYFDYINVGSWDNGELKMDDDEVWSKKSNIIRSVCSEPCEKGQIKVIRKGEVSCCWTCTPCKENEYVFDEYTCKACQLGSWPTDDLTGCDLIPVQYLRWGDPEPIAAVVFACLGLLATLFVTVVFIIYRDTPVVKSSSRELCYIILAGICLGYLCTFCLIAKPKQIYCYLQRIGIGLSPAMSYSALVTKTNRIARILAGSKKKICTKKPRFMSACAQLVIAFILICIQLGIIVALFIMEPPDIMHDYPSIREVYLICNTTNLGVVTPLGYNGLLILSCTFYAFKTRNVPANFNEAKYIAFTMYTTCIIWLAFVPIYFGSNYKIITMCFSVSLSATVALGCMFVPKVYIILAKPERNVRSAFTTSTVVRMHVGDGKSSSAASRSSSLVNLWKRRGSSGETLRYKDRRLAQHKSEIECFTPPSPFRDSVDSGSTTPNSPVSESALCIPSSPKYDTLIIRDYTQSSSSL

SEQ ID NO: 339612 - DNA, 2829 bp, Artificial Sequence
  derived and/or modified sequence
atggtgctgctgctgatcctgagcgtgctgctgctgaaggaggacgtgagaggcagcgcccagagcagcgagagaagagtggtggcccacatgcccggcgacatcatcatcggcgccctgttcagcgtgcaccaccagcccaccgtggacaaggtgcacgagagaaagtgcggcgccgtgagagagcagtacggcatccagagagtggaggccatgctgcacaccctggagagaatcaacagcgaccccaccctgctgcccaacatcaccctgggctgcgagatcagagacagctgctggcacagcgccgtggccctggagcagagcatcgagttcatcagagacagcctgatcagcagcgaggaggaggagggcctggtgagatgcgtggacggcagcagcagcagcttcagaagcaagaagcccatcgtgggcgtgatcggccccggcagcagcagcgtggccatccaggtgcagaacctgctgcagctgttcaacatcccccagatcgcctacagcgccaccagcatggacctgagcgacaagaccctgttcaagtacttcatgagagtggtgcccagcgacgcccagcaggccagagccatggtggacatcgtgaagagatacaactggacctacgtgagcgccgtgcacaccgagggcaactacggcgagagcggcatggaggccttcaaggacatgagcgccaaggagggcatctgcatcgcccacagctacaagatctacagcaacgccggcgagcagagcttcgacaagctgctgaagaagctgaccagccacctgcccaaggccagagtggtggcctgcttctgcgagggcatgaccgtgagaggcctgctgatggccatgagaagactgggcctggccggcgagttcctgctgctgggcagcgacggctgggccgacagatacgacgtgaccgacggctaccagagagaggccgtgggcggcatcaccatcaagctgcagagccccgacgtgaagtggttcgacgactactacctgaagctgagacccgagaccaaccacagaaacccctggttccaggagttctggcagcacagattccagtgcagactggagggcttcccccaggagaacagcaagtacaacaagacctgcaacagcagcctgaccctgaagacccaccacgtgcaggacagcaagatgggcttcgtgatcaacgccatctacagcatggcctacggcctgcacaacatgcagatgagcctgtgccccggctacgccggcctgtgcgacgccatgaagcccatcgacggcagaaagctgctggagagcctgatgaagaccaacttcaccggcgtgagcggcgacaccatcctgttcgacgagaacggcgacagccccggcagatacgagatcatgaacttcaaggagatgggcaaggactacttcgactacatcaacgtgggcagctgggacaacggcgagctgaagatggacgacgacgaggtgtggagcaagaagagcaacatcatcagaagcgtgtgcagcgagccctgcgagaagggccagatcaaggtgatcagaaagggcgaggtgagctgctgctggacctgcaccccctgcaaggagaacgagtacgtgttcgacgagtacacctgcaaggcctgccagctgggcagctggcccaccgacgacctgaccggctgcgacctgatccccgtgcagtacctgagatggggcgaccccgagcccatcgccgccgtggtgttcgcctgcctgggcctgctggccaccctgttcgtgaccgtggtgttcatcatctacagagacacccccgtggtgaagagcagcagcagagagctgtgctacatcatcctggccggcatctgcctgggctacctgtgcaccttctgcctgatcgccaagcccaagcagatctactgctacctgcagagaatcggcatcggcctgagccccgccatgagctacagcgccctggtgaccaagaccaacagaatcgccagaatcctggccggcagcaagaagaagatctgcaccaagaagcccagattcatgagcgcctgcgcccagctggtgatcgccttcatcctgatctgcatccagctgggcatcatcgtggccctgttcatcatggagccccccgacatcatgcacgactaccccagcatcagagaggtgtacctgatctgcaacaccaccaacctgggcgtggtgacccccctgggctacaacggcctgctgatcctgagctgcaccttctacgccttcaagaccagaaacgtgcccgccaacttcaacgaggccaagtacatcgccttcaccatgtacaccacctgcatcatctggctggccttcgtgcccatctacttcggcagcaactacaagatcatcaccatgtgcttcagcgtgagcctgagcgccaccgtggccctgggctgcatgttcgtgcccaaggtgtacatcatcctggccaagcccgagagaaacgtgagaagcgccttcaccaccagcaccgtggtgagaatgcacgtgggcgacggcaagagcagcagcgccgccagcagaagcagcagcctggtgaacctgtggaagagaagaggcagcagcggcgagaccctgagatacaaggacagaagactggcccagcacaagagcgagatcgagtgcttcaccccccccagccccttcagagacagcgtggacagcggcagcaccacccccaacagccccgtgagcgagagcgccctgtgcatccccagcagccccaagtacgacaccctgatcatcagagactacacccagagcagcagcagcctgtag

SEQ ID NO: 339613 - DNA, 2829 bp, Artificial Sequence
  derived and/or modified sequence
atggtccttctgttgatcctgtcagtcttacttttgaaagaagatgtccgtgggagtgcacagtccagtgagaggagggtggtggctcacatgccgggtgacatcattattggagctctcttttctgttcatcaccagcctactgtggacaaagttcatgagaggaagtgtggggcggtccgtgaacagtatggcattcagagagtggaggccatgctgcataccctggaaaggatcaattcagaccccacactcttgcccaacatcacactgggctgtgagataagggactcctgctggcattcggctgtggccctagagcagagcattgagttcataagagattccctcatttcttcagaagaggaagaaggcttggtacgctgtgtggatggctcctcctcttccttccgctccaagaagcccatagtaggggtcattgggcctggctccagttctgtagccattcaggtccagaatttgctccagcttttcaacatacctcagattgcttactcagcaaccagcatggatctgagtgacaagactctgttcaaatatttcatgagggttgtgccttcagatgctcagcaggcaagggccatggtggacatagtgaagaggtacaactggacctatgtatcagccgtgcacacagaaggcaactatggagaaagtgggatggaagccttcaaagatatgtcagcgaaggaagggatttgcatcgcccactcttacaaaatctacagtaatgcaggggagcagagctttgataagctgctgaagaagctcacaagtcacttgcccaaggcccgggtggtggcctgcttctgtgagggcatgacggtgagaggtctgctgatggccatgaggcgcctgggtctagcgggagaatttctgcttctgggcagtgatggctgggctgacaggtatgatgtgacagatggatatcagcgagaagctgttggtggcatcacaatcaagctccaatctcccgatgtcaagtggtttgatgattattatctgaagctccggccagaaacaaaccaccgaaacccttggtttcaagaattttggcagcatcgttttcagtgccgactggaagggtttccacaggagaacagcaaatacaacaagacttgcaatagttctctgactctgaaaacacatcatgttcaggattccaaaatgggatttgtgatcaacgccatctattcgatggcctatgggctccacaacatgcagatgtccctctgcccaggctatgcaggactctgtgatgccatgaagccaattgatggacggaaacttttggagtccctgatgaaaaccaattttactggggtttctggagatacgatcctattcgatgagaatggagactctccaggaaggtatgaaataatgaatttcaaggaaatgggaaaagattactttgattatatcaacgttggaagttgggacaatggagaattaaaaatggatgatgatgaagtatggtccaagaaaagcaacatcatcagatctgtgtgcagtgaaccatgtgagaaaggccagatcaaggtgatccgaaagggagaagtcagctgttgttggacctgtacaccttgtaaggagaatgagtatgtctttgatgagtacacatgcaaggcatgccaactggggtcttggcccactgatgatctcacaggttgtgacttgatcccagtacagtatcttcgatggggtgaccctgaacccattgcagctgtggtgtttgcctgccttggcctcctggccaccctgtttgttactgtagtcttcatcatttaccgtgatacaccagtagtcaagtcctcaagcagggaactctgctacattatccttgctggcatctgcctgggctacttatgtaccttctgcctcattgcgaagcccaaacagatttactgctaccttcagagaattggcattggtctctccccagccatgagctactcagcccttgtaacaaagaccaaccgtattgcaaggatcctggctggcagcaagaagaagatctgtaccaaaaagcccagattcatgagtgcctgtgcccagctagtgattgctttcattctcatatgcatccagttgggcatcatcgttgccctctttataatggagcctcctgacataatgcatgactacccaagcattcgagaagtctacctgatctgtaacaccaccaacctaggagttgtcactccacttggatacaatggattgttgattttgagctgcaccttctatgcgttcaagaccagaaatgttccagctaacttcaacgaggccaagtatatcgccttcacaatgtacacgacctgcattatatggctagcttttgtgccaatctactttggcagcaactacaaaatcatcaccatgtgtttctcggtcagcctcagtgccacagtggccctaggctgcatgtttgtgccgaaggtgtacatcatcctggccaaaccagagagaaacgtgcgcagcgccttcaccacatctaccgtggtgcgcatgcatgtaggggatggcaagtcatcctccgcagccagcagatccagcagcctagtcaacctgtggaagagaaggggctcctctggggaaaccttaaggtacaaagacaggagactggcccagcacaagtcggaaatagagtgtttcaccccgccgtcccccttcagagactcggtggactcggggagcacaacccccaactcgccagtgtccgagtcggccctctgtatcccgtcgtctcccaaatatgacactcttatcataagagattacactcagagctcctcgtcgttgtga

SEQ ID NO: 339614 - DNA, 2829 bp, Artificial Sequence
  derived and/or modified sequence
atggtgctgcttctgattctgtccgttctgctgcttaaggaggatgtgcgggggtccgcccagtcaagcgagagacgcgtagtggcccacatgcctggtgatataatcatcggagctcttttctcagtgcatcatcagcccacagtggacaaggtgcacgaaagaaagtgcggcgccgtgagagagcaatatggtatacagcgggtcgaggctatgctgcacaccttggagcgtatcaattccgaccctaccttgctgccaaacataacgctgggatgcgagatccgcgattcttgctggcactccgctgtcgcgctggagcagtccattgagtttataagggattctttaatttcatccgaagaggaagagggcctggtgaggtgcgtcgacgggtcctcaagcagtttccgctccaaaaagcctatcgtaggtgtaattggcccagggtcttctagcgtagctattcaagtgcagaacctactgcagctctttaatattcctcaaattgcctacagtgcgacgtccatggatctctccgataagaccttgttcaagtattttatgcgtgtagtgcctagtgacgcacagcaggcaagggctatggtcgatatcgttaaaagatacaattggacttatgttagcgctgtgcacaccgaaggaaattacggagaatcaggcatggaggcctttaaggatatgtcagcaaaggaggggatctgcatcgcccactcttacaagatttatagtaatgctggcgaacagtcgtttgacaagctgctgaagaaactaacgagtcaccttccaaaagcccgggttgtggcttgcttttgcgagggaatgacagtcagaggcctgttaatggcaatgaggaggctcggtctggctggcgaatttctgctgcttgggtcagacgggtgggccgatcgatatgacgtgactgacggctaccagcgggaggcagtgggaggcattacgatcaaattacagtcgccagacgtaaaatggttcgatgattactacctaaagctgcggcccgaaacaaaccatagaaacccatggttccaggagttttggcagcacaggttccaatgccgcctggagggtttcccacaggagaattctaaatacaataagacgtgcaattcttcactgaccctcaagacacaccatgtgcaggacagtaagatgggattcgtgattaatgcgatctattctatggcctacggcctgcacaatatgcagatgtccctctgccccggatatgcaggcctgtgcgacgcaatgaagcccatcgatggcagaaagctccttgaatcactgatgaaaacaaacttcacgggtgtttcaggcgacacaatcttgttcgatgagaatggggatagccctgggcgctatgaaataatgaactttaaagagatgggaaaggattacttcgactacattaacgtcggttcttgggacaacggagaactgaagatggacgatgacgaggtctggagtaagaagagcaatattattcggagcgtttgttctgaaccgtgtgagaagggccaaattaaggtgataagaaagggcgaggtctcttgctgttggacttgcacaccttgtaaagagaacgagtacgtgtttgacgaatacacctgcaaagcttgtcagctcgggtcctggccgactgacgacctgactggctgcgacttgattcctgttcagtacctgcgctggggcgatcctgagcccattgccgccgtggtattcgcctgccttgggttgctggctacgctgtttgttactgtcgtctttattatataccgggacacccctgtggtgaagtcgagtagccgagaactgtgctatatcatccttgccggaatttgtttgggctatctgtgcaccttctgcttgatcgcgaagcccaagcagatctactgctaccttcaacggataggaattggactgagtccagctatgagctacagtgcacttgtgacaaagaccaacagaattgccagaattcttgcgggcagcaagaaaaaaatctgcacaaaaaaacctaggttcatgagcgcctgtgctcagttagttatcgcttttattcttatatgcatccagttgggcatcatcgttgccctcttcattatggagccacctgacataatgcacgattatccaagcatccgggaggtttatctgatctgtaacacgaccaacctcggagtagttactcccttggggtataacggactgctaattctcagctgcacattttatgcttttaagacccggaacgtgcccgcgaacttcaatgaggctaaatatattgcctttacgatgtacaccacatgtattatatggctggcctttgtcccaatttactttggatctaactacaagataatcacaatgtgcttctcggtcagtttgtctgccacagttgctctcgggtgcatgttcgtgccaaaggtgtatattattctagcgaagcctgagaggaatgtgaggagtgccttcactacgtcgacggtagtgcggatgcacgtcggagacggcaagagcagctccgccgcctcacggtcaagctcccttgtaaatctgtggaaacgccgaggttccagcggagagaccctgagatacaaggaccggcgcctcgctcagcataaatctgagatcgagtgcttcaccccccctagcccttttcgagattcagtcgactccgggtctacaacccccaactcaccggtttcagagagcgcactttgcattccttcttcacctaagtatgataccttgattattcgagattacacccagtccagctctagcctgtag

SEQ ID NO: 339615 - DNA, 2829 bp, Artificial Sequence
  derived and/or modified sequence
atggtgctgctgctgatcctgtctgtgctgctgctgaaggaggatgtgcggggcagcgcccagagcagcgagaggagagtggtggcccacatgcctggggacatcatcattggagccctcttctctgtgcaccaccagcccaccgtggacaaggtgcatgagaggaaatgtggggctgtgcgggagcagtatggcatccagagggtggaggccatgctgcacaccctggagcgcatcaacagcgaccccaccctgctgcccaacatcaccctgggctgtgagatccgggacagctgctggcacagcgctgtggccctggagcagagcattgagttcatccgggacagcctcatcagcagcgaggaggaggagggcctggtgcgctgtgtggatggcagcagcagcagcttccgcagcaagaagcccatcgtgggcgtgattggccctggcagcagctctgtggccatccaggtgcagaacctgctgcagctgttcaacatcccccagatcgcctacagcgccacctccatggacctgagtgacaagaccctcttcaagtacttcatgagggtggtgcccagtgatgcccagcaggcccgggccatggtggacatcgtgaagcgctacaactggacctacgtgtctgctgtgcacacagagggcaactatggagagagcggcatggaggccttcaaggacatgtctgccaaggagggcatctgcatcgcccacagctacaagatctacagcaatgctggggagcagagctttgacaagctgctgaagaagctgaccagccacctgcccaaggcccgggtggtggcctgcttctgtgagggcatgacagtgcggggcctgctgatggccatgaggcggctgggcctggccggggagttcctgctgctgggcagtgatggctgggccgacagatatgatgtgacagatggctaccagcgggaggccgtgggcggcatcaccatcaagctgcagagcccagatgtgaagtggtttgatgactactacctgaagctgcggcctgagaccaaccacaggaacccctggttccaggagttctggcagcaccgcttccagtgccgcctggagggcttcccccaggagaacagcaagtacaacaagacctgcaacagcagcctgaccctgaagacccaccacgtgcaggacagcaagatgggctttgtgatcaatgccatctacagcatggcctacggcctgcacaacatgcagatgagcctgtgccccggctacgccggcctgtgtgatgccatgaagcccattgatggcaggaagctgctggagagcctgatgaagaccaacttcaccggggtgtctggggacaccatcctgtttgatgaaaatggagacagccctggccgctatgagatcatgaacttcaaggagatgggcaaggactactttgactacatcaacgtgggctcctgggacaatggagagctgaagatggatgatgatgaggtgtggagcaagaagagcaacatcatccgctctgtgtgcagcgagccctgtgagaagggccagatcaaggtgatcagaaaaggagaggtgtcctgctgctggacctgcaccccctgcaaggaaaatgaatatgtgtttgatgagtacacctgcaaggcctgccagctgggctcctggcccacagatgacctgaccggctgtgacctgatccctgtgcagtacctgcgctggggagaccctgagcccatcgctgctgtggtgtttgcctgcctgggcctgctggccaccctgtttgtgacagtggtgttcatcatctacagagacacccctgtggtgaagagcagcagccgggagctgtgctacatcatcctggccggcatctgcctgggctacctgtgcaccttctgcctgattgccaagcccaagcagatctactgctacctgcagagaattggaattggcctgagccctgccatgagctacagcgccctggtgaccaagaccaacagaattgcccgcatcctggccggcagcaagaagaagatctgcaccaagaagccccgcttcatgtctgcctgtgcccagctggtgattgccttcatcctgatctgcatccagctgggcatcatcgtggccctcttcatcatggagcccccagacatcatgcatgactaccccagcatccgggaggtgtacctgatctgcaacaccaccaacctgggcgtggtgacccccctgggctacaacggcctgctgatcctgagctgcaccttctacgccttcaagaccagaaatgtgcctgccaacttcaatgaggccaagtacatcgccttcaccatgtacaccacctgcatcatctggctggcctttgtgcccatctacttcggcagcaactacaagatcatcaccatgtgcttctctgtgtccctgagcgccaccgtggccctgggctgcatgtttgtgcccaaggtgtacatcatcctggccaagccagagagaaatgtgcgcagcgccttcaccaccagcacagtggtgaggatgcacgtgggagatggcaagagcagcagcgctgccagccgcagcagcagcctggtgaacctgtggaagaggcggggcagcagcggggagaccctgcgctacaaggaccggcggctggcccagcacaagtcagaaattgagtgcttcaccccacccagccccttccgggacagcgtggacagcggcagcaccacccccaacagccctgtgtctgagagcgccctgtgcatccccagcagccccaagtatgacaccctcatcatccgggactacacccagagcagcagcagcctgtag

SEQ ID NO: 339616 - DNA, 2829 bp, Artificial Sequence
  derived and/or modified sequence
atggtgctgctgctgatcctgagcgtgctgctgctgaaggaggacgtgaggggcagtgcccagtcgagcgaaaggcgtgtcgtagcccacatgcccggggacattattatcggcgccttgtttagcgtacaccaccagcctaccgtggacaaagtccacgaaagaaagtgtggagctgtgcgtgagcagtatgggatccaacgcgttgaagctatgctgcatactctggagcggatcaactccgatcccacactgctccccaacatcacgctaggatgcgaaattagagattcttgctggcactctgcggtcgcactggaacagagcattgagttcattcgggattctctgataagctcagaggaggaggaaggactggttcggtgtgtggatggtagctcttcctcgttccggtccaagaaaccaatcgttggcgtcataggccccggatcctcctcagtggcgatacaggtacagaacctgcttcagctcttcaatattccacagatcgcatatagcgctacatctatggacctgtctgacaagacccttttcaagtattttatgagggtggtgcccagtgatgcacagcaggcccgcgcaatggtggacattgttaagcgctataactggacgtacgtgagtgccgtccatacagaagggaattacggcgaatcaggcatggaggcatttaaagatatgtcggccaaagaaggcatttgtattgctcacagctacaagatttactccaatgccggcgagcagtctttcgacaagctcctcaaaaaactcactagccatctgcccaaagcacgggtggtagcgtgtttctgcgaaggcatgaccgtgagaggcctgctgatggctatgagacggctgggactcgcaggggaattcttgctgcttggcagtgacgggtgggccgatcggtatgacgttactgatggctatcagcgagaggccgtgggaggcatcacaatcaaactacaatcccccgatgtgaaatggtttgacgactactacctgaagctccgcccggagaccaaccaccggaacccctggttccaagaattttggcagcaccgctttcagtgccgtttggaaggttttccccaggagaacagtaaatacaacaaaacctgtaatagttcactgactctcaagacccatcacgtacaagattcaaaaatgggcttcgttatcaatgcaatctacagcatggcatatgggctgcacaacatgcagatgtctttgtgcccaggatatgccggtctgtgcgacgccatgaaacctatcgacggcagaaagctcttggagtctctgatgaagaccaatttcaccggcgtatccggagacaccatccttttcgacgagaacggagatagccctgggagatacgaaattatgaatttcaaggaaatgggcaaggattacttcgattatatcaacgtggggagttgggacaacggggagttgaaaatggacgatgacgaggtgtggagcaagaaatctaacattatccggagcgtgtgctcagagccgtgtgagaaggggcagattaaggtgattagaaagggcgaggtgtcctgctgctggacctgcaccccctgtaaggaaaacgagtacgtgttcgatgagtatacatgcaaagcctgccagctcgggtcctggccaacggatgacctcaccggatgcgacctgatcccagtgcaatatctgagatggggcgacccggagccgattgccgcagtagtgttcgcatgcctcggacttttggcgactttgttcgtgactgtcgtattcatcatctatcgggacacgccagtagttaagtccagttcaagggaactttgctacatcattctggctggcatttgccttggatacctatgtactttctgcctgatcgctaagcccaagcaaatctattgttatcttcagcggatcggcatcggcctgagcccagccatgagctatagcgcacttgtgaccaagactaaccgaatcgcgcggatcctggctggctccaagaagaagatttgtacaaaaaagccgaggtttatgagcgcatgtgcccagctcgtgattgccttcattctaatatgcatccaattagggattatagtggccctgttcataatggaaccgccggacattatgcatgactacccatcgataagggaggtgtacctaatctgtaatacaaccaatctgggcgttgtcaccccacttgggtacaacggtctactgatactgagctgcacattttacgcctttaaaactcgaaatgtgcccgcaaacttcaatgaagccaaatacattgcatttactatgtatacaacttgcatcatttggctagccttcgtaccgatctattttggaagtaactataagatcatcactatgtgtttttcagtgtccctcagcgccacggtggcactgggctgtatgttcgtgccaaaggtctacattatcctcgccaagcctgagcggaacgtccgctcagcgtttacaacgtccactgtcgtaagaatgcatgtgggagatgggaaatcatccagtgccgcctctagatctagttctctcgtaaacctgtggaagcggcgtggatctagtggcgaaacattgcgttacaaggaccggagactggcccagcataagagcgagatcgagtgcttcactccaccttcaccctttcgtgatagtgtggacagtggttctacaacacccaactcccctgtcagcgagagcgccctctgcatcccaagcagcccaaagtacgacaccctgatcatcagggattacacccaaagctcaagttcattatag

SEQ ID NO: 339617 - DNA, 2829 bp, Artificial Sequence
  derived and/or modified sequence
atggttttgctgttgatcctgagcgttcttctgctgaaagaagatgtgcggggaagtgcccagagctctgaaaggagagttgttgcacacatgcccggtgacattataataggggctctcttctcagtgcatcaccaacctaccgtggacaaggttcatgagcggaagtgcggagccgtgcgggaacagtacggcatacagcgcgtcgaagccatgctgcacaccttagagaggatcaactctgatccgacattgctccctaacattacccttggttgcgagatcagagattcttgctggcattccgctgtagcacttgagcagagtatagagtttatccgcgacagtttgatctcctctgaagaggaagagggtctggtaaggtgtgtggacggaagttcaagctccttccgaagtaagaaacctattgtcggagtcataggacccggaagttcctcagtggcgatccaggtgcagaacctgcttcaactcttcaatatcccacagatagcatattcagcaacttctatggacctcagtgataagacacttttcaaatacttcatgcgtgtggttcctagcgatgcacagcaggctcgtgccatggtggacatagtgaagcgatataactggacctatgtgagtgccgttcacactgaagggaattatggggagtcaggtatggaggcattcaaggacatgagcgctaaggaaggaatctgtatagcccacagctacaagatctattctaacgccggagaacagtctttcgataaactactgaaaaagctcacttcacacctacccaaggccagggttgtggcttgcttctgtgagggcatgaccgtgagaggactattaatggccatgcgccgtcttggcctggctggcgagttcctcctcctgggatcggatggctgggcagatcggtacgatgtgaccgacggttaccagagagaagccgtaggcggaatcaccatcaaacttcagtcccccgacgtgaaatggtttgatgattactacctcaagttgaggccggaaacaaatcataggaacccatggtttcaagaattttggcaacaccggtttcaatgccgactcgaaggattcccccaggagaattccaagtataacaagacttgcaacagcagcctgacattgaaaactcatcatgtgcaggatagcaaaatgggattcgttatcaatgctatctatagcatggcttacgggctgcacaacatgcagatgtctctgtgccccggttatgcaggcttgtgcgacgccatgaaaccgatcgacggaaggaaactgctggagtcgctgatgaagaccaactttaccggggtgagcggagacactattctgttcgacgagaacggtgatagccccggtagatacgaaattatgaattttaaggaaatgggaaaggactattttgactatattaacgtcggctcttgggacaatggtgaacttaagatggacgatgatgaagtttggtctaagaagagtaatatcattagatccgtgtgctctgaaccgtgtgagaagggacagatcaaagtgatccgcaagggagaagtgagttgttgttggacttgcacaccttgtaaagagaatgagtatgttttcgacgagtacacttgtaaggcatgtcagctggggagctggccaaccgacgacttgaccgggtgcgatctcatcccagttcagtatctgagatggggagaccccgagcctatagccgctgtggtcttcgcgtgtctagggttactagctacccttttcgttaccgttgtgttcataatctaccgtgatactccagtagtgaaaagttctagtcgagagctttgttacattatcctcgctggaatctgtctcggctacctgtgcacattttgcctcatagccaagcctaaacaaatttactgctatttacagcggattggcattggcttgtcgccggctatgtcttactccgccctagtcaccaagactaatagaatcgctaggatcttggccggatctaaaaagaagatatgcacaaaaaagccacgttttatgtccgcgtgcgcccagctggttatagctttcattctgatctgcattcagctcggaatcattgtcgctctctttatcatggaaccgccagatataatgcatgattacccaagcattagagaggtctacctaatatgtaatacaaccaatctgggtgtcgtgacccccctgggttacaacgggttgcttattctgtcctgtactttctatgctttcaagactcgcaacgtgcctgccaactttaacgaagccaagtacattgccttcactatgtatacaacttgcatcatctggttggcttttgttccaatttactttgggagtaactataagataatcactatgtgcttttcagtgtctctgagtgctactgtggctcttggatgcatgttcgtccccaaagtttatatcattctggcgaaacctgaaaggaatgtcagatccgcttttacaaccagtacagtcgtgcgcatgcacgtgggggacggaaagagcagctcggctgccagccgcagctcttctctggtgaacctatggaaacggaggggaagtagtggcgagaccctgcgttacaaggaccggcgtctggcccagcacaaatctgaaatagagtgctttacccctccatctcccttcagggatagcgtggatagcgggtctactaccccaaattcacccgtcagcgaaagcgcgctgtgtatccccagcagccccaagtacgacaccctgattatcagagactatacacagagtagttccagcctgtag

SEQ ID NO: 339618 - DNA, 4728 bp, Artificial Sequence
  derived and/or modified sequence
caagctttgagctttgagctcagaagacgtgggctagaattccactctagcacttgttagctttgtggccctggataagtggtttgcaattttcttttccctttcctcttccaaatgaccttctttcaaatatttgagccctatccttccagtcttctcctagcctccctgtgtgataagaccttcatttcctttatcactttggtcacatgcccagctctgcccatgcacatgcaatactcaaagatgcacaggattccccaggtgtggttctgggtcagggagtcatcagggctggcaagggctgggagaatggaccagaaagccatagagtgagatacagggggaagaagaacacagactggcacaccagatccccggccctcaccttcacggtcctttggccaagctgccccctggttccaatagttctgggactaaaccctggcttttgcccttgcgccaggagtagtggtgaatgtaatcattctggccacatcattgagggaactagatgggatcagggccagctttgcctcctgttcactttgtccagagctgacatcagagcctgctggagagtaggtgagcagcaatatgtgtccctttttacccatgtccagatgcagcatccatccttatgacctcattccctccccagctgagattcattctcagtcacacacagtcttttcagtctagaagcaaagactcttctactcattgtgtaggtcagaaagagaaatgcaaaggttttgagatctgatttctgacctgaagatccttattactagctatgtgtcttcagaaagtttaacctctcttagtttcagttccttcatctgtaaaaattgagacataagtagcccatacctcatagattgcaggaagaattaaatgatgtggtgtatacaaactcttagtctaagtgattgatgtgtgttggcttcttgggggaaggagaggtgacagtgaatgatttcttaccccactacctgtgagagcagagcaagacaggctgggcttgcccatcaccctgcccttcaaccccctgtgggggacctagggttcaaatgaacgtcactatccacacttctgtaaagttggccagtgttactctggggcaaacctaaatagaatgtcaaacggaatttgaattttacagaggaaatgtgaaagtcttagagaacatttcgctagtttttaaaactttttataggtcacagttcagttgccttgcagtttcatgaactttgccagtgttttcaatttagcataaaaagtgtggtcagatttgtataaacctcacctgggaacttgtttgaagcacaagttctcagacccctccccagactcactgaaactctgggggtgcagctcagcagtctgtgttcagtgagcactccaggtgcttctcagggctcccgtttgagaacactggtctaggtgttagaagggtggtcccctcccttctccccttcctcccacccctggcagttttgaggtccagatgaccaagcccggctctctagccgtgtattttcagcacttccgtagtgtgaagacagctcctgagagaatgactcatcgtctcatcctgggagattcatgtatttgtgtcacagcaggtgtaatctaaatccaagcctaggcctggaaaagagttaggaaacaaacatctgttttgggtgttcagactgacagatcagttgtctccctccacctcggaggcttccttcctgatctcctgaccacagtaatagttctctgatggctaatgaaaatagcaaattttatcaagttctaccttttggaaaataccattcattattttccctttaatcctcacaacagcccaacaaggtagatgctattaagatccttatgtccttcacagtgaaacagcctcagagaggctaagtcatttgcccaagatcgtgtagctaataaatgggagacgagagacttgagttcaagtcagacaccagattctgtaaatcttcagccagacttcccacttggttaagcaagctagatccttgagccaggaatattctaggcctgtggttcttaaaatttgtcatggatcaagatttctggaggacatcttaaagcacagattgctggacccttgtccccaagtgttagattcagtgctgctaggttgaggcctgggaatttgcatttctagcaagctcccagatattgctggtgctgctggtccggagaccacacttaaagaatcacttctgtaggccagtatttctcaaccagggctgtacattagaatcatctgaggaacttcagattcaattgttctagtgtgagacactgccattctatttttttatgttccctggataattctaatgcacagccagggttgagaaccactgctatactcaaaggaagactactaattcctttttatagctttggttcttgagtcctgtgtccatttttttctaacggcagcatgcatacttctgggaaactcagtgtgtgcaacgggtaccaacactgcaagacaaatagtgctcattcatttcatttcaatattttctatgaaacaaacatctattgtggagtataatgcaaagtgttcatgaactcttaatgtaaaatgtaatgtaaatgggatttagtccactcctaagaatttagccaaggaaaattgtcaggaccaactgtcaaagatatgtacaagaagaggcatctaagtattactttgtcttgataattgctgagtctgtgtgatggttatatggtgattcattgttcaaagaatatctaatacttatgtcaagtacaaaaaggaggatacaaactgaatatttagtatgactctaattgtacttttaacaaaactatatacatacacacacagaaaaaagactggaagataacacaacaaaatattaccagtgattatttcttgatgggattatgggtgataatgataacattttctaatttttaaacaatattacttttatgattagaccaaaagaatttgtgtaggcagtcacctattcttgtaaatacattctacaatgtctgcctgaaatacaaagcatgcatttgtagattagaagttttttcagagaattagaaagcatcttacaattgttaattaaggtcccaatgggtgctaatgcctttgggacctggaaatgtgagaatcatcataggaacctagggagattgtgctgggcaaaagggcttttgctctgcaaggtggttcttctaatggggttaggcagcaggggttgctagaggctcctcaggatgcatggggtgagtgtggggcttttgtcctctcctctagcgagtacacactcctccacagtgcttctgtgtgacatcaccaaagcatccactataattaatgtatcatagatcaaatgcaccctagtaaagggaatttagcaatgtccatgtagtgtgcaaatatgcaggaggtaagaaagttaagcatatgtaactcaaggaccacctatgaatgttaataaagaaagaacatatggagaaaactcttgtattgcaaaacatgaagcccatgtgccttcatcatccccagaagtctgtctgttcatgctccctgggattccgttcagaaaacaagtaaatggtgccttctgcacatttatgttaaacggagaaccaaaaagagtgactaccccactccagtgcttgctggggctgggagaacaaagaagctgcaagtatgaggtactcaaagacagtgttactagggtaatgattttccagtatggccaaaagacatcttctatgcaaccaagcctcacctggccttacaaaacaaaagtggtttggccagagcttgaataacagctgggatggatggcccaatgtaaaggagcaggtggcaggccagtggaccccactctggggtggccccatggtggacagagcccctgctccctaaaatggccaacacctgtcccaaggaaggccacctagccagaagtgcccaccatctgctgtaatcaaatttgcaatcacaggtaacttttcctctcaagggtccagctggcaatataaataaatggaatgaatggggctcctcagatgagtacagcatcttccatgtatggggagcagacattactgagctgctgccatgtgggaatctcagtccagttgtgccaggtcttctgagttattccaagagaagcaagaattcgtctttgtgttatagtttccagtttctaaatattggtagcattttaaaaatatgtagtccaaagaagacagtcctgtgggctgactttggcctgcaggcaccagtttctcatctctgcttgtgaatgtcaagttctagagagaccattgctttagtcacctctgtcctctccctcctcttcccactcctgcctcaccaagaccaaattccaaaagaccagttctcctcaaaagttgtgtttcataaggaccttaaaattggctactagtctaacagtaatttatttcagttgaggactttttaaactccatgactaaccattgagggtactttctggatgattaagttaataattttaaaggaattgccttggtttttgaggggtagagggtatattatttgggaagtggctgtttcaaagtgagtgggatctaggtttaaatccagcttcaccacctgtatcacttaagcaagtgatgcagcctctcttagtttctcattatttaaaaaaaaaaaaaaaa

SEQ ID NO: 339619 - protein, 236 aa, Artificial Sequence
  derived and/or modified sequence
MPGSPVTSGYYGVRRSFLSDSDFHNSKQFSNDVYTSSVGKPFPCESSAGQSHAALLEPYFPQEPYGDYRPPALTPNAGSLFSASPLPPLLPPPFPGDPAHFLFRDSWEQTLPDGLSQPDPVSADALLTLPPSTSCLSQLESGSIAQHRGSSWGSSLAGAQSYSLHALEDLHHTPGYPTPPPYPFTPFMTVSNDLPPKVGPLSPDEEADTGSLHDPSPWVKEDGSIAWGSYECRRAY

SEQ ID NO: 339620 - DNA, 1205 bp, Artificial Sequence
  derived and/or modified sequence
gtcccaggagactacagcaaacgagtgtatcaaggagtgagagtgaagcatacagtcaaagatctcctggcagaaaaacgatccgggcagacaagtaactcaagacttaatggcagcgtcagttcctctcagtctccatttgtgcagatgccaggttcgccggtcacgtcaggttactacggtgtcagaagatctttcttatctgactcagacttccacaacagtaaacagttttcaaatgacgtctacacctccagcgtggggaagccgtttccctgtgagtcctccgcagggcagagccatgcggctctcctggagccctacttcccccaggagccctacggagactaccggcctccggcgctgacgcccaacgcgggctctctgttcagcgcctcgcccctaccgccgctcctgccaccgcccttccccggagacccagctcacttcctatttagggactcatgggagcagacgttgcctgacggtctcagccagcctgaccctgtgtctgccgatgccctgctgaccttgccacccagcacgagttgcctctcccagcttgagtccgggagcatcgcccagcacaggggctcaagctgggggtcatccctggctggggctcagtcatactcgctgcatgctctggaagatctgcaccacactccggggtaccctaccccgcctccttaccccttcacccctttcatgacggtgtcaaatgacctaccgcccaaggtggggccactctccccagatgaggaagcagacaccggttccctccatgacccttccccttgggtgaaagaagatgggagtattgcctgggggtcatatgaatgccgcagagcttattgaggggagggccaaatgacttctgggtttttctttaacttgaggtgtattccaaagattgttttaggtgtgtcagcccattcaggactggattttcagaataagcctcaatgctgctctttgttagtggacgagggcatttatttgtaatcctctccactgtaaccccactgaaataaaacagaatgttaattaaatgtgtcagagaccgtattctagtaagataaccttacaatgtggtctttttggaactgttgtaacccattacgttctgaatcttctgttatctttgaagtatcatttttggcactgatttttcttaaattacattaaaaagtttatgcagatca

SEQ ID NO: 339621 - protein, 419 aa, Artificial Sequence
  derived and/or modified sequence
MAGDSRNAMNQDMEIGVTPWDPKKIPKQARDYVPIATDRTRLLAEGKKPRQRYMEKSGKCNVHHGNVQETYRYLSDLFTTLVDLKWRFNLLVFTMVYTVTWLFFGFIWWLIAYIRGDLDHVGDQEWIPCVENLSGFVSAFLFSIETETTIGYGFRVITEKCPEGIILLLVQAILGSIVNAFMVGCMFVKISQPKKRAETLMFSNNAVISMRDEKLCLMFRVGDLRNSHIVEASIRAKLIKSRQTKEGEFIPLNQTDINVGFDTGDDRLFLVSPLIISHEINQKSPFWEMSQAQLHQEEFEVVVILEGMVEATGMTCQARSSYMDTEVLWGHRFTPVLTLEKGFYEVDYNTFHDTYETNTPSCCAKELAEMKREGRLLQYLPSPPLLGGCAEAGLDAEAEQNEEDEPKGLGGSREARGSV

SEQ ID NO: 339622 - DNA, 1260 bp, Artificial Sequence
  derived and/or modified sequence
atggcgggcgatagccggaacgctatgaatcaggacatggaaattggcgtgacaccttgggatcccaaaaaaattcccaagcaggctcgagattacgtacctatcgccactgatagaacaagactgcttgccgaaggcaagaagccacgccagcgttacatggagaaatcaggaaagtgcaatgtccaccatgggaatgtccaggagacataccggtacctgagcgatttgttcactaccctcgtcgacctgaagtggcgcttcaatttacttgtatttacaatggtgtacaccgtcacttggctcttcttcggattcatttggtggctgatcgcatatatcaggggagacctcgaccacgtgggggaccaagagtggattccttgcgtggagaacctaagtggattcgtgagcgctttcttgttcagtattgaaaccgaaacaacaattggatacggcttcagggtgattacggagaaatgtcccgagggcattattctgctactggtgcaggccattctaggatcaatcgtcaatgcctttatggttggatgtatgttcgtgaaaattagccagcctaaaaagcgggccgaaaccctcatgttctccaataatgccgtgataagtatgcgggatgaaaaactgtgcctgatgttccgtgtgggcgacctgaggaatagtcatatcgtggaagcttctatacgggccaagctcatcaagtcccgccagacgaaggagggcgagttcattccgcttaatcaaacggatattaacgtgggttttgatacaggcgacgaccggctatttcttgtctccccccttatcatttcccacgagatcaatcagaagagccccttctgggaaatgtcccaagcgcagctgcatcaggaagaatttgaggtcgttgtgattttggaaggtatggtcgaagccaccggaatgacttgtcaggcaaggtcctcatacatggacacagaagtgctgtgggggcatagattcacaccggtgctcactcttgagaaaggtttttacgaagtcgactataacacattccatgatacctatgaaactaacaccccaagctgttgcgccaaagaactcgccgaaatgaagcgcgaaggaaggttgcttcagtatctgcccagcccgcccctgctaggaggctgtgctgaggccgggctcgacgctgaagccgagcagaatgaagaggatgaaccaaaggggctgggagggagcagagaggccagagggtccgtgtag

SEQ ID NO: 339623 - DNA, 1260 bp, Artificial Sequence
  derived and/or modified sequence
atggctggcgatagtcggaacgctatgaaccaggacatggaaatcggcgtgaccccttgggatcctaagaaaattccaaagcaggcaagagattacgtgccaatcgccacggatcggacacgcctcttggccgaaggtaaaaaacccagacaacggtatatggaaaagagtggcaagtgtaacgtgcaccacgggaatgtgcaggagacgtaccgatatctctcagatctctttaccaccctggtagacttaaaatggcggttcaatctgctagtgtttacgatggtttataccgtaacctggctgttcttcggatttatctggtggctaatcgcgtacattagaggggacctagatcatgtgggtgatcaggaatggattccttgcgtagaaaatctatcaggctttgtgtcagcgtttctcttcagtatcgagaccgagactacaattggatatgggtttcgggtcattactgaaaagtgcccagaaggaattatccttctccttgtccaggctatattgggcagtattgtgaacgcctttatggttgggtgcatgttcgtgaagatatctcagccgaaaaaaagggccgagacactcatgttctcaaacaatgccgtgatcagtatgcgtgacgagaaattatgtctaatgttccgggtgggcgacctgaggaactcccatattgtcgaggccagcattcgggctaagctgattaaaagtaggcagacaaaagagggggagtttatcccactcaatcagactgacataaatgtgggtttcgacacaggggatgacaggctgtttttggtgagtccgctgatcatttcccatgagatcaaccagaagtctccattctgggaaatgtctcaggcgcagctacaccaggaggagttcgaagtcgtcgtgatcttggaagggatggtggaggccacagggatgacttgtcaagcgcgaagctcatacatggatacagaagtcctctggggccataggtttaccccagtccttaccctggagaaaggcttctacgaggtcgattacaacactttccacgatacttacgaaaccaatacaccttcttgttgtgccaaagaattagccgagatgaaacgtgaaggacgcctgctacagtaccttccatcccccccacttctgggcggatgcgccgaagcaggtctggacgctgaggctgagcagaacgaagaggacgaacctaaagggctgggtggctcgagggaagctaggggatcagtgtag

SEQ ID NO: 339624 - DNA, 1260 bp, Artificial Sequence
  derived and/or modified sequence
atggcgggcgactcgaggaacgccatgaatcaggacatggagattggagtcacaccctgggaccccaaaaaaattcccaaacaggcccgggactacgttcctattgcaacagaccgcactcggctgctcgctgagggcaagaaaccccggcagaggtatatggaaaagagtgggaaatgcaatgtgcaccatggcaacgtgcaggagacgtatagatatttgtcggacctgttcacaacgctcgtggatcttaaatggcggttcaatctgttagtctttactatggtgtacacagtgacatggctcttcttcggcttcatttggtggctcattgcctatatccggggggacttagatcacgtgggagatcaggagtggatcccttgtgtggaaaatctgtctggattcgtttccgcttttctgttttcaatagaaaccgagaccaccattggttacggttttcgtgtcattactgagaaatgccccgagggaataatattattattggtccaggcaatcctcggttctatcgtgaatgcttttatggtgggttgtatgtttgtgaaaatcagtcagcctaaaaagagggcagagaccctcatgttctccaacaatgctgtgatatccatgcgggatgagaagctctgtctaatgtttagagtgggggatctgcggaatagtcacatcgtggaagcttcgatcagagctaagctgattaagagtcgccaaaccaaggaaggagagttcattcccctgaatcagactgacatcaatgtaggtttcgacaccggagatgaccgcctgttcctggtgtcaccactgattatcagccacgagattaatcagaagtcacctttttgggagatgagccaagctcagctgcatcaggaggaatttgaagtggtggtaattctcgagggaatggttgaagctaccggcatgacctgccaggctaggagttcctatatggatacagaagtcctctggggacaccgcttcacacccgttctaaccctcgagaaaggattctatgaggttgattataatactttccacgacacttacgagacaaacacgccctcctgctgtgcgaaggagctcgcggagatgaaacgcgaaggacgacttttgcagtatcttcctagccctccattacttggcggatgcgccgaagcaggactcgatgccgaggccgaacaaaacgaagaggacgagcctaaggggctcggcggatctcgagaggctagagggagcgtatag

SEQ ID NO: 339625 - DNA, 1260 bp, Artificial Sequence
  derived and/or modified sequence
atggccggggacagcagaaatgccatgaaccaggacatggagattggagtgaccccctgggaccccaagaagatccccaagcaggcccgggactatgtgcccatcgccacagacaggacccggctgctggccgagggcaagaagccccggcagcgctacatggagaagtctggaaaatgtaatgtgcaccacggcaatgtgcaggagacctaccgctacctgagtgacctcttcaccaccctggtggacctgaagtggaggttcaacctgctggtgttcaccatggtgtacacagtgacctggctgttcttcggcttcatctggtggctgattgcctacatccggggggacctggaccacgtgggggaccaggagtggatcccctgtgtggagaacctgagcggctttgtgtctgccttcctgttcagcattgaaacagagaccaccatcggctacggcttccgggtcatcacagagaagtgcccagagggcatcatcctgctgctggtgcaggccatcctgggcagcatcgtgaatgccttcatggtgggctgcatgtttgtgaagatcagccagcccaagaagagagctgagaccctgatgttcagcaacaatgctgtgatctccatgagagatgagaagctgtgcctgatgttccgggtgggggacctgaggaacagccacatcgtggaggccagcatccgggccaagctgatcaagagccggcagaccaaggagggggagttcatccccctgaaccagacagacatcaacgtgggctttgacacaggagatgacaggctcttcctggtgagccccctcatcatcagccatgagatcaaccagaagagccccttctgggagatgagccaggcccagctgcaccaggaggagtttgaggtggtggtgatcctggagggcatggtggaggccaccggcatgacctgccaggcccggagcagctacatggacacagaggtgctgtggggccaccgcttcacccctgtgctgaccctggagaagggcttctatgaggtggactacaacaccttccatgacacctatgagaccaacacccccagctgctgtgccaaggagctggccgagatgaagcgggagggccgcctgctgcagtacctgcccagcccccccctgctgggcggctgtgccgaggccggcctggatgctgaggccgagcagaatgaagaagatgagcccaagggcctgggcggcagccgggaggcccggggctctgtgtag

SEQ ID NO: 339626 - DNA, 1260 bp, Artificial Sequence
  derived and/or modified sequence
atggccggcgacagccggaacgccatgaaccaggacatggagatcggcgtcacgccttgggatcctaagaagatccctaaacaagcacgcgattatgttccaatcgcgaccgatcggaccagactcctggcagagggcaagaaaccccgccaacgctatatggagaagtccggtaaatgcaacgtgcatcatggaaatgtacaggaaacctaccgttacctgagcgacttgttcactacactggtcgatctcaaatggcggttcaacctgctggtattcacaatggtttacacagtcacgtggctgttctttggatttatttggtggctaatcgcgtatatacgcggcgatctggaccatgtcggagatcaggagtggatcccttgcgtggagaatctgagtggctttgtgagtgcattcttgttcagtatcgagaccgagaccaccattgggtatggattcagggtcatcactgagaagtgcccggaagggataatcctgctgctcgtgcaggctatcctgggctccattgtgaatgcctttatggtgggttgcatgtttgtgaagattagccaaccaaaaaagcgcgccgaaaccttgatgtttagcaacaatgccgtgatttccatgcgggatgaaaaactgtgccttatgttcagagtgggtgacttgaggaacagtcacattgtagaggcttccatcagggccaagctcatcaagagcagacaaacgaaagaaggagagtttattcctctcaatcagacagacattaacgtgggctttgataccggtgacgacagactgttcttggtgtctccgttaatcattagtcacgagatcaaccagaaaagtcccttttgggaaatgtctcaagctcagctgcatcaagaagagttcgaagtagtggttattctggaaggtatggtcgaagcgactggaatgacatgtcaggcaaggagctcttatatggatactgaggtgttgtgggggcatcgcttcactcctgtacttaccttagaaaaaggattctacgaggtggattacaataccttccacgacacttatgagaccaacacgccctcctgctgtgctaaggaactggctgaaatgaagcgagagggtcggctcctccagtacctaccatctccccctctgcttggggggtgtgcagaagcgggattggacgcagaagccgaacagaacgaggaggatgagcctaagggactgggcggaagccgggaggccagaggttctgtgtag

SEQ ID NO: 339627 - DNA, 1260 bp, Artificial Sequence
  derived and/or modified sequence
atggccggcgacagccggaacgccatgaaccaggacatggagatcggtgtcacaccttgggacccaaagaagattcccaaacaggctagagattacgtgcccattgcgacggacagaaccaggctcctggcagaaggcaagaagccaagacagagatatatggagaaaagcggcaaatgtaacgttcaccacgggaacgtacaagagacttaccgctatctgagtgatctgtttaccactcttgtggatctgaagtggaggtttaacctgctcgtttttaccatggtttacacagtgacttggctgtttttcgggtttatctggtggttgatagcctacatccgcggggatctcgaccacgtcggggatcaggaatggattccctgcgtggaaaatctctccggattcgtttccgcatttctgttttcgatagaaacagagacaaccattggctacggtttccgggtgataaccgaaaaatgcccagaaggaatcatcctgctcctggtgcaagccattctgggatcaatcgttaatgcctttatggtgggctgtatgttcgtgaaaatatcacagccaaagaaacgggctgaaactttgatgttttctaacaatgcagttattagcatgagggatgagaaactgtgtcttatgttccgggtcggcgaccttcgcaacagccatatcgtggaagcttccatacgagccaaactgatcaagagtaggcaaaccaaagaaggcgagtttattcccctaaatcagaccgacataaacgtaggatttgacaccggagacgaccggctcttcctagtgtccccacttattatctcacatgagattaaccagaagagtccgttctgggaaatgtcacaggcacagctgcatcaggaggaattcgaggtggttgtgatactggagggcatggtggaggctactgggatgacctgtcaggcccggtcatcctatatggatacagaggttttgtgggggcaccgctttacgccggtattgactcttgagaaaggcttttatgaggttgactacaacaccttccacgacacctacgaaaccaacaccccttcatgttgcgctaaagagctggccgaaatgaagcgggaaggtcgattgctgcagtacttacctagcccgccgctgctgggagggtgcgccgaggcggggttggatgctgaagccgaacaaaatgaagaagacgaaccgaaggggctggggggcagtcgggaggctcgaggtagtgtgtag

SEQ ID NO: 339628 - DNA, 1260 bp, Artificial Sequence
  derived and/or modified sequence
atggccggcgacagccggaacgccatgaaccaggacatggagatcggggtgacaccttgggaccctaaaaagattcctaaacaggcccgtgactacgtgcccattgcaaccgatcgcacccgcctgctggccgagggaaagaagccacggcagcgctacatggagaaatctggcaagtgcaacgtccaccatgggaacgtgcaggagacctatagatacctctcggacctatttaccactcttgtggacctgaagtggcggttcaatctcttggtttttaccatggtgtacacagtgacctggctgttcttcggtttcatttggtggctgatcgcatatattcgaggcgacttggaccatgtgggagaccaggagtggattccatgtgttgaaaacttatcaggttttgtgtctgcatttctattttcaatcgaaaccgagacaactatcggttacggttttcgcgtgatcaccgagaagtgtcccgagggaatcattcttctgctggtgcaagctattctggggagcatcgtgaatgcctttatggtcggttgcatgtttgttaagatctcccagccaaagaagagagccgagacgttgatgttttcaaataacgccgtgatctcaatgcgtgacgaaaagctgtgcctcatgttccgtgtaggtgatttgcgtaactcgcacatcgtcgaagcatctatccgagcaaagctgatcaaatcacggcagaccaaagaaggggagtttattcctctgaatcagaccgacatcaatgtgggattcgatactggcgacgacaggctcttcctggtttcaccgctgattatttcccatgaaatcaaccagaagtccccattttgggaaatgagtcaggcacagctgcatcaggaagagtttgaagtagttgtgatcctcgaaggtatggttgaagccaccggcatgacttgtcaagccaggtcctcttacatggatacagaagtattatgggggcatcggtttactcccgtgctaacgctcgaaaaaggcttctatgaagtcgactacaatacattccacgacacttatgaaacaaataccccgagctgttgtgctaaagagctagccgagatgaaaagagaaggtcggctgctccaatacctccccagtccccctctactgggggggtgcgccgaggcaggcctggacgccgaggccgaacaaaacgaggaggatgagccaaagggcctaggcggatcaagggaggctagggggtccgtgtag

SEQ ID NO: 339629 - DNA, 1734 bp, Artificial Sequence
  derived and/or modified sequence
gagagagattgttccagctgctctcgctagagaaagggagtgacccaaggggccgcgagtgaagggacaggatggcttaggtacctctgcccacaggaccccacaacagggagaggttccagctacagctcctccgtggggtcatggcaggggctggggagtcccctcaaaagccctgagcccccctgcaccgccgctaagggacaccccagaagttagcatcagtgggactcggaagctccgatctcaacaaggccagaagctcatagaactttctgaagggagcaggtcatcagccttagcatgagccccggagcatcagtgtctgctggccgttgtgtgcatcccagctatggctggcgattctaggaatgccatgaaccaggacatggagattggagtcactccctgggaccccaagaagattccaaaacaggcccgcgattatgtccccattgccacagaccgtacgcgcctgctggccgagggcaagaagccacgccagcgctacatggagaagagtggcaagtgcaacgtgcaccacggcaacgtccaggagacctaccggtacctgagtgacctcttcaccaccctggtggacctcaagtggcgcttcaacttgctcgtcttcaccatggtttacactgtcacctggctgttcttcggcttcatttggtggctcattgcttatatccggggtgacctggaccatgttggcgaccaagagtggattccttgtgttgaaaacctcagtggcttcgtgtccgctttcctgttctccattgagaccgaaacaaccattgggtatggcttccgagtcatcacagagaagtgtccagaggggattatactcctcttggtccaggccatcctgggctccatcgtcaatgccttcatggtggggtgcatgtttgtcaagatcagccagcccaagaagagagcggagaccctcatgttttccaacaacgcagtcatctccatgcgggacgagaagctgtgcctcatgttccgggtgggcgacctccgcaactcccacatcgtggaggcctccatccgggccaagctcatcaagtcccggcagaccaaagagggggagttcatccccctgaaccagacagacatcaacgtgggctttgacacgggcgacgaccgcctcttccttgtgtctcctctgatcatctcccatgagatcaaccagaagagccctttctgggagatgtctcaggctcagctgcatcaggaagagtttgaagttgtggtcattctagaagggatggtggaagccacaggcatgacctgccaagcccggagctcctacatggatacagaggtgctctggggccaccgattcacaccagtcctcaccttggaaaagggcttctatgaggtggactacaacaccttccatgatacctatgagaccaacacacccagctgctgtgccaaggagctggcagaaatgaagagggaaggccggctcctccagtacctccccagccccccactgctggggggctgtgctgaggcagggctggatgcagaggctgagcagaatgaagaagatgagcccaaggggctgggtgggtccagggaggccaggggctcggtgtgaggggtgcagcctccctaagacctcctgtcactggcttcagtgaacacagacactgcagagcctgggagcaggggaggggaatagttgagtgtgctgtttgggggctcaggagccatcaaggc

SEQ ID NO: 339630 - DNA, 5940 bp, Artificial Sequence
  derived and/or modified sequence
atttgtaccagggacggagggagagaggagagggaggaggggacacacacacacacacacacacacacacacacacacacacacacagagagagagagagagagagagagagagagagagattgttccagctgctctcgctagagaaagggagtgacccaaggggccgcgagtgaagggacaggatggcttaggtacctctgcccacaggaccccacaacagggagaggttccagctacagctcctccgtggggtcatggcaggggctggggagtcccctcaaaagccctgagcccccctgcaccgccgctaagggacaccccagaagttagcatcagtgggactcggaagctccgatctcaacaacatcccagctatggctggcgattctaggaatgccatgaaccaggacatggagattggagtcactccctgggaccccaagaagattccaaaacaggcccgcgattatgtccccattgccacagaccgtacgcgcctgctggccgagggcaagaagccacgccagcgctacatggagaagagtggcaagtgcaacgtgcaccacggcaacgtccaggagacctaccggtacctgagtgacctcttcaccaccctggtggacctcaagtggcgcttcaacttgctcgtcttcaccatggtttacactgtcacctggctgttcttcggcttcatttggtggctcattgcttatatccggggtgacctggaccatgttggcgaccaagagtggattccttgtgttgaaaacctcagtggcttcgtgtccgctttcctgttctccattgagaccgaaacaaccattgggtatggcttccgagtcatcacagagaagtgtccagaggggattatactcctcttggtccaggccatcctgggctccatcgtcaatgccttcatggtggggtgcatgtttgtcaagatcagccagcccaagaagagagcggagaccctcatgttttccaacaacgcagtcatctccatgcgggacgagaagctgtgcctcatgttccgggtgggcgacctccgcaactcccacatcgtggaggcctccatccgggccaagctcatcaagtcccggcagaccaaagagggggagttcatccccctgaaccagacagacatcaacgtgggctttgacacgggcgacgaccgcctcttccttgtgtctcctctgatcatctcccatgagatcaaccagaagagccctttctgggagatgtctcaggctcagctgcatcaggaagagtttgaagttgtggtcattctagaagggatggtggaagccacaggcatgacctgccaagcccggagctcctacatggatacagaggtgctctggggccaccgattcacaccagtcctcaccttggaaaagggcttctatgaggtggactacaacaccttccatgatacctatgagaccaacacacccagctgctgtgccaaggagctggcagaaatgaagagggaaggccggctcctccagtacctccccagccccccactgctggggggctgtgctgaggcagggctggatgcagaggctgagcagaatgaagaagatgagcccaaggggctgggtgggtccagggaggccaggggctcggtgtgaggggtgcagcctccctaagacctcctgtcactggcttcagtgaacacagacactgcagagcctgggagcaggggaggggaatagttgagtgtgctgtttgggggctcaggagccatcaaggctgtggggaggaaccataaacccagccctcacagctcccagcacagggcctccctgagccagtggcatcctgcctgggccccccatggcagtgctgcctcttgtaggtgctggctaagggccaggccaggatgagtttccccatggtgaatgttaccggatggcatctgttctctccatgccctgggtcacttccttttttgggtctcacagacccctccaggggctgacacctagagagaaccatcaccttgtccctcattccttccaccctgaggcttgctgtggactcagagaggagacttacctgatgagagctcaaacctctagtctgggatgagctcacagagccctcatgagttaagatccatccatatcacataggcaattccttttaaatcagataccaacgacccattactgagaggtacagagcgtacagcccttggtgttctctgctgttatctgccaaatgtgtgtgtttttcctctgctgtgttctgtgtgtccagtgtagcctattggagaatcggtctcattagagtgactcttagaaggtggcctgggactagacagcccctctgagcacatgcatagtggcatcagcagcttcctggcctactcccaatcacactgtgccctgcacctcccaccaagggggaaccccagcagctggggcttttcgagtgctttttggcccaagaatctcagagtgcttctaatcatcacagtagtttttgtgttttgttttgttttgttttgttttgttttgttttgttttgtttttttcacaatctcagccagcctgcggtgtgacctggggagaaagttgagtgtcaggggacatgatgagccagttggccctgaaacaggaatggggcaaagagaaaggagagccaggagcatttaaaaatcagcatctgggccaggcaagatggctcacgcctgtgatcccagcattttgggaggccgaggcgggtggatcatgaggtcaggagatcgagaccatcctggctaacacggtgaaaccccgtctctactgaaaatacaaaaaattagccaggcatggtggcaggtgcctgtagtcccagctactcgggaagctgaggcagaagaatggcatgaacctgggaggtggaggttgcagtgagccaagatcatgccactgcactccagcctgggcgacagagcgagactccatctcaaaaaaaaaaaaaacatcagcatctgccccagttgtggccaagacactctgacctcagggctcagcaccttcaccatcaagttcagcctgagccaagctcccagcccactgctgaaaagcccctgggcctccctccacaggcagagttacaaccgggagggctgggcagggagggcagggagattgcctggggaaggcaaagggaatggctgcccctcccaggctggaaacaagagggcaagcggggtcagcaggagaattcgggggcagggtgagtgttaagaaaaaaagagtagagaagagcctgaaaatcagcaacttccagggcttttctgatctggaggcccaagagcaagggtggaggggggcagattgtcaggtcccgaaatgtgtgttgacacacacgggcttcgggttagctggcctgacatggagatagagtgccaatgttcccaggccacagaattatggaggcctcacccacagtattcacagctctcaactggcctttgagaatggaagccttttcctgccctggatatggcgcttcttcctgggagaggagcagagccacagagaggtaggaagttgaggcagagcaaagggaaggcttcagagcttaggcccggttcatctcagaagtgttttctaggcctggggctgaaaggaagaggggtggggcagcctgggacgggaactgcctctgtgggctccccactcccagggaggggctccataagctttgctcctgggctggatcttgagaggtgggcagggtcttcccaccagtggcagggtgtgcagttgtggtcccaagccttggagggaatggggaatgggctggcacccggctcagggaaagcagaagcagacagtgccccagcaggggagctgcatgcccccaggagtctcagaaaggcagcccatcactaaggctggatgcctttcagcagagctacagctggagccctccggctgaggccagcactcgcctgggactccctggaccccagggttactaacagcaaaaccattccacacccccttgccagatctaagcctgtcttaggaccgtcagtgcccccaggttagagctcatgggggtcaactaagcgagggagggaaggcgaaggcaaagctggccttgcacctggacagcggcctggctcctccccacacctgccttcatttatgactctgaaacatcccccacctgaccaagggagccactctccagttctctcactccaccagggccctccgtgagccaggaccaggtcacatctctcagccaagtctagaagctctggctagaggagaggaagcgtgcagagggtcctctgccaaagctccctgcctggcccgagcccgggcatgctgggattagtgcaacaccgccccagtgtgcctcctctgccttctatcatgccagtttaaaagcaagaagactcccccttcacatcctgaggaaatccccttcctggtgaccaactgatgcaatgaaagtttgaaaagttcttcattttctagaagttcttgaataaacatggacttactaaatgcagagtctgatgatggacagagtttcaaggggtcactttcaaaacatttaattaatttatttatgtagagacagggtctcgctctgtcgcccaggctggagtgcagtggtacaacctcagctcactgcaacctctgccacctcccaggttcaagcgattctcatgcttcagcctcctgagtagctgggattacaggcatgagccaccacgcccagccattttcaaaacactgctcctgcatacaaaccactcagaggccactgcccttggttctgtgatggctctgagcccatgccatcacatctgatggaccccagagagctgagccgtggtttaagatggggtcatgcgctggtcattcccacagtcttgagtatctccaaaatcccaaagtgatatttcactttcggaccctgaaagtttggagagctggtttcttgccttaatttaagctctctgagaatgtcccctgtagggagaagcctccaggaactcagaatagaactcgttcccactcattttccttgctccaccaatctgacgcctgacagatgtcaccactgcctgaaggatcctgtccccaggccagggcagaatgggcattgcctttgactctccccttcagactcccctcccaccggcctcctgtgtagtcagagaacccactgcccatcgcctcctgctgctgctttgaggttgaggtcctggcttgagcagttaccttgctggagaagaggagcccctgccatctggggagcactgtccctgctcgtgatctgtaacagtggggcgctttttcacaccccttatctcacggcttgcttccagcccccatcaatcctgtgcctcatgtgaggtgagccccagagaaacttaaattgcttgtactgaagttgccaaaaaccaaaagttgcccgttgtcatttttaagactgtgccctgaacacacctctgcccatgcgccatggagcatgtgttaggtgcctgccgtgggtcaggcacttgattctcaaaacactgccgagaagctcttaccaacgtgacagttgaggctgagagaggttcatgagcttgctcaaggccacgggtagtaataagaggcatggccttggtgccaagtgcctcccaaacaaacagccggggccgtggtcctgcctaaactctcacatccacggcaccacgctgggcccaggcaacagagataaggagagccctggctcttgggatggggtcgcgccgattcacatgctgtgccacggagccccggcttccatccatgatgtgcccctgtggcgggataattgggaaacaacctttttctgattcccagagaactaatgagctgcaaaaagagattagacagggaagaattgctttcggggagaagccacttactcggctcgccttggtttttgctaa

SEQ ID NO: 339631 - DNA, 1350 bp, Artificial Sequence
  derived and/or modified sequence
ggggtgggggtggccttccatcttgtgttctagtgaatcagaacagcccacttcactgatggtgtctttttaactcaaagcatcccagctatggctggcgattctaggaatgccatgaaccaggacatggagattggagtcactccctgggaccccaagaagattccaaaacaggcccgcgattatgtccccattgccacagaccgtacgcgcctgctggccgagggcaagaagccacgccagcgctacatggagaagagtggcaagtgcaacgtgcaccacggcaacgtccaggagacctaccggtacctgagtgacctcttcaccaccctggtggacctcaagtggcgcttcaacttgctcgtcttcaccatggtttacactgtcacctggctgttcttcggcttcatttggtggctcattgcttatatccggggtgacctggaccatgttggcgaccaagagtggattccttgtgttgaaaacctcagtggcttcgtgtccgctttcctgttctccattgagaccgaaacaaccattgggtatggcttccgagtcatcacagagaagtgtccagaggggattatactcctcttggtccaggccatcctgggctccatcgtcaatgccttcatggtggggtgcatgtttgtcaagatcagccagcccaagaagagagcggagaccctcatgttttccaacaacgcagtcatctccatgcgggacgagaagctgtgcctcatgttccgggtgggcgacctccgcaactcccacatcgtggaggcctccatccgggccaagctcatcaagtcccggcagaccaaagagggggagttcatccccctgaaccagacagacatcaacgtgggctttgacacgggcgacgaccgcctcttccttgtgtctcctctgatcatctcccatgagatcaaccagaagagccctttctgggagatgtctcaggctcagctgcatcaggaagagtttgaagttgtggtcattctagaagggatggtggaagccacaggcatgacctgccaagcccggagctcctacatggatacagaggtgctctggggccaccgattcacaccagtcctcaccttggaaaagggcttctatgaggtggactacaacaccttccatgatacctatgagaccaacacacccagctgctgtgccaaggagctggcagaaatgaagagggaaggccggctcctccagtacctccccagccccccactgctggggggctgtgctgaggcagggctggatgcagaggctgagcagaatgaagaagatgagcccaaggggctgggtgggtccagggaggccaggggctcggtgtga

SEQ ID NO: 339632 - DNA, 1260 bp, Artificial Sequence
  derived and/or modified sequence
atggcaggagatagccgaaacgccatgaatcaggatatggagataggggtgacaccttgggatccgaaaaagattcccaaacaagccagggattatgtgcccatcgctacagaccggacacgcttgctggccgaggggaaaaagcccaggcagaggtacatggaaaagagcgggaagtgtaacgtccatcacggcaatgtgcaggaaacttaccggtacctcagcgatctttttacgaccctggtggatctcaaatggcgctttaacctgctcgtctttacaatggtgtatactgtgacctggctatttttcggattcatttggtggttgattgcatatataagaggggatcttgaccacgtcggggatcaggaatggattccgtgcgtggagaatctgagcgggttcgtcagtgcctttcttttctcaatagaaaccgagacaacaataggatatggctttagagtcattacagaaaagtgcccagagggcattatcctgcttctcgtgcaggcgatcctaggtagcatagttaacgccttcatggtcgggtgcatgtttgtgaagatctcgcaacctaagaaacgtgctgagacccttatgttcagtaataacgcagtaataagtatgcgggatgagaagctttgtttaatgtttcgcgtaggagacctcaggaactcccacattgtggaagcctctatcagggctaagctgataaagtctcggcagacaaaagaaggcgagttcatccctctcaaccaaactgacataaacgtgggctttgacaccggagatgataggctcttcctcgttagtcccctgatcatctcacatgagattaatcagaagagcccattctgggagatgtcccaggcacagctccaccaggaggagtttgaggtcgtcgttattctcgaggggatggtggaagccaccggcatgacttgtcaggccagatcaagttatatggatactgaggttctgtggggccaccgattcaccccggtcttaaccctggagaaggggttctatgaggtggactataacacctttcacgatacatacgagactaacacaccttcatgctgcgcaaaggaattagccgaaatgaaacgcgagggtagattgctccagtatttaccatctcccccattgttagggggatgcgcagaagccggacttgatgcagaagcagagcaaaatgaggaggacgagcccaaagggctgggcggaagtcgcgaggcgagaggtagcgtatag

SEQ ID NO: 339633 - DNA, 1260 bp, Artificial Sequence
  derived and/or modified sequence
atggcaggagatagccgtaatgcaatgaaccaggatatggagatcggagtcacgccgtgggatccaaagaagatacctaagcaggcccgtgattacgtacctatagcaaccgatcgcactagattacttgcagaaggcaaaaagcctagacagaggtatatggagaaaagtgggaaatgtaatgtccaccacgggaatgttcaggagacctatagatatctgagtgatctcttcaccactctggtggacctgaagtggcggtttaacttgttggtctttacaatggtgtacaccgtcacatggctgttctttggcttcatttggtggctcattgcctatatccggggtgatctggaccacgtgggagatcaggaatggatcccctgcgtagagaaccttagtgggtttgtaagcgcatttctatttagcatcgagacagagacaaccatcggctatggatttagagtgattacagagaagtgtcccgaaggcatcattctgttgctggttcaggctattttgggatctattgtcaatgcatttatggtggggtgtatgtttgtcaaaatttcccagcccaagaagagggccgaaacgctgatgttcagcaacaatgccgtgatctcaatgcgagatgagaagctctgcctgatgttcagggtgggggacctcagaaactcccacattgtggaagcttctattcgagccaaactgattaagtcccggcaaaccaaggagggagaatttatacccctgaatcagaccgatatcaatgtggggttcgatacaggggacgaccggctgttcttagtaagccccctaataatctctcatgagatcaatcagaagagcccattctgggagatgtctcaggcccagctgcatcaggaggagtttgaggtagttgtgatactcgagggcatggtggaagctacgggcatgacatgccaggccaggagctcttacatggacaccgaggtactctggggacaccgctttacccctgtgttgacattggagaaaggcttctacgaggtggattataataccttccatgatacctatgagactaataccccaagttgctgtgctaaagaactggccgagatgaagagagagggaagactccttcagtaccttccttctcctcccttactcggaggatgtgccgaggccggtctggacgccgaggctgagcaaaatgaggaggatgaaccaaagggactgggtgggtcccgcgaagcacgcggttccgtctag

SEQ ID NO: 339634 - DNA, 1260 bp, Artificial Sequence
  derived and/or modified sequence
atggctggcgatagtcggaacgccatgaatcaagacatggaaattggggtgaccccttgggatcccaaaaaaatcccaaaacaggccagagactacgtgccaattgctaccgacaggactcgtttactcgccgaaggtaagaagcctcggcagaggtacatggagaagagcggaaaatgcaatgtccaccacggcaacgttcaggagacctaccgatacctgtctgacctgtttactaccttggtggatctcaaatggaggttcaatcttctggtgtttaccatggtatacacggtgacttggctattctttgggtttatatggtggctcatcgcttacattcgtggcgatttagaccatgtgggtgatcaggagtggataccttgcgtggagaacctgagcggattcgtgtccgcattcctgttttccattgagaccgaaactactattgggtatgggtttagggtgataaccgaaaagtgcccagaaggaattatcctgcttcttgtgcaagcaattctgggatccattgtgaacgctttcatggtgggctgtatgttcgtcaagattagtcagcctaaaaagcgcgctgagaccctgatgtttagtaacaatgctgtgatctctatgcgggatgagaagctgtgcttgatgttccgcgttggcgatttacgcaactcccacattgtcgaagcaagcatccgcgctaagttaattaagtcccgccaaactaaggagggagagttcatcccactgaaccaaactgacattaacgtggggttcgatacaggtgacgacaggctgtttctcgtctcacccctcatcatctcccacgagatcaaccagaagagcccattttgggagatgagccaggcacagctgcaccaagaggaattcgaggtggttgtgatactcgaaggaatggtggaggccacgggtatgacatgtcaggcccgttcctcttatatggacacagaggtcctatgggggcaccgattcacgccagtcctgacactcgaaaagggattttatgaggtcgattataacacattccacgacacctatgaaactaacaccccctcatgttgcgctaaagaattggctgaaatgaaacgggaaggcaggcttctgcagtatctccccagcccccctctgctgggaggttgcgctgaagccggattggatgccgaagccgagcagaatgaggaggatgaacccaaaggccttggcggatcacgcgaagcccgtgggtcagtttag

SEQ ID NO: 339635 - DNA, 1260 bp, Artificial Sequence
  derived and/or modified sequence
atggccggcgacagcagaaacgccatgaaccaggacatggagatcggcgtgaccccctgggaccccaagaagatccccaagcaggccagagactacgtgcccatcgccaccgacagaaccagactgctggccgagggcaagaagcccagacagagatacatggagaagagcggcaagtgcaacgtgcaccacggcaacgtgcaggagacctacagatacctgagcgacctgttcaccaccctggtggacctgaagtggagattcaacctgctggtgttcaccatggtgtacaccgtgacctggctgttcttcggcttcatctggtggctgatcgcctacatcagaggcgacctggaccacgtgggcgaccaggagtggatcccctgcgtggagaacctgagcggcttcgtgagcgccttcctgttcagcatcgagaccgagaccaccatcggctacggcttcagagtgatcaccgagaagtgccccgagggcatcatcctgctgctggtgcaggccatcctgggcagcatcgtgaacgccttcatggtgggctgcatgttcgtgaagatcagccagcccaagaagagagccgagaccctgatgttcagcaacaacgccgtgatcagcatgagagacgagaagctgtgcctgatgttcagagtgggcgacctgagaaacagccacatcgtggaggccagcatcagagccaagctgatcaagagcagacagaccaaggagggcgagttcatccccctgaaccagaccgacatcaacgtgggcttcgacaccggcgacgacagactgttcctggtgagccccctgatcatcagccacgagatcaaccagaagagccccttctgggagatgagccaggcccagctgcaccaggaggagttcgaggtggtggtgatcctggagggcatggtggaggccaccggcatgacctgccaggccagaagcagctacatggacaccgaggtgctgtggggccacagattcacccccgtgctgaccctggagaagggcttctacgaggtggactacaacaccttccacgacacctacgagaccaacacccccagctgctgcgccaaggagctggccgagatgaagagagagggcagactgctgcagtacctgcccagcccccccctgctgggcggctgcgccgaggccggcctggacgccgaggccgagcagaacgaggaggacgagcccaagggcctgggcggcagcagagaggccagaggcagcgtgtag

SEQ ID NO: 339636 - protein, 197 aa, Artificial Sequence
  derived and/or modified sequence
MSARAPKELRLALPPCLLNRTFASPNASGSGNTGARGPGAVGSGTCITQVGQQLFQSFSSTLVLIVLVTLIFCLIVLSLSTFHIHKRRMKKRKMQRAQEEYERDHCSGSRGGGGLPRPGRQAPTHAKETRLERQPRDSPFCAPSNASSLSSSSPGLPCQGPCAPPPPPPASSPQGAHAASSCLDTAGEGLLQTVVLS

SEQ ID NO: 339637 - DNA, 5884 bp, Artificial Sequence
  derived and/or modified sequence
gaagcggcggcgaaggcggcggcggcggcggcggcggcggcagcagcgcggctcggtctctggtccattcactccacgctttctgcagccgccactgcagccgcgcggcgggggctccctccttgcagccagccggcggtccagcctggtgcctctgcaaaggaaaggggagcgtggagacgtgttcgaggtggtatcggcgaggatctctcgggcgccgctcactccttggtcgccttgcttgccagcagttgctcccttagtccttggctcgctcgcacaccccctcccgctacagggagcagttttgggtggcgtgggctccgtcctcttcttggctggtaggaacggtgtgcccaagaggggaagcctagtgggcctggcccctcccagccccgcgccaatgagtgccagggcgccgaaggagctgaggctggcgttgccgccgtgtctcctcaaccggacctttgcttcccccaacgccagcggcagcggcaacacgggtgcccgcggcccaggcgcagtaggcagcggcacctgcatcacgcaggtgggacagcagctcttccagtccttctcctccacgctggtgctgattgtcctggttaccctcatcttctgcctcatcgtgctgtccctctccactttccacatccacaagcgtaggatgaagaagcggaagatgcagagggctcaggaggaatatgagcgggatcactgcagcggcagccgcggtggcggggggctgccccgacctggcaggcaggccccaacccacgcaaaggaaacccggctggagaggcagccccgggactctcccttctgcgccccttccaacgcctcgtcgttgtcctcttcgtcccctggcctcccgtgccagggtccctgtgctcctccgcctccaccgccagcctccagtccccaaggagcacacgcagcttcctcctgtttggacacagctggcgagggccttttgcaaacggtggtactgtcctgatcgtctagcccctctcgttccccgtcctcgtttccagcatctttgccacccttgcttttttccttcttccttccttttccattttcctctggcccctctttcctcttcctggtttccttacctgccctccccttactcttgtttctcctccgccgaggcactgtgcggtatttgtaaatattgggcgaggaaagtctcggaagaagaaataacgctgataataatactttattaatatttatagtaattattataatactaataacacaatccaagcgcatgacaaatcacataatttctaactgtcaatggaggatgcatcttcccattccaccccgcgctcccctcaattaggaggagaaaccgcacaagctaccaaatatataaaaggcattgattcccggagcaaagggaggggagggggcccggtaatgtacatagctgtcaagttaagatttagtttccttccttcccctctgacccctaagctttcacttttcctttagcttccctttcctccccattcccaccctcagccgggctcaggcaatagtatattataaagaaaatgtctacattaagcaccaggactgcaagaggccatagagaatagtccccggaaagtgtttatgacaggtacccctcgccagtccgcccatttctcaccctttggttaaccattacattttccaggacagagcatttaatttactttttaaaatgaccctcgctggccgagcataagtacgttaaaatctttaaatgagttttttttaaaaagctaacgctttcattccctgccccgcccccacccgtacacctttgacttgtgacattttcaggatttacaaaggatctgggagctgtccagccaggtctggtgctgaagtcgcctcaccgttctgattacttcctctagttgtgaaggcagaggaggggctgttttggaaagtgactattctggcttttggttgggttctttcttctttttctacaatcgagttagcgtgtactattggttttcttattattaaacattgcataagttaccttttttgtaaaaaaaaaaaagtattaggtgatgtgcagtactgaaagtgcagtatctaaccaactagaacgtttgttttatttttagaacaagtgcacctttgttatatatttagtatattggtaccaaatacagaaaaaaactatagttctgtactatgtcctccaaactgtatattattgttcttaatttccagctgttgatataatggttaccactggatgagaaattcagtggtgcagacctggcttctgctgtttccagaagtgttcttttgtaccttattctgtagtagactgttataaaaagatgacacacacgctttattttttcttttgcaaataatagaaaaaacacaaccacagaaacaaacaaataatggatgtgcaagaatgccatctattaaaaacatggttaatatttaaacagtgcctgtagttctccctgcatgcagttaccacctggaggcagtggtgtgtgtgcttgcttgtactgtatgtggttggggatgagactggtggggatgttgggcaatttggatgataagacatgcgaatttcaagaaaagctagatccagtaattacttataggatacaaatgtttgcagcttgtttgtttagttacaaatctgtgcctgcagcaaaagaaaggctctctttctcagtctgtcctaacttcactgaacatacaaaaatactgagaaaaaaagaaagtgagaaaataagataaatattttattattttctaatgccagacaaggccatctatgttagaaatggaagtagtctatagttatttaccaccttgtttcctttggttgaatgacagaagaagccagaagcatattacaatattaattatatgcagtgacatctcttcttggaaatcaagcctttgacagctattcaaatttttggaaaatgtatgaatgaaagtgatctgcaaaaagctctaccaagagagtccttactatcctgcagggtgtaaggcaacagtgcccctatgagcatccctctcccaagcaactcattgttctaaattgtctacttggtccagacatatgtgctcttatccagaggaaacattacctctaatatttttggtcatctattaaattgcccaagctcagtttgcatcttttataaaaataatttaataaacttaattttaatcacccataagataatcacctttcctgaagcacagaagatcatcattgaagcatgccatcttgtaatattaggaagaccaggtataatctttgggtacaatatattaaacaatgaaccagtttttctccagtgccttagtcacttcctagtaataggtaaaagagtgcattaactccctcaggccactagggaatcctgtagtgcatcagagttctacactgtacatcagaatgactaaggcactgtgaagaagaaagtccattgatttttgtagcttaccctcatccagtggtagctctttaataccttattacagaatgacttttggacttgaaatttgaatagaatcagggtcccagaagggagcttcatcatttccaatgagctccaataagtgcatggatattactttctttcccttatttggtgcactttctacagcgaataatttcccattttattaaagcaataagatgttctgttgtgagcagtgctggataacgattccattttcttggtgctgaagctacgcatatgttcttgccttatgaatcatagtatattcaaggcatgcaataataatccccttccaaggagcagcctgtacactctgtgggggtaattatgaaattgtcctacatcatttctccccaaaggaatgcaaggagcaagagaaataaaagcattatgtatattgtaaaacaaatgatctcaatacctctcaacgtgggcacacatctgtaatacacttttattgtgcaactttaaatgtgtgtgcctttctccattaattgactgtagtttaatatttttaatagtgctctgtgtaaagatgatgcagtttgtgagtcagatttcatactgagcttaatatactcaaaacctaagcttccagtggtattacttgtgatttttttatgagatagagaattacatgaaattctagtaatccagtttccacacaaaattatttcaataagcacatatccaagcaatttgtacagaccttgtttaaagcactgcttcttatagggctcaattggcagtctcaggagcttgggatgctaccaacagggcatttaggttttcatttttatgaaacaaaaggcaatctggaaatagctaaatttattttaaggattttattcactgatgtcccgtcaaactaaatgcttcaaacccctatagctacagcttaacttctgcacttgctattcagtattaataaggtggcatgcttgattcttattgtttttaaaaatgagaaaatttggagagagaatactattatgtcaacggtacaagactctgaatcttgaagatgtagatggatataatatttagactttatatacacccatagatatgtatttatatatgcatacgttttgtataaatttacaattgactttttgtattctcttttctgtcattacaagaatgagatggaaaccaaaatagttgttccatcctcttacccaaagaggatactgaaaagtccggtatgtgcatgcacttgtttctctggggtcaaatctgaatgactttctctttaataatgaaaggggagagtcctggttagcttggaaaattggtaattagataagcttcctttcctaggttagtgactcaaatgtagcaatgataataaagttatgaccatatcaatgtggtctaaatatctagatggaaagcaaaaatatccagaagaggtttagggccatctagaccacaaacctggaacctggattgtggtttgatttttttcattttcaacctatatgttgtgtagaaatacaatttatatctgcatagctaaaggtaaagtgaaaatatgaccattatctgtttagtttgagaaatcatttttggataatatggataaattagctttaagaaacttctttgacatctgacttttccaccatttctatctgtatcaattgtattaattagataatggttaaatttttatttttttatcatgtagacatatgctttcatgcttttctgtgggtgaaagttgaacaattgctagctgatattatgtggaagttacaggttaaagtagaaccagaaattttaatataatctgatcaggttccttagtcccattcccatgtgaatctgaactttgaatttgaatctgaaaggcctacttatttgggccattttttgttggaacttgtgattgtaactcacagatgtttcagttcatattagaataaattgcccaatctataagagagtgtttaatcattggaatgaatgtaaatctgattctgatttggttatttatttgataacatttgagaaacagctaatgtggcttgacatcaatacttattaatgtcttcaacctaataatacaattggtgtcatgtatgaatgcttagctgacaataagaatttaatcaactttatttggagacaatgacttatcaaggaggtcctacccatttgtggtagggatatttcccttacagttgtgattacaagggattgtttctatagagagatgaacagcaacaacagtgacaatgatgacaacagaaaaactgacttttgaacttgagtatatccaatagatagaagaaaaaagatattagaattcatggaaattttgttttgcttttctatcaataaaagagttttcttgttaa

SEQ ID NO: 339638 - DNA, 594 bp, Artificial Sequence
  derived and/or modified sequence
atgagcgccagagcccccaaggagctgagactggccctgcccccctgcctgctgaacagaaccttcgccagccccaacgccagcggcagcggcaacaccggcgccagaggccccggcgccgtgggcagcggcacctgcatcacccaggtgggccagcagctgttccagagcttcagcagcaccctggtgctgatcgtgctggtgaccctgatcttctgcctgatcgtgctgagcctgagcaccttccacatccacaagagaagaatgaagaagagaaagatgcagagagcccaggaggagtacgagagagaccactgcagcggcagcagaggcggcggcggcctgcccagacccggcagacaggcccccacccacgccaaggagaccagactggagagacagcccagagacagccccttctgcgcccccagcaacgccagcagcctgagcagcagcagccccggcctgccctgccagggcccctgcgccccccccccccccccccccgccagcagcccccagggcgcccacgccgccagcagctgcctggacaccgccggcgagggcctgctgcagaccgtggtgctgagctag

SEQ ID NO: 339639 - DNA, 594 bp, Artificial Sequence
  derived and/or modified sequence
atgagtgcacgtgcacctaaggaactgcgcttagcactgcccccctgccttctaaaccgtacgtttgcgtccccaaacgcttctggctctggcaatacaggggcacgcggccccggcgccgttggatccggaacctgtattacccaggtgggtcagcagttgttccagtccttcagcagcaccctggtgttgatcgtgctggtgacattgatattttgtctgatagtcttatcactgagcactttccatattcacaagcgtagaatgaaaaaaagaaagatgcagagagcccaggaggagtacgagcgggaccattgttcggggtcacggggcggggggggtctgcctcggccagggcggcaggctcctacacacgctaaggaaaccaggcttgagcggcaacctagggactctccattttgcgccccaagcaacgcctcgtccttgagttcttcgtcaccagggctcccctgtcagggcccttgtgccccccctcctccgccccctgcgtcaagccctcaaggggcccatgctgcaagcagctgtcttgacactgccggtgaaggcctgctgcagacagtcgtattatcttag

SEQ ID NO: 339640 - DNA, 594 bp, Artificial Sequence
  derived and/or modified sequence
atgtctgcccgggcccccaaggagctgcggctggccctgcccccctgcctgctgaacagaacatttgccagccccaatgccagcggcagcggcaacacaggagcccggggccctggagctgtgggcagcggcacctgcatcacccaggtgggccagcagctgttccagagcttcagcagcaccctggtgctgattgtgctggtgaccctcatcttctgcctgattgtgctgagcctgagcaccttccacatccacaagaggaggatgaagaagaggaagatgcagagggcccaggaggagtatgagcgggaccactgcagcggcagcagaggaggcggcggcctgccccggcccggccggcaggcccccacccacgccaaggagacccggctggagcggcagccccgggacagccccttctgtgcccccagcaatgccagcagcctgagcagcagcagccctggcctgccctgccagggcccctgtgcccctcctcctcctcctccagccagcagcccccagggcgcccacgccgccagcagctgcctggacacagctggggagggcctgctgcagacagtggtgctgtcctag

SEQ ID NO: 339641 - DNA, 594 bp, Artificial Sequence
  derived and/or modified sequence
atgagcgcccgggcccccaaggagctgcggctggccctgcccccctgcctcctgaaccgcacattcgcaagtcctaacgcctccggcagtggcaacactggtgcccggggtcctggcgccgtgggctcagggacctgcatcactcaggtgggacagcaactgttccagagcttttcgagcacgttagtactgatcgtgctggtcactcttatcttttgtctcatagtgctgtcactctctacattccacattcataagcggcgcatgaaaaagcgaaagatgcaaagggcccaggaggaatacgagagggaccattgctccggcagtagggggggcggaggtctgcctcggcccgggcgccaggccccaacacacgctaaggagactaggctggagaggcagcctcgggatagcccattttgtgccccatccaacgcttctagtctgagcagttccagcccgggactgccttgccagggaccctgcgcaccccctccgcctcctcccgcttctagcccccagggagcgcatgcagcctcaagttgtctggacaccgccggcgaaggactgctccaaacggtcgtactatcttag

SEQ ID NO: 339642 - DNA, 594 bp, Artificial Sequence
  derived and/or modified sequence
atgagcgcccgagccccaaaagagttgcggttagccctgcctccctgcctgcttaatcgcaccttcgcctcccccaatgcctcgggttctggtaataccggggctcgagggccaggtgcggtcggcagcggcacatgtatcacccaagttgggcagcagcttttccaatcgttctcctccactttggttctgatcgtactggttaccttgatcttttgcttgattgtgttaagcttgtcaactttccatatccataagcgcagaatgaaaaaacgcaaaatgcagcgggcacaggaagagtacgagagggatcactgtagtggttcacgcggaggaggaggactgccacgcccaggccgtcaagcccctacccacgcaaaggagaccagactcgagaggcagcctagagacagtcccttctgtgctccgtccaatgcttcgtctttatcgtcatcaagccctgggcttccttgccaggggccttgcgctccaccccctccgcctcccgcatcctccccgcagggggctcacgccgcttcctcctgtcttgacactgcgggtgaaggcctcctgcagactgttgtgttgagctag

SEQ ID NO: 339643 - protein, 426 aa, Artificial Sequence
  derived and/or modified sequence
MVHFCGLLTLHREPVPLKSISVSVNIYEFVAGVSATLNYENEEKVPLEAFFVFPMDEDSAVYSFEALVDGKKIVAELQDKMKARTNYEKAISQGHQAFLLEGDSSSRDVFSCNVGNLQPGSKAAVTLKYVQELPLEADGALRFVLPAVLNPRYQFSGSSKDSCLNVKTPIVPVEDLPYTLSMVATIDSQHGIEKVQSNCPLSPTEYLGEDKTSAQVSLAAGHKFDRDVELLIYYNEVHTPSVVLEMGMPNMKPGHLMGDPSAMVSFYPNIPEDQPSNTCGEFIFLMDRSGSMQSPMSSQDTSQLRIQAAKETLILLLKSLPIGCYFNIYGFGSSYEACFPESVKYTQQTMEEALGRVKLMQADLGGTEILAPLQNIYRGPSIPGHPLQVFERPYTLTVLLLHLSPEGNLCVIRPRHSRWTITVSVG

SEQ ID NO: 339644 - protein, 415 aa, Artificial Sequence
  derived and/or modified sequence
MVHFCGLLTLHREPVPLKSISVSVNIYEFVAGVSATLNYENEEKVPLEAFFVFPMDEDSAVYSFEALVDGKKIVAELQDKMKARTNYEKAISQGHQAFLLEGDSSSRDVFSCNVGNLQPGSKAAVTLKYVQELPLEADGALRFVLPAVLNPRYQFSGSSKDSCLNVKTPIVPVEDLPYTLSMVATIDSQHGIEKVQSNCPLSPTEYLGEDKTSAQVSLAAGHKFDRDVELLIYYNEVHTPSVVLEMGMPNMKPGHLMGDPSAMVSFYPNIPEDQPSNTCGEFIFLMDRSGSMQSPMSSQDTSQLRIQAAKETLILLLKSLPIGCYFNIYGFGSSYEACFPESVKYTQQTMEEALGRVKLMQADLGGTEILAPLQNIYRGPSIPGHPLQLFVFTDGEVTDTFSVIKEVRINRQKHR

SEQ ID NO: 339645 - DNA, 2361 bp, Artificial Sequence
  derived and/or modified sequence
atggtgcacttctgcggcctgctgaccctgcacagagagcccgtgcccctgaagagcatcagcgtgagcgtgaacatctacgagttcgtggccggcgtgagcgccaccctgaactacgagaacgaggagaaggtgcccctggaggccttcttcgtgttccccatggacgaggacagcgccgtgtacagcttcgaggccctggtggacggcaagaagatcgtggccgagctgcaggacaagatgaaggccagaaccaactacgagaaggccatcagccagggccaccaggccttcctgctggagggcgacagcagcagcagagacgtgttcagctgcaacgtgggcaacctgcagcccggcagcaaggccgccgtgaccctgaagtacgtgcaggagctgcccctggaggccgacggcgccctgagattcgtgctgcccgccgtgctgaaccccagataccagttcagcggcagcagcaaggacagctgcctgaacgtgaagacccccatcgtgcccgtggaggacctgccctacaccctgagcatggtggccaccatcgacagccagcacggcatcgagaaggtgcagagcaactgccccctgagccccaccgagtacctgggcgaggacaagaccagcgcccaggtgagcctggccgccggccacaagttcgacagagacgtggagctgctgatctactacaacgaggtgcacacccccagcgtggtgctggagatgggcatgcccaacatgaagcccggccacctgatgggcgaccccagcgccatggtgagcttctaccccaacatccccgaggaccagcccagcaacacctgcggcgagttcatcttcctgatggacagaagcggcagcatgcagagccccatgagcagccaggacaccagccagctgagaatccaggccgccaaggagaccctgatcctgctgctgaagagcctgcccatcggctgctacttcaacatctacggcttcggcagcagctacgaggcctgcttccccgagagcgtgaagtacacccagcagaccatggaggaggccctgggcagagtgaagctgatgcaggccgacctgggcggcaccgagatcctggcccccctgcagaacatctacagaggccccagcatccccggccaccccctgcagctgttcgtgttcaccgacggcgaggtgaccgacaccttcagcgtgatcaaggaggtgagaatcaacagacagaagcacagatgcttcagcttcggcatcggcgagggcaccagcaccagcctgatcaagggcatcgccagagccagcggcggcaccagcgagttcatcaccggcaaggacagaatgcagagcaaggccctgagaaccctgaagagaagcctgcagcccgtggtggaggacgtgagcctgagctggcacctgccccccggcctgagcgccaagatgctgagccccgagcagaccgtgatcttcagaggccagagactgatcagctacgcccagctgaccggcagaatgcccgccgccgagaccaccggcgaggtgtgcctgaagtacaccctgcagggcaagaccttcgaggacaaggtgaccttccccctgcagcccaagcccgacgtgaacctgaccatccacagactggccgccaagagcctgctgcagaccaaggacatgggcctgagagagacccccgccagcgacaagaaggacgccctgaacctgagcctggagagcggcgtgatcagcagcttcaccgccttcatcgccatcaacaaggagctgaacaagcccgtgcagggccccctggcccacagagacgtgcccagacccatcctgctgggcgccagcgcccccctgaagatcaagtgccagagcggcttcagaaaggccctgcacagcgacagaccccccagcgccagccagcccagaggcgagctgatgtgctacaaggccaagaccttccagatggacgactacagcctgtgcggcctgatcagccacaaggaccagcacagccccggcttcggcgagaaccacctggtgcagctgatctaccaccagaacgccaacggcagctgggacctgaacgaggacctggccaagatcctgggcatgagcctggaggagatcatggccgcccagcccgccgagctggtggacagcagcggctgggccaccatcctggccgtgatctggctgcacagcaacggcaaggacctgaagtgcgagtgggagctgctggagagaaaggccgtggcctggatgagagcccacgccggcagcaccatgcccagcgtggtgaaggccgccatcaccttcctgaagagcagcgtggaccccgccatcttcgccttctag

SEQ ID NO: 339646 - DNA, 2361 bp, Artificial Sequence
  derived and/or modified sequence
atggtgcacttttgcggtctactgaccctacatcgcgagcctgtcccgctcaagtccatttcggtgtccgtcaacatatatgaatttgtggcaggtgtaagtgcaacgcttaactacgagaatgaggaaaaggtgcctctggaagccttctttgtgtttcctatggacgaggactctgccgtgtattcctttgaggccctggtggatggaaaaaagattgtcgctgaattgcaggataagatgaaagcgcgaaccaactacgagaaagcgatatctcaaggtcaccaggccttccttctggaaggagatagctcttcaagggacgtgttttcctgtaatgtcgggaacctgcagcccggatcaaaggccgcggtgacactgaagtacgttcaggaattacccctggaggcagatggcgcgttgagattcgtgcttccggcagttctcaatccgcggtatcagtttagcggcagcagcaaggatagttgtctcaatgtcaaaacaccaatcgtgcccgtcgaggatttgccatacactctgtcaatggtggcaacaatcgatagtcagcatggcatagagaaagtgcaatcaaattgtccactgagccctacagagtacctgggcgaggataaaaccagtgcacaggtaagcctcgctgctggacataaattcgatagagacgtggagttacttatatactataacgaggtccatacccctagcgttgtgctggagatgggcatgccaaacatgaagcccgggcacctaatgggggacccttcagccatggtgagtttttatccaaatattccagaggatcagcccagtaacacctgcggtgaattcatctttctcatggataggagcggatccatgcaatccccaatgagcagccaggacacaagtcaacttaggattcaggcagcaaaggaaacgctgattctcctgctgaaaagcttgcctataggatgttacttcaacatctacggctttgggtctagctacgaagcctgctttcctgaatccgttaagtacacacaacaaaccatggaggaagctctggggcgagtgaagctgatgcaagccgacctcggtggaaccgagattctggccccgctgcagaacatctaccgagggccctcgataccgggccaccccttacaattgttcgtcttcactgacggcgaggtaactgacacatttagcgtgataaaggaggtacgcatcaaccgacagaagcacagatgcttttctttcggcatcggagaaggcacctctacatccctcataaaaggtattgcacgggcgagcgggggtaccagcgaatttatcaccggcaaggacagaatgcaatctaaggctctccgaaccctgaaaaggagtctgcagcctgtggttgaggacgtgtccttatcttggcatcttcctccagggctaagcgcaaagatgctctctcccgagcagacggtcatatttagaggccagagacttatatcttatgctcagcttacaggtaggatgcccgctgctgagaccactggggaggtgtgcctgaaatatacattacaggggaaaacttttgaggataaggttacattccctttacagcccaagcctgacgtgaacctgactatccaccggctggccgccaaaagcttgctccagaccaaagatatgggactcagagagacccctgccagcgacaagaaagacgccttgaacctgtctctagaaagcggtgttattagctctttcacagcattcattgctatcaataaggagctgaacaagccagtgcaggggccactggcccaccgcgacgtccctaggcccatcctgttaggcgcctccgccccccttaaaatcaaatgccaatccggattccgaaaggccctgcacagtgacagacccccctctgcttcccagccgaggggggagctgatgtgctacaaagcaaaaacatttcagatggatgactatagcctctgtggcttgatctctcacaaagaccagcattcccctgggttcggggagaaccaccttgtgcagctaatctatcaccagaatgcaaatggctcatgggatctcaacgaggatttggccaagatcctgggaatgtctcttgaggagatcatggccgcgcaaccagctgaattggtggactcctcaggttgggcaacaatcctcgccgttatttggttacatagtaacggtaaggatcttaagtgcgaatgggagctgctggagaggaaggcggttgcgtggatgagagcgcacgccggctccactatgccgtccgtcgtgaaggccgccataacgtttctgaaatccagtgttgaccctgcaattttcgctttttag

SEQ ID NO: 339647 - DNA, 2361 bp, Artificial Sequence
  derived and/or modified sequence
atggtgcacttctgcggcctgttgaccctgcatcgggagcccgtgcctctaaagtcgatcagcgtgtcagtgaatatttacgaattcgtggctggcgtgagcgctacgcttaactatgagaatgaagaaaaagtgccactagaagccttcttcgttttccccatggacgaagacagtgcagtgtattccttcgaagctttagtggacggtaagaagattgttgcagagctgcaggacaaaatgaaggcaagaacaaattacgaaaaagctatttctcaaggccaccaggcttttctgctggaaggagactccagttctagggacgtattcagttgtaatgtcggtaatctgcagcctggatccaaggctgcagtgactctcaaatacgtgcaagaactccccctggaagcggatggggctttgcggtttgtactcccagctgtcctgaaccctcgatatcaattttctggttcatctaaagacagttgtctaaacgtcaagactcctattgtcccagttgaggatctgccctacaccctatctatggtggcgacaatagacagccagcacggtattgaaaaagtacaatctaattgtcctttgtctcctactgagtaccttggggaagacaagactagtgctcaggttagcctggcggccggccacaaatttgatcgggatgtggaactgcttatctattataacgaagtccacacgccatcggttgtccttgagatgggaatgccaaacatgaagcccggtcacttgatgggagacccatcagctatggtgtcattttaccctaatatacccgaagatcaaccatcaaacacttgcggagagtttatctttctgatggacaggagcggttctatgcagagccccatgagctctcaggatacttctcagctgaggatacaggctgccaaggaaacccttatcttactattaaagtccctgcccattggctgttacttcaatatatatggcttcggttcaagctacgaggcctgcttcccggagtccgtgaagtatacacaacagacaatggaagaagccttggggagggtcaagctgatgcaagccgacctgggaggaacagaaatcctggctcctctgcagaacatctaccggggcccaagcattcccggtcaccctctgcagctgttcgttttcacggatggcgaggtgacagatactttcagtgtcatcaaggaggtcaggatcaatagacagaagcaccgatgctttagcttcggcataggagaaggtacttccacaagcctgataaagggcattgcccgggcgagtggcggaacctccgaatttatcacaggtaaagaccgcatgcagagcaaagcactccggacactgaagcgctctcttcaaccggttgtcgaagatgtctcactgtcatggcacctgccacctgggctttctgcaaagatgctgagccccgagcagactgttatcttcagagggcaaagactaatatcctatgcccagctgacggggcgcatgcccgctgctgagactactggcgaggtttgcctgaaatacacactgcaaggtaagacgttcgaggacaaagtcacctttccgttgcagcccaagcctgacgtcaaccttaccatacatcggttggccgccaagagtcttcttcagacaaaggacatgggtctcagggaaacaccagcatccgataaaaaggatgctcttaatctgtcccttgagtccggggtcatttcctcatttacagccttcattgcaatcaacaaagagctgaataaaccagtccaggggcctcttgcacacagagacgtacctcggcccatactactcggcgcatcagccccacttaagatcaaatgtcagtctgggtttaggaaggccctccactcagatcgaccaccttctgccagccagccgcgtggtgagctgatgtgctataaagccaaaacatttcagatggatgattatagcttgtgcgggttaatatctcacaaagaccagcactctccaggctttggtgagaaccacctcgttcagctgatctaccatcagaacgccaacggatcttgggatttgaacgaagacctggcgaaaattcttggcatgagtctggaggagattatggctgcccaaccggccgaactggtggatagcagcggttgggcaactatcctcgcggtgatctggctgcattccaacggtaaggacctgaaatgtgagtgggagttgctggagcgcaaagctgttgcttggatgcgcgcccatgctggctcaacgatgccatccgtggtgaaggccgccatcacttttttgaaatcctccgtggatccggcgatctttgctttttag

SEQ ID NO: 339648 - DNA, 2361 bp, Artificial Sequence
  derived and/or modified sequence
atggtgcacttctgtggcctgctgaccctgcaccgggagcctgtgcccctgaagagcatctctgtgtctgtgaacatctatgaatttgtggccggcgtgtctgccaccctgaactatgaaaatgaggagaaggtgcccctggaggccttctttgtgttccccatggatgaagattctgctgtgtacagctttgaggccctggtggatggcaagaagatcgtggccgagctgcaggacaagatgaaggcccggaccaactatgagaaggccatcagccagggccaccaggccttcctgctggagggggacagcagcagcagagatgtgttcagctgcaatgtgggcaacctgcagcccggcagcaaggctgctgtgaccctgaagtatgtgcaggagctgcccctggaggctgatggagccctgcgctttgtgctgcctgctgtgctgaacccccgctaccagttcagcggcagcagcaaggacagctgcctgaatgtgaagacccccatcgtgcctgtggaggacctgccctacaccctgtccatggtggccaccatcgacagccagcacggcatcgagaaggtgcagagcaactgccccctgagccccacagagtacctgggggaggacaagaccagcgcccaggtgtccctggccgccggccacaagtttgacagagatgtggagctgctgatctactacaatgaggtgcacaccccatctgtggtgctggagatgggcatgcccaacatgaagccaggccacctgatgggagaccccagcgccatggtgtccttctaccccaacatccctgaggaccagcccagcaacacctgtggggagttcatcttcctgatggacagaagtggctccatgcagagccccatgagcagccaggacaccagccagctgcgcatccaggccgccaaggagaccctcatcctgctgctgaagagcctgcccatcggctgctacttcaacatctacggcttcggcagcagctatgaggcctgcttccctgagagcgtgaagtacacccagcagaccatggaggaggccctgggccgggtgaagctgatgcaggccgacctgggcggcacagagatcctggcccccctgcagaacatctaccggggccccagcatccctggccaccccctgcagctgtttgtgttcacagatggagaggtgacagacaccttcagcgtcatcaaggaggtgcgcatcaaccggcagaagcaccgctgcttctcctttggaattggagagggcaccagcaccagcctcatcaagggcatcgcccgggccagcggcggcaccagcgagttcatcaccgggaaggacaggatgcagagcaaggccctgcggaccctgaagaggagcctgcagcctgtggtggaggatgtgtccctgtcctggcacctgcccccaggcctgagcgccaagatgctgagccctgagcagaccgtcatcttccggggccagaggctcatctcctatgcccagctgaccggccgcatgcctgctgctgagaccactggagaggtgtgcctgaagtacaccctgcagggcaagacctttgaggacaaggtgaccttccccctgcagcccaagccagatgtgaacctgaccatccaccggctggccgccaagagcctgctgcagaccaaggacatgggcctgcgggagaccccagccagtgacaagaaggatgccctgaacctgagcctggagagcggggtcatcagcagcttcaccgccttcatcgccatcaacaaggagctgaacaagcctgtgcagggccccctggcccacagagatgtgccccggcccatcctgctgggcgccagcgcccccctgaagatcaagtgccagagcggcttcaggaaggccctgcacagcgacaggcctccttctgccagccagcccagaggagagctgatgtgctacaaggccaagaccttccagatggatgactacagcctgtgtggcctcatcagccacaaggaccagcacagccctggctttggagagaaccacctggtgcagctgatctaccaccagaatgccaacggctcctgggacctgaatgaagacctggccaagatcctgggcatgagcctggaggagatcatggccgcccagcctgctgagctggtggacagcagcggctgggccaccatcctggccgtcatctggctgcacagcaatggcaaggacctgaagtgtgagtgggagctgctggagaggaaggctgtggcctggatgagggcccacgccggcagcaccatgcccagcgtggtgaaggccgccatcaccttcctgaagagctctgtggaccctgccatctttgccttctag

SEQ ID NO: 339649 - DNA, 2361 bp, Artificial Sequence
  derived and/or modified sequence
atggtgcacttctgcggcctgctgaccctgcaccgggagcccgtgcccctaaaaagtatctctgtgagcgtgaacatttacgaattcgtcgctggagtgagcgcaacactaaattatgagaacgaggaaaaggtacccttggaggctttttttgtattccctatggacgaagatagtgcagtctattcattcgaggccttggtcgatggcaaaaagatagtcgctgagctgcaggataaaatgaaagcacggaccaattatgaaaaagccatcagccaagggcaccaagcatttttattggaaggcgacagttctagtcgcgatgttttttcctgtaacgtcggtaacctccaacccggatcaaaggctgccgtcacactgaagtatgtgcaggagctgcctttggaggcagatggggctctgcgattcgtcctccccgccgttcttaaccccaggtaccagttctccggctcaagtaaggactcctgcctcaacgtcaagacacccatcgttcctgtggaggaccttccatacacactctcaatggtcgccaccatcgatagtcagcatggcatcgagaaagtgcagagcaactgtcccctgagtccgaccgagtatctgggggaggacaagacctctgcgcaggtgtcactggcagccggccacaagttcgatagggacgtggagttacttatttactacaacgaggtacatactccctccgtagtgctggaaatgggaatgcctaacatgaaacctgggcaccttatgggagatccttctgcaatggtgtctttttaccccaatatccctgaagatcagcccagtaacacttgcggggaatttatctttctgatggatcgttccgggagcatgcagagtcccatgagctcccaggatacttcccagcttagaattcaggcagccaaggaaacgctaatcttactgctaaagtctttgccaatcggctgttacttcaatatatatggattcggcagcagctatgaggcctgctttccggagtccgtgaagtacacccaacagactatggaggaggccctcggccgcgttaaactcatgcaagctgacttgggcggcactgagatcttggcaccactgcagaacatttataggggcccgagcattcctgggcacccattgcagctcttcgtttttacagacggcgaggttaccgacacctttagtgtgatcaaggaggtgcgaattaaccggcagaagcaccgctgttttagttttggaattggcgaaggaacatccacatctctgatcaagggaatcgcccgcgccagcggcggcacatcagaatttattactggcaaggaccggatgcagagtaaggctctgcgtacactgaagagatctctacaacctgtagtggaggacgtcagcctgtcctggcacttgccccccggcttatccgctaaaatgctttcaccagaacagactgtgatttttcgggggcagcggctgatatcctatgcacagctaacggggagaatgcccgcagctgagactacaggtgaggtgtgtcttaagtacacactccaagggaaaacctttgaagataaagtgaccttccccctccagccgaaacccgatgtgaatctgactatccatcgcttagccgctaaatctctgctgcagacaaaagacatgggcctacgtgagacccccgcatccgataaaaaggatgcactcaatctatcgctggagtcaggggtaatctccagctttacagcattcattgccatcaacaaggagctgaataaacccgtccaggggccgttggcccatagagacgttcctcggccgatacttctgggcgcatcagcccccttaaagatcaagtgtcagtcaggtttccggaaggctctccatagtgaccgacccccatccgcctcccagcctagaggggaactgatgtgttataaagcaaaaaccttccaaatggatgactacagcttgtgcggattaatcagtcacaaagaccagcactcgccaggctttggggaaaaccacctggttcagttaatttatcatcagaatgcaaacggcagctgggacctcaatgaagacctggccaagatcctgggtatgtctctggaagagatcatggcggcccagcctgccgagctcgtggattcatcaggctgggccacaattttagcagtgatatggctgcacagcaacggcaaggacttaaagtgtgaatgggaacttctcgaacgtaaagccgtggcttggatgcgcgctcatgccggctccaccatgcccagcgtggtgaaggcagccattacattcttgaaaagttctgtggaccctgcgatattcgccttctag

SEQ ID NO: 339650 - DNA, 2361 bp, Artificial Sequence
  derived and/or modified sequence
atggtgcacttctgcggcctgctgaccctgcaccgggagcccgtgccactcaaatccattagtgtgtccgtcaacatctatgagtttgttgccggggtcagcgccaccctgaattacgagaacgaagagaaagtaccccttgaggcattcttcgtgttcccaatggatgaagacagcgctgtgtattcctttgaggccctggtcgacggaaagaagattgtcgctgaactccaggacaagatgaaagctagaaccaactatgaaaaggcgatcagccaaggccatcaggcctttttactcgagggggatagttcatccagggacgtgttctcgtgcaacgttggcaatcttcagcctggctccaaggctgcagtgaccctaaagtatgtacaagagctgcctctcgaggccgacggagcgctgcgcttcgtgctgccagccgtcctcaaccctcggtatcagtttagcggcagttccaaagatagttgtctgaatgtgaaaactcctatagttcccgtggaggacctgccctatactctttcaatggtagcgacgattgatagtcagcacggcatagagaaggtgcagtctaactgcccactaagtcctacagagtacctgggagaagacaagactagcgcccaggtgagcttggccgcagggcacaaatttgatagagacgtagagctcctgatatactacaacgaagtacatacaccctctgttgtgctagagatggggatgcccaatatgaaacccggccacttgatgggcgacccaagtgccatggtgagcttctatccgaatatccccgaggatcaaccgtccaacacatgtggtgaatttatcttccttatggatcgaagcggatctatgcagtcccccatgtccagccaggacaccagtcagctgaggatccaggccgctaaggagaccctgatcctcctcttaaagtcccttccgatcggctgttattttaacatttatgggtttgggtcaagttatgaggcttgcttccccgagagcgtgaagtatacgcagcaaacaatggaagaagcgttgggccgtgtaaagctgatgcaggccgaccttggcggcacggagatcctcgcacccttgcagaacatatacagaggaccatcaattccaggccacccccttcagctgtttgtgttcacagatggcgaggtgacagacaccttctccgtgattaaagaagtaagaattaatcgtcagaagcaccggtgcttcagctttggcattggagagggtacctctacctccctgattaagggcatcgcgagagccagcggcggcacgtccgagttcattactggaaaggataggatgcagtccaaagccctgagaacattgaaacgttcacttcagcctgtggtcgaggatgtctccttatcctggcacctgccaccgggcctgtcagcgaaaatgctgagcccagagcagacggtgatctttcgcggccagcggctcatctcatatgcccagctgaccggaagaatgcctgccgccgaaacgacaggcgaagtgtgcctaaaatatacactccaggggaagacatttgaagataaggtcacctttcctctccagccaaaacctgacgtgaacctgacaatccatcgactcgcagctaaatctcttttacaaactaaagatatgggtttgagagaaacacctgcttcggacaagaaggacgctttgaatctgagcctcgagtcaggcgtcatctcttctttcactgccttcattgcgatcaataaggagctgaataagcccgtgcagggacctctagcacatcgagacgtaccaagacccattctcctgggtgcctccgcgccgctcaaaatcaagtgccagagtggattcagaaaggctctacattccgacaggccgcccagcgcgtcacagcccagaggcgagctgatgtgttacaaggctaaaacctttcagatggacgattattctctctgtggcctgattagtcataaggatcagcacagccccggattcggcgaaaatcacctggttcagcttatttatcatcagaacgcaaatggatcatgggatctgaacgaggatctggcaaaaattctgggcatgtctctagaagaaatcatggccgcccaacccgcagaattggttgactcgtctggctgggccacaattctggccgtgatttggctccactcgaatggaaaagatctgaagtgtgaatgggagctgctcgaaaggaaggccgttgcatggatgagggcacatgcgggaagcaccatgcctagcgtcgtgaaagctgctatcacctttctaaaaagcagcgtcgaccccgccattttcgcgttctag

SEQ ID NO: 339651 - DNA, 2361 bp, Artificial Sequence
  derived and/or modified sequence
atggtccacttctgtggcctcttaactctgcaccgggagccggttcctcttaagagcataagcgtctcggttaacatctacgagttcgtggccggagtaagtgcgactctcaattatgaaaatgaggaaaaagtgccacttgaagcgttctttgtgttccccatggatgaggattctgcagtgtacagcttcgaggccttggtcgatgggaaaaagatcgttgccgaattgcaggacaaaatgaaagcccgtactaattatgaaaaggccatctctcaggggcaccaggcttttcttctagaaggtgactcaagttcccgtgatgtgttttcatgcaacgtgggcaacttacagcctgggtcaaaagccgcagttacactaaagtacgtacaggagctcccactggaggctgacggcgctttgagatttgttctgcccgcagtgctcaatcctcggtaccaattcagtggaagcagtaaggattcatgcctaaacgtcaagacccccatagtgcccgtcgaagacctgccgtataccctgagtatggtggccactatcgacagtcagcacggaatcgaaaaggtacagagcaattgtccactcagtcctacagagtatttgggagaagataaaactagtgcccaggtgagccttgccgcaggccataaatttgatagagacgtggaactgcttatatactacaatgaggtccacacccccagcgtggtcctcgaaatggggatgcctaacatgaagcctggtcacctgatgggagacccttccgctatggtaagtttctatcctaacatacccgaagatcaaccttcaaacacgtgcggcgaatttatcttcttaatggaccgtagcggatctatgcaaagcccaatgtcatcccaggatacttctcagctgcgcatccaggccgctaaagaaactctgatacttctcctgaagtcgctgcctatcgggtgttacttcaacatttatggctttggatcttcgtacgaggcgtgtttcccagagtctgtcaaatatacccagcagaccatggaagaagccttaggcagagttaaactgatgcaggctgacttgggaggcacagagatactcgcacccctgcagaatatctaccgtgggcctagtatccccggtcacccactccagctgttcgtattcacggacggagaggtgactgacacttttagcgtgatcaaggaagtgcggatcaaccggcagaagcacaggtgcttctcatttggcattggcgagggaaccagcacaagcctcattaagggcatcgccagagcatctggaggaacgtccgaattcattacaggcaaggataggatgcaatccaaagcactgcggacccttaaacggagcctccagccagttgtcgaggatgtgagcttgtcttggcacctgccacctgggttatccgcaaagatgctgtccccagaacagacagtaatttttcgcggacagcggcttatcagctacgcccagctgactggaaggatgccagccgcagaaacaaccggggaggtgtgtttaaagtacactttacagggcaagacatttgaagacaaggtcaccttcccattgcagccaaaacccgacgttaatctgaccattcaccggctggccgctaaaagtttactgcaaacaaaagacatgggactcagggaaactccagccagcgacaaaaaagatgcactgaacctgagtctggagtccggcgtaatatcaagctttacggcgtttatcgctattaacaaggaactaaacaagccagtccagggaccactggcacacagggacgtccctaggcccatcctactcggggcttccgccccattgaagataaaatgccagagcgggttccgaaaagctctccactcagacaggccgccatccgcaagtcagccgcgaggagagttgatgtgttacaaggccaagacattccagatggatgactactcgctgtgcggtctcataagtcacaaagatcagcactctcctgggtttggtgagaatcacctggtgcagttgatttatcaccagaatgctaacggttcatgggatttgaacgaggacttggcaaaaatcctgggcatgtctctggaagagatcatggccgcacagcccgctgagctcgtagactcatcgggatgggctaccatcttggctgtcatttggttgcactcgaatggcaaggatttgaaatgtgaatgggaacttctggagagaaaagctgtagcctggatgagagcccatgcaggcagcaccatgccctccgttgtgaaggcagccatcactttcttaaagagcagcgtggacccagctatattcgcattctag

SEQ ID NO: 339652 - DNA, 2361 bp, Artificial Sequence
  derived and/or modified sequence
atggtgcatttctgtggcctgcttaccctacaccgtgaaccagtcccactgaagtcaatctcagttagtgtcaatatctacgaatttgtagccggagtgtcagccactctgaactacgagaacgaagagaaagttcctctggaggcctttttcgtcttccccatggatgaggactccgctgtgtactcctttgaggcactggttgatgggaaaaagattgtcgcagaactacaagacaaaatgaaagccagaaccaactatgaaaaagcaatttcacaggggcaccaggctttcctgcttgaaggggacagtagcagcagagatgttttcagctgtaatgttgggaacttgcaaccagggtccaaggccgctgtgactcttaagtacgtgcaggagttacctttggaggccgacggcgctttacgatttgtgctgcccgcagtcctgaatcccaggtatcagttctctggttcatcaaaggacagctgtttaaacgtgaaaaccccaatcgttcctgtagaggacctgccatacactctgagcatggtcgccaccatcgatagccagcacggcatcgaaaaagttcagtctaattgtcctttgagtcctacagagtacctcggtgaggacaagacgtcggcccaagtctctctggctgcgggacacaagtttgatagagatgttgaactcctcatatattataacgaggtgcacaccccttccgtcgtgctggagatgggcatgcccaatatgaaacctggacacctcatgggcgaccctagtgccatggtgtctttttatccaaacattcctgaggaccagccttctaacacatgtggggagtttatctttctgatggaccgatccgggtcgatgcagtcacctatgtcttcacaggatacttcacaacttcggatccaggctgccaaagaaaccctcatactgctcctcaagagtctgcctattgggtgttattttaatatctacggctttggcagctcatacgaggcttgttttcccgagagtgtgaaatacactcagcagactatggaggaagccctgggcagagtcaagttaatgcaagctgatctgggcggaacagaaattctggcacctttgcagaatatctacagagggcctagtattccaggtcatcctctgcagctgtttgtgttcaccgatggtgaggttacagacacattttccgtgatcaaagaagtcaggattaatagacagaagcaccgctgttttagcttcggaatcggtgaaggtacatccacctctctgataaaggggattgctcgggctagcggcggaacctctgagttcataacgggcaaagaccgcatgcagagtaaggcactgcgcacccttaagcgatctttgcagccggtagtggaggatgtctccttatcatggcatctgccacctggactgtctgccaagatgctctctcccgaacagacggtgatcttccggggtcagaggcttattagctacgctcagctgactggtaggatgccagcagcagagactacaggagaggtttgcctcaagtatacactacagggcaagacatttgaggacaaggtcacgtttccactccagccaaagcccgacgtaaatctgactatccacaggctggccgctaaatctctgctgcagaccaaagatatggggctgagggaaactcctgcgtccgacaagaaggacgccctaaacctttcccttgaaagcggggtgatttcctcttttaccgccttcatagcgatcaataaagaactgaataagcccgtgcagggacctctggctcacagggacgtgcctagacctatcctcctgggtgccagtgcacctctcaaaatcaaatgccagtccggctttcgcaaagctcttcactctgatagacctccatctgcctcccagcctagaggcgaactgatgtgctacaaggccaaaacttttcagatggatgactatagtctgtgcggactcatatctcataaggaccagcattctccgggtttcggagagaatcatctcgtacagctgatctatcaccaaaacgctaatggcagttgggaccttaatgaagacctcgccaagattctgggcatgagcctcgaggaaattatggcagcacagccggctgagctggttgacagctcagggtgggccaccattctggcagtgatctggctgcattctaacggaaaggatctgaagtgtgagtgggagctgctggagcggaaagccgtggcctggatgcgcgctcacgcaggcagcactatgccaagcgtcgtcaaagctgccatcacttttctgaagtctagcgtcgatccagccatctttgcattttag

SEQ ID NO: 339653 - DNA, 3419 bp, Artificial Sequence
  derived and/or modified sequence
cggttctttccggaaattatgactgcagctgttttcactccgctgtgactcagagcgctccgggctgcaggagaggaagaaatcttgcatcaccatggtgcacttctgtggcctactcaccctccaccgggagccagtgccgctgaagagtatctctgtgagcgtgaacatttacgagtttgtggctggtgtgtctgcaactttgaactacgagaatgaggagaaagttcctttggaggccttctttgtgttccccatggatgaagactctgctgtttacagctttgaggccttggtggatgggaagaaaattgtagcagaattacaagacaagatgaaggcccgcaccaactatgagaaagccatctcccagggccaccaggccttcttattggagggggacagcagctccagggatgtcttctcttgcaatgtgggtaacctccaacctgggtcgaaggcggcagtcaccctgaagtatgtgcaggagctgcctctggaagcagatggggctctgcgctttgtgctcccagctgtcctgaatcctagataccagttctctgggtcgtctaaggacagttgccttaatgtgaagactcctatagtccctgtggaggacctgccctacacactcagcatggtcgccaccatagattcccagcatggcattgagaaggtccaatccaactgccccttgagtcctaccgagtacctaggagaggacaagacttctgctcaggtttccctggctgctggacacaagtttgatcgggacgtggaactcctgatttactacaatgaggtgcatacccccagcgtggttttggagatggggatgcctaacatgaagccaggtcatttgatgggagatccatctgcaatggtgagtttctatccaaatatcccagaagatcaaccatcaaatacctgtggagagtttatctttctcatggaccgctcgggaagtatgcagagccccatgagtagccaggatacatctcagctgcgaatacaggcagccaaggaaacactgattttgctgctgaagagtttacctataggctgttatttcaacatctatggatttggctcttcctatgaggcatgctttccggagagtgtgaagtacactcagcaaacaatggaggaggctctggggagagtgaagcttatgcaggccgacctagggggcactgaaatcttggcaccactccagaacatttacaggggaccctccatcccaggccaccccctacagctttttgtctttacagatggagaagttacagacacgtttagtgtaattaaagaagttaggatcaacagacagaaacacaggtgtttctcatttggtattggagaaggcacctccaccagcctaataaaaggtattgcccgggcatcagggggcacctcagaatttatcacaggcaaagacaggatgcagtccaaggctctcaggactctgaaacgctctctgcagcctgtggtagaggatgtctctctgagctggcatttgcctcctggtctgtctgctaaaatgctttccccagaacagactgtcatctttaggggtcagagattaatcagctatgcccagctgaccgggaggatgccagcagcagagacaacaggagaagtatgcctcaaatatacactccagggcaagacttttgaggataaggtgacatttcctctacaacccaagcctgatgtcaacctcaccattcaccgccttgctgccaagtccttgctccagaccaaggacatgggcctcagggagactccagcaagtgataaaaaagatgcattgaaccttagccttgagtctggtgtcataagctccttcacagctttcattgctatcaataaggagctcaacaagccggttcaggggcctctggctcatagggacgtcccaaggccaattctgttgggtgcttctgccccattgaagataaaatgccaatcaggttttcgaaaggccttacactctgaccgtcctccttctgcatctcagcccagaggggaacttatgtgttataaggccaagacattccagatggacgattacagtctctgtgggttgataagtcacaaggaccagcacagtccaggctttggagagaatcaccttgtgcagctgatttaccaccaaaatgcaaatggttcctgggatctgaatgaagatctagccaagatcctaggtatgagtttggaagaaataatggctgcacagcctgccgagcttgtggattcctcaggctgggccaccatcctggccgtgatctggctgcacagcaatggtaaggacttgaagtgtgaatgggagcttctggaaaggaaggccgtggcctggatgcgtgcccatgcaggctccaccatgccttcggttgtgaaagctgctattactttcctgaagtcatctgtggatcctgctatctttgccttttgaagataccatccagaaaaagaagtgcctttaatttgctactgtcatttcctctagtatcacttttgctgtgatgatgtgttcttgtgtattataactctttattttttgccataaaagtaaaggatgcttactccacttcgcttctctgctccaggttcactttggatatgatctttcttttcccaacatatgccctcagaaaagtgacagtggtcccagaacctattccctttcttgagggagttcaaaacattcataggcagtaatgttcctcccagggtttccagggaaacaacatgaaaaacaggtgacatgaactacagactaaagattgcagcatttatgttagagaatgcttgaattagagaattttctgcattatctttgtctgttcactttctatcttatatacttatcagggccatactggtaagcttgcgtaggaggagttagagggaagttgaaagccaacatctggatcaatgtaatgtcaagatcacaaagacagagactgcaggggtccactgtgagaggtgacactgttggggaccttcctgattcattcttcttgggctttgctagcctgtacaacctacatgtcttttcttccactgcctgaaagacttgggttgaactataactgttggagagagatgttcctctttaatcatgaaacaccttaagaagtctataatgcaatccttagtcctaccctgaacctatgtgtcctctaagtcaggccctgatctagtgcagtaaagggaagggtgggcttaatgggagctttgcctgggacctgaacctggagcacttaccgcattaggaagaaaggagctccccgtaatcgttcctgacccttgtgtctcatataccctatcctggtggaaatgaccctatttgatatgctgtcccttaaaataacttgtatcaatattaaaatgactatttctaccctttgatgagt

SEQ ID NO: 339654 - DNA, 4388 bp, Artificial Sequence
  derived and/or modified sequence
agtcttgtagtcgctactttataaccggtccctagaagggggcggttctttccggaaattatgactgcagctgttttcactccgctgtgactcagagcgctccgggctgcaggagaggaagcccagcctgttctaccagagaacttgcccaggtcagaggtctgcgtagaagcccttttctgagcatcctctcctctcctcacacctgccactgtcctctgcgttgctgtcgaattaaatcttgcatcaccatggtgcacttctgtggcctactcaccctccaccgggagccagtgccgctgaagagtatctctgtgagcgtgaacatttacgagtttgtggctggtgtgtctgcaactttgaactacgagaatgaggagaaagttcctttggaggccttctttgtgttccccatggatgaagactctgctgtttacagctttgaggccttggtggatgggaagaaaattgtagcagaattacaagacaagatgaaggcccgcaccaactatgagaaagccatctcccagggccaccaggccttcttattggagggggacagcagctccagggatgtcttctcttgcaatgtgggtaacctccaacctgggtcgaaggcggcagtcaccctgaagtatgtgcaggagctgcctctggaagcagatggggctctgcgctttgtgctcccagctgtcctgaatcctagataccagttctctgggtcgtctaaggacagttgccttaatgtgaagactcctatagtccctgtggaggacctgccctacacactcagcatggtcgccaccatagattcccagcatggcattgagaaggtccaatccaactgccccttgagtcctaccgagtacctaggagaggacaagacttctgctcaggtttccctggctgctggacacaagtttgatcgggacgtggaactcctgatttactacaatgaggtgcatacccccagcgtggttttggagatggggatgcctaacatgaagccaggtcatttgatgggagatccatctgcaatggtgagtttctatccaaatatcccagaagatcaaccatcaaatacctgtggagagtttatctttctcatggaccgctcgggaagtatgcagagccccatgagtagccaggatacatctcagctgcgaatacaggcagccaaggaaacactgattttgctgctgaagagtttacctataggctgttatttcaacatctatggatttggctcttcctatgaggcatgctttccggagagtgtgaagtacactcagcaaacaatggaggaggctctggggagagtgaagcttatgcaggccgacctagggggcactgaaatcttggcaccactccagaacatttacaggggaccctccatcccaggccaccccctacagctttttgtctttacagatggagaagttacagacacgtttagtgtaattaaagaagttaggatcaacagacagaaacacaggtgtttctcatttggtattggagaaggcacctccaccagcctaataaaaggtattgcccgggcatcagggggcacctcagaatttatcacaggcaaagacaggatgcagtccaaggctctcaggactctgaaacgctctctgcagcctgtggtagaggatgtctctctgagctggcatttgcctcctggtctgtctgctaaaatgctttccccagaacagactgtcatctttaggggtcagagattaatcagctatgcccagctgaccgggaggatgccagcagcagagacaacaggagaagtatgcctcaaatatacactccagggcaagacttttgaggataaggtgacatttcctctacaacccaagcctgatgtcaacctcaccattcaccgccttgctgccaagtccttgctccagaccaaggacatgggcctcagggagactccagcaagtgataaaaaagatgcattgaaccttagccttgagtctggtgtcataagctccttcacagctttcattgctatcaataaggagctcaacaagccggttcaggggcctctggctcatagggacgtcccaaggccaattctgttgggtgcttctgccccattgaagataaaatgccaatcaggttttcgaaaggccttacactctgaccgtcctccttctgcatctcagcccagaggggaacttatgtgttataaggccaagacattccagatggacgattacagtctctgtgggttgataagtcacaaggaccagcacagtccaggctttggagagaatcaccttgtgcagctgatttaccaccaaaatgcaaatggttcctgggatctgaatgaagatctagccaagatcctaggtatgagtttggaagaaataatggctgcacagcctgccgagcttgtggattcctcaggctgggccaccatcctggccgtgatctggctgcacagcaatggtaaggacttgaagtgtgaatgggagcttctggaaaggaaggccgtggcctggatgcgtgcccatgcaggctccaccatgccttcggttgtgaaagctgctattactttcctgaagtcatctgtggatcctgctatctttgccttttgaagataccatccagaaaaagaagtgcctttaatttgctactgtcatttcctctagtatcacttttgctgtgatgatgtgttcttgtgtattataactctttattttttgccataaaagtaaaggatgcttactccacttcgcttctctgctccaggttcactttggatatgatctttcttttcccaacatatgccctcagaaaagtgacagtggtcccagaacctattccctttcttgagggagttcaaaacattcataggcagtaatgttcctcccagggtttccagggaaacaacatgaaaaacaggtgacatgaactacagactaaagattgcagcatttatgttagagaatgcttgaattagagaattttctgcattatctttgtctgttcactttctatcttatatacttatcagggccatactggtaagcttgcgtaggaggagttagagggaagttgaaagccaacatctggatcaatgtaatgtcaagatcacaaagacagagactgcaggggtccactgtgagaggtgacactgttggggaccttcctgattcattcttcttgggctttgctagcctgtacaacctacatgtcttttcttccactgcctgaaagacttgggttgaactataactgttggagagagatgttcctctttaatcatgaaacaccttaagaagtctataatgcaatccttagtcctaccctgaacctatgtgtcctctaagtcaggccctgatctagtgcagtaaagggaagggtgggcttaatgggagctttgcctgggacctgaacctggagcacttaccgcattaggaagaaaggagctccccgtaatcgttcctgacccttgtgtctcatataccctatcctggtggaaatgaccctatttgatatgctgtcccttaaaataacttgtatcaatattaaaatgactatttctaccctttgatgagtaaatgcagtggttcttaaagtggtctcgtctccctaccccacaatattttggtactgccactttgggaagccaaactaggatagtaaattgaccggaacacagttgtggaaatttgacctgaagttagtgaaataaaacttagtagggaaaaaaagcttagcaagaggtctactcctccatagattcatttattgaacttacattggttttattgtcccttgttttctgttccagcttttctgatgcctccactgttcccatggtatcctgaccctctatcttctgttgtaggctgacttcttttatatgaagcaagtaaaggatactaataagaataccactgtagaatcctgaccatacccttaaatagttatgtgatgatgggcaaatgatttcaccctcaggcacttaatatcctcatctgtaaaactaagggattaaactagaactttattaacactttcgagttccactcagaattcctagaggaacatcggtgacttttcactcagaaagtgggtggactaggcctgagtttctttaagttgttgagttacctggtattaggaagacttgtgtgacttgcatagtggactctaatctctcagtctttcttccaagtttgtttatgctgaatgtgatctgcggaacagggttgttagaaatgcagctttttagaaatgcagaattttaatcgataccaggaactactttatttaacaaggctcccaggtatcatgcatgcacattgaagtttgaaaagtaaaggcttaatattttcatgaaataggcttatatccaagcctgccat

SEQ ID NO: 339655 - protein, 512 aa, Artificial Sequence
  derived and/or modified sequence
MAHSCRWRFPARPGTTGGGGGGGRRGLGGAPRQRVPALLLPPGPPVGGGGPGAPPSPPAVAAAAAAAGSSGAGVPGGAAAASAASSSSASSSSSSSSSASSGPALLRVGPGFDAALQVSAAIGTNLRRFRAVFGESGGGGGSGELTTQIPCSWRTKGHIHDKKTEPFRLLAWSWCLNDEQFLGFGSDEEVRVRSPTRSPSVKTSPRKPRGRPRSGSDRNSAILSDPSVFSPLNKSETKSGDKIKKKDSKSIEKKRGRPPTFPGVKIKITHGKDISELPKGNKEDSLKKIKRTPSATFQQATKIKKLRAGKLSPLKSKFKTGKLQIGRKGVQIVRRRGRPPSTERIKTPSGLLINSELEKPQKVRKDKEGTPPLTKEDKTVVRQSPRRIKPVRIIPSSKRTDATIAKQLLQRAKKGAQKKIEKEAAQLQGRKVKTQVKNIRQFIMPVVSAISSRIIKTPRRFIEDEDYDPPIKIARLESTPNSRFSAPSCGSSEKSSAASQHSSQMSSDSSRS

SEQ ID NO: 339656 - DNA, 1539 bp, Artificial Sequence
  derived and/or modified sequence
atggctcatagttgtagatggagattccccgctcgtccaggcacgaccggcggtggcggtggcggtggacgccggggactgggcggggccccaagacagcgagtacctgccttgctcctacctccaggtccccctgtgggaggaggcggaccgggagctccaccctctccgccagccgttgccgctgcggctgcagccgccgggtccagtggagctggggtaccgggcggcgccgctgccgctagcgccgcttcttcatcaagcgcaagctcatccagttccagctccagcagtgcctcaagcggaccagcacttctacgcgtgggtccgggattcgacgcagcacttcaggtatcagctgctattgggacaaacttaaggagattccgtgcggtatttggagagtcaggcggcggcggtggttctggggaacttacaacacagatcccttgttcttggcgaactaagggccacattcatgataagaaaacagagcctttcaggctcctcgcttggtcctggtgcctaaatgacgagcagttcttgggttttgggtccgatgaagaggtgcgggtccggtcacctactcgcagtccctctgtcaaaacaagtcccagaaaaccacgaggtagaccacgcagtggatcggacagaaacagtgccattctgtcagatccatctgtcttcagcccactgaataaaagtgaaactaagtccggggacaagattaaaaagaaagatagcaagagcatcgagaaaaaacgcggacgccctcctactttccctggcgtgaagatcaaaattactcatggcaaggacatttcagagctccccaaaggcaacaaggaggacagccttaaaaagatcaaacgcaccccctcagcgacgttccagcaggccactaaaatcaaaaagctgcgcgctgggaagctctctcctctgaagagcaagtttaagacagggaaattacagatagggagaaagggcgtgcaaatcgttcgcagacgcggaaggccgccatccacagagcggataaaaacgccgtcggggctgctgattaacagtgagctggaaaagccccagaaggtcaggaaagataaagaaggcaccccccctctgacaaaagaggacaagaccgtcgtacgtcagagtccacgtcgcatcaaaccagtacggatcatcccatcctccaaacgtaccgatgctactattgccaaacagctgttgcagagagctaaaaagggtgctcagaagaagattgaaaaggaagcagcccagcttcaagggcgaaaggtgaagacacaagtgaaaaatatcaggcagttcataatgcccgtggtaagcgccatatcgagcaggattataaaaacacctagaaggtttatcgaagacgaagattacgatccaccaatcaagattgcccggctggaaagcacaccaaattctagattttcggcaccatcctgcgggtcttcggaaaagtccagcgctgcttcccagcacagctcccagatgagctccgattccagccgctcatag

SEQ ID NO: 339657 - DNA, 1539 bp, Artificial Sequence
  derived and/or modified sequence
atggcccacagctgccgctggaggtttcctgcccggcccggcaccaccggcggcggcggcggcggcggccggcggggcctgggcggggccccccggcagagggtgcctgccctgctgctgcccccaggcccccctgtgggcggcggcggccctggggccccacccagccccccagctgtggccgctgctgctgctgctgctggcagcagcggggccggcgtgcctggaggagctgctgctgccagcgctgccagcagcagcagcgccagcagcagcagcagcagcagcagcagcgccagcagcggccctgccctgctgcgggtgggccctggctttgatgctgccctgcaggtgtctgctgccatcggcaccaacctgcggcgcttccgggctgtgtttggagagagcggcggcggcggcggcagcggggagctgaccacccagatcccctgctcctggaggaccaagggccacatccatgacaagaagacagagcccttccggctgctggcctggagctggtgcctgaatgatgagcagttcctgggcttcggcagtgatgaggaggtgcgggtgcgcagccccaccaggagccccagcgtgaagaccagccccaggaagccccggggccggcccaggagcggcagtgacaggaacagcgccatcctgagtgaccccagcgtcttcagccccctgaacaagtctgagaccaagagcggggacaagatcaagaagaaggacagcaagagcattgagaagaagaggggccggccccccaccttccctggggtgaagatcaagatcacccacggcaaggacatcagcgagctgcccaagggcaacaaggaggacagcctgaagaagatcaagaggacccccagcgccaccttccagcaggccaccaagatcaagaagctgcgggccggcaagctgagccccctgaagagcaagttcaagacaggcaagctgcagattggaaggaagggcgtgcagatcgtgagaagaagaggccggccccccagcacagagcgcatcaagaccccatctggcctgctgatcaacagcgagctggagaagccccagaaggtgaggaaggacaaggagggcaccccacccctgaccaaggaggacaagacagtggtgcggcagagcccccggcgcatcaagcctgtgcgcatcatccccagcagcaagaggacagatgccaccatcgccaagcagctgctgcagagggccaagaagggggcccagaagaagattgagaaggaggccgcccagctgcagggcaggaaggtgaagacccaggtgaagaacatccggcagttcatcatgcctgtggtgtctgccatcagcagccgcatcatcaagaccccccggcgcttcattgaagatgaagattatgacccccccatcaagatcgcccggctggagagcacccccaacagccgcttcagcgcccccagctgtggcagcagcgagaagagcagcgctgccagccagcacagcagccagatgagcagtgacagcagccgctcctag

SEQ ID NO: 339658 - DNA, 14542 bp, Artificial Sequence
  derived and/or modified sequence
atggcgcacagctgtcggtggcgcttccccgcccgacccgggaccaccgggggcggcggcggcggggggcgccggggcctagggggcgccccgcggcaacgcgtcccggccctgctgcttccccccgggcccccggtcggcggtggcggccccggggcgcccccctcccccccggctgtggcggccgcggcggcggcggcgggaagcagcggggctggggttccagggggagcggccgccgcctcagcagcctcctcgtcgtccgcctcgtcttcgtcttcgtcatcgtcctcagcctcttcagggccggccctgctccgggtgggcccgggcttcgacgcggcgctgcaggtctcggccgccatcggcaccaacctgcgccggttccgggccgtgtttggggagagcggcgggggaggcggcagcggagagctaacaacacagatcccatgtagttggagaaccaaaggccacatacatgacaaaaagactgaaccgttcaggttacttgcatggagttggtgcttaaatgatgagcaattcttaggttttggctcagatgaagaagtcagagtgcgaagtcccacaaggtctccttcagttaaaactagtcctcgaaaacctcgtgggagacctagaagtggctctgaccgaaattcagctatcctctcagatccatctgtgttttcccctctaaataaatcagagaccaaatctggagataagatcaagaagaaagattctaaaagtatagaaaagaagagaggaagacctcccaccttccctggagtaaaaatcaaaataacacatggaaaggacatttcagagttaccaaagggaaacaaagaagatagcctgaaaaaaattaaaaggacaccttctgctacgtttcagcaagccacaaagattaaaaaattaagagcaggtaaactctctcctctcaagtctaagtttaagacagggaagcttcaaataggaaggaagggggtacaaattgtacgacggagaggaaggcctccatcaacagaaaggataaagaccccttcgggtctcctcattaattctgaactggaaaagccccagaaagtccggaaagacaaggaaggaacacctccacttacaaaagaagataagacagttgtcagacaaagccctcgaaggattaagccagttaggattattccttcttcaaaaaggacagatgcaaccattgctaagcaactcttacagagggcaaaaaagggggctcaaaagaaaattgaaaaagaagcagctcagctgcagggaagaaaggtgaagacacaggtcaaaaatattcgacagttcatcatgcctgttgtcagtgctatctcctcgcggatcattaagacccctcggcggtttatagaggatgaggattatgaccctccaattaaaattgcccgattagagtctacaccgaatagtagattcagtgccccgtcctgtggatcttctgaaaaatcaagtgcagcttctcagcactcctctcaaatgtcttcagactcctctcgatctagtagccccagtgttgatacctccacagactctcaggcttctgaggagattcaggtacttcctgaggagcggagcgatacccctgaagttcatcctccactgcccatttcccagtccccagaaaatgagagtaatgataggagaagcagaaggtattcagtgtcggagagaagttttggatctagaacgacgaaaaaattatcaactctacaaagtgccccccagcagcagacctcctcgtctccacctccacctctgctgactccaccgccaccactgcagccagcctccagtatctctgaccacacaccttggcttatgcctccaacaatccccttagcatcaccatttttgcctgcttccactgctcctatgcaagggaagcgaaaatctattttgcgagaaccgacatttaggtggacttctttaaagcattctaggtcagagccacaatacttttcctcagcaaagtatgccaaagaaggtcttattcgcaaaccaatatttgataatttccgaccccctccactaactcccgaggacgttggctttgcatctggtttttctgcatctggtaccgctgcttcagcccgattgttttcgccactccattctggaacaaggtttgatatgcacaaaaggagccctcttctgagagctccaagatttactccaagtgaggctcactctagaatatttgagtctgtaaccttgcctagtaatcgaacttctgctggaacatcttcttcaggagtatccaatagaaaaaggaaaagaaaagtgtttagtcctattcgatctgaaccaagatctccttctcactccatgaggacaagaagtggaaggcttagtagttctgagctctcacctctcacccccccgtcttctgtctcttcctcgttaagcatttctgttagtcctcttgccactagtgccttaaacccaacttttacttttccttctcattccctgactcagtctggggaatctgcagagaaaaatcagagaccaaggaagcagactagtgctccggcagagccattttcatcaagtagtcctactcctctcttcccttggtttaccccaggctctcagactgaaagagggagaaataaagacaaggcccccgaggagctgtccaaagatcgagatgctgacaagagcgtggagaaggacaagagtagagagagagaccgggagagagaaaaggagaataagcgggagtcaaggaaagagaaaaggaaaaagggatcagaaattcagagtagttctgctttgtatcctgtgggtagggtttccaaagagaaggttgttggtgaagatgttgccacttcatcttctgccaaaaaagcaacagggcggaagaagtcttcatcacatgattctgggactgatattacttctgtgactcttggggatacaacagctgtcaaaaccaaaatacttataaagaaagggagaggaaatctggaaaaaaccaacttggacctcggcccaactgccccatccctggagaaggagaaaaccctctgcctttccactccttcatctagcactgttaaacattccacttcctccataggctccatgttggctcaggcagacaagcttccaatgactgacaagagggttgccagcctcctaaaaaaggccaaagctcagctctgcaagattgagaagagtaagagtcttaaacaaaccgaccagcccaaagcacagggtcaagaaagtgactcatcagagacctctgtgcgaggaccccggattaaacatgtctgcagaagagcagctgttgcccttggccgaaaacgagctgtgtttcctgatgacatgcccaccctgagtgccttaccatgggaagaacgagaaaagattttgtcttccatggggaatgatgacaagtcatcaattgctggctcagaagatgctgaacctcttgctccacccatcaaaccaattaaacctgtcactagaaacaaggcaccccaggaacctccagtaaagaaaggacgtcgatcgaggcggtgtgggcagtgtcccggctgccaggtgcctgaggactgtggtgtttgtactaattgcttagataagcccaagtttggtggtcgcaatataaagaagcagtgctgcaagatgagaaaatgtcagaatctacaatggatgccttccaaagcctacctgcagaagcaagctaaagctgtgaaaaagaaagagaaaaagtctaagaccagtgaaaagaaagacagcaaagagagcagtgttgtgaagaacgtggtggactctagtcagaaacctaccccatcagcaagagaggatcctgccccaaagaaaagcagtagtgagcctcctccacgaaagcccgtcgaggaaaagagtgaagaagggaatgtctcggcccctgggcctgaatccaaacaggccaccactccagcttccaggaagtcaagcaagcaggtctcccagccagcactggtcatcccgcctcagccacctactacaggaccgccaagaaaagaagttcccaaaaccactcctagtgagcccaagaaaaagcagcctccaccaccagaatcaggtccagagcagagcaaacagaaaaaagtggctccccgcccaagtatccctgtaaaacaaaaaccaaaagaaaaggaaaaaccacctccggtcaataagcaggagaatgcaggcactttgaacatcctcagcactctctccaatggcaatagttctaagcaaaaaattccagcagatggagtccacaggatcagagtggactttaaggaggattgtgaagcagaaaatgtgtgggagatgggaggcttaggaatcttgacttctgttcctataacacccagggtggtttgctttctctgtgccagtagtgggcatgtagagtttgtgtattgccaagtctgttgtgagcccttccacaagttttgtttagaggagaacgagcgccctctggaggaccagctggaaaattggtgttgtcgtcgttgcaaattctgtcacgtttgtggaaggcaacatcaggctacaaagcagctgctggagtgtaataagtgccgaaacagctatcaccctgagtgcctgggaccaaactaccccaccaaacccacaaagaagaagaaagtctggatctgtaccaagtgtgttcgctgtaagagctgtggatccacaactccaggcaaagggtgggatgcacagtggtctcatgatttctcactgtgtcatgattgcgccaagctctttgctaaaggaaacttctgccctctctgtgacaaatgttatgatgatgatgactatgagagtaagatgatgcaatgtggaaagtgtgatcgctgggtccattccaaatgtgagaatctttcaggtacagaagatgagatgtatgagattctatctaatctgccagaaagtgtggcctacacttgtgtgaactgtactgagcggcaccctgcagagtggcgactggcccttgaaaaagagctgcagatttctctgaagcaagttctgacagctttgttgaattctcggactaccagccatttgctacgctaccggcaggctgccaagcctccagacttaaatcccgagacagaggagagtataccttcccgcagctcccccgaaggacctgatccaccagttcttactgaggtcagcaaacaggatgatcagcagcctttagatctagaaggagtcaagaggaagatggaccaagggaattacacatctgtgttggagttcagtgatgatattgtgaagatcattcaagcagccattaattcagatggaggacagccagaaattaaaaaagccaacagcatggtcaagtccttcttcattcggcaaatggaacgtgtttttccatggttcagtgtcaaaaagtccaggttttgggagccaaataaagtatcaagcaacagtgggatgttaccaaacgcagtgcttccaccttcacttgaccataattatgctcagtggcaggagcgagaggaaaacagccacactgagcagcctcctttaatgaagaaaatcattccagctcccaaacccaaaggtcctggagaaccagactcaccaactcctctgcatcctcctacaccaccaattttgagtactgataggagtcgagaagacagtccagagctgaacccacccccaggcatagaagacaatagacagtgtgcgttatgtttgacttatggtgatgacagtgctaatgatgctggtcgtttactatatattggccaaaatgagtggacacatgtaaattgtgctttgtggtcagcggaagtgtttgaagatgatgacggatcactaaagaatgtgcatatggctgtgatcaggggcaagcagctgagatgtgaattctgccaaaagccaggagccaccgtgggttgctgtctcacatcctgcaccagcaactatcacttcatgtgttcccgagccaagaactgtgtctttctggatgataaaaaagtatattgccaacgacatcgggatttgatcaaaggcgaagtggttcctgagaatggatttgaagttttcagaagagtgtttgtggactttgaaggaatcagcttgagaaggaagtttctcaatggcttggaaccagaaaatatccacatgatgattgggtctatgacaatcgactgcttaggaattctaaatgatctctccgactgtgaagataagctctttcctattggatatcagtgttccagggtatactggagcaccacagatgctcgcaagcgctgtgtatatacatgcaagatagtggagtgccgtcctccagtcgtagagccggatatcaacagcactgttgaacatgatgaaaacaggaccattgcccatagtccaacatcttttacagaaagttcatcaaaagagagtcaaaacacagctgaaattataagtcctccatcaccagaccgacctcctcattcacaaacctctggctcctgttattatcatgtcatctcaaaggtccccaggattcgaacacccagttattctccaacacagagatcccctggctgtcgaccgttgccttctgcaggaagtcctaccccaaccactcatgaaatagtcacagtaggtgatcctttactctcctctggacttcgaagcattggctccaggcgtcacagtacctcttccttatcaccccagcggtccaaactccggataatgtctccaatgagaactgggaatacttactctaggaataatgtttcctcagtctccaccaccgggaccgctactgatcttgaatcaagtgccaaagtagttgatcatgtcttagggccactgaattcaagtactagtttagggcaaaacacttccacctcttcaaatttgcaaaggacagtggttactgtaggcaataaaaacagtcacttggatggatcttcatcttcagaaatgaagcagtccagtgcttcagacttggtgtccaagagctcctctttaaagggagagaagaccaaagtgctgagttccaagagctcagagggatctgcacataatgtggcttaccctggaattcctaaactggccccacaggttcataacacaacatctagagaactgaatgttagtaaaatcggctcctttgctgaaccctcttcagtgtcgttttcttctaaagaggccctctccttcccacacctccatttgagagggcaaaggaatgatcgagaccaacacacagattctacccaatcagcaaactcctctccagatgaagatactgaagtcaaaaccttgaagctatctggaatgagcaacagatcatccattatcaacgaacatatgggatctagttccagagataggagacagaaagggaaaaaatcctgtaaagaaactttcaaagaaaagcattccagtaaatcttttttggaacctggtcaggtgacaactggtgaggaaggaaacttgaagccagagtttatggatgaggttttgactcctgagtatatgggccaacgaccatgtaacaatgtttcttctgataagattggtgataaaggcctttctatgccaggagtccccaaagctccacccatgcaagtagaaggatctgccaaggaattacaggcaccacggaaacgcacagtcaaagtgacactgacacctctaaaaatggaaaatgagagtcaatccaaaaatgccctgaaagaaagtagtcctgcttcccctttgcaaatagagtcaacatctcccacagaaccaatttcagcctctgaaaatccaggagatggtccagtggcccaaccaagccccaataatacctcatgccaggattctcaaagtaacaactatcagaatcttccagtacaggacagaaacctaatgcttccagatggccccaaacctcaggaggatggctcttttaaaaggaggtatccccgtcgcagtgcccgtgcacgttctaacatgttttttgggcttaccccactctatggagtaagatcctatggtgaagaagacattccattctacagcagctcaactgggaagaagcgaggcaagagatcagctgaaggacaggtggatggggccgatgacttaagcacttcagatgaagacgacttatactattacaacttcactagaacagtgatttcttcaggtggagaggaacgactggcatcccataatttatttcgggaggaggaacagtgtgatcttccaaaaatctcacagttggatggtgttgatgatgggacagagagtgatactagtgtcacagccacaacaaggaaaagcagccagattccaaaaagaaatggtaaagaaaatggaacagagaacttaaagattgatagacctgaagatgctggggagaaagaacatgtcactaagagttctgttggccacaaaaatgagccaaagatggataactgccattctgtaagcagagttaaaacacagggacaagattccttggaagctcagctcagctcattggagtcaagccgcagagtccacacaagtaccccctccgacaaaaatttactggacacctataatactgagctcctgaaatcagattcagacaataacaacagtgatgactgtgggaatatcctgccttcagacattatggactttgtactaaagaatactccatccatgcaggctttgggtgagagcccagagtcatcttcatcagaactcctgaatcttggtgaaggattgggtcttgacagtaatcgtgaaaaagacatgggtctttttgaagtattttctcagcagctgcctacaacagaacctgtggatagtagtgtctcttcctctatctcagcagaggaacagtttgagttgcctctagagctaccatctgatctgtctgtcttgaccacccggagtcccactgtccccagccagaatcccagtagactagctgttatctcagactcaggggagaagagagtaaccatcacagaaaaatctgtagcctcctctgaaagtgacccagcactgctgagcccaggagtagatccaactcctgaaggccacatgactcctgatcattttatccaaggacacatggatgcagaccacatctctagccctccttgtggttcagtagagcaaggtcatggcaacaatcaggatttaactaggaacagtagcacccctggccttcaggtacctgtttccccaactgttcccatccagaaccagaagtatgtgcccaattctactgatagtcctggcccgtctcagatttccaatgcagctgtccagaccactccaccccacctgaagccagccactgagaaactcatagttgttaaccagaacatgcagccactttatgttctccaaactcttccaaatggagtgacccaaaaaatccaattgacctcttctgttagttctacacccagtgtgatggagacaaatacttcagtattgggacccatgggaggtggtctcacccttaccacaggactaaatccaagcttgccaacttctcaatctttgttcccttctgctagcaaaggattgctacccatgtctcatcaccagcacttacattccttccctgcagctactcaaagtagtttcccaccaaacatcagcaatcctccttcaggcctgcttattggggttcagcctcctccggatccccaacttttggtttcagaatccagccagaggacagacctcagtaccacagtagccactccatcctctggactcaagaaaagacccatatctcgtctacagacccgaaagaataaaaaacttgctccctctagtaccccttcaaacattgccccttctgatgtggtttctaatatgacattgattaacttcacaccctcccagcttcctaatcatccaagtctgttagatttggggtcacttaatacttcatctcaccgaactgtccccaacatcataaaaagatctaaatctagcatcatgtattttgaaccggcacccctgttaccacagagtgtgggaggaactgctgccacagcggcaggcacatcaacaataagccaggatactagccacctcacatcagggtctgtgtctggcttggcatccagttcctctgtcttgaatgttgtatccatgcaaactaccacaacccctacaagtagtgcgtcagttccaggacacgtcaccttaaccaacccaaggttgcttggtaccccagatattggctcaataagcaatcttttaatcaaagctagccagcagagcctggggattcaggaccagcctgtggctttaccgccaagttcaggaatgtttccacaactggggacatcacagaccccctctactgctgcaataacagcggcatctagcatctgtgtgctcccctccactcagactacgggcataacagccgcttcaccttctggggaagcagacgaacactatcagcttcagcatgtgaaccagctccttgccagcaaaactgggattcattcttcccagcgtgatcttgattctgcttcagggccccaggtatccaactttacccagacggtagacgctcctaatagcatgggactggagcagaacaaggctttatcctcagctgtgcaagccagccccacctctcctgggggttctccatcctctccatcttctggacagcggtcagcaagcccttcagtgccgggtcccactaaacccaaaccaaaaaccaaacggtttcagctgcctctagacaaagggaatggcaagaagcacaaagtttcccatttgcggaccagttcttctgaagcacacattccagaccaagaaacgacatccctgacctcaggcacagggactccaggagcagaggctgagcagcaggatacagctagcgtggagcagtcctcccagaaggagtgtgggcaacctgcagggcaagtcgctgttcttccggaagttcaggtgacccaaaatccagcaaatgaacaagaaagtgcagaacctaaaacagtggaagaagaggaaagtaatttcagctccccactgatgctttggcttcagcaagaacaaaagcggaaggaaagcattactgagaaaaaacccaagaaaggacttgtttttgaaatttccagtgatgatggctttcagatctgtgcagaaagtattgaagatgcctggaagtcattgacagataaagtccaggaagctcgatcaaatgcccgcctaaagcagctctcatttgcaggtgttaacggtttgaggatgctggggattctccatgatgcagttgtgttcctcattgagcagctgtctggtgccaagcactgtcgaaattacaaattccgtttccacaagccagaggaggccaatgaaccccccttgaaccctcacggctcagccagggctgaagtccacctcaggaagtcagcatttgacatgtttaacttcctggcttctaaacatcgtcagcctcctgaatacaaccccaatgatgaagaagaggaggaggtacagctgaagtcagctcggagggcaactagcatggatctgccaatgcccatgcgcttccggcacttaaaaaagacttctaaggaggcagttggtgtctacaggtctcccatccatggccggggtcttttctgtaagagaaacattgatgcaggtgagatggtgattgagtatgccggcaacgtcatccgctccatccagactgacaagcgggaaaagtattacgacagcaagggcattggttgctatatgttccgaattgatgactcagaggtagtggatgccaccatgcatggaaatgctgcacgcttcatcaatcactcgtgtgagcctaactgctattctcgggtcatcaatattgatgggcagaagcacattgtcatctttgccatgcgtaagatctaccgaggagaggaactcacttacgactataagttccccattgaggatgccagcaacaagctgccctgcaactgtggcgccaagaaatgccggaagttcctaaactaaagctgctcttctcccccagtgttggagtgcaaggaggcggggccatccaaagcaacgctgaaggccttttccagcagctgggagctcccggattgcgtggcacagctgaggggcctctgtgatggctgagctctcttatgtcctatactcacatcagacatgtgatcatagtcccagagacagagttgaggtctcgaagaaaagatccatgatcggctttctcctggggcccctccaattgtttactgttagaaagtgggaatggggtccctagcagacttgcctggaaggagcctattatagagggttggttatgttgggagattgggcctgaatttctccacagaaataagttgccatcctcaggttggccctttcccaagcactgtaagtgagtgggtcaggcaaagccccaaatggagggttggttagattcctgacagtttgccagccaggccccacctacagcgtctgtcgaacaaacagaggtctggtggttttccctactatcctcccactcgagagttcacttctggttgggagacaggattcctagcacctccggtgtcaaaaggctgtcatggggttgtgccaattaattaccaaacattgagcctgcaggctttgagtgggagtgttgcccccaggagccttatctcagccaattacctttcttgacagtaggagcggcttccctctcccattccctcttcactcccttttcttcctttcccctgtcttcatgccactgctttcccatgcttctttcgggttgtaggggagactgactgcctgctcaaggacactccctgctgggcataggatgtgcctgcaaaaagttccctgagcctgtaagcactccaggtggggaagtggacaggagccattggtcataaccagacagaatttggaaacattttcataaagctccatggagagttttaaagaaacatatgtagcatgattttgtaggagaggaaaaagattatttaaataggatttaaatcatgcaacaacgagagtatcacagccaggatgacccttgggtcccattcctaagacatggttactttattttccccttgttaagacataggaagacttaatttttaaacggtcagtgtccagttgaaggcagaacactaatcagatttcaaggcccacaacttggggactagaccaccttatgttgagggaactctgccacctgcgtgcaacccacagctaaagtaaattcaatgacactactgccctgattactccttaggatgtggtcaaaacagcatcaaatgtttcttctcttcctttccccaagacagagtcctgaacctgttaaattaagtcattggattttactctgttctgtttacagtttactatttaaggttttataaatgtaaatatattttgtatatttttctatgagaagcacttcatagggagaagcacttatgacaaggctattttttaaaccgcggtattatcctaatttaaaagaagatcggtttttaataattttttattttcataggatgaagttagagaaaatattcagctgtacacacaaagtctggtttttcctgcccaacttccccctggaaggtgtactttttgttgtttaatgtgtagcttgtttgtgccctgttgacataaatgtttcctgggtttgctctttgacaataaatggagaaggaaggtcacccaactccattgggccactcccctccttcccctattgaagctcctcaaaaggctacagtaatatcttgatacaacagattctcttctttcccgcctctctcctttccggcgcaacttccagagtggtgggagacggcaatctttacatttccctcatctttcttacttcagagttagcaaacaacaagttgaatggcaacttgacatttttgcatcaccatctgcctcataggccactctttcctttccctctgcccaccaagtcctcatatctgcagagaacccattgatcaccttgtgccctcttttggggcagcctgttgaaactgaagcacagtctgaccactcacgataaagcagatttttctctgcctctgccacaaggtttcagagtagtgtagtccaagtagagggtggggcacccttttctcgccgcaagaagcccattcctatggaagtctagcaaagcaatacgactcagcccagcactctctgccccaggactcatggctctgctgtgccttccatcctgggctcccttctctcctgtgaccttaagaactttgtctggtggctttgctggaacattgtcactgttttcactgtcatgcagggagcccagcactgtggccaggatggcagagacttccttgtcatcatggagaagtgccagcaggggactgggaaaagcactctacccagacctcacctcccttcctccttttgcccatgaacaagatgcagtggccctaggggttccactagtgtctgctttcctttattattgcactgtgtgaggtttttttgtaaatccttgtattcc

SEQ ID NO: 339659 - DNA, 1539 bp, Artificial Sequence
  derived and/or modified sequence
atggcccacagctgccggtggcggttccccgcccggcccggcaccacaggcgggggcggaggcgggggccggagagggctgggtggcgctccccggcaacgagtgcccgcattactgctgccgcctggtccaccagtcggaggtggcggcccgggcgctccaccatcgcctcccgctgttgctgcagcagccgcggcagcggggagcagcggggcgggcgtgcccggtggcgcagccgcagctagcgccgctagtagtagcagcgccagctctagtagcagcagttcatcatccgcgtctagcggccccgcactgctgagagtgggcccaggattcgacgcagctcttcaggtgtcagctgccatcggaactaacttgcgcagattccgtgccgtgttcggtgagtccggagggggaggaggaagcggcgagctgacaacacagattccatgctcgtggagaactaagggacacatacacgacaagaagaccgaaccattcaggttgctcgcatggtcgtggtgcctaaacgacgagcagtttttggggttcggctcggatgaagaagtgagagtacggtcacccacacggagtccctcggtgaaaactagtcctaggaaaccaaggggtcggcctcgcagtgggtcagacagaaattcagccatcttgtcagacccatctgtgtttagcccccttaataaatcagagacgaagagtggggacaaaataaagaaaaaggattctaaatccattgagaagaaacggggccgccctcctacgtttccaggagtcaaaatcaaaatcactcacgggaaggatatttcggaactgccaaaaggtaacaaggaggattcattaaagaagatcaaaaggacacccagcgccactttccagcaagcgacaaaaatcaaaaaactgagagcaggaaaactctcccctttaaaatcgaaattcaagaccggaaaattacaaatcggcagaaaaggtgtccagatcgtgaggcgacgaggcagaccgccctccacagagcggatcaaaacccccagtggcctgctcataaacagcgagttagaaaaacctcagaaagtgagaaaggataaggagggcaccccccccctgacaaaagaagataaaactgtcgtacgtcagtcacccagacggatcaagcctgttcgaatcatcccttcttctaagagaacagatgccacaatagcaaaacagctactccagagggccaagaaaggggcgcagaagaagatagaaaaggaagcagctcagctacagggaagaaaagtcaagactcaagtcaagaacatccgacaattcattatgcctgttgtctccgccatcagctcacggatcatcaaaacccctagaagattcatagaagacgaagactatgatccccccatcaaaatcgcccggttagaatcaaccccaaactcccggttcagtgccccaagctgcgggtctagcgagaaatctagtgcagctagtcagcacagttcgcaaatgtctagcgatagttctaggagctag

SEQ ID NO: 339660 - DNA, 1539 bp, Artificial Sequence
  derived and/or modified sequence
atggctcattcctgtcgctggcggtttcctgctaggcccggaaccactggcggaggcggaggcggaggtaggcgcggtctgggcggagcccctcggcagcgcgtgcctgcactgctgctcccacctggccctccggtgggcggagggggtcccggagccccaccctctccaccagccgtcgccgctgccgctgcggcagccggttcctccggcgctggtgtccccggtggagcagccgctgcctccgccgcatcgagctcttcggcgtccagtagtagctctagctctagctccgcgtcaagcggtccagccctcctgagggtcggccctgggtttgacgccgctctgcaggtatctgccgctatcgggacaaacctgcgacgcttccgcgcagtcttcggggaatcaggaggcggtgggggttcaggggagttgaccacccaaattccctgttcctggagaacgaagggacatattcacgataagaaaacagagcctttcagactcctggcatggtcatggtgtctaaacgatgaacagttcctgggttttggctctgacgaggaggtgcgtgtgagatctcccacccgcagtccgagcgttaaaacatcccctcgcaagcccagggggcgaccaaggagcggcagcgaccgaaactctgccatcctgagcgatccgtccgtttttagccctctgaataaaagcgaaactaaatcaggtgataagatcaaaaagaaagattcaaagagtatcgagaaaaagcggggtagaccccctaccttcccaggagtgaaaattaaaattacccatggaaaggatattagcgaactccctaagggtaacaaagaggactcgctcaagaaaatcaaaagaacaccaagtgcgaccttccagcaggccactaagataaaaaaactaagagccggaaaactgagtccactgaaatcaaagttcaagaccggaaagcttcagatcggcagaaaaggggttcagattgtacggcgacgagggcgtcccccatccactgaacgcattaagaccccttccggactactgattaactccgaactggagaagcctcagaaagtacgtaaagacaaggagggaacaccacctttaactaaagaagataagactgtagttcgacaatcgcctcggagaattaagccggttagaatcataccgagttctaaaagaaccgacgccaccattgcgaagcagctccttcagagagccaagaagggggctcagaaaaaaatcgaaaaagaggcagcccaactgcagggccgaaaggtgaagacccaagtgaagaatatccggcagtttatcatgcccgtggtgtccgccatcagcagccggatcatcaagaccccacggagatttattgaggacgaggattatgaccctccaatcaaaatagccagactagagagtactcctaactctcggttttccgccccaagctgtggatccagcgaaaaatcctcagccgcatcccagcatagttcccagatgtcctccgattcgagccgatcttag

SEQ ID NO: 339661 - DNA, 1539 bp, Artificial Sequence
  derived and/or modified sequence
atggcccacagctgcagatggagattccccgccagacccggcaccaccggcggcggcggcggcggcggcagaagaggcctgggcggcgcccccagacagagagtgcccgccctgctgctgccccccggcccccccgtgggcggcggcggccccggcgccccccccagcccccccgccgtggccgccgccgccgccgccgccggcagcagcggcgccggcgtgcccggcggcgccgccgccgccagcgccgccagcagcagcagcgccagcagcagcagcagcagcagcagcagcgccagcagcggccccgccctgctgagagtgggccccggcttcgacgccgccctgcaggtgagcgccgccatcggcaccaacctgagaagattcagagccgtgttcggcgagagcggcggcggcggcggcagcggcgagctgaccacccagatcccctgcagctggagaaccaagggccacatccacgacaagaagaccgagcccttcagactgctggcctggagctggtgcctgaacgacgagcagttcctgggcttcggcagcgacgaggaggtgagagtgagaagccccaccagaagccccagcgtgaagaccagccccagaaagcccagaggcagacccagaagcggcagcgacagaaacagcgccatcctgagcgaccccagcgtgttcagccccctgaacaagagcgagaccaagagcggcgacaagatcaagaagaaggacagcaagagcatcgagaagaagagaggcagaccccccaccttccccggcgtgaagatcaagatcacccacggcaaggacatcagcgagctgcccaagggcaacaaggaggacagcctgaagaagatcaagagaacccccagcgccaccttccagcaggccaccaagatcaagaagctgagagccggcaagctgagccccctgaagagcaagttcaagaccggcaagctgcagatcggcagaaagggcgtgcagatcgtgagaagaagaggcagaccccccagcaccgagagaatcaagacccccagcggcctgctgatcaacagcgagctggagaagccccagaaggtgagaaaggacaaggagggcaccccccccctgaccaaggaggacaagaccgtggtgagacagagccccagaagaatcaagcccgtgagaatcatccccagcagcaagagaaccgacgccaccatcgccaagcagctgctgcagagagccaagaagggcgcccagaagaagatcgagaaggaggccgcccagctgcagggcagaaaggtgaagacccaggtgaagaacatcagacagttcatcatgcccgtggtgagcgccatcagcagcagaatcatcaagacccccagaagattcatcgaggacgaggactacgacccccccatcaagatcgccagactggagagcacccccaacagcagattcagcgcccccagctgcggcagcagcgagaagagcagcgccgccagccagcacagcagccagatgagcagcgacagcagcagaagctag

SEQ ID NO: 339662 - protein, 1439 aa, Artificial Sequence
  derived and/or modified sequence
MAHSCRWRFPARPGTTGGGGGGGRRGLGGAPRQRVPALLLPPGPPVGGGGPGAPPSPPAVAAAAAAAGSSGAGVPGGAAAASAASSSSASSSSSSSSSASSGPALLRVGPGFDAALQVSAAIGTNLRRFRAVFGESGGGGGSGELTTQIPCSWRTKGHIHDKKTEPFRLLAWSWCLNDEQFLGFGSDEEVRVRSPTRSPSVKTSPRKPRGRPRSGSDRNSAILSDPSVFSPLNKSETKSGDKIKKKDSKSIEKKRGRPPTFPGVKIKITHGKDISELPKGNKEDSLKKIKRTPSATFQQATKIKKLRAGKLSPLKSKFKTGKLQIGRKGVQIVRRRGRPPSTERIKTPSGLLINSELEKPQKVRKDKEGTPPLTKEDKTVVRQSPRRIKPVRIIPSSKRTDATIAKQLLQRAKKGAQKKIEKEAAQLQGRKVKTQVKNIRQFIMPVVSAISSRIIKTPRRFIEDEDYDPPIKIARLESTPNSRFSAPSCGSSEKSSAASQHSSQMSSDSSRSSSPSVDTSTDSQASEEIQVLPEERSDTPEVHPPLPISQSPENESNDRRSRRYSVSERSFGSRTTKKLSTLQSAPQQQTSSSPPPPLLTPPPPLQPASSISDHTPWLMPPTIPLASPFLPASTAPMQGKRKSILREPTFRWTSLKHSRSEPQYFSSAKYAKEGLIRKPIFDNFRPPPLTPEDVGFASGFSASGTAASARLFSPLHSGTRFDMHKRSPLLRAPRFTPSEAHSRIFESVTLPSNRTSAGTSSSGVSNRKRKRKVFSPIRSEPRSPSHSMRTRSGRLSSSELSPLTPPSSVSSSLSISVSPLATSALNPTFTFPSHSLTQSGESAEKNQRPRKQTSAPAEPFSSSSPTPLFPWFTPGSQTERGRNKDKAPEELSKDRDADKSVEKDKSRERDREREKENKRESRKEKRKKGSEIQSSSALYPVGRVSKEKVVGEDVATSSSAKKATGRKKSSSHDSGTDITSVTLGDTTAVKTKILIKKGRGNLEKTNLDLGPTAPSLEKEKTLCLSTPSSSTVKHSTSSIGSMLAQADKLPMTDKRVASLLKKAKAQLCKIEKSKSLKQTDQPKAQGQESDSSETSVRGPRIKHVCRRAAVALGRKRAVFPDDMPTLSALPWEEREKILSSMGNDDKSSIAGSEDAEPLAPPIKPIKPVTRNKAPQEPPVKKGRRSRRCGQCPGCQVPEDCGVCTNCLDKPKFGGRNIKKQCCKMRKCQNLQWMPSKAYLQKQAKAVKKKEKKSKTSEKKDSKESSVVKNVVDSSQKPTPSAREDPAPKKSSSEPPPRKPVEEKSEEGNVSAPGPESKQATTPASRKSSKQVSQPALVIPPQPPTTGPPRKEVPKTTPSEPKKKQPPPPESGPEQSKQKKVAPRPSIPVKQKPKEKEKPPPVNKQENAGTLNILSTLSNGNSSKQKIPADGVHRIRVDFK

SEQ ID NO: 339663 - DNA, 4320 bp, Artificial Sequence
  derived and/or modified sequence
atggctcactcatgccggtggagattccccgcaaggccaggtactacaggggggggcgggggtggcgggcgccggggccttggcggcgcccctcggcagcgtgttcccgccctgcttctgccaccaggtcctcccgtcggcggcgggggtcctggagcccctccgagtccaccagccgtcgcggccgccgctgctgccgcaggatcctctggtgcgggagtgcccgggggcgccgcagcagcatcggcagctagtagttcgagcgcttctagctcaagctcgtcctcctcttctgcttcgtctggccctgcactgctccgagtgggacccgggttcgacgcagctctgcaagtgtccgcagctatcggcactaacttgcgccgtttcagagccgtattcggcgagtcgggcggcgggggcggctcaggcgaactaactacacaaataccttgctcatggaggacaaaggggcacatacacgacaagaaaactgaaccattccggctcctcgcatggagctggtgcctaaacgacgagcagttcctgggcttcgggtctgatgaggaggtgagagtgagatctcccacccgatcgcctagcgtgaagacaagtccccggaaaccccgtggcaggcctcgctccggaagtgaccggaattctgcgattctgtccgatccctctgtgttttcacccctgaataagagcgagacaaaaagcggcgacaaaattaagaaaaaggattctaagtcaatcgaaaaaaagaggggaagaccacctaccttccccggcgtaaagatcaagatcactcacggaaaggacatttcagagctgcctaagggtaataaagaggactccctaaagaagatcaaacgcacaccgagtgcaacgttccagcaagccaccaagattaagaaactgcgagcaggaaagctgtctccacttaaaagtaaattcaagactggtaaactgcagatagggagaaagggagtccagattgtacggaggagaggacgccctccctcaaccgaaaggataaaaacaccatcgggcctgctcatcaatagcgaattagagaaaccccagaaagtgcgcaaggataaggaggggaccccgcctctcacaaaagaggacaagaccgtagttcggcagagcccacggagaattaaacctgtcagaataataccatcctctaagcgaactgatgccacgattgcgaaacaactgttgcagcgggccaaaaagggggcccaaaagaagatcgaaaaagaggcagcccagctccagggacggaaggtgaaaacccaggtcaagaacatcagacagttcattatgcctgtagtttcggcaatcagctcacgcataattaagaccccgaggcggttcatcgaggacgaggattacgatccacccataaagatagctaggctggaatcaacaccaaacagccgcttctccgcaccatcgtgtggcagtagcgaaaaatccagcgctgccagtcaacacagcagtcagatgtccagtgattcctcccgctcctcctcaccttctgttgacacatccaccgacagccaggcctctgaagagatacaggtcctcccagaggagagatccgacaccccggaagtgcacccacccctgcccatctctcagtctcctgaaaacgaatccaatgatcgcagatcccgccgttattccgtgagtgagcggagctttggttcccgcacaacaaaaaagttgtccacactacagagcgcaccccagcagcagacaagttcaagccctcccccgccactgctgactccgccgccaccacttcagcccgcttctagcatatctgatcacaccccgtggttgatgcctcctacaatcccactggccagtccctttctgccagcttctacagccccgatgcaaggcaaaaggaaaagtattcttagggaacccaccttcaggtggacatctctcaagcattctcgctccgaacctcagtatttttctagcgccaagtatgcaaaggaggggctaatcaggaagcccatttttgacaactttcgtcctccaccattgacaccggaggatgtgggcttcgcctctgggttcagcgcgtcgggcacagcagcttctgcaaggctgttcagtcctctgcatagcgggactcggtttgatatgcataagagaagccccttattgcgtgcccccaggtttaccccaagcgaggctcatagccgcatattcgaatctgtcaccctcccctctaatagaacatccgccggcacttcctcatctggagtcagtaaccggaagcgcaagcgaaaggtctttagcccgattcgctccgagcctagatctccatcacactccatgcgcacacggtctggcaggcttagctccagtgaattgtccccgcttacacccccatccagcgtgagctctagcctctccatctcagtaagcccattggctaccagcgctctgaatccaacatttaccttcccaagtcactcactgacgcagagcggagagtcagccgaaaagaaccagagacccaggaagcaaacatctgctcccgcagaaccattttcctccagcagcccaacacccttatttccttggtttaccccagggtcccagacagagcgcggccgaaacaaggacaaggctcccgaagagttgtcaaaggatcgagatgccgataaaagcgtggagaaagataagtcacgagaacgagacagggaacgcgaaaaggagaacaagcgggagagcagaaaggaaaaaagaaagaagggatccgagatccaatcttcgagtgccctgtatcctgtgggaagagtgtccaaagaaaaggtagttggcgaagacgtggccacatcatcatcggctaaaaaggctaccggccggaaaaaaagtagttctcatgattccgggacagatattaccagtgttactttaggtgatactaccgcagtcaaaacgaaaattttgattaaaaagggcagaggcaacctggaaaagactaacctggatctggggcctaccgccccatcacttgagaaggagaaaaccctgtgtctgtccacccccagctcaagcacagttaaacactctacgagctctatcggatccatgctagcacaggcagacaaactgcctatgaccgacaagcgcgtagctagcttgctgaagaaggcaaaagctcaactgtgcaagatcgaaaaaagtaagagcttaaagcagaccgaccagccaaaggcccagggtcaagagtccgattccagtgaaacctcggtgaggggccctaggataaagcatgtctgtagacgggccgcagtcgcactaggacgaaaacgagctgtgttcccggatgacatgccaaccctaagcgcgctgccttgggaggagcgggaaaaaatcttatcatcgatgggcaatgacgataagagttctatcgctggctcagaagacgcggaacccttggccccacccatcaagcccattaagcccgtgactcggaataaggctcctcaggagcctccggtgaagaaaggtaggcgaagtagaagatgcggccaatgccctggctgtcaggtccccgaagactgtggggtgtgtaccaattgtctggacaagccaaaattcggtggtcgcaatattaaaaagcagtgctgcaaaatgaggaagtgtcaaaatctccagtggatgccttccaaggcctacctccaaaaacaggctaaggcagtgaaaaagaaggaaaaaaaaagtaagacctctgagaaaaaagactctaaagaatcctctgttgtgaagaacgtggttgatagcagtcagaagcctactccatctgcccgcgaggaccccgcgccaaaaaagagctcctctgagccgccccctcgaaagcctgtcgaggagaagagtgaggaaggcaatgtaagtgcccctggcccggagagcaagcaggctactactcctgcttctagaaagtcctcgaaacaggtctcccagcccgccctggtcatcccaccgcagccccctacaacgggacctcctcggaaggaggttccgaaaacgactcctagcgagcccaaaaaaaaacagcctccaccaccagaaagcggccccgagcagtccaagcaaaagaaggtcgcgcctcggccttcaatcccagtgaaacagaagccgaaagaaaaagagaagcccccacccgtgaataagcaggagaacgcgggcaccctaaacatattgtccacattatcaaatggaaacagtagtaagcaaaaaatccccgctgacggggtccatcgcataagagtggacttcaagtag

SEQ ID NO: 339664 - DNA, 4320 bp, Artificial Sequence
  derived and/or modified sequence
atggcccacagctgccgctggaggtttcctgcccggcccggcaccaccggcggcggcggcggcggcggccggcggggcctgggcggggccccccggcagagggtgcctgccctgctgctgcccccaggcccccctgtgggcggcggcggccctggggccccacccagccccccagctgtggccgctgctgctgctgctgctggcagcagcggggccggcgtgcctggaggagctgctgctgccagcgctgccagcagcagcagcgccagcagcagcagcagcagcagcagcagcgccagcagcggccctgccctgctgcgggtgggccctggctttgatgctgccctgcaggtgtctgctgccatcggcaccaacctgcggcgcttccgggctgtgtttggagagagcggcggcggcggcggcagcggggagctgaccacccagatcccctgctcctggaggaccaagggccacatccatgacaagaagacagagcccttccggctgctggcctggagctggtgcctgaatgatgagcagttcctgggcttcggcagtgatgaggaggtgcgggtgcgcagccccaccaggagccccagcgtgaagaccagccccaggaagccccggggccggcccaggagcggcagtgacaggaacagcgccatcctgagtgaccccagcgtcttcagccccctgaacaagtctgagaccaagagcggggacaagatcaagaagaaggacagcaagagcattgagaagaagaggggccggccccccaccttccctggggtgaagatcaagatcacccacggcaaggacatcagcgagctgcccaagggcaacaaggaggacagcctgaagaagatcaagaggacccccagcgccaccttccagcaggccaccaagatcaagaagctgcgggccggcaagctgagccccctgaagagcaagttcaagacaggcaagctgcagattggaaggaagggcgtgcagatcgtgagaagaagaggccggccccccagcacagagcgcatcaagaccccatctggcctgctgatcaacagcgagctggagaagccccagaaggtgaggaaggacaaggagggcaccccacccctgaccaaggaggacaagacagtggtgcggcagagcccccggcgcatcaagcctgtgcgcatcatccccagcagcaagaggacagatgccaccatcgccaagcagctgctgcagagggccaagaagggggcccagaagaagattgagaaggaggccgcccagctgcagggcaggaaggtgaagacccaggtgaagaacatccggcagttcatcatgcctgtggtgtctgccatcagcagccgcatcatcaagaccccccggcgcttcattgaagatgaagattatgacccccccatcaagatcgcccggctggagagcacccccaacagccgcttcagcgcccccagctgtggcagcagcgagaagagcagcgctgccagccagcacagcagccagatgagcagtgacagcagccgcagcagcagccccagcgtggacaccagcacagacagccaggccagcgaggagatccaggtgctgcctgaggagaggagtgacaccccagaggtgcacccccccctgcccatcagccagagcccagaaaatgaaagcaatgacagaagaagccgccgctacagcgtgtctgagaggagctttggcagcaggaccaccaagaagctgagcaccctgcagagcgccccccagcagcagaccagcagcagccccccaccacccctgctgaccccacctccacccctgcagcctgccagcagcatcagtgaccacaccccctggctgatgccacccaccatccccctggccagccccttcctgcctgccagcacagcccccatgcagggcaagaggaagagcatcctgcgggagcccaccttccgctggaccagcctgaagcacagccgctctgagccccagtacttcagcagcgccaagtatgccaaggagggcctcatcaggaagcccatctttgacaacttccggcccccacccctgaccccagaagatgtgggctttgccagcggcttcagcgccagcggcacagctgccagcgcccggctcttcagccccctgcacagcggcaccaggtttgacatgcacaagaggagccccctgctgcgggccccccgcttcacccccagcgaggcccacagccgcatctttgaatctgtgaccctgcccagcaacagaaccagcgctggcaccagcagcagcggcgtgagcaacaggaagaggaagaggaaggtgttcagccccatccgctctgagcccaggagccccagccacagcatgaggaccaggagcggccgcctgagcagcagcgagctgagccccctgaccccacccagctctgtgagcagcagcctgagcatctctgtgagccccctggccaccagcgccctgaaccccaccttcaccttccccagccacagcctgacccagagcggggagagcgctgagaagaaccagaggcccaggaagcagaccagcgccccagctgagcccttcagcagcagcagccccacccccctcttcccctggttcaccccaggcagccagacagagcggggcaggaacaaggacaaggcccctgaggagctgagcaaggacagagatgctgacaagtctgtggagaaggacaagagccgggagcgggaccgggagcgggagaaggagaacaagcgggagagcaggaaggagaagaggaagaagggcagcgagatccagagcagcagcgccctgtaccctgtgggccgggtgtccaaggagaaggtggtgggggaggatgtggccaccagcagcagcgccaagaaggccaccggcaggaagaagagcagcagccatgacagcggcacagacatcacctctgtgaccctgggggacaccacagctgtgaagaccaagatcctgatcaagaagggccggggcaacctggagaagaccaacctggacctgggccccacagcccccagcctggagaaggagaagaccctgtgcctgagcacccccagcagcagcacagtgaagcacagcaccagcagcatcggctccatgctggcccaggccgacaagctgcccatgacagacaagagggtggccagcctgctgaagaaggccaaggcccagctgtgcaagattgagaagagcaagagcctgaagcagacagaccagcccaaggcccagggccaggagagtgacagcagcgagacctctgtgcggggcccccgcatcaagcacgtgtgccggcgggctgctgtggccctgggcaggaagagagctgtgtttcctgatgacatgcccaccctgagcgccctgccctgggaggagcgggagaagatcctgagctccatgggaaatgatgacaagagcagcattgctggctctgaagatgctgagcccctggccccacccatcaagcccatcaagcctgtgaccaggaacaaggccccccaggagccccctgtgaagaagggcagaagaagccgccgctgtggccagtgccccggctgccaggtgcctgaggactgtggggtgtgcaccaactgcctggacaagcccaagtttggaggaagaaacatcaagaagcagtgctgcaagatgaggaagtgccagaacctgcagtggatgcccagcaaggcctacctgcagaagcaggccaaggctgtgaagaagaaggagaagaagagcaagaccagcgagaagaaggacagcaaggagagctctgtggtgaagaatgtggtggacagcagccagaagcccacccccagcgccagagaagatcctgcccccaagaagagcagcagcgagcccccacccaggaagcctgtggaggagaagtctgaggagggcaatgtgtctgcccctggccctgagagcaagcaggccaccaccccagccagcaggaagagcagcaagcaggtgtcccagcctgccctggtgattcctccccagccccccaccactggaccacccaggaaggaggtgcccaagaccacccccagcgagcccaagaagaagcagcccccacctcctgagagcggccctgagcagagcaagcagaagaaggtggccccccggcccagcatccctgtgaagcagaagcccaaggagaaggagaagcccccacctgtgaacaagcaggagaatgccggcaccctgaacatcctgagcaccctgagcaatggaaacagcagcaagcagaagatcccagcagatggagtgcaccgcatccgggtggacttcaagtag

SEQ ID NO: 339665 - DNA, 4320 bp, Artificial Sequence
  derived and/or modified sequence
aacatggcgcacagctgtcggtggcgcttccccgcccgacccgggaccaccgggggcggcggcggcggggggcgccggggcctagggggcgccccgcggcaacgcgtcccggccctgctgcttccccccgggcccccggtcggcggtggcggccccggggcgcccccctcccccccggctgtggcggccgcggcggcggcggcgggaagcagcggggctggggttccagggggagcggccgccgcctcagcagcctcctcgtcgtccgcctcgtcttcgtcttcgtcatcgtcctcagcctcttcagggccggccctgctccgggtgggcccgggcttcgacgcggcgctgcaggtctcggccgccatcggcaccaacctgcgccggttccgggccgtgtttggggagagcggcgggggaggcggcagcggagagctaacaacacagatcccatgtagttggagaaccaaaggccacatacatgacaaaaagactgaaccgttcaggttacttgcatggagttggtgcttaaatgatgagcaattcttaggttttggctcagatgaagaagtcagagtgcgaagtcccacaaggtctccttcagttaaaactagtcctcgaaaacctcgtgggagacctagaagtggctctgaccgaaattcagctatcctctcagatccatctgtgttttcccctctaaataaatcagagaccaaatctggagataagatcaagaagaaagattctaaaagtatagaaaagaagagaggaagacctcccaccttccctggagtaaaaatcaaaataacacatggaaaggacatttcagagttaccaaagggaaacaaagaagatagcctgaaaaaaattaaaaggacaccttctgctacgtttcagcaagccacaaagattaaaaaattaagagcaggtaaactctctcctctcaagtctaagtttaagacagggaagcttcaaataggaaggaagggggtacaaattgtacgacggagaggaaggcctccatcaacagaaaggataaagaccccttcgggtctcctcattaattctgaactggaaaagccccagaaagtccggaaagacaaggaaggaacacctccacttacaaaagaagataagacagttgtcagacaaagccctcgaaggattaagccagttaggattattccttcttcaaaaaggacagatgcaaccattgctaagcaactcttacagagggcaaaaaagggggctcaaaagaaaattgaaaaagaagcagctcagctgcagggaagaaaggtgaagacacaggtcaaaaatattcgacagttcatcatgcctgttgtcagtgctatctcctcgcggatcattaagacccctcggcggtttatagaggatgaggattatgaccctccaattaaaattgcccgattagagtctacaccgaatagtagattcagtgccccgtcctgtggatcttctgaaaaatcaagtgcagcttctcagcactcctctcaaatgtcttcagactcctctcgatctagtagccccagtgttgatacctccacagactctcaggcttctgaggagattcaggtacttcctgaggagcggagcgatacccctgaagttcatcctccactgcccatttcccagtccccagaaaatgagagtaatgataggagaagcagaaggtattcagtgtcggagagaagttttggatctagaacgacgaaaaaattatcaactctacaaagtgccccccagcagcagacctcctcgtctccacctccacctctgctgactccaccgccaccactgcagccagcctccagtatctctgaccacacaccttggcttatgcctccaacaatccccttagcatcaccatttttgcctgcttccactgctcctatgcaagggaagcgaaaatctattttgcgagaaccgacatttaggtggacttctttaaagcattctaggtcagagccacaatacttttcctcagcaaagtatgccaaagaaggtcttattcgcaaaccaatatttgataatttccgaccccctccactaactcccgaggacgttggctttgcatctggtttttctgcatctggtaccgctgcttcagcccgattgttttcgccactccattctggaacaaggtttgatatgcacaaaaggagccctcttctgagagctccaagatttactccaagtgaggctcactctagaatatttgagtctgtaaccttgcctagtaatcgaacttctgctggaacatcttcttcaggagtatccaatagaaaaaggaaaagaaaagtgtttagtcctattcgatctgaaccaagatctccttctcactccatgaggacaagaagtggaaggcttagtagttctgagctctcacctctcacccccccgtcttctgtctcttcctcgttaagcatttctgttagtcctcttgccactagtgccttaaacccaacttttacttttccttctcattccctgactcagtctggggaatctgcagagaaaaatcagagaccaaggaagcagactagtgctccggcagagccattttcatcaagtagtcctactcctctcttcccttggtttaccccaggctctcagactgaaagagggagaaataaagacaaggcccccgaggagctgtccaaagatcgagatgctgacaagagcgtggagaaggacaagagtagagagagagaccgggagagagaaaaggagaataagcgggagtcaaggaaagagaaaaggaaaaagggatcagaaattcagagtagttctgctttgtatcctgtgggtagggtttccaaagagaaggttgttggtgaagatgttgccacttcatcttctgccaaaaaagcaacagggcggaagaagtcttcatcacatgattctgggactgatattacttctgtgactcttggggatacaacagctgtcaaaaccaaaatacttataaagaaagggagaggaaatctggaaaaaaccaacttggacctcggcccaactgccccatccctggagaaggagaaaaccctctgcctttccactccttcatctagcactgttaaacattccacttcctccataggctccatgttggctcaggcagacaagcttccaatgactgacaagagggttgccagcctcctaaaaaaggccaaagctcagctctgcaagattgagaagagtaagagtcttaaacaaaccgaccagcccaaagcacagggtcaagaaagtgactcatcagagacctctgtgcgaggaccccggattaaacatgtctgcagaagagcagctgttgcccttggccgaaaacgagctgtgtttcctgatgacatgcccaccctgagtgccttaccatgggaagaacgagaaaagattttgtcttccatggggaatgatgacaagtcatcaattgctggctcagaagatgctgaacctcttgctccacccatcaaaccaattaaacctgtcactagaaacaaggcaccccaggaacctccagtaaagaaaggacgtcgatcgaggcggtgtgggcagtgtcccggctgccaggtgcctgaggactgtggtgtttgtactaattgcttagataagcccaagtttggtggtcgcaatataaagaagcagtgctgcaagatgagaaaatgtcagaatctacaatggatgccttccaaagcctacctgcagaagcaagctaaagctgtgaaaaagaaagagaaaaagtctaagaccagtgaaaagaaagacagcaaagagagcagtgttgtgaagaacgtggtggactctagtcagaaacctaccccatcagcaagagaggatcctgccccaaagaaaagcagtagtgagcctcctccacgaaagcccgtcgaggaaaagagtgaagaagggaatgtctcggcccctgggcctgaatccaaacaggccaccactccagcttccaggaagtcaagcaagcaggtctcccagccagcactggtcatcccgcctcagccacctactacaggaccgccaagaaaagaagttcccaaaaccactcctagtgagcccaagaaaaagcagcctccaccaccagaatcaggtccagagcagagcaaacagaaaaaagtggctccccgcccaagtatccctgtaaaacaaaaaccaaaagaaaaggaaaaaccacctccggtcaataagcaggagaatgcaggcactttgaacatcctcagcactctctccaatggcaatagttctaagcaaaaaattccagcagatggagtccacaggatcagagtggactttaag

SEQ ID NO: 339666 - DNA, 4320 bp, Artificial Sequence
  derived and/or modified sequence
atggcccacagctgccggtggcggttccccgcccggcccggcaccacaggcggcggtggcggtggaggacggcgagggctcggtggggctccccgccagcgagttcccgcccttctgttgccccctgggcctcctgtgggagggggaggcccgggggctcccccttcaccacctgccgttgccgcggctgccgcagctgctgggtcctcaggggctggcgtccccggcggagctgccgctgccagcgccgcttcgagctcttccgcctcctcaagctccagtagcagttcctccgccagctccggacccgcactgcttcgggtcggccctgggttcgacgcggccctgcaggtttctgccgcgattgggaccaatttgcgccgttttagggcagtttttggcgagagtggggggggcggcggctcgggggaattgactacccagattccttgtagctggagaactaaagggcatatccatgataagaagaccgagcccttccgcctccttgcatggtcatggtgcctgaacgatgaacagtttctaggatttggctcagacgaagaagtgcgggttcgatcccccacgcgcagcccatctgtgaagacctctccaagaaaacctcgggggaggccacgatccggcagcgacaggaacagcgcgatcctgtcggacccatccgtgtttagccctcttaacaaaagtgagactaagtccggtgacaagataaaaaaaaaagattccaagtcgattgaaaaaaagaggggacgcccaccaaccttccccggagtaaagatcaaaattactcacggaaaggacatcagtgagttgcccaaaggcaataaggaggactctctgaagaagattaaacgcacaccatcagccaccttccagcaggccaccaaaatcaaaaaactgcgggcagggaagctttctcccttaaaaagtaagtttaagactggaaaattacagattggacggaaaggggtccagattgtcagaagacgcggcaggcctcccagtaccgagcgcattaaaactcccagcggcctactgattaattccgaattagagaaaccgcaaaaggtcaggaaagataaagaaggaaccccacctctgacaaaggaggataagaccgtagtgcggcagtcaccaaggagaatcaaacccgtgagaataatcccatcttctaagcgcacagatgcaactattgcaaagcagttactgcaacgcgccaagaagggcgctcaaaagaagatcgaaaaggaggccgcccagttgcagggccgcaaagtgaagactcaggttaagaacattcggcagtttataatgcctgtcgtctccgcgatctcaagcagaataatcaagacgccacgccggtttatcgaagacgaagactatgaccctccaatcaaaattgcccggctggaaagcacgccaaattcgagattttcagcgccatcttgcggcagttcagaaaaatcttccgccgcctcccagcacagttcacaaatgagtagcgactccagcaggtcttctagccccagcgtggacaccagtaccgattctcaggcctccgaggaaatccaggtgctgcctgaagagagaagtgatacgccagaagttcacccaccgcttcccataagtcagagtcccgagaacgaaagcaatgaccggagatctcgcaggtatagcgtgtctgagcgttctttcggttctcgcaccacaaagaaactgtctacattacagagcgcacctcagcaacaaacgagttctagcccccctccacccctgctcactcccccgcctcctctgcagcccgcatcctcaatttcagatcacacaccttggctgatgccacccaccatccctcttgcctctccattcctgcctgcgtctaccgcgcccatgcaggggaaacgcaagtccatcttaagagaacctacatttcgttggacgagcctcaagcatagccgcagtgagccacagtacttttcctccgcgaaatatgcaaaagagggccttattaggaaacccatcttcgataacttcagacccccccctctgacacctgaggacgtggggtttgcctccggattttccgcctctggtacggcggcgtccgcccgtctgttttctccattgcactccggcacaagattcgatatgcataagcggagtccccttctgagagctccgaggtttacaccatctgaggctcacagccgcatttttgagtctgtaaccctgccttctaaccggactagcgcaggtacttctagctccggtgtgtcaaaccgaaaacggaagagaaaagtgttttcgcctatacggagcgaaccaaggagcccaagtcactccatgagaaccaggagtgggaggctgagctcttccgagttatcccccctgacaccccctagttccgtatcctcgtctcttagcattagcgtgtcacccctggccacatcagccctcaatcccacatttaccttcccaagccacagtttaacccagtcaggcgagagtgccgaaaaaaaccagaggcccagaaaacaaacatcagcgccggcagaaccattctcaagctcgtcgccaacacccctctttccttggtttacccctggctcccagacggaaagaggacggaataaggataaggccccagaggagctgtcaaaagaccgtgacgctgacaagagtgtggaaaaagataaatcccgcgagcgcgaccgggagcgggagaaagaaaataagcgcgagtcacggaaggagaaaaggaaaaagggaagcgagatacagagctcgtccgctctctatccagttggacgcgtgagcaaagagaaagtggtcggcgaggatgtcgctacttcctcaagtgcaaaaaaggccactgggcgcaaaaaaagttcaagtcatgactccggcaccgacatcacttctgtgactctaggtgacactactgccgtcaagactaagatcctgataaagaaagggcggggcaacctggagaagaccaacctggatctaggtcccacagccccaagcctggaaaaggaaaagaccctgtgcttgtctactccttcttcctcaacagtgaaacacagcacatcaagcatcggctccatgctggcccaggccgataagcttccaatgactgacaagcgcgtagcatcattgttaaaaaaagccaaggcccagctttgtaaaatcgaaaaatcaaagagcctaaagcagaccgatcagcctaaagcgcaggggcaagaaagtgactcgtccgagaccagcgtgcgtgggccccggatcaagcatgtctgtaggcgggcggcagtagctctggggagaaaaagagccgttttcccggacgacatgccaactctgtctgccctgccttgggaggagagagagaaaatactcagctcaatgggcaacgacgataagtcatctatcgctggctctgaggatgctgaacctctggccccgccgattaaacccatcaagcccgtcacaaggaataaggcccctcaagaacctcccgtgaagaaagggaggagaagtaggcggtgcggccagtgccctggctgtcaggtccccgaggattgcggagtgtgcacgaattgcctggataagcctaagtttggcggcagaaacatcaagaaacagtgctgtaagatgcggaaatgccaaaatctccagtggatgccatctaaagcctatctccagaagcaggcgaaggccgttaagaagaaagagaagaaatcaaagaccagtgagaagaaagacagcaaagaaagctcggttgtgaagaacgtagttgattcgtcccagaagcctacaccttctgcccgtgaggatccagcgcctaagaagtcatcaagcgagcccccccctagaaaacccgtggaagaaaagtctgaggagggcaatgtttctgcaccgggtccggagtcgaaacaggcaacaacccccgctagccggaaatcgtctaaacaggtgagccagcctgccttagtaatacctcctcaacccccgactacaggtcccccacgaaaggaagtcccaaaaacaacccccagcgagcccaagaagaagcaacctcccccccccgaaagcggcccagaacagtcaaagcagaaaaaggtcgcaccgcggccgtctatccctgttaagcagaagcccaaggaaaaagagaaacccccccctgtcaacaagcaggaaaacgcaggcacactaaacattctgtcaacgttaagtaatgggaacagtagtaaacagaagatccctgctgatggagtgcataggattcgggtcgacttcaagtag

SEQ ID NO: 339667 - DNA, 4320 bp, Artificial Sequence
  derived and/or modified sequence
atggcccatagttgcaggtggcgcttccctgccaggccagggactaccggaggcggaggcggaggtggaaggcgaggcctgggtggcgcaccgaggcagcgcgtacccgcattattattgcccccagggccacccgtcgggggtgggggaccgggagctcccccttcgccaccagccgtggcagctgccgctgccgctgccggaagttccggagcgggtgtgccgggtggagcggcagccgcatccgccgctagctcttcatctgcctcgagcagtagcagcagctcctcatccgctagtagcggccctgcactcctgcgggttgggccaggattcgacgccgcactgcaggtcagcgcggctattgggaccaacctgcgacgcttccgagctgtatttggggagagcggcggaggaggcggtagcggagagcttacaactcagatcccctgctcttggagaaccaaagggcatattcacgacaagaagacagagcctttccggctcctggcctggtcctggtgtctaaatgacgaacaattcctgggattcggatcagacgaagaggtgcgtgtcagatctcccacaaggtccccatcagtcaagacttcccctaggaaacccaggggcaggccccgttctggcagcgacaggaacagtgctattttgagcgatccttctgtgttctctcccttgaacaaatccgaaactaagagtggggataaaattaaaaaaaaagattcaaagtctattgagaagaagagaggtcgtccacccaccttccctggagttaagatcaagattacgcatggcaaggatatctctgaattacctaaaggtaataaggaggatagtcttaaaaaaatcaaaagaactccgagcgccactttccagcaggccacaaagattaaaaaactgagggcagggaaattatcccctctgaagagtaaattcaaaacgggcaagcttcaaattggccgtaaaggggtccagattgtgagacgacggggacggcctccctccaccgagcgcattaagacaccgagtggccttcttatcaattctgaactcgagaagccccagaaagttagaaaagacaaggaggggactcccccactgaccaaggaggataagacagtggtacgtcagtcacccaggcgtattaaaccggtgagaataattccaagtagtaagaggaccgatgccacaatcgcaaaacagcttctccaacgggctaagaagggggctcagaaaaagatcgagaaagaagccgctcaattgcaagggaggaaagtcaagactcaggtcaaaaatattcgacagtttatcatgccggttgtctctgccattagctcgcgcataattaagactccaagaaggtttattgaagatgaagactatgatcctcccataaagatagccagactggagagcactcctaacagccggttctcggccccttcctgtggaagcagtgagaaatcttccgctgcctcacagcactccagccagatgtcaagcgatagctctcgtagcagtagcccctctgtggatactagcacagatagccaggctagcgaggaaatccaggtcctgccggaggagagatctgataccccagaggtgcacccccctctgcccatatcgcagtctcccgaaaacgagtcaaatgatcgtaggtctcggagatacagtgtctctgagcgatcattcgggtccagaaccaccaagaaactgagtaccttacaaagcgccccacagcagcaaacatccagctcccctccacctccactcttgactcctcctcctcctctccagcccgcttcttctatttccgatcacacaccttggcttatgcccccaaccatcccactcgcttcgcccttccttccagcatcaacagccccaatgcagggaaaaaggaagagcattcttcgggagccaacgttccggtggacctccctgaagcactctagaagcgagccccaatacttttctagtgccaagtacgcaaaagagggcctaattcgcaaacctatctttgacaactttaggcctccccctctgacaccagaggatgtaggattcgcatcgggcttcagcgcctcagggacagctgcttctgctcggctgttcagcccgttacattccggaactcgttttgacatgcataagagatcccccctgttgcgagcgccaagatttacaccaagtgaggctcactccagaatttttgaaagcgtaaccctgccctccaatagaacgtccgctggtacctccagttccggggtcagcaaccgtaagcggaagaggaaggtattctccccgattcggagcgagcctcggtctccctcccacagcatgagaactaggtcaggccgactctcctcatcggagctgagtcccctgactccccctagtagtgtgtcttcttcccttagtatcagcgtgtccccactggccacctcggcgctcaaccccaccttcacattcccatcacattcccttacacagagtggtgagtctgcagaaaagaatcagcggccacgcaaacagaccagcgcccctgccgagcccttctctagctcaagcccaacccccctatttccttggttcacacctggcagccagaccgaaagaggcagaaataaagacaaagcacccgaggaactctccaaagaccgggacgctgataagtcagtcgagaaggataagagcagagagcgagaccgagagagggaaaaagagaataagagagagagtagaaaagagaaaagaaaaaagggctccgagatccaatcaagtagcgcactctatcctgttggaagagtcagcaaggagaaggtagtcggtgaagatgtcgcgacctcttccagtgcaaagaaggctaccggcaggaaaaaaagttcctctcacgactccgggaccgatatcacatcggttactctgggtgacaccaccgccgtgaagacgaagatattgataaaaaaggggaggggaaacctcgaaaagaccaatctggatctgggaccaaccgctccgtcactggagaaagaaaagacattatgcctctccacccccagcagctctactgtgaagcatagcactagctctatcggttcaatgttggcccaggccgacaaactgccgatgaccgataaaagggtggcctccctactgaagaaggctaaggcccaactgtgcaagatagagaaaagcaaaagcttgaagcagactgatcagcccaaagcccaagggcaggagtccgactcatccgagacatctgttaggggacccagaattaagcatgtgtgtcgccgtgcggctgtagcattgggacggaagcgagccgtattcccagatgatatgccaactctgtctgccctgccgtgggaggagagagagaagattctttccagcatgggaaacgatgacaagtcaagtatcgcagggagtgaagatgctgagccgctcgccccacctatcaagcctatcaaacctgtgaccaggaataaagcccctcaggaacctccagtaaagaagggcagaaggtcacgaagatgtggacagtgtcccggatgtcaagttccagaagactgtggggtatgcacaaactgcctggataaaccaaaatttgggggaaggaacataaaaaagcaatgctgtaaaatgagaaagtgccagaatctgcagtggatgcccagtaaagcctaccttcagaaacaggctaaggcagtgaagaagaaggaaaaaaaatccaagaccagtgaaaagaaggactccaaggaatcctccgtcgtgaagaatgtagtggacagcagtcaaaagcccacgccatctgccagggaggatcctgctcccaagaagagttcaagcgaaccaccgcctaggaagccagttgaggagaaaagtgaggagggcaatgtgtccgccccagggccagagtccaagcaggcaacaactcccgcaagccgcaaaagctcaaaacaggtctcccagcctgccctagtgatcccaccacaaccgccaaccaccggcccaccccgaaaggaagttccaaagaccactccatccgagccaaagaagaaacagccacccccacctgaaagtggccctgaacaatccaagcagaaaaaggtcgctcctcggccatccatcccagtgaagcagaagcctaaggaaaaagagaaaccccctcccgtaaataaacaggagaacgctgggactcttaatattttaagcaccctgtcgaatggcaattccagtaagcaaaagatcccggcagacggtgtgcaccgcatcagggttgactttaagtag

SEQ ID NO: 339668 - DNA, 4320 bp, Artificial Sequence
  derived and/or modified sequence
atggcccacagctgcagatggagattccccgccagacccggcaccaccggcggcggcggcggcggcggcagaagaggcctgggcggcgcccccagacagagagtgcccgccctgctgctgccccccggcccccccgtgggcggcggcggccccggcgccccccccagcccccccgccgtggccgccgccgccgccgccgccggcagcagcggcgccggcgtgcccggcggcgccgccgccgccagcgccgccagcagcagcagcgccagcagcagcagcagcagcagcagcagcgccagcagcggccccgccctgctgagagtgggccccggcttcgacgccgccctgcaggtgagcgccgccatcggcaccaacctgagaagattcagagccgtgttcggcgagagcggcggcggcggcggcagcggcgagctgaccacccagatcccctgcagctggagaaccaagggccacatccacgacaagaagaccgagcccttcagactgctggcctggagctggtgcctgaacgacgagcagttcctgggcttcggcagcgacgaggaggtgagagtgagaagccccaccagaagccccagcgtgaagaccagccccagaaagcccagaggcagacccagaagcggcagcgacagaaacagcgccatcctgagcgaccccagcgtgttcagccccctgaacaagagcgagaccaagagcggcgacaagatcaagaagaaggacagcaagagcatcgagaagaagagaggcagaccccccaccttccccggcgtgaagatcaagatcacccacggcaaggacatcagcgagctgcccaagggcaacaaggaggacagcctgaagaagatcaagagaacccccagcgccaccttccagcaggccaccaagatcaagaagctgagagccggcaagctgagccccctgaagagcaagttcaagaccggcaagctgcagatcggcagaaagggcgtgcagatcgtgagaagaagaggcagaccccccagcaccgagagaatcaagacccccagcggcctgctgatcaacagcgagctggagaagccccagaaggtgagaaaggacaaggagggcaccccccccctgaccaaggaggacaagaccgtggtgagacagagccccagaagaatcaagcccgtgagaatcatccccagcagcaagagaaccgacgccaccatcgccaagcagctgctgcagagagccaagaagggcgcccagaagaagatcgagaaggaggccgcccagctgcagggcagaaaggtgaagacccaggtgaagaacatcagacagttcatcatgcccgtggtgagcgccatcagcagcagaatcatcaagacccccagaagattcatcgaggacgaggactacgacccccccatcaagatcgccagactggagagcacccccaacagcagattcagcgcccccagctgcggcagcagcgagaagagcagcgccgccagccagcacagcagccagatgagcagcgacagcagcagaagcagcagccccagcgtggacaccagcaccgacagccaggccagcgaggagatccaggtgctgcccgaggagagaagcgacacccccgaggtgcacccccccctgcccatcagccagagccccgagaacgagagcaacgacagaagaagcagaagatacagcgtgagcgagagaagcttcggcagcagaaccaccaagaagctgagcaccctgcagagcgccccccagcagcagaccagcagcagcccccccccccccctgctgaccccccccccccccctgcagcccgccagcagcatcagcgaccacaccccctggctgatgccccccaccatccccctggccagccccttcctgcccgccagcaccgcccccatgcagggcaagagaaagagcatcctgagagagcccaccttcagatggaccagcctgaagcacagcagaagcgagccccagtacttcagcagcgccaagtacgccaaggagggcctgatcagaaagcccatcttcgacaacttcagacccccccccctgacccccgaggacgtgggcttcgccagcggcttcagcgccagcggcaccgccgccagcgccagactgttcagccccctgcacagcggcaccagattcgacatgcacaagagaagccccctgctgagagcccccagattcacccccagcgaggcccacagcagaatcttcgagagcgtgaccctgcccagcaacagaaccagcgccggcaccagcagcagcggcgtgagcaacagaaagagaaagagaaaggtgttcagccccatcagaagcgagcccagaagccccagccacagcatgagaaccagaagcggcagactgagcagcagcgagctgagccccctgaccccccccagcagcgtgagcagcagcctgagcatcagcgtgagccccctggccaccagcgccctgaaccccaccttcaccttccccagccacagcctgacccagagcggcgagagcgccgagaagaaccagagacccagaaagcagaccagcgcccccgccgagcccttcagcagcagcagccccacccccctgttcccctggttcacccccggcagccagaccgagagaggcagaaacaaggacaaggcccccgaggagctgagcaaggacagagacgccgacaagagcgtggagaaggacaagagcagagagagagacagagagagagagaaggagaacaagagagagagcagaaaggagaagagaaagaagggcagcgagatccagagcagcagcgccctgtaccccgtgggcagagtgagcaaggagaaggtggtgggcgaggacgtggccaccagcagcagcgccaagaaggccaccggcagaaagaagagcagcagccacgacagcggcaccgacatcaccagcgtgaccctgggcgacaccaccgccgtgaagaccaagatcctgatcaagaagggcagaggcaacctggagaagaccaacctggacctgggccccaccgcccccagcctggagaaggagaagaccctgtgcctgagcacccccagcagcagcaccgtgaagcacagcaccagcagcatcggcagcatgctggcccaggccgacaagctgcccatgaccgacaagagagtggccagcctgctgaagaaggccaaggcccagctgtgcaagatcgagaagagcaagagcctgaagcagaccgaccagcccaaggcccagggccaggagagcgacagcagcgagaccagcgtgagaggccccagaatcaagcacgtgtgcagaagagccgccgtggccctgggcagaaagagagccgtgttccccgacgacatgcccaccctgagcgccctgccctgggaggagagagagaagatcctgagcagcatgggcaacgacgacaagagcagcatcgccggcagcgaggacgccgagcccctggccccccccatcaagcccatcaagcccgtgaccagaaacaaggccccccaggagccccccgtgaagaagggcagaagaagcagaagatgcggccagtgccccggctgccaggtgcccgaggactgcggcgtgtgcaccaactgcctggacaagcccaagttcggcggcagaaacatcaagaagcagtgctgcaagatgagaaagtgccagaacctgcagtggatgcccagcaaggcctacctgcagaagcaggccaaggccgtgaagaagaaggagaagaagagcaagaccagcgagaagaaggacagcaaggagagcagcgtggtgaagaacgtggtggacagcagccagaagcccacccccagcgccagagaggaccccgcccccaagaagagcagcagcgagcccccccccagaaagcccgtggaggagaagagcgaggagggcaacgtgagcgcccccggccccgagagcaagcaggccaccacccccgccagcagaaagagcagcaagcaggtgagccagcccgccctggtgatccccccccagccccccaccaccggcccccccagaaaggaggtgcccaagaccacccccagcgagcccaagaagaagcagccccccccccccgagagcggccccgagcagagcaagcagaagaaggtggcccccagacccagcatccccgtgaagcagaagcccaaggagaaggagaagcccccccccgtgaacaagcaggagaacgccggcaccctgaacatcctgagcaccctgagcaacggcaacagcagcaagcagaagatccccgccgacggcgtgcacagaatcagagtggacttcaagtag

SEQ ID NO: 339669 - protein, 111 aa, Artificial Sequence
  derived and/or modified sequence
DFKDEQFLGFGSDEEVRVRSPTRSPSGSMLAQADKLPMTDKRVASLLKKAKAQLCKIEKSKSLKQTDQPKAQGQESDSSETSVRGPRIKHVCRRAAVALGRKRAVFPDDMP

SEQ ID NO: 339670 - DNA, 1930 bp, Artificial Sequence
  derived and/or modified sequence
gacacatgatgctgtgaacgtcagggtgctcgccagggaagggccctacccagagggacagaaagaaagccaggaggggtagagtttgaagagaagatcatgttctccctgaagacgcttccatttctgctcttactccatgtgcagatttccaaggcctttcctgtatcttctaaagagaaaaatacaaaaactgttcagcagaataaataagccttttctacagtagtgaagaggataaaaaagaggaactgcactgatgcaacaaatacctcaagagaagtcaattaatgactacctggaaaagttctaccaattaccaagcaaccagtatcagtctacaaggaagaatggcactaatgtgatcgttgaaaagcttaaagaaatgcagcgattttttgggttgaatgtgacggggaagccaaatgaggaaactctggacatgatgaaaaagcctcgctgtggagtgcctgacagtggtggttttatgttaaccccaggaaaccccaagtgggaacgcactaacttgacctacaggattcgaaactataccccacagctgtcagaggctgaggtagaaagagctatcaaggatgcctttgaactctggagtgttgcatcacctctcatcttcaccaggatctcacagggagaggcagatatcaacattgctttttaccaaagagatcacggtgacaattctccatttgatggacccaatggaatccttgctcatgcctttcagccaggccaaggtattggaggagatgctcattttgatgccgaagaaacatggaccaacacctccgcaaattacaacttgtttcttgttgctgctcatgaatttggccattctttggggctcgctcactcctctgaccctggtgccttgatgtatcccaactatgctttcagggaaaccagcaactactcactccctcaagatgacatcgatggcattcaggccatctatggactttcaagcaaccctatccaacctactggaccaagcacacccaaaccctgtgaccccagtttgacatttgatgctatcaccacactccgtggagaaatacttttctttaaagacaggtacttctggagaaggcatcctcagctacaaagagtcgaaatgaattttatttctctattctggccatcccttccaactggtatacaggctgcttatgaagattttgacagagacctcattttcctatttaaaggcaaccaatactgggctctgagtggctatgatattctgcaaggttatcccaaggatatatcaaactatggcttccccagcagcgtccaagcaattgacgcagctgttttctacagaagtaaaacatacttctttgtaaatgaccaattctggagatatgataaccaaagacaattcatggagccaggttatcccaaaagcatatcaggtgcctttccaggaatagagagtaaagttgatgcagttttccagcaagaacatttcttccatgtcttcagtggaccaagatattacgcatttgatcttattgctcagagagttaccagagttgcaagaggcaataaatggcttaactgtagatatggctgaagcaaaatcaaatgtggctgtatccactttcagaatgttgaagggaagttcagcaagcattttcgttacattgtgtcctgcttatacttttctcaatattaagtcattgtttcccatcactgtatccattctacctgtcctccgtgaaaatatgtttggaatattccactatttgcagaggcttattcagttcttacacattccatcttacattagtgattccatcaaagagaaggaaagtaagcctttttgtcacctcaatatttactatttcaatacttacatatctgacttctaggatttattgttatattacttgcctatctgacttcatac

SEQ ID NO: 339671 - protein, 427 aa, Artificial Sequence
  derived and/or modified sequence
MQQIPQEKSINDYLEKFYQLPSNQYQSTRKNGTNVIVEKLKEMQRFFGLNVTGKPNEETLDMMKKPRCGVPDSGGFMLTPGNPKWERTNLTYRIRNYTPQLSEAEVERAIKDAFELWSVASPLIFTRISQGEADINIAFYQRDHGDNSPFDGPNGILAHAFQPGQGIGGDAHFDAEETWTNTSANYNLFLVAAHEFGHSLGLAHSSDPGALMYPNYAFRETSNYSLPQDDIDGIQAIYGLSSNPIQPTGPSTPKPCDPSLTFDAITTLRGEILFFKDRYFWRRHPQLQRVEMNFISLFWPSLPTGIQAAYEDFDRDLIFLFKGNQYWALSGYDILQGYPKDISNYGFPSSVQAIDAAVFYRSKTYFFVNDQFWRYDNQRQFMEPGYPKSISGAFPGIESKVDAVFQQEHFFHVFSGPRYYAFDLIAQ

SEQ ID NO: 339672 - DNA, 1284 bp, Artificial Sequence
  derived and/or modified sequence
atgcagcagatcccccaggagaagagcatcaacgactacctggagaagttctaccagctgcccagcaaccagtaccagagcaccagaaagaacggcaccaacgtgatcgtggagaagctgaaggagatgcagagattcttcggcctgaacgtgaccggcaagcccaacgaggagaccctggacatgatgaagaagcccagatgcggcgtgcccgacagcggcggcttcatgctgacccccggcaaccccaagtgggagagaaccaacctgacctacagaatcagaaactacaccccccagctgagcgaggccgaggtggagagagccatcaaggacgccttcgagctgtggagcgtggccagccccctgatcttcaccagaatcagccagggcgaggccgacatcaacatcgccttctaccagagagaccacggcgacaacagccccttcgacggccccaacggcatcctggcccacgccttccagcccggccagggcatcggcggcgacgcccacttcgacgccgaggagacctggaccaacaccagcgccaactacaacctgttcctggtggccgcccacgagttcggccacagcctgggcctggcccacagcagcgaccccggcgccctgatgtaccccaactacgccttcagagagaccagcaactacagcctgccccaggacgacatcgacggcatccaggccatctacggcctgagcagcaaccccatccagcccaccggccccagcacccccaagccctgcgaccccagcctgaccttcgacgccatcaccaccctgagaggcgagatcctgttcttcaaggacagatacttctggagaagacacccccagctgcagagagtggagatgaacttcatcagcctgttctggcccagcctgcccaccggcatccaggccgcctacgaggacttcgacagagacctgatcttcctgttcaagggcaaccagtactgggccctgagcggctacgacatcctgcagggctaccccaaggacatcagcaactacggcttccccagcagcgtgcaggccatcgacgccgccgtgttctacagaagcaagacctacttcttcgtgaacgaccagttctggagatacgacaaccagagacagttcatggagcccggctaccccaagagcatcagcggcgccttccccggcatcgagagcaaggtggacgccgtgttccagcaggagcacttcttccacgtgttcagcggccccagatactacgccttcgacctgatcgcccagtag

SEQ ID NO: 339673 - DNA, 1284 bp, Artificial Sequence
  derived and/or modified sequence
atgcagcagatcccacaagagaaatcaatcaacgattacctggaaaagttctaccagcttccctccaaccagtaccagtccactcgaaagaacggaacgaatgtgatcgtcgaaaagcttaaagaaatgcagcggttcttcgggctcaacgtgacagggaagccgaatgaggagacactggatatgatgaaaaaaccccgttgcggggtgcccgacagcggggggtttatgttgacccctggcaaccctaagtgggagcgcacaaatctgacctatagaattaggaattacaccccacagctctccgaggccgaagtggagagagctataaaagacgcgttcgagctgtggtctgtggctagcccgctcattttcacacggataagtcaaggggaggctgatataaacatagcattctaccagagggaccatggtgacaacagtcctttcgatggtcctaacgggatcctcgcacacgctttccaacccgggcaaggcatcggaggcgatgcccatttcgacgccgaagagacctggacaaatacctctgccaactacaacctgttcctagtagctgcacacgagttcggccatagcttaggtttggcccatagcagcgatcctggggccctcatgtatccgaattacgcattcagagagacctcaaactacagccttccccaggacgatatcgacggtatccaggccatctacgggttaagctctaatcccattcagccaacaggccccagcacccctaagccttgcgacccctcactcacctttgacgcaatcactaccctccgaggggagatcctattttttaaggacagatacttttggaggcgacacccacaactgcaacgagtggagatgaacttcattagcctgttctggccgagcttacccacaggtattcaggcggcctacgaagacttcgacagagacctgatatttctcttcaagggaaaccagtattgggccttgtctggctatgacattttacagggctatccaaaggatatctcgaattacggctttccatccagcgtgcaagcaattgacgctgccgttttttatagatctaaaacctatttcttcgtcaacgaccaattctggcgttacgacaatcagagacagttcatggagccaggatatccgaagagcatctcgggtgcatttccaggaatcgaatctaaagtagatgccgtgtttcaacaggagcatttcttccacgtttttagcggtcctcgctactatgccttcgatctgatcgctcagtag

SEQ ID NO: 339674 - DNA, 1284 bp, Artificial Sequence
  derived and/or modified sequence
atgcagcagatcccccaggagaagagcatcaatgactacctggagaagttctaccagctgcccagcaaccagtaccagagcaccaggaagaatggcaccaacgtcatcgtggagaagctgaaggagatgcagcgcttcttcggcctgaatgtgacaggcaagcccaatgaggagaccctggacatgatgaagaagccccgctgtggggtgcctgattctgggggcttcatgctgaccccaggcaaccccaagtgggagaggaccaacctgacctaccgcatccggaactacaccccccagctgtctgaggccgaggtggagcgggccatcaaggatgcctttgagctgtggagcgtggccagccccctcatcttcacccgcatcagccagggcgaggccgacatcaacatcgccttctaccagagggaccacggggacaacagcccctttgatggccccaacggcatcctggcccacgccttccagcccggccagggcattggaggagatgcccactttgatgctgaggagacctggaccaacaccagcgccaactacaacctcttcctggtggccgcccacgagtttggccacagcctgggcctggcccacagcagtgaccccggggccctgatgtaccccaactatgccttccgggagaccagcaactacagcctgccccaggatgacattgatggcatccaggccatctacggcctgagcagcaaccccatccagcccaccggccccagcacccccaagccctgtgaccccagcctgacctttgatgccatcaccaccctgcggggggagatcctcttcttcaaggaccgctacttctggaggaggcacccccagctgcagagggtggagatgaacttcatcagcctcttctggcccagcctgcccaccggcatccaggccgcctatgaagattttgaccgggacctgatcttcctgttcaagggcaaccagtactgggccctgagcggctatgacatcctgcagggctaccccaaggacatcagcaactacggcttccccagctctgtgcaggccattgatgctgctgtgttctaccgcagcaagacctacttctttgtgaatgaccagttctggaggtatgacaaccagaggcagttcatggagcccggctaccccaagagcatcagcggggccttccctggcatcgagagcaaggtggatgctgtgttccagcaggagcacttcttccacgtgttttctggcccccgctactatgcctttgacctgattgcccagtag

SEQ ID NO: 339675 - DNA, 1284 bp, Artificial Sequence
  derived and/or modified sequence
atgcagcagatcccccaggagaagagcatcaacgactacctggagaagttttatcagcttcctagcaaccagtaccaaagcaccagaaaaaacggcaccaatgtgattgttgagaaacttaaagagatgcagcgattcttcgggctgaacgtgaccgggaaacccaacgaagagacgctcgacatgatgaagaagccacgctgtggcgtgcccgattcaggaggttttatgctcactcccggtaatcccaaatgggaacgtaccaaccttacgtatcgaatccgtaattacaccccacaactttcagaggcagaggtggagcgggccattaaggatgcctttgaactctggtccgtggctagccctctgatctttactcgcattagccagggagaggctgacatcaacatcgccttttaccagcgcgaccatggcgacaactccccctttgacggccccaacggcatactcgcccacgcattccagcccggtcaggggattggaggtgacgctcactttgatgcggaggagacttggacaaatacgtctgcgaactacaacctgttcttggtagctgcccacgagttcggtcacagcctgggattggcccacagcagcgatcccggtgcactaatgtatccgaactacgccttcagggaaacatccaactacagtttaccccaggacgatatcgacggaatccaggccatctacggcctcagttcgaaccctattcaacccactgggccctcaacgcctaagccgtgcgacccatccctcacatttgacgctattaccactcttagaggtgaaattctgttttttaaggacagatacttctggaggagacatcctcagctgcagcgtgttgaaatgaactttatcagcttgttttggccatctctcccaactggtattcaggccgcctatgaggatttcgaccgcgacctcatctttctgtttaagggcaatcagtactgggccctgtccggatatgacatcctgcagggttacccaaaggatattagtaattacggctttccaagctcagttcaggctatcgacgcagcagtcttttacagatctaagacctacttcttcgtgaatgatcagttttggagatatgacaaccaacgacagtttatggagccagggtatcctaaatccatttctggggcttttcctggcattgaatctaaggtggatgctgtgtttcagcaggagcactttttccacgtgttcagtggccctcgctattatgccttcgacctgatcgcccaatag

SEQ ID NO: 339676 - DNA, 1284 bp, Artificial Sequence
  derived and/or modified sequence
atgcagcagatcccacaagagaagagtatcaatgactatcttgagaaattctaccagctccctagtaaccaataccagtctacgagaaagaatgggacaaacgtcatagtggagaagttgaaggaaatgcaacgctttttcggtctgaacgtaacgggtaaaccaaacgaagagactctagatatgatgaaaaagccacgttgcggcgttcctgactcaggagggttcatgctcaccccgggtaatcccaaatgggagagaacaaacctgacataccggatcaggaactacactccacagctgtcagaggccgaagttgagcgggctattaaggatgcgttcgaactgtggagcgtcgcgtcacctctgatatttaccaggatttcgcaaggagaggcggatattaacatcgctttctaccagagagaccacggtgacaatagtcccttcgatggtcccaacgggatcctcgcacacgcattccagccaggtcaaggaatcggcggagatgcccacttcgacgccgaggagacttggacaaatacctccgcaaactacaatctgtttctagtagccgctcacgagttcggacattcacttggccttgctcacagcagtgacccgggagccctcatgtacccaaactatgcttttcgggagacttcaaattacagtttacctcaagacgatattgatggcatacaggcaatttacggactctcttccaatcccatccagcccactggcccatcaacccccaaaccgtgcgatccttcacttacattcgacgccatcacaacactgcggggagagattctcttcttcaaggaccgctacttctggcgtcgtcatcctcagttgcagcgagtggagatgaatttcatttctttgttttggccctccctacccaccgggatacaggctgcatatgaggacttcgatcgcgatctgatcttcttgttcaaaggaaaccaatactgggcactctccggctatgacatcctccagggctatccgaaggatatttccaattacggctttcctagctccgtacaagccatagatgctgctgtgttttatcgatccaagacatacttcttcgtgaatgaccaattctggcgttacgacaaccagagacaattcatggaacctggttaccccaagtctataagtggagcattcccgggaattgaaagcaaggttgatgctgtgtttcaacaggaacacttcttccatgtcttttcgggacctaggtattacgccttcgatctgatcgcgcaatag

SEQ ID NO: 339677 - protein, 305 aa, Artificial Sequence
  derived and/or modified sequence
MQRFFGLNVTGKPNEETLDMMKKPRCGVPDSGGFMLTPGNPKWERTNLTYRIRNYTPQLSEAEVERAIKDAFELWSVASPLIFTRISQGEADINIAFYQRDHGDNSPFDGPNGILAHAFQPGQGIGGDAHFDAEETWTNTSANYNLFLVAAHEFGHSLGLAHSSDPGALMYPNYAFRETSNYSLPQDDIDGIQAIYGLSSNPIQPTGPSTPKPCDPSLTFDAITTLRGEILFFKDRYFWRRHPQLQRVEMNFISLFWPSLPTGIQAAYEDFDRDLIFLFKDMITKDNSWSQVIPKAYQVPFRNRE

SEQ ID NO: 339678 - DNA, 918 bp, Artificial Sequence
  derived and/or modified sequence
atgcagagattcttcggcctgaacgtgaccggcaagcccaacgaggagaccctggacatgatgaagaagcccagatgcggcgtgcccgacagcggcggcttcatgctgacccccggcaaccccaagtgggagagaaccaacctgacctacagaatcagaaactacaccccccagctgagcgaggccgaggtggagagagccatcaaggacgccttcgagctgtggagcgtggccagccccctgatcttcaccagaatcagccagggcgaggccgacatcaacatcgccttctaccagagagaccacggcgacaacagccccttcgacggccccaacggcatcctggcccacgccttccagcccggccagggcatcggcggcgacgcccacttcgacgccgaggagacctggaccaacaccagcgccaactacaacctgttcctggtggccgcccacgagttcggccacagcctgggcctggcccacagcagcgaccccggcgccctgatgtaccccaactacgccttcagagagaccagcaactacagcctgccccaggacgacatcgacggcatccaggccatctacggcctgagcagcaaccccatccagcccaccggccccagcacccccaagccctgcgaccccagcctgaccttcgacgccatcaccaccctgagaggcgagatcctgttcttcaaggacagatacttctggagaagacacccccagctgcagagagtggagatgaacttcatcagcctgttctggcccagcctgcccaccggcatccaggccgcctacgaggacttcgacagagacctgatcttcctgttcaaggacatgatcaccaaggacaacagctggagccaggtgatccccaaggcctaccaggtgcccttcagaaacagagagtag

SEQ ID NO: 339679 - DNA, 918 bp, Artificial Sequence
  derived and/or modified sequence
atgcagagatttttcggtctgaacgtgaccggtaagcctaacgaggaaacattggatatgatgaagaagccaagatgcggcgtcccggatagcggggggtttatgctgacccctgggaatcccaaatgggaaagaaccaatctcacatatcgcattcgaaactacacacctcagctatccgaagctgaggtagagcgggctattaaagacgccttcgaactgtggtcagtggcctcccccctcatattcacacgcatttcccagggcgaggccgacataaacatcgccttttaccaacgcgaccacggggataactctcctttcgatggcccaaacgggattctcgcgcatgcgttccagcccggccagggcattgggggggacgcacactttgatgctgaggaaacgtggacaaatacctctgccaattataacctttttcttgtcgccgctcacgaatttgggcactcactcggcctggcacattcctccgatcccggagcattgatgtacccaaactacgccttccgggaaacttctaactactcccttccccaggatgatattgacggcattcaggcaatctatggcttgagttccaacccaatccagcccacagggccctcaacacctaagccctgtgacccaagccttacattcgacgcaataacaacactgagaggggagattcttttcttcaaagacaggtatttctggcggaggcatcctcagctacagagagtagaaatgaactttatctctcttttctggcctagcttgcccacggggatccaagcagcatacgaggactttgacagggatctaatcttcttgtttaaagacatgataaccaaggataattcttggagccaggttattcctaaagcataccaggtacccttccgcaacagagaatag

SEQ ID NO: 339680 - DNA, 918 bp, Artificial Sequence
  derived and/or modified sequence
atgcagcgcttcttcggcctgaatgtgacaggcaagcccaatgaggagaccctggacatgatgaagaagccccgctgtggggtgcctgattctgggggcttcatgctgaccccaggcaaccccaagtgggagaggaccaacctgacctaccgcatccggaactacaccccccagctgtctgaggccgaggtggagcgggccatcaaggatgcctttgagctgtggagcgtggccagccccctcatcttcacccgcatcagccagggcgaggccgacatcaacatcgccttctaccagagggaccacggggacaacagcccctttgatggccccaacggcatcctggcccacgccttccagcccggccagggcattggaggagatgcccactttgatgctgaggagacctggaccaacaccagcgccaactacaacctcttcctggtggccgcccacgagtttggccacagcctgggcctggcccacagcagtgaccccggggccctgatgtaccccaactatgccttccgggagaccagcaactacagcctgccccaggatgacattgatggcatccaggccatctacggcctgagcagcaaccccatccagcccaccggccccagcacccccaagccctgtgaccccagcctgacctttgatgccatcaccaccctgcggggggagatcctcttcttcaaggaccgctacttctggaggaggcacccccagctgcagagggtggagatgaacttcatcagcctcttctggcccagcctgcccaccggcatccaggccgcctatgaagattttgaccgggacctgatcttcctgttcaaggacatgatcaccaaggacaacagctggagccaggtgatccccaaggcctaccaggtgcccttcaggaaccgggagtag

SEQ ID NO: 339681 - DNA, 918 bp, Artificial Sequence
  derived and/or modified sequence
atgcagcggttcttcggcctgaacgtgaccggcaagcccaacgaggagactttggatatgatgaaaaagcctagatgcggtgtgcctgattctggggggtttatgctgacgcccggcaatccaaagtgggagcggacaaacctgacataccgaatcagaaactacactccgcaattaagcgaagctgaagtagaaagagctattaaagatgcctttgagttgtggagtgttgctagtcccttaatctttacaaggattagccaaggagaggcagacattaatatcgcattctaccagcgagaccacggagataacagtccattcgacggaccaaatgggatcctcgcacacgcgtttcaacctgggcaagggattggtggggacgctcatttcgacgctgaagagacatggacgaacactagtgcaaattacaacctttttttagttgcagcacacgagtttggccacagcttggggctcgctcactcctcagacccaggcgcgcttatgtaccccaactacgcatttcgggagacgtcgaattactctttgccacaggacgatatcgacgggatccaggctatatacggccttagttccaatcccatccagccaactggaccctctacacctaaaccttgcgaccccagcctcacctttgacgccattactacactcagaggggaaatccttttctttaaggatcgttacttctggaggcgacacccccagctgcagagagtagagatgaactttatctctctgttttggccgtctctcccgacaggcatccaagcagcttacgaagactttgacagagatctcatctttctttttaaagatatgatcaccaaagacaacagttggtctcaggttatcccgaaggcttatcaggtcccctttcgcaacagagagtag

SEQ ID NO: 339682 - DNA, 918 bp, Artificial Sequence
  derived and/or modified sequence
atgcaaaggttctttggcctaaatgtcacaggcaaacctaatgaagaaaccctggatatgatgaagaaacccagatgcggagtaccagattctggcggtttcatgctgacccccggtaaccccaaatgggaaagaacaaatctaacctacaggattcgcaactacaccccccagcttagtgaagcggaagtcgaaagagcaatcaaagatgccttcgaactttggtctgtagcttccccactgattttcaccagaattagtcagggagaggcagacattaacatagcattctaccagagagaccacggagataatagtcccttcgatggacccaacggaatcctggcacacgcctttcagcccggtcaagggattggtggagacgctcactttgacgctgaagagacctggaccaacacctctgccaactacaatctgtttctggtggctgcccatgaattcggacacagcctcggcctcgcccacagttcagatccaggcgctcttatgtacccaaactatgcttttagggaaacgagcaattactctcttccgcaagatgatatcgacgggatacaggctatttatgggctcagctccaaccctattcagcccaccggcccatccaccccgaaaccctgcgacccaagcctgaccttcgacgctatcacaactcttagaggggaaatcttgttcttcaaagatagatacttttggaggcgacatcctcaactgcaacgtgttgagatgaactttatcagcctgttttggccaagtctgcccacaggaattcaggctgcatatgaagactttgatcgggacttgatcttcttgttcaaggacatgatcactaaagataatagctggtcccaggtgatacccaaggcttatcaggtaccatttcggaatagggagtag

SEQ ID NO: 339683 - DNA, 1514 bp, Artificial Sequence
  derived and/or modified sequence
gacacatgatgctgtgaacgtcagggtgctcgccagggaagggccctacccagagggacagaaagaaagccaggaggggtagagtttgaagagaagatcatgttctccctgaagacgcttctaaagagaaaaatacaaaaactgttcaggactacctggaaaagttctaccaattaccaagcaaccagtatcagtctacaaggaagaatggcactaatgtgatcgttgaaaagcttaaagaaatgcagcgattttttgggttgaatgtgacggggaagccaaatgaggaaactctggacatgatgaaaaagcctcgctgtggagtgcctgacagtggtggttttatgttaaccccaggaaaccccaagtgggaacgcactaacttgacctacaggattcgaaactataccccacagctgtcagaggctgaggtagaaagagctatcaaggatgcctttgaactctggagtgttgcatcacctctcatcttcaccaggatctcacagggagaggcagatatcaacattgctttttaccaaagagatcacggtgacaattctccatttgatggacccaatggaatccttgctcatgcctttcagccaggccaaggtattggaggagatgctcattttgatgccgaagaaacatggaccaacacctccgcaaattacaacttgtttcttgttgctgctcatgaatttggccattctttggggctcgctcactcctctgaccctggtgccttgatgtatcccaactatgctttcagggaaaccagcaactactcactccctcaagatgacatcgatggcattcaggccatctatggactttcaagcaaccctatccaacctactggaccaagcacacccaaaccctgtgaccccagtttgacatttgatgctatcaccacactccgtggagaaatacttttctttaaagacaggtacttctggagaaggcatcctcagctacaaagagtcgaaatgaattttatttctctattctggccatcccttccaactggtatacaggctgcttatgaagattttgacagagacctcattttcctatttaaagatatgataaccaaagacaattcatggagccaggttatcccaaaagcatatcaggtgcctttcaggaatagagagtaaagttgatgcagttttccagcaagaacatttcttccatgtcttcagtggaccaagatattacgcatttgatcttattgctcagagagttaccagagttgcaagaggcaataaatggcttaactgtagatatggctgaagcaaaatcaaatgtggctgtatccactttcagaatgttgaagggaagttcagcaagcattttcgttacattgtgtcctgcttatacttttctcaatattaagtcattgtttcccatcactgtatccattctacctgtcctccgtgaaaatatgtttggaatattccactatttgcagaggcttattcagttcttacacattccatcttacattagtg

SEQ ID NO: 339684 - protein, 138 aa, Artificial Sequence
  derived and/or modified sequence
MTLHEPANSSASQSTDLCDFSGDLDPAPNPPHFPSHVIKATFAYISNCHKTKLKSILEILSKSPDSYQKILLAICEQAAETNNVYKKHRILKIYHLFVSLLLKDIKSGLGGAWAFVLRDVIYTLIHYINQRKLTIFSQ

SEQ ID NO: 339685 - protein, 1369 aa, Artificial Sequence
  derived and/or modified sequence
MSLVLNDLLICCRQLEHDRATERKKEVEKFKRLIRDPETIKHLDRHSDSKQGKYLNWDAVFRFLQKYIQKETECLRIAKPNVSASTQASRQKKMQEISSLVKYFIKCANRRAPRLKCQELLNYIMDTVKDSSNGAIYGADCSNILLKDILSVRKYWCEISQQQWLELFSVYFRLYLKPSQDVHRVLVARIIHAVTKGCCSQTDGLNSKFLDFFSKAIQCARQEKSSSGLNHILAALTIFLKTLAVNFRIRVCELGDEILPTLLYIWTQHRLNDSLKEVIIELFQLQIYIHHPKGAKTQEKGAYESTKWRSILYNLYDLLVNEISHIGSRGKYSSGFRNIAVKENLIELMADICHQVFNEDTRSLEISQSYTTTQRESSDYSVPCKRKKIELGWEVIKDHLQKSQNDFDLVPWLQIATQLISKYPASLPNCELSPLLMILSQLLPQQRHGERTPYVLRCLTEVALCQDKRSNLESSQKSDLLKLWNKIWCITFRGISSEQIQAENFGLLGAIIQGSLVEVDREFWKLFTGSACRPSCPAVCCLTLALTTSIVPGTVKMGIEQNMCEVNRSFSLKESIMKWLLFYQLEGDLENSTEVPPILHSNFPHLVLEKILVSLTMKNCKAAMNFFQSVPECEHHQKDKEELSFSEVEELFLQTTFDKMDFLTIVRECGIEKHQSSIGFSVHQNLKESLDRCLLGLSEQLLNNYSSEITNSETLVRCSRLLVGVLGCYCYMGVIAEEEAYKSELFQKAKSLMQCAGESITLFKNKTNEEFRIGSLRNMMQLCTRCLSNCTKKSPNKIASGFFLRLLTSKLMNDIADICKSLASFIKKPFDRGEVESMEDDTNGNLMEVEDQSSMNLFNDYPDSSVSDANEPGESQSTIGAINPLAEEYLSKQDLLFLDMLKFLCLCVTTAQTNTVSFRAADIRRKLLMLIDSSTLEPTKSLHLHMYLMLLKELPGEEYPLPMEDVLELLKPLSNVCSLYRRDQDVCKTILNHVLHVVKNLGQSNMDSENTRDAQGQFLTVIGAFWHLTKERKYIFSVRMALVNCLKTLLEADPYSKWAILNVMGKDFPVNEVFTQFLADNHHQVRMLAAESINRLFQDTKGDSSRLLKALPLKLQQTAFENAYLKAQEGMREMSHSAENPETLDEIYNRKSVLLTLIAVVLSCSPICEKQALFALCKSVKENGLEPHLVKKVLEKVSETFGYRRLEDFMASHLDYLVLEWLNLQDTEYNLSSFPFILLNYTNIEDFYRSCYKVLIPHLVIRSHFDEVKSIANQIQEDWKSLLTDCFPKILVNILPYFAYEGTRDSGMAQQRETATKVYDMLKSENLLGKQIDHLFISNLPEIVVELLMTLHEPANSSASQSTDLCDFS

SEQ ID NO: 339686 - protein, 93 aa, Artificial Sequence
  derived and/or modified sequence
MSLVLNDLLICCRQLEHDRATERKKEVEKFKRLIRDPETIKHLDRHSDSKQGKYLNWDAVFRFLQKYIQKETECLRIAKPNVSASTQASRQKK

SEQ ID NO: 339687 - DNA, 4110 bp, Artificial Sequence
  derived and/or modified sequence
atgtccctggtgcttaacgacctacttatttgctgccggcagctcgagcacgaccgcgctaccgagagaaagaaagaagtggaaaaattcaaaaggctcatccgagacccagaaactatcaagcatcttgaccgccattccgacagtaaacaaggaaaatacctcaactgggacgctgtgtttaggtttctgcagaaatatattcagaaggagaccgagtgtctcagaattgcaaaaccgaatgtaagcgcctcaacccaagctagcagacagaaaaaaatgcaggaaatttcttccctggtcaaatacttcataaagtgcgccaaccgtagggctccacgtcttaagtgccaggagttgcttaattacatcatggataccgttaaggatagttctaatggggctatatacggggcagattgttccaatatcctcctgaaagacatcctgagtgtgaggaagtactggtgcgagatctcgcaacaacaatggctggaattgtttagcgtgtactttcgcctatatctgaagccaagccaggatgtccacagagtgttagtggcacgcatcattcatgccgtcactaagggttgctgtagccagactgatgggctcaatagcaagttcttagatttcttcagcaaggctattcagtgtgcccggcaggagaagtcgtcatcaggacttaaccacattctggctgccttgacaatatttcttaaaaccctggccgtgaactttcggatccgcgtgtgtgagctcggagacgagattttgccaacactgctttatatttggacccagcataggttgaacgattccctgaaggaggtcatcatcgagctcttccagctgcagatctatatccaccaccctaaaggagctaagactcaggaaaaaggagcttatgaaagcacaaaatggcgctccattctctataatctgtatgacctcctggtgaacgaaatatctcacatagggtcccggggcaagtatagctcgggattcagaaatatagctgtgaaggagaatctgatcgaattaatggcggacatctgccatcaggtgttcaatgaggatacacggtcgttggaaatttcacagtcttataccacaacccagcgcgagtctagcgactattctgttccctgcaagcggaaaaaaattgagctgggatgggaggtaatcaaagatcatttgcaaaaatcccaaaacgacttcgacctggtgccatggctgcaaattgcgactcaattgataagcaagtaccccgcgtccctgccgaattgtgaactgtctccactgctgatgatcctcagtcagctcctgccccagcaaagacacggagagcggacaccatacgttctgagatgcttaacagaggtggccctgtgccaggataaaagatcgaacttagaatcgtctcagaaaagcgatctcttgaaactctggaataagatttggtgtatcacttttaggggcataagctcagagcagatccaagccgagaactttgggcttctgggtgcaattattcaggggagtcttgtggaagtcgatagagaattttggaagctgtttactggcagtgcttgtagaccttcatgccctgctgtttgctgcctcacccttgcactgaccacatccatcgttcccggaacagttaagatgggaatcgaacagaacatgtgcgaagtcaataggagtttctccctcaaagagagcatcatgaagtggttgctcttttatcagctggaaggagacctggagaattcgactgaggtcccacctatccttcattccaacttcccccatctcgtcctggagaagatcttggtaagtctcactatgaaaaactgcaaggctgctatgaatttctttcagagcgtacccgaatgtgagcatcatcagaaggacaaagaggagctatccttcagtgaggtagaagagctgttcctgcagacaaccttcgacaaaatggactttttgactattgttcgtgagtgcgggattgagaaacaccagtctagcatcggattttcggtgcaccaaaatctaaaagagtctctagaccggtgcctgctgggcctgtccgaacagctcctgaataattacagttctgagatcactaatagtgagacgctggtgagatgcagtcggttgctcgtcggagtattggggtgttattgttacatgggcgtgattgccgaagaggaagcctacaaaagcgaactcttccagaaagcaaagtcactgatgcaatgtgcaggcgagtccatcacactgttcaaaaacaagactaatgaggagttccggatcggcagcctaaggaatatgatgcaattatgcacacgctgcctgagtaattgcacaaaaaaaagccctaataaaattgcctctggttttttcctgagactattgacctctaaactgatgaacgatatcgccgacatttgcaagagcctggcatctttcatcaaaaagccatttgacagaggggaggtagaatcaatggaggacgacactaacggaaatctcatggaggtggaagaccagtcctccatgaacctatttaacgattacccagattcctccgtttccgacgcaaacgagcctggcgagagtcagtccactattggagccatcaacccactggctgaggagtacctatctaagcaggatttgcttttcctcgatatgttgaaatttctctgtctgtgcgttaccacagcgcagactaatactgtgtcatttagagcagccgatattaggcgcaaactcctgatgttgatcgattcgtccacccttgaacctacaaagtctctacatctgcacatgtacctgatgcttcttaaggaactgccaggcgaagaataccccctccctatggaggacgtgctggaactgttaaaaccattgtccaacgtctgcagcctctatcggcgagaccaggacgtgtgtaaaaccattcttaaccatgtgctgcatgtggtcaaaaatctgggccagagtaatatggactccgagaatacccgggatgcccagggccagtttctgaccgtgatcggggctttttggcacctgacaaaagaacgtaaatatattttttccgttaggatggccctggtcaattgcctaaaaaccctactcgaggcagatccctattcaaagtgggctattctgaacgtgatgggcaaggactttcctgttaacgaagtgttcacacagttcctggctgacaaccaccaccaggtgcgtatgctggctgcagagtccattaacagattgtttcaggacacaaaaggcgattctagccggttactgaaagccctacccttgaaactgcagcagaccgcattcgaaaatgcgtatctgaaagcccaggaaggtatgagggagatgtctcactctgctgagaaccccgagacattggacgagatctataaccgaaaaagtgtgctcttgaccctcatcgctgtggtgctctcctgtagcccaatttgcgaaaagcaagctttattcgctctctgtaagagtgtcaaggagaatggccttgagccccacctagtcaaaaaagtgctagagaaagtgagcgagacgttcggttataggaggttggaggacttcatggcctcgcacctagattatctggtgctggaatggctgaatcttcaggacaccgaatacaatctttcttcttttcccttcattttgctgaattacaccaacatcgaggacttttacagaagctgctataaagtgctgatacctcatcttgtgattcgatcccacttcgatgaggtaaagtcaattgctaaccagattcaagaggactggaagtccctattgacagattgcttccctaagatcctggtcaacatcctaccatacttcgcctacgaggggaccagagacagtggcatggctcagcaacgagagaccgcgaccaaggtttatgatatgctgaagtcagagaacttgttgggaaaacagatcgaccacctgttcatttccaatctgcccgaaattgtggtggagctgctaatgacactgcacgagcccgccaactcaagcgcttctcagtctactgacctgtgcgatttctcatag

SEQ ID NO: 339688 - DNA, 4110 bp, Artificial Sequence
  derived and/or modified sequence
atgagcctggtgctgaatgacctgctgatctgctgccggcagctggagcatgaccgggccacagagaggaagaaggaggtggagaagttcaagaggctcatccgggaccctgagaccatcaagcacctggacagacacagcgacagcaagcagggcaagtacctgaactgggatgctgtgttccgcttcctgcagaagtacatccagaaggagacagaatgtctgagaattgccaagcccaacgtgtctgccagcacccaggccagccggcagaagaagatgcaggagatcagcagcctggtgaagtacttcatcaagtgtgccaacagaagagccccccggctgaagtgccaggagctgctgaactacatcatggacacagtgaaggacagcagcaatggagccatctatggagctgactgcagcaacatcctgctgaaggacatcctgtctgtgaggaagtactggtgtgagatcagccagcagcagtggctggagctgttctctgtgtacttccggctgtacctgaagcccagccaggatgtgcaccgggtgctggtggcccgcatcatccatgctgtgaccaagggctgctgcagccagacagatggcctgaacagcaagttcctggacttcttcagcaaggccatccagtgtgcccggcaggagaagagcagcagcggcctgaaccacatcctggccgccctgaccatcttcctgaagaccctggccgtgaacttccgcatccgggtgtgtgagctgggagatgagatcctgcccaccctgctgtacatctggacccagcaccggctgaatgacagcctgaaggaggtgatcatcgagctgttccagctgcagatctacatccaccaccccaagggggccaagacccaggagaagggggcctatgagagcaccaagtggaggagcatcctgtacaacctgtatgacctgctggtgaatgagatcagccacatcggcagccggggcaagtacagcagcggcttcagaaatattgctgtgaaggaaaatctcatcgagctgatggctgacatctgccaccaggtgttcaatgaagacaccaggagcctggagatcagccagagctacaccaccacccagcgggagagcagtgactacagcgtgccctgcaagaggaagaagattgagctgggctgggaggtgatcaaggaccacctgcagaagagccagaatgactttgacctggtgccctggctgcagatcgccacccagctgatcagcaagtacccagccagcctgcccaactgtgagctgagccccctgctgatgatcctgagccagctgctgccccagcagagacatggagagaggaccccctacgtgctgcgctgcctgacagaggtggccctgtgccaggacaagaggagcaacctggagagcagccagaagagtgacctgctgaagctgtggaacaagatctggtgcatcaccttccggggcatcagcagcgagcagatccaggctgaaaattttggcctgctgggcgccatcatccagggcagcctggtggaggtggaccgggagttctggaagctgttcaccggcagcgcctgccggcccagctgcccagctgtgtgctgcctgaccctggccctgaccaccagcatcgtgcccggcaccgtgaagatgggcatcgagcagaacatgtgtgaggtgaacagaagcttcagcctgaaggagagcatcatgaagtggctgctcttctaccagctggagggggacctggagaacagcacagaggtgccccccatcctgcacagcaacttcccccacctggtgctggagaagatcctggtgtccctgaccatgaagaactgcaaggccgccatgaacttcttccagagcgtgcctgaatgtgagcaccaccagaaggacaaggaggagctgtccttcagcgaggtggaggagctgttcctgcagaccacctttgacaagatggacttcctgaccatcgtgcgggagtgtggcatcgagaagcaccagagcagcatcggcttctctgtgcaccagaacctgaaggagagcctggaccgctgcctgctgggcctgtctgagcagctgctgaacaactacagcagcgagatcaccaacagcgagaccctggtgcgctgcagccggctgctggtgggcgtgctgggctgctactgctacatgggcgtgattgctgaggaggaggcctacaagtctgagctgttccagaaggccaagagcctgatgcagtgtgccggggagagcatcaccctcttcaagaacaagaccaatgaggagttcagaattggcagcctgaggaacatgatgcagctgtgcacccgctgcctgagcaactgcaccaagaagagccccaacaagatcgccagcggcttcttcctgcggctgctgaccagcaagctgatgaatgacattgctgacatctgcaagagcctggccagcttcatcaagaagccctttgacagaggagaggtggagagcatggaggatgacaccaatggaaacctgatggaggtggaggaccagagctccatgaacctcttcaatgactacccagacagctctgtgtctgatgccaatgagcccggggagagccagagcaccatcggggccatcaaccccctggccgaggagtacctgagcaagcaggacctgctcttcctggacatgctgaagttcctgtgcctgtgtgtgaccacagcccagaccaacacagtgtccttccgggctgctgacatccggaggaagctgctgatgctgattgacagcagcaccctggagcccaccaagagcctgcacctgcacatgtacctgatgctgctgaaggagctgcctggagaggagtaccccctgcccatggaggatgtgctggagctgctgaagcccctgagcaatgtgtgcagcctgtacagaagagaccaggatgtgtgcaagaccatcctgaaccacgtgctgcacgtggtgaagaacctgggccagagcaacatggacagcgagaacaccagagatgcccagggccagttcctgaccgtcatcggggccttctggcacctgaccaaggagaggaagtacatcttctctgtgaggatggccctggtgaactgcctgaagaccctgctggaggccgacccctacagcaagtgggccatcctgaatgtgatgggcaaggacttccctgtgaatgaggtgttcacccagttcctggccgacaaccaccaccaggtgaggatgctggccgctgagagcatcaacagactcttccaggacaccaagggggacagcagccggctgctgaaggccctgcccctgaagctgcagcagacagcctttgaaaatgcctacctgaaggcccaggagggcatgagggagatgagccacagcgcagaaaatcctgagaccctggatgagatctacaacaggaagtctgtgctgctgaccctgattgctgtggtgctgagctgcagccccatctgtgagaagcaggccctgtttgccctgtgcaagtctgtgaaggaaaatggcctggagccccacctggtgaagaaggtgctggagaaggtgtctgagaccttcggctaccgccgcctggaggacttcatggccagccacctggactacctggtgctggagtggctgaacctgcaggacacagagtacaacctgagcagcttccccttcatcctgctgaactacaccaacatcgaggacttctaccgcagctgctacaaggtgctgatcccccacctggtgatccgcagccactttgatgaggtgaagagcatcgccaaccagatccaggaggactggaagagcctgctgacagactgcttccccaagatcctggtgaacatcctgccctactttgcctatgagggcacccgggacagcggcatggcccagcagcgggagacagccaccaaggtgtatgacatgctgaagtctgagaacctgctgggcaagcagattgaccacctgttcatcagcaacctgcctgagatcgtggtggagctgctgatgaccctgcacgagcccgccaacagcagcgccagccagagcacagacctgtgtgacttctcctag

SEQ ID NO: 339689 - DNA, 4110 bp, Artificial Sequence
  derived and/or modified sequence
atgagcctggtgctgaacgacctgctgatctgctgccggcagctggaacacgacagagctaccgaacgcaagaaagaggtagagaaatttaaacgcctcattcgcgatcccgaaacaatcaaacatctcgaccgccattccgactccaaacaaggcaagtatctgaactgggacgcagttttccgcttcttacagaagtatattcagaaagaaacggagtgtttaaggatagctaagcccaatgtgagtgcctccacacaagcctctcgtcagaagaagatgcaggaaatctcctctctggtgaaatatttcattaaatgcgccaaccgaagggcacccagacttaaatgtcaggagctgctgaattacattatggatacagttaaagattctagtaatggagcaatctacggtgccgattgcagtaacatcctgttgaaggatatcttgtctgtaagaaagtactggtgcgagatcagccaacaacagtggttggagctcttttcggtatattttagactttaccttaagccatcccaggatgttcaccgggtgctggtcgccagaatcatccatgccgtcacaaaaggatgttgctcccagaccgacgggttaaattccaagtttctggattttttctcaaaggccatacagtgtgcccgccaggaaaagtcttcaagtggcctgaaccatatcctggccgccttaactattttcctgaagaccctggccgtaaacttcagaattcgggtatgcgagcttggcgacgaaatactgcccacactcttgtacatttggacccagcatcgcctgaatgactctcttaaagaagttatcatagaactgttccagctgcagatttatatccaccatcccaagggagccaagacacaagagaaaggggcatatgaaagcactaagtggcgtagtatcctttataacctgtatgatctgctagtgaatgaaatctctcacatcggatcaagaggcaagtattccagtggtttcagaaacatcgctgtgaaagagaacctgatagaattgatggcggatatttgccaccaggtgtttaacgaggatacgcggtcactggagatcagccagtcttacaccaccacacaacgggagagttccgactacagcgtgccatgcaaacgtaagaaaatcgagctggggtgggaggttatcaaagaccatcttcagaagagccagaatgatttcgatttggtcccttggttgcaaatagccacccagctgatatcgaagtacccggcctcccttcctaactgtgaattgtcccctctgttgatgatcctgtctcaactcttaccgcagcaacggcatggcgaaaggacaccctacgttctgcgttgtttgacagaagtcgccctgtgtcaggacaaacgatccaacctagagtctagtcagaaaagtgacctgctgaaactgtggaataagatctggtgtataaccttccggggtataagcagcgagcaaatacaagctgaaaacttcggtcttttgggtgcgatcattcagggcagcttagtggaggtcgaccgtgagttctggaaactgttcacgggttctgcctgcaggccgtcttgcccagcggtgtgctgcctcaccttggccctcacaacaagtatcgtcccaggcaccgtgaaaatgggaatcgaacagaatatgtgtgaagtgaatcgcagcttcagcctaaaagagtccattatgaaatggttactattttatcagcttgaaggagacctggagaattctaccgaggtccctccaatattgcattcgaacttcccccatctagtgctggagaaaatcctggtaagtctgactatgaagaactgtaaagccgccatgaattttttccagagcgtgccagagtgcgagcaccaccagaaagataaggaggagttgtctttcagcgaggtagaggagttgtttctgcagaccacatttgataagatggattttctgaccatcgtgcgggagtgcgggatcgagaagcaccagagtagcatcggttttagtgtccaccaaaatctcaaggaatccctcgatcgctgtctactgggtctttctgagcaattgttgaacaattactcctccgagatcacaaattccgagacgttggtgagatgctctcgactgctcgtcggtgtactcggctgctattgttatatgggcgttattgccgaggaggaggcatataagtcagagctttttcagaaggctaaaagtttgatgcaatgtgcgggcgaatccattacgctgttcaaaaacaagacaaacgaggagtttaggatcggatcactgcgcaacatgatgcagctttgcacaagatgtctttccaattgcactaaaaaaagccccaataagatcgcatctgggtttttccttaggctcttaacatctaagctgatgaacgatatcgctgatatttgcaagtctctcgcttcatttattaaaaagccctttgatcgtggggaagtagaaagcatggaggatgataccaatggcaatctgatggaagtggaggatcagagctccatgaacctcttcaatgattacccggattcttcagtgtctgacgcaaatgaaccaggtgagtcgcagtccacaatcggcgcaattaatccacttgccgaagaatatctcagcaaacaggatttgcttttcctggacatgctgaaatttctatgtctttgcgtaaccactgctcaaaccaataccgtttccttccgggccgccgacatccgccgcaagctgcttatgcttatcgactctagtacactggaaccaacaaagtccctccatctccatatgtaccttatgctgctgaaggaattgcctggcgaagagtatccacttcccatggaggatgtcctagagctgctgaagcccttgtcaaatgtgtgttccttgtataggcgggaccaggatgtttgtaaaactattcttaaccacgtactgcacgtagttaaaaacctcgggcagagcaacatggactctgagaacacccgagacgcacaagggcagttccttaccgtgatcggagccttctggcaccttaccaaagagcgaaaatatatcttctcagtcagaatggcgctggtgaattgcctgaagacattgttagaggcagacccctattccaaatgggctattcttaatgtcatggggaaggatttccccgtgaacgaagtgttcacgcagttcctcgccgataaccatcaccaagttaggatgctggctgcagagtcaataaatagattgtttcaggacacgaagggcgatagttccagactcctcaaggcacttcctcttaaactgcagcagactgcctttgaaaacgcctacctgaaggctcaggagggtatgagagaaatgtctcacagcgccgaaaaccctgagaccctggatgagatttataatagaaagtctgtgctgttgacactaatagctgtggtgctcagttgctccccaatctgtgaaaaacaggccctctttgcgctatgtaaaagcgtcaaggagaacgggcttgagccccatcttgtgaaaaaggtgttagagaaagtaagtgagaccttcggctatcggcgactcgaggactttatggcctcacacctggattacctcgtcttggaatggctgaatttgcaggacactgaatacaacttatcatccttcccttttatccttctgaattacactaacatcgaagacttctacagaagctgttataaggttttgatcccccacctcgtgatccggtcccactttgacgaggtaaaatcgatcgccaaccagatccaggaggactggaagtccctgctgactgattgttttcctaagatactcgttaacatattgccatacttcgcctatgaaggcactcgcgattcaggaatggcccagcagagagaaacagcgacgaaggtgtatgacatgttaaaatctgaaaaccttctgggcaaacaaattgaccatctgtttatctcaaatctgccagaaatcgtcgtggaactcctgatgacccttcacgagcccgcaaatagttctgcctcacagtctaccgacctctgcgacttctcttag

SEQ ID NO: 339690 - DNA, 4110 bp, Artificial Sequence
  derived and/or modified sequence
atgtctctggtactgaatgatctcttgatttgctgccggcagctggagcacgaccgcgctacagaacgtaagaaagaggtggagaaattcaaacggctgattagagaccctgagaccattaagcacttggacagacattctgatagtaagcaaggtaagtacctgaactgggacgccgtgtttcgcttccttcagaagtatatccagaaggaaactgagtgcctccgcattgctaaacccaatgtctccgcctccactcaagctagtagacagaagaagatgcaagaaatttcaagcctggttaagtacttcatcaaatgtgcaaacaggcgggctcctagactgaaatgtcaggagttgttgaactatattatggataccgtgaaggacagttcaaacggcgctatatacggcgcagactgttccaacattctgctgaaggacattcttagcgttagaaaatattggtgcgaaatctcccagcaacagtggctggaactcttttctgtgtacttccggctctacctgaagccttctcaggacgtgcaccgcgtgctggtggcgcgaattattcatgccgtgacgaagggatgctgttctcagactgacggtctgaattcaaagttcctcgacttcttttccaaagctatacagtgcgcaaggcaggagaagagctctagcggtttaaaccacatcctggctgcattaaccattttccttaagactctcgctgtgaatttccggatacgcgtgtgtgagctgggcgacgagatcttaccgactctgttgtatatctggacccagcatcgcctgaatgacagcctcaaagaggtgattatcgagctcttccagcttcaaatctatatacatcacccaaagggcgcaaagacacaggaaaaaggcgcatacgagagtacgaagtggcgaagtatcctgtacaatctgtatgatctactcgtgaatgaaatcagtcatattggctctcgcggtaaatacagctcaggcttccgcaatatcgccgtgaaagagaatctaattgaacttatggctgacatatgtcaccaggtctttaacgaagacacaagatcactggagattagtcagagttacactacaactcagagggaaagctcggattacagcgtgccatgcaagaggaagaaaatcgagctggggtgggaagtgattaaagatcacctacaaaagagccagaatgacttcgacctggtgccatggcttcagattgcgacacaacttatttcgaagtacccagcgtcactcccaaattgcgagctgtctcccctgctaatgattctctcccaactgttaccacagcagaggcacggagagcgcactccatacgtactcaggtgtctgacggaggtggccctttgccaggacaaacgtagcaacctggagagctcccagaagtccgaccttctgaagctgtggaacaaaatatggtgcatcacttttcgaggaattagttctgagcagattcaggccgagaactttggtctgctcggcgcaataattcaggggagcctggtcgaggtggaccgtgagttttggaaactattcaccggcagcgcctgccgcccatcttgtcctgcagtgtgttgcttaaccctggcccttaccacaagcatagtgcctgggacagttaaaatggggattgagcagaacatgtgcgaagtaaacaggagcttcagcctcaaggaaagtattatgaagtggctcctattctatcagctcgaaggtgacctggaaaattccacagaggtaccgccaattctgcactcaaactttccgcatctcgtcctcgagaagatcctcgtgtccctgacaatgaaaaattgtaaggccgctatgaacttcttccagagcgtgccagagtgtgaacaccatcaaaaagacaaggaagaactgtcattctcggaagtggaggaactatttctgcagacgacattcgacaaaatggatttcctaacaatcgtgcgcgagtgcggcatcgagaaacaccagagcagcatcgggttctctgtccaccagaacctcaaagagagcctcgaccgatgtttacttggtctttccgagcagttactcaacaactatagctccgagataaccaacagcgaaacgttagtcaggtgctcacgactattggttggagtgcttggatgttactgctatatgggcgtcatcgcagaagaggaggcttacaagtctgaactctttcagaaggctaagagcctgatgcaatgtgcaggcgagtccatcacactttttaagaacaagaccaatgaagaatttcgaatcgggtctctccggaatatgatgcagctgtgtaccagatgtctcagcaactgcaccaagaagtctcctaacaaaattgcctctggctttttcctaagactgctgacttctaaactgatgaacgacattgccgacatttgcaagtccttggctagcttcatcaagaaacccttcgaccgaggggaagtggaaagcatggaggatgataccaacggcaacctcatggaagtggaagatcagagctctatgaatctctttaacgactaccctgactccagcgtttccgatgccaacgagccaggcgagagccaaagcacgatcggtgccatcaatcccctagccgaggagtatctcagcaagcaagatttgctgtttttagacatgctcaaatttctgtgtctgtgtgtgaccacagcacagaccaatactgtaagctttagggcagcggacatcaggagaaaactactgatgctgattgactcttctacactggagcccacaaagagcctccatctgcacatgtatttgatgcttcttaaggaactgccgggagaggaatacccactgcccatggaggacgtgctggagctgctgaagccgctgagtaatgtgtgctctctttatagacgcgatcaagacgtctgcaagacaattttgaatcacgtgctccacgtggtgaagaatctcggtcaatctaacatggattccgaaaacaccagggatgcccaaggccagtttcttacagtgatcggggcattctggcatttgactaaggaaaggaagtatattttttcggtccggatggcactggtcaactgcctgaagaccctgctggaggccgacccatattccaaatgggccattctgaatgttatggggaaagacttccctgtaaacgaagtcttcacccaattcctagccgataatcaccaccaggtccgcatgctagcggctgagtcaattaatcgccttttccaggatacaaaaggcgacagttcccggctcctcaaagctctccccctgaaactgcagcagaccgcttttgaaaatgcctatctgaaagcccaagaggggatgcgggaaatgtcccattcagcggagaatcctgagacgcttgacgaaatatacaataggaaatcagttctgctgactctcatcgcggtggtgctgtcttgcagtccaatttgtgagaagcaggcactcttcgccctctgtaaaagtgttaaggagaatggacttgagcctcacctagtcaagaaggttctggagaaggtgtccgagacatttggatatcgtagactggaggacttcatggccagtcacctggactatctcgtgctcgagtggctgaatttacaggacactgagtataacctcagctcctttccctttatattgctcaactatacaaatattgaagatttttacagatcctgctataaggtgctgatcccccatttggtcatccgaagccatttcgatgaggtgaagtctatagctaaccagattcaagaggactggaagtccttactgaccgattgcttccctaagattctggtcaatatattgccttattttgcgtacgaaggcacacgggactctggaatggcccagcagcgcgagacagcaactaaggtctacgacatgcttaagagcgaaaatctgcttggcaagcagattgaccatctgttcatctctaatctccccgagatagtggtcgaactccttatgacactgcacgagccagctaactccagcgccagtcagtctaccgacctgtgtgatttcagctag

SEQ ID NO: 339691 - DNA, 1511 bp, Artificial Sequence
  derived and/or modified sequence
agattgatcacttattcattagtaatttaccagagattgtggtggagttattgatgacgttacatgagccagcaaattctagtgccagtcagagcactgacctctgtgacttttcaggggatttggatcctgctcctaatccacctcattttccatcgcatgtgattaaagcaacatttgcctatatcagcaattgtcataaaaccaagttaaaaagcattttagaaattctttccaaaagccctgattcctatcagaaaattcttcttgccatatgtgagcaagcagctgaaacaaataatgtttataagaagcacagaattcttaaaatatatcacctgtttgttagtttattactgaaagatataaaaagtggcttaggaggagcttgggcctttgttcttcgagacgttatttatactttgattcactatatcaaccaaaggaaattaaccattttctctcagtaagtgtttatgatgcacttccattgacaagacttgaaggactaaaggatcttcgaagacaactggaactacataaagatcagatggtggacattatgagagcttctcagggtgctaattttaaatgacatgggctatttctacctgtttctttttgaaagaatattttgcaaagtcttgctcttggtttcattgtcacagacttagttcagactctcatcatttagttcagaccctcatttctcatctaactgtaaaactggtcctaactggtcttctcaccctgaactcttcctgttttattcatcctctgccagatgatttctctaaacccaaatatgatcatgtttttctactgcctaaattttttttttaagagacagagtttttttttttttttaagagtctcactctgtcacctaggctggagtgtagtggcaccatcataacttactatgaccttgaattcctgggtacaaggaattctcctgtctcagccttctgaatagctggaacaacaggcacacaccactacacctagctactttatttattttttttattttttgtagggacaggggtcccactatgttgcctaggttggtctcgaattcttggcctcaagtgatcctcctgccttagcctcacaaagcattgggattagaggtgtgagccacggcatctagccatgcttaaacatttttcatttctttttctttttttttaagacggagtttcgctcttgttgcccaggctggaatgcagtggcactatcttagctcactgcaacctccacctcctgagctcagattctcgtgcctcagccttcctagtagctaggattacaggcacctgccaccatgcctggctaattttttgtattttttttagtagagacggggtttcaccatgttggccagggtggtctcaaactcctgagctcaggcaatccgcccacctcagcctcccaaagtgctgggattacaggcatgagccaccgcggctggcccatgcttaaacatttttaacaccttccaaccatgt

SEQ ID NO: 339692 - DNA, 4841 bp, Artificial Sequence
  derived and/or modified sequence
ccgcgtccgcgcttacccaatacaagccgggctacgtccgagggtaacaacatgatcaaaaccacagcaggaaccacaataaggaacaagactcaggttaaagcaaacacagcgacagctcctgcgccgcatctcctggttccagtggcggcactgaactcgcggcaatttgtcccgcctctttcgcttcacggcagccaatcgcttccgccagagaaagaaaggcgccgaaatgaaacccgcctccgttcgccttcggaactgtcgtcacttccgtcctcagacttggaggggcggggatgaggagggcggggaggacgacgagggcgaagagggtgggtgagagccccggagcccgagccgaagggcgagccgcaaacgctaagtcgctggccattggtggacatggcgcaggcgcgtttgctccgacgggccgaatgttttggggcagtgttttgagcgcggagaccgcgtgatactggatgcgcatgggcataccgtgctctgcggctgcttggcgttgcttcttcctccagaagtgggcgctgggcagtcacgcagggtttgaaccggaagcgggagtaggtagctgcgtggctaacggagaaaagaagccgtggccgcgggaggaggcgagaggagtcgggatctgcgctgcagccaccgccgcggttgatactactttgaccttccgagtgcagtgacagtgatgtgtgttctgaaattgtgaaccatgagtctagtacttaatgatctgcttatctgctgccgtcaactagaacatgatagagctacagaacgaaagaaagaagttgagaaatttaagcgcctgattcgagatcctgaaacaattaaacatctagatcggcattcagattccaaacaaggaaaatatttgaattgggatgctgtttttagatttttacagaaatatattcagaaagaaacagaatgtctgagaatagcaaaaccaaatgtatcagcctcaacacaagcctccaggcagaaaaagatgcaggaaatcagtagtttggtcaaatacttcatcaaatgtgcaaacagaagagcacctaggctaaaatgtcaagaactcttaaattatatcatggatacagtgaaagattcatctaatggtgctatttacggagctgattgtagcaacatactactcaaagacattctttctgtgagaaaatactggtgtgaaatatctcagcaacagtggttagaattgttctctgtgtacttcaggctctatctgaaaccttcacaagatgttcatagagttttagtggctagaataattcatgctgttaccaaaggatgctgttctcagactgacggattaaattccaaatttttggactttttttccaaggctattcagtgtgcgagacaagaaaagagctcttcaggtctaaatcatatcttagcagctcttactatcttcctcaagactttggctgtcaactttcgaattcgagtgtgtgaattaggagatgaaattcttcccactttgctttatatttggactcaacataggcttaatgattctttaaaagaagtcattattgaattatttcaactgcaaatttatatccatcatccgaaaggagccaaaacccaagaaaaaggtgcttatgaatcaacaaaatggagaagtattttatacaacttatatgatctgctagtgaatgagataagtcatataggaagtagaggaaagtattcttcaggatttcgtaatattgccgtcaaagaaaatttgattgaattgatggcagatatctgtcaccaggtttttaatgaagataccagatccttggagatttctcaatcttacactactacacaaagagaatctagtgattacagtgtcccttgcaaaaggaagaaaatagaactaggctgggaagtaataaaagatcaccttcagaagtcacagaatgattttgatcttgtgccttggctacagattgcaacccaattaatatcaaagtatcctgcaagtttacctaactgtgagctgtctccattactgatgatactatctcagcttctaccccaacagcgacatggggaacgtacaccatatgtgttacgatgccttacggaagttgcattgtgtcaagacaagaggtcaaacctagaaagctcacaaaagtcagatttattaaaactctggaataaaatttggtgtattacctttcgtggtataagttctgagcaaatacaagctgaaaactttggcttacttggagccataattcagggtagtttagttgaggttgacagagaattctggaagttatttactgggtcagcctgcagaccttcatgtcctgcagtatgctgtttgactttggcactgaccaccagtatagttccaggaacggtaaaaatgggaatagagcaaaatatgtgtgaagtaaatagaagcttttctttaaaggaatcaataatgaaatggctcttattctatcagttagagggtgacttagaaaatagcacagaagtgcctccaattcttcacagtaattttcctcatcttgtactggagaaaattcttgtgagtctcactatgaaaaactgtaaagctgcaatgaattttttccaaagcgtgccagaatgtgaacaccaccaaaaagataaagaagaactttcattctcagaagtagaagaactatttcttcagacaacttttgacaagatggactttttaaccattgtgagagaatgtggtatagaaaagcaccagtccagtattggcttctctgtccaccagaatctcaaggaatcactggatcgctgtcttctgggattatcagaacagcttctgaataattactcatctgagattacaaattcagaaactcttgtccggtgttcacgtcttttggtgggtgtccttggctgctactgttacatgggtgtaatagctgaagaggaagcatataagtcagaattattccagaaagccaagtctctaatgcaatgtgcaggagaaagtatcactctgtttaaaaataagacaaatgaggaattcagaattggttccttgagaaatatgatgcagctatgtacacgttgcttgagcaactgtaccaagaagagtccaaataagattgcatctggctttttcctgcgattgttaacatcaaagctaatgaatgacattgcagatatttgtaaaagtttagcatccttcatcaaaaagccatttgaccgtggagaagtagaatcaatggaagatgatactaatggaaatctaatggaggtggaggatcagtcatccatgaatctatttaacgattaccctgatagtagtgttagtgatgcaaacgaacctggagagagccaaagtaccataggtgccattaatcctttagctgaagaatatctgtcaaagcaagatctacttttcttagacatgctcaagttcttgtgtttgtgtgtaactactgctcagaccaatactgtgtcctttagggcagctgatattcggaggaaattgttaatgttaattgattctagcacgctagaacctaccaaatccctccacctgcatatgtatctaatgcttttaaaggagcttcctggagaagagtaccccttgccaatggaagatgttcttgaacttctgaaaccactatccaatgtgtgttctttgtatcgtcgtgaccaagatgtttgtaaaactattttaaaccatgtccttcatgtagtgaaaaacctaggtcaaagcaatatggactctgagaacacaagggatgctcaaggacagtttcttacagtaattggagcattttggcatctaacaaaggagaggaaatatatattctctgtaagaatggccctagtaaattgccttaaaactttgcttgaggctgatccttattcaaaatgggccattcttaatgtaatgggaaaagactttcctgtaaatgaagtatttacacaatttcttgctgacaatcatcaccaagttcgcatgttggctgcagagtcaatcaatagattgttccaggacacgaagggagattcttccaggttactgaaagcacttcctttgaagcttcagcaaacagcttttgaaaatgcatacttgaaagctcaggaaggaatgagagaaatgtcccatagtgctgagaaccctgaaactttggatgaaatttataatagaaaatctgttttactgacgttgatagctgtggttttatcctgtagccctatctgcgaaaaacaggctttgtttgccctgtgtaaatctgtgaaagagaatggattagaacctcaccttgtgaaaaaggttttagagaaagtttctgaaacttttggatatagacgtttagaagactttatggcatctcatttagattatctggttttggaatggctaaatcttcaagatactgaatacaacttatcttcttttccttttattttattaaactacacaaatattgaggatttctatagatcttgttataaggttttgattccacatctggtgattagaagtcattttgatgaggtgaagtccattgctaatcagattcaagaggactggaaaagtcttctaacagactgctttccaaagattcttgtaaatattcttccttattttgcctatgagggtaccagagacagtgggatggcacagcaaagagagactgctaccaaggtctatgatatgcttaaaagtgaaaacttattgggaaaacagattgatcacttattcattagtaatttaccagagattgtggtggagttattgatgacgttacatgagccagcaaattctagtgccagtcagagcactgacctctgtgacttttcag

SEQ ID NO: 339693 - DNA, 481 bp, Artificial Sequence
  derived and/or modified sequence
aaaagaagccgtggccgcgggaggaggcgagaggagtcgggatctgcgctgcagccaccgccgcggttgatactactttgaccttccgagtgcagtgtctcgctctgtcgcccatgctggagtgcaattgcgtgatctcagctaactgcactttccgcctcctgggttcaaacagtgatgtgtgttctgaaattgtgaaccatgagtctagtacttaatgatctgcttatctgctgccgtcaactagaacatgatagagctacagaacgaaagaaagaagttgagaaatttaagcgcctgattcgagatcctgaaacaattaaacatctagatcggcattcagattccaaacaaggaaaatatttgaattgggatgctgtttttagatttttacagaaatatattcagaaagaaacagaatgtctgagaatagcaaaaccaaatgtatcagcctcaacacaagcctccaggcagaaaaaga

SEQ ID NO: 339694 - DNA, 4110 bp, Artificial Sequence
  derived and/or modified sequence
atgagcctggtgctgaacgacctgctgatctgctgcagacagctggagcacgacagagccaccgagagaaagaaggaggtggagaagttcaagagactgatcagagaccccgagaccatcaagcacctggacagacacagcgacagcaagcagggcaagtacctgaactgggacgccgtgttcagattcctgcagaagtacatccagaaggagaccgagtgcctgagaatcgccaagcccaacgtgagcgccagcacccaggccagcagacagaagaagatgcaggagatcagcagcctggtgaagtacttcatcaagtgcgccaacagaagagcccccagactgaagtgccaggagctgctgaactacatcatggacaccgtgaaggacagcagcaacggcgccatctacggcgccgactgcagcaacatcctgctgaaggacatcctgagcgtgagaaagtactggtgcgagatcagccagcagcagtggctggagctgttcagcgtgtacttcagactgtacctgaagcccagccaggacgtgcacagagtgctggtggccagaatcatccacgccgtgaccaagggctgctgcagccagaccgacggcctgaacagcaagttcctggacttcttcagcaaggccatccagtgcgccagacaggagaagagcagcagcggcctgaaccacatcctggccgccctgaccatcttcctgaagaccctggccgtgaacttcagaatcagagtgtgcgagctgggcgacgagatcctgcccaccctgctgtacatctggacccagcacagactgaacgacagcctgaaggaggtgatcatcgagctgttccagctgcagatctacatccaccaccccaagggcgccaagacccaggagaagggcgcctacgagagcaccaagtggagaagcatcctgtacaacctgtacgacctgctggtgaacgagatcagccacatcggcagcagaggcaagtacagcagcggcttcagaaacatcgccgtgaaggagaacctgatcgagctgatggccgacatctgccaccaggtgttcaacgaggacaccagaagcctggagatcagccagagctacaccaccacccagagagagagcagcgactacagcgtgccctgcaagagaaagaagatcgagctgggctgggaggtgatcaaggaccacctgcagaagagccagaacgacttcgacctggtgccctggctgcagatcgccacccagctgatcagcaagtaccccgccagcctgcccaactgcgagctgagccccctgctgatgatcctgagccagctgctgccccagcagagacacggcgagagaaccccctacgtgctgagatgcctgaccgaggtggccctgtgccaggacaagagaagcaacctggagagcagccagaagagcgacctgctgaagctgtggaacaagatctggtgcatcaccttcagaggcatcagcagcgagcagatccaggccgagaacttcggcctgctgggcgccatcatccagggcagcctggtggaggtggacagagagttctggaagctgttcaccggcagcgcctgcagacccagctgccccgccgtgtgctgcctgaccctggccctgaccaccagcatcgtgcccggcaccgtgaagatgggcatcgagcagaacatgtgcgaggtgaacagaagcttcagcctgaaggagagcatcatgaagtggctgctgttctaccagctggagggcgacctggagaacagcaccgaggtgccccccatcctgcacagcaacttcccccacctggtgctggagaagatcctggtgagcctgaccatgaagaactgcaaggccgccatgaacttcttccagagcgtgcccgagtgcgagcaccaccagaaggacaaggaggagctgagcttcagcgaggtggaggagctgttcctgcagaccaccttcgacaagatggacttcctgaccatcgtgagagagtgcggcatcgagaagcaccagagcagcatcggcttcagcgtgcaccagaacctgaaggagagcctggacagatgcctgctgggcctgagcgagcagctgctgaacaactacagcagcgagatcaccaacagcgagaccctggtgagatgcagcagactgctggtgggcgtgctgggctgctactgctacatgggcgtgatcgccgaggaggaggcctacaagagcgagctgttccagaaggccaagagcctgatgcagtgcgccggcgagagcatcaccctgttcaagaacaagaccaacgaggagttcagaatcggcagcctgagaaacatgatgcagctgtgcaccagatgcctgagcaactgcaccaagaagagccccaacaagatcgccagcggcttcttcctgagactgctgaccagcaagctgatgaacgacatcgccgacatctgcaagagcctggccagcttcatcaagaagcccttcgacagaggcgaggtggagagcatggaggacgacaccaacggcaacctgatggaggtggaggaccagagcagcatgaacctgttcaacgactaccccgacagcagcgtgagcgacgccaacgagcccggcgagagccagagcaccatcggcgccatcaaccccctggccgaggagtacctgagcaagcaggacctgctgttcctggacatgctgaagttcctgtgcctgtgcgtgaccaccgcccagaccaacaccgtgagcttcagagccgccgacatcagaagaaagctgctgatgctgatcgacagcagcaccctggagcccaccaagagcctgcacctgcacatgtacctgatgctgctgaaggagctgcccggcgaggagtaccccctgcccatggaggacgtgctggagctgctgaagcccctgagcaacgtgtgcagcctgtacagaagagaccaggacgtgtgcaagaccatcctgaaccacgtgctgcacgtggtgaagaacctgggccagagcaacatggacagcgagaacaccagagacgcccagggccagttcctgaccgtgatcggcgccttctggcacctgaccaaggagagaaagtacatcttcagcgtgagaatggccctggtgaactgcctgaagaccctgctggaggccgacccctacagcaagtgggccatcctgaacgtgatgggcaaggacttccccgtgaacgaggtgttcacccagttcctggccgacaaccaccaccaggtgagaatgctggccgccgagagcatcaacagactgttccaggacaccaagggcgacagcagcagactgctgaaggccctgcccctgaagctgcagcagaccgccttcgagaacgcctacctgaaggcccaggagggcatgagagagatgagccacagcgccgagaaccccgagaccctggacgagatctacaacagaaagagcgtgctgctgaccctgatcgccgtggtgctgagctgcagccccatctgcgagaagcaggccctgttcgccctgtgcaagagcgtgaaggagaacggcctggagccccacctggtgaagaaggtgctggagaaggtgagcgagaccttcggctacagaagactggaggacttcatggccagccacctggactacctggtgctggagtggctgaacctgcaggacaccgagtacaacctgagcagcttccccttcatcctgctgaactacaccaacatcgaggacttctacagaagctgctacaaggtgctgatcccccacctggtgatcagaagccacttcgacgaggtgaagagcatcgccaaccagatccaggaggactggaagagcctgctgaccgactgcttccccaagatcctggtgaacatcctgccctacttcgcctacgagggcaccagagacagcggcatggcccagcagagagagaccgccaccaaggtgtacgacatgctgaagagcgagaacctgctgggcaagcagatcgaccacctgttcatcagcaacctgcccgagatcgtggtggagctgctgatgaccctgcacgagcccgccaacagcagcgccagccagagcaccgacctgtgcgacttcagctag

SEQ ID NO: 339695 - DNA, 3900 bp, Artificial Sequence
  derived and/or modified sequence
atggattctcttgaccacatgttgacagacccattagaactgggcccttgtggagacgggcatggcaccaggattatggaagattgtctactcggcggtactagagtgtccctccccgaagacctgcttgaagaccctgagatctttttcgacgttgtgtcgctctctacctggcaggaggtgcttagcgacagccaaagagagcatctgcaacagttcctcccacaattccctgaggactcagctgaacagcagaatgaactgatcttggccctgttctccggcgaaaacttccgtttcgggaatcccctgcatattgctcagaaactgttcagggatggtcactttaacccggaggtagtgaaatatcggcagctgtgctttaagagccagtacaaaagatacttgaatagccaacaacagtactttcacaggcttctcaaacagatcctggcttcgagatcagatctgctggagatggcccggcggtctggcccggcccttcccttccggcagaagcgcccctcaccatcaagaactccagaggaaagggaatggagaacgcaacagcggtacctcaaggtgctgcgtgaagtgaaggaggaatgtggagacaccgccctctcgtccgacgaggaggatctgtcctcttggctaccttcctctccggcccggtctccctccccggcagtcccgctgagagtcgtgccaacacttagcaccaccgacatgaaaacagcagataaagttgagctgggtgatagcgatctcaaaataatgctgaagaagcaccatgaaaagcggaaacatcagcctgaccacccagacctgctgacaggggacctaaccttgaacgacattatgacccgcgtgaatgctggtcgtaaagggagtctggcagccctgtatgatctggctgtcctgaagaagaaggtaaaagaaaaggaggagaaaaaaaaaaaaaaaattaagaccatcaaaagcgaggccgaagacctcgcggagcccctctcctccaccgaaggagtggcgcccctgtcccaggcaccctcccctctggcgattcccgccattaaagaggaaccactggaggaccttaaaccttgtctcggaataaatgagatctctagtagcttcttttcactcctactcgagatcctgttactggaaagccaagcatctctgcctatgctcgaagaacgcgtattagactggcagagctcccccgccagctctttgaactcatggttcagtgccgcacctaactgggcagagctggtgctgcctgctctacaatacctggcaggagagtcccgtgctgtgcccagctcctttagtccttttgtcgagttcaaggagaaaacccagcagtggaaactgctcggccaatcccaggataacgaaaaggagctggccgctctgttccaactgtggctcgagacgaaggaccaggcgttttgcaagcaggaaaacgaggacagctctgatgcaaccaccccggtccctcgcgtccggacagactacgttgttaggccttctacgggcgaggagaagagagtgtttcaggaacaggagcgctatagatattcacagccccataaggccttcactttcaggatgcacggctttgagagtgtagtgggccccgttaaaggggtttttgataaagaaacctccttgaacaaagcccgtgagcactcactgcttcgctctgatcggcccgcctacgttactattctctctctggtacgtgacgctgccgcacgtttgccgaatggagaggggaccagagccgaaatttgtgagcttctcaaggatagccaattcctggccccggacgtcacctccacacaagtgaatacggttgtgtccggggccctagaccgacttcattatgagaaagacccctgtgttaagtatgacattggaagaaagttatggatctatctccatcgcgaccgctctgaggaggagtttgagaggattcatcaggctcaggcggcagcggcgaaagcccgtaaagcacttcaacagaagccaaaaccaccttctaaggtaaaaagttccagcaaggagtcctccattaaagttttgtccagcggtccttcagagcagagccagatgagtctttccgactcttcgatgccacccacgcctgttacccccgtaacaccaacgacacccgcattacccgcaatcccaatatccccccccccggtgtccgccgtgaacaaaagtggcccaagcacggtatctgaaccagccaaatcttcttccggagtgctgttggttagttcccctaccatgccgcacctcggtactatgttgtccccagcctcaagccagactgcacccagtagccaagcagcggcgagggttgtgtcccattcaggatccgctggcctcagccaggttagagttgttgctcagcctagccttcccgctgttccccagcagagcgggggacccgctcagacactgccgcaaatgcccgccggaccacaaataagggtccctgccaccgccacgcagacaaaagtggtgcctcaaaccgttatggctacagtacctgtgaaggctcaaactaccgcggccacagttcagcggcccggacccggacagacaggattaaccgtcacgtcgcttcccgcaaccgccagtcccgtctccaagccggcaacctcaagcccagggacctcagcaccctctgcatccacggccgccgtaatccagaacgtgacaggacaaaacatcatcaagcaggtggctattaccgggcagctgggggttaagccacagactggcaactccatccccctcactgcgacgaacttccgcatccagggcaaagacgtgctaagactgccaccctcttcgataacaactgacgcaaaaggtcagaccgtgctgcgaatcactcctgacatgatggcaaccctagcaaagagtcaggtgacgaccgttaagctgacgcaggaccttttcggaacgggaggcaataccacaggcaagggcatatctgccaccttacatgtaaccagcaaccccgtgcatgccgccgactcccctgccaaagcatcgagtgcttctgcgccctccagtaccccaactgggaccaccgtcgtcaaagtcacacccgaccttaagcccaccgaagccagttcctctgcgtttcgcttgatgcctgcgttgggggtgtcagtggcagatcagaaaggtaagagcactgtggcctcctcagaagctaaacctgccgctacaattagaatcgtccaggggttgggcgtcatgcctcccaaggctggccagacaattacagttgcaacccatgcgaagcagggtgctagtgtggcttccggttcaggaacggtgcatactagcgccgtctcactgccaagcatgaacgcggcggtaagcaaaaccgtagcagtcgcctcgggggcggcaagcacaccaattagcatatccacgggggccccaacagtgcgccaggtgcctgtgtccaccacagtagtgtctacaagccaggcagggaaacttccaactcgtattaccgtccccctttctgtcattagccagcccatgaaggggaagagcgttgtgactgcccctatcatcaaaggaaacctcggcgccaacttgtcaggcctgggtagaaacatcattctaacaacaatgccggccggtactaaattaatcgcgggcaacaagcccgtgagttttctgaccgcacagcagctccaacagctgcaacaacagggtcaagccacccaggtgaggattcaaacagtgcccgcttctcatctgcagcagggcaccgcctcaggatcttcgaaagccgtgtccacggttgtagtgaccactgcccctagtcctaagcaggcaccggaacaacagtag

SEQ ID NO: 339696 - DNA, 3900 bp, Artificial Sequence
  derived and/or modified sequence
atggacagcctcgatcacatgcttacagatcccctggaactcggaccttgtggagacggccacggtaccaggatcatggaagactgtcttctgggggggacgagggtttccctccctgaggacttgctcgaagaccccgaaatcttcttcgatgttgtcagtctgagcacatggcaggaggttttaagcgattcacagagggagcacctgcaacagttcttaccccagtttcccgaagattcagccgagcagcaaaacgaacttatcttggctcttttctctggcgagaattttcgcttcggtaatccactgcacattgctcagaaactgttcagggatggccactttaatcctgaggtcgttaagtatcgtcaattgtgctttaagtcccagtataagcggtacttaaactcccagcaacagtacttccatcgattgctgaagcagatcttagcttccaggtcagacctcttggagatggccaggagaagtggcccagccctgccgttccggcagaagcgtcctagcccttctagaacgcccgaagaaagggagtggcgcacccaacagagataccttaaggtactaagagaagtgaaagaggagtgtggcgatacagctctctctagcgatgaggaggatctgtcttcatggttgcctagtagccccgcacgcagcccaagccctgcagtgcccctgagggttgtccccacactcagcactacggacatgaagactgcagataaggtggagctgggtgactcagatctgaagattatgctcaagaagcaccacgagaagagaaagcaccaacccgaccaccctgacctgctgacgggcgacctgacccttaatgacataatgacccgagttaatgctggccgcaaagggagcctggcagcgctctatgatcttgcggtgttgaaaaagaaggtgaaggagaaagaggagaagaagaaaaagaagatcaaaacaattaagagcgaggccgaggacctagccgagcccctgagctctaccgagggtgtggccccattgtcacaggctccgtctccactcgcgattccagctataaaggaggagccacttgaagaccttaagccttgcctgggcatcaatgaaatttcctcatcattcttcagcctgttgctagaaatcctgctgttagagtcacaggctagtctgccaatgctggaggaacgcgtactggattggcagagttcgccggcgtcatccctaaactcttggttttccgctgcgcctaactgggctgaactcgtcctgcccgctttacagtatttggccggggaaagcagagctgtaccatcatcattctccccattcgtcgagttcaaggaaaagacacaacagtggaagttgctcggacagtcccaggacaatgagaaagagctggctgcactattccaactctggctcgaaacaaaggatcaggcattttgcaagcaagagaacgaggactcatctgacgcaacaactccagtaccccgggtgaggacagactatgttgtgcgtccatccaccggcgaggaaaagcgtgtgtttcaggagcaggagagataccgctactctcagcctcacaaagcctttacgttcagaatgcacggcttcgagagcgttgtagggcccgtgaaaggagtgttcgataaggagacatcattaaataaggccagagaacactccttactacggagcgataggcctgcctatgtcacaattctcagcctggtccgggacgcagccgcccgcttaccaaacggggagggaacgcgggccgaaatatgcgagttgttgaaggattctcagtttctcgctcctgacgtcaccagcacacaggttaacacagttgttagtggagctttggaccgcctgcattatgagaaggatccatgcgttaaatacgacatcggccgaaaactttggatatacctgcaccgtgataggtcagaggaggagtttgagcgaattcaccaagcgcaggccgcagctgccaaggctcggaaagctctgcaacaaaaacccaagcctccatccaaggtgaagagctcatcaaaagagtcttccattaaagtactgagcagcggtccctctgaacagtcccagatgtcactcagcgattcctcaatgcccccaacccccgttacaccagtgactcccaccacacctgcactgcctgctatccctatctctccacctcctgttagtgccgtaaacaaaagcggacctagtacagtgagtgagcctgccaagtctagcagtggcgtgctgctcgtgagctcaccaaccatgcctcacctcggaactatgctgtctcccgcttcctctcagacagctccttctagccaggcggctgccagggtggtgagtcacagtggatctgcgggactgtcccaggtgagggtagtcgcgcaaccctctctgcccgctgtcccccagcagtccggaggccctgctcagacactaccacagatgcccgccggcccccagatcagagtgcccgctacggccacacagacaaaagtcgtcccacagactgtcatggctacggttcccgtcaaagcacagactactgccgcgactgtgcagcgacccggtcctggccagaccggactgacagtcacatctcttccggcaactgcgagtcctgtgtctaagccggccacatcatccccgggaacttcggctccatctgctagtactgctgccgtcatacagaatgtgaccgggcaaaacatcatcaagcaggtggccatcaccgggcagctcggtgtgaagccccagacagggaatagcatccccttgactgcgacaaactttagaatccagggaaaggatgtgttacgtctcccaccaagctccatcaccaccgatgccaaaggccagacagtcctgcgtatcacgcccgacatgatggccaccctggcgaaaagccaagtgacaacagtgaaacttactcaggacttgtttggcaccggtggaaacacaacagggaaagggattagcgccacactgcacgtgacttccaacccggtccatgctgccgactcacccgcaaaggctagcagtgcatccgcccccagcagtacacccaccggtaccaccgtcgtcaaggtcaccccagatctgaagcctaccgaagcgtcatcaagtgcctttcgtttgatgcctgccttgggagtgagcgtggcagaccagaagggaaaatctaccgtggcaagcagcgaggccaaacctgctgccactatcaggatagtccagggcctcggggtgatgccccctaaggctgggcagaccattactgtcgcaacacacgccaagcagggggctagtgttgcttctggtagcggaactgtacatacgagtgcggtgtctctcccctcaatgaacgccgctgtctcgaaaaccgttgccgttgccagcggggcagctagtaccccaatatctatctctacgggggccccaactgtgcgccaggtccctgtaagtactactgtcgtttctaccagtcaagccggtaagctgcctacacggataaccgtcccattgtccgtcatctcccagccgatgaaggggaaatccgtggtgacagctcccatcataaagggcaacctcggcgctaatctgtccggattagggcgcaacatcatcttaacaactatgccagctggaacaaagcttatcgccggaaataagcctgtcagcttcctcacggcacaacagctgcagcagctgcagcagcagggccaggccacccaggtgcggatccagacggtccctgcctcgcacctccagcaggggactgccagcggttcatcaaaagcagtgtctacagtggttgttactaccgcaccaagcccaaagcaagcccccgagcagcagtag

SEQ ID NO: 339697 - DNA, 3900 bp, Artificial Sequence
  derived and/or modified sequence
atggattcattggaccacatgctgacagatccactagagctgggaccctgtggggatggacacggcaccaggataatggaagattgcctccttggtgggacccgcgtgtcactgcccgaggatttattagaagatcctgagatctttttcgacgtcgtgagcttgtcaacgtggcaggaggtcttgagcgatagccagcgagagcatctgcagcagttccttcctcagttccccgaggactcagcagaacaacagaatgagctgatcttagcactgttttcgggggaaaacttccggtttggcaatcccttgcacatagcccagaagctctttcgcgatggccattttaatccagaggtggtgaagtacagacagctctgtttcaagagccagtacaagcggtacttaaactctcagcagcagtacttccacagattgctgaagcagatcctggcttcaagatccgacctccttgagatggctcgtaggtcagggcccgccctaccatttcgccagaagcgcccatcaccctcccgcacacccgaggagagagagtggcggacacaacagcggtacctcaaggtgttaagggaggtaaaagaggagtgcggcgacaccgccctctccagcgacgaggaggatctgagttcttggcttcccagctccccagcccgcagcccatcaccggccgtgcctctccgggtcgtacctacactatcaacaaccgatatgaaaacggctgataaagtggagttaggggacagcgatttgaaaattatgctgaagaagcaccatgagaaacggaaacaccaacccgaccatcctgacctgctcaccggagacctgactctgaacgacatcatgacacgcgtaaacgcaggccgcaagggatccctggccgcgttgtatgacttggccgtgctgaagaaaaaggttaaagagaaagaagagaaaaagaagaaaaaaataaagaccattaagtctgaggctgaagacctcgccgaaccactctcaagcactgagggcgtggctcctctgtcccaggccccatctccccttgccattccagccattaaggaggaacctctcgaggacttgaagccatgtctggggatcaacgaaatatctagcagttttttctcactcctgctagaaattctattgctggagtcccaagcatccctgcccatgttggaggaacgggtccttgactggcaaagcagcccagcctctagtcttaactcttggttcagcgccgctccgaactgggctgagcttgtactgccagcattgcagtatctagcaggcgaaagcagagcggtgccttcctcatttagcccattcgttgaatttaaggaaaaaacccaacagtggaagttactgggtcagtctcaggacaatgaaaaagagctggccgccctgttccaactgtggctggagacaaaggaccaggctttctgcaaacaggaaaacgaggatagttccgacgctaccacacccgtgcccagagtccggacagattacgtggtccggccctccaccggcgaggagaagcgggtgttccaggagcaggagaggtatcgctacagtcagcctcacaaggcttttacctttaggatgcatggattcgagagcgtagtcggccctgtgaaaggcgtgttcgacaaggaaacgtccttgaacaaggctcgtgagcactcactgctgcgctctgacagaccagcttatgtaaccatactgagccttgttagggatgccgccgcccgtctgcctaacggagagggaactagagcagaaatctgtgaattgctcaaagacagccaattcctggccccagacgtcacgtctacacaggtgaatacggtcgtcagtggagcattggatcgactgcattatgagaaagacccctgcgtaaaatatgacatcgggaggaagctctggatttatttgcaccgggatcggtctgaagaggaatttgaaaggatacatcaagcgcaggctgcagctgccaaagctagaaaggccctgcagcagaaacctaagcctccatcaaaggtcaagagctccagtaaggaaagcagtatcaaggtcctgagctctggaccctctgagcagtcacagatgtctcttagcgattccagcatgccaccaacgccggttactccagtgactcctacgactcctgcattgccggccatcccaatatccccaccgcccgtgagcgcagtgaacaaaagcgggccaagcactgtgagcgaaccagctaagtcgtcatctggggtgctgctggtatcatcacccaccatgccgcaccttgggactatgctgagccctgccagtagccaaaccgcaccatcttcccaagcggcagccagagttgtgtcccactccggcagcgcaggactgtcacaggtgagagttgtagctcagccctctctcccagcggttccccaacagtctggtggcccagcccagactcttcctcagatgcctgcagggccacaaatcagagtcccagccaccgcaacacagaccaaggtggtcccccaaaccgtcatggccaccgtcccagtgaaagcgcagactaccgccgcgaccgttcagaggcctggacccgggcagactggcctcaccgttacatctctccctgctaccgcttctccagtctccaagccggccacgtctagccctggaacctccgcaccctctgcctccacggccgctgtgatccagaacgttacaggacagaatattattaagcaggtcgccataacaggacagctcggcgttaagccacagacagggaactctatcccactcaccgcgaccaatttccgaattcagggcaaggatgtgctcagactgccaccatctagcatcactacagatgccaaaggtcagactgtcctgcgtataactcccgatatgatggctactctggccaaaagccaggtgactactgttaagctcacccaggacctgtttgggaccggcggaaacacaaccggaaagggcatttcagccacactgcatgttacatccaatcctgtccatgccgccgattcaccagcaaaagcgtcatcagcttccgctccgtcatccactcccaccggcactacagtcgtgaaggtgacaccagacttgaagcctaccgaagcctccagctcggcatttcgcctgatgcctgcgttaggggtttccgttgcggaccagaagggtaaatctaccgtggcttctagtgaagctaagcctgccgcaaccatacgtattgttcagggcctgggagttatgccgccaaaggccggccagacaattactgtggccacccatgcgaagcagggggcgagtgtagcgagtggatccggcactgtgcatacaagtgccgttagcctcccaagcatgaatgccgccgtgtctaagaccgtcgctgtggctagtggagcggcatccactcccataagtatcagcacaggcgccccaacagtcagacaggtcccggtgtcaacgactgtggtgtccacatcccaggcgggcaagttgccaacccgcattaccgtaccactgagcgtgatttcccagccaatgaaaggaaaatctgtcgtgacagccccaattataaaggggaacctgggagctaatttgagtgggttgggcaggaacatcattttgaccacaatgccagcaggaactaagttaatcgcaggaaataaacctgtctcttttctcaccgctcagcagctccaacagctgcagcaacaaggtcaagccacccaggtgagaattcagacggtacccgcaagccacctccagcagggcacagcctcaggatcttcaaaagctgtcagtaccgtggttgttacaacagccccaagcccaaagcaagcgcccgagcagcagtag

SEQ ID NO: 339698 - DNA, 3900 bp, Artificial Sequence
  derived and/or modified sequence
atggacagcctggaccacatgctgacagaccccctggagctgggcccctgtggagatggccacggcacccgcatcatggaggactgcctgctgggcggcaccagggtgtccctgcctgaggacctgctggaggaccctgagatcttctttgatgtggtgtccctgagcacctggcaggaggtgctgagtgacagccagcgggagcacctgcagcagttcctgccccagttcccagaagattctgctgagcagcagaatgagctgatcctggccctcttcagcggggagaacttccgcttcggcaaccccctgcacatcgcccagaagctgttcagagatggccacttcaaccctgaggtggtgaagtaccggcagctgtgcttcaagagccagtacaagcgctacctgaacagccagcagcagtacttccaccggctgctgaagcagatcctggccagcagaagtgacctgctggagatggcccggcgcagcggccctgccctgcccttccggcagaagaggcccagccccagcaggaccccagaggagcgggagtggaggacccagcagcgctacctgaaggtgctgcgggaggtgaaggaggagtgtggggacacagccctgagcagtgatgaggaggacctgagctcctggctgcccagcagccctgcccggagccccagccctgctgtgcccctgcgggtggtgcccaccctgagcaccacagacatgaagacagctgacaaggtggagctgggggacagcgacctgaagatcatgctgaagaagcaccacgagaagaggaagcaccagcctgaccacccagacctgctgactggagacctgaccctgaatgacatcatgaccagggtgaatgccggcaggaagggcagcctggccgccctgtatgacctggccgtgctgaagaagaaggtgaaggagaaggaggagaagaagaagaagaagatcaagaccatcaagtctgaggccgaggacctggccgagcccctgagcagcacagagggcgtggcccccctgagccaggcccccagccccctggccatcccagccatcaaggaggagcccctggaggacctgaagccctgcctgggcatcaatgagatcagcagcagcttcttcagcctgctgctggagatcctgctgctggagagccaggccagcctgcccatgctggaggagcgggtgctggactggcagagcagccctgccagcagcctgaacagctggttctctgctgcccccaactgggccgagctggtgctgcctgccctgcagtacctggccggggagagcagagctgtgcccagcagcttcagcccctttgtggagttcaaggagaagacccagcagtggaagctgctgggccagagccaggacaatgagaaggagctggccgccctcttccagctgtggctggagaccaaggaccaggccttctgcaagcaggagaatgaagacagcagtgatgccaccacccctgtgccccgggtgaggacagattatgtggtgcggcccagcactggagaggagaagagggtcttccaggagcaggagcgctaccgctacagccagccccacaaggccttcaccttcaggatgcacggctttgaatctgtggtgggccctgtgaagggcgtgtttgacaaggagaccagcctgaacaaggcccgggagcacagcctgctgcggagtgacaggcctgcctacgtgaccatcctgagcctggtgagagatgctgctgcccggctgcccaacggggagggcaccagggctgagatctgtgagctgctgaaggacagccagttcctggccccagatgtgaccagcacccaggtgaacacagtggtgtctggggccctggaccggctgcactatgagaaggacccctgtgtgaagtatgacatcggcaggaagctgtggatctacctgcaccgggacagaagtgaggaggagtttgagcgcatccaccaggcccaggccgctgctgccaaggccaggaaggccctgcagcagaagcccaagccacccagcaaggtgaagagcagcagcaaggagagcagcatcaaggtgctgagcagcggccccagcgagcagagccagatgagcctgagtgacagctccatgccacccacccctgtgacccctgtgacccccaccaccccagccctgcctgccatccccatcagccccccacctgtgtctgctgtgaacaagagcggccccagcacagtgtctgagcccgccaagagcagcagtggagtgctgctggtgagcagccccaccatgccccacctgggcaccatgctgagccctgccagcagccagacagcccccagcagccaggccgccgcccgggtggtgagccacagcggcagcgctggcctgagccaggtgcgggtggtggcccagcccagcctgcctgctgtgccccagcagagcggcggccctgcccagaccctgccccagatgcctgctggcccccagatccgggtgcctgccacagccacccagaccaaggtggtgccccagacagtgatggccaccgtgcctgtgaaggcccagaccacagctgccaccgtgcagaggcctggccctggccagacaggcctgactgtgaccagcctgcctgccacagccagccctgtgtccaagccagccaccagcagccctggcaccagcgcccccagcgccagcacagctgctgtgatccagaatgtgacaggccagaacatcatcaagcaggtggccatcaccggccagctgggcgtgaagccccagacaggcaacagcatccccctgacagccaccaacttccgcatccagggcaaggatgtgctgcggctgccccccagcagcatcaccacagatgccaagggccagacagtgctgcgcatcaccccagacatgatggccaccctggccaagagccaggtgaccaccgtgaagctgacccaggacctgtttggaactggaggcaacaccaccgggaagggcatcagcgccaccctgcacgtgaccagcaaccctgtgcatgctgctgacagccctgccaaggccagcagcgccagcgcccccagcagcacccccaccggcaccaccgtggtgaaggtgaccccagacctgaagcccacagaggccagcagcagcgccttccggctgatgcctgccctgggcgtgtctgtggccgaccagaagggcaagagcacagtggccagcagcgaggccaagccagctgccaccatccgcatcgtgcagggcctgggcgtgatgccacccaaggccggccagaccatcaccgtggccacccacgccaagcagggcgcctctgtggccagcggcagcggcaccgtgcacaccagcgctgtgtccctgcccagcatgaatgctgctgtgtccaagacagtggccgtggccagcggggccgccagcacccccatcagcatcagcactggagcccccaccgtgcggcaggtgcctgtgtccaccaccgtggtgtccaccagccaggccggcaagctgcccacccgcatcaccgtgcccctgagcgtcatcagccagcccatgaagggcaagtctgtggtgacagcccccatcatcaagggcaacctgggcgccaacctgagcggcctgggcaggaacatcatcctgaccaccatgcctgctggcaccaagctgattgctggcaacaagcctgtgtccttcctgacagcccagcagctgcagcagctgcagcagcagggccaggccacccaggtgcgcatccagacagtgcctgccagccacctgcagcagggcacagccagcggcagcagcaaggctgtgtccacagtggtggtgaccacagcccccagccccaagcaggcccctgagcagcagtag

SEQ ID NO: 339699 - DNA, 3900 bp, Artificial Sequence
  derived and/or modified sequence
atggacagcctggaccacatgctgaccgaccccctggagctgggcccatgtggagatggccacgggacccgaatcatggaagactgtctcctgggggggacgcgagtgtcgctgccggaagacctgctggaagacccggaaatttttttcgatgtcgtgtccctttcaacctggcaagaagtgctctctgacagccagcgagagcacctgcagcagttcctgcctcaatttcccgaggatagtgccgagcagcaaaacgaattgatcctggcactcttcagtggcgagaacttcagattcggtaatcctctccacattgcacagaagctgtttcgggacggtcactttaaccccgaggtggttaaatatcgccaactctgtttcaagtcccagtataaacgctatctcaactcgcagcaacagtactttcaccggttgcttaagcagattctggccagccgctccgatcttctggaaatggctcggaggagcggcccagccctcccatttagacaaaaaaggccatcgccctcacgaacacccgaggagcgggaatggcgaacacaacaacggtacctgaaagtacttcgggaagtgaaagaagaatgcggagataccgcgttgtcttcggatgaagaggacctgtcgtcctggttgccgagtagtccagcaaggtccccttctcccgcagttccgctgcgcgtcgtgccgacgttatctaccaccgacatgaaaacggcggataaggtggagctgggcgactctgacttgaagataatgctgaaaaaacaccatgagaaaaggaaacatcagccagatcatccagacctgctgactggagacctgacacttaacgacatcatgactagagtgaatgccggacggaaaggctctttggccgctctgtacgatctcgctgtgctcaagaagaaggtcaaagagaaggaggaaaagaaaaagaaaaagatcaaaacaattaagagcgaggccgaagatctggctgagcccttaagttccacagagggcgtcgctcccttgtcgcaggccccttcccctctggccataccggcgattaaggaggagccgcttgaggacctgaagccctgcctgggcataaacgaaatttccagttccttcttctccctgctgctggagatcctccttctggaatcacaggcttcgcttcctatgttagaagaaagggtgcttgattggcaaagtagcccagctagcagtcttaatagctggttcagcgcagcccccaactgggccgagctggtgctgcctgcccttcaatacttagccggcgaatcacgggcagtcccatccagcttcagcccattcgtggagtttaaggagaagacacagcagtggaagctgcttggccagtcccaggacaacgaaaaggaactggccgctctgttccagttatggttggagaccaaggaccaggcattctgtaagcaggagaacgaggattcatccgatgccaccactcctgtgccccgggtccggaccgactacgtcgttcggccctctaccggggaagagaagcgtgtattccaagaacaagagagataccgctactctcaaccccacaaggcattcaccttccgtatgcatggattcgaaagcgtggtcggtccggtgaaaggcgtgttcgacaaggaaacatccctgaacaaggcacgcgaacacagtctcctacgatccgacagacccgcatatgttactatcttgtccctggtccgagatgcagccgcccgcttaccaaacggggaggggaccagggccgagatctgcgagttactgaaggactcccaattccttgcccctgacgtgacaagcactcaggtgaacacagtcgtgagcggtgccttggatcggctccactacgagaaagatccatgtgtgaagtacgacatcggtaggaaactgtggatctatttgcaccgcgacaggtccgaggaagaatttgagcgcatccaccaggcccaagctgctgccgccaaagcccgtaaggccctgcaacagaagcctaaacctccttcaaaggttaagagttcatccaaagaaagctcaatcaaggtcctttcgagtggtccgagtgaacagagtcaaatgtctctgtccgacagttctatgccacccacccccgtaacgcccgtcactcctaccacccctgctttgcctgccatacctattagtccaccaccagtctcagccgtcaacaaatctgggccctctacggtgtcagaacccgccaaatccagttccggcgtcttgttggtcagttcacctaccatgccccacctgggcacgatgctgagtccggccagttcacagaccgctcctagcagccaggccgctgctagagtagtgagtcactccgggtcagcaggactgtcccaggtgcgggtggttgcacagccatcccttccagcagttccacagcaaagtgggggccctgcccagactcttccacagatgcccgccggcccccagatccgggttcctgctacggccactcaaaccaaagtggtaccgcagaccgtcatggccactgttccggtgaaggcacagactaccgctgcaactgtgcagcgaccaggaccaggccaaaccgggctcaccgttacgagcttgccagcaacggcttccccggtgtcaaagcctgccaccagctctcccgggacctcagctccctccgcctcgaccgcagccgttatccaaaatgtaactggtcagaacatcattaaacaggtggctataacgggccaactgggggtaaaacctcagaccgggaactccatccccctgactgctaccaattttagaatccaaggcaaggatgtactccggctgcctccaagttctattaccacggacgctaagggccagacagtgctccggattaccccagacatgatggccactctcgccaaaagccaagtgactacagtcaagcttacgcaggacctgttcggcactggtggaaacacaacaggcaaagggatttcagctactctccacgttacatcaaacccagtgcacgcggctgactcgcccgctaaagcctctagcgcgtcggctcccagtagcactccaactgggacaacggtggtgaaggtcacccctgaccttaagccaaccgaagcctcttccagtgctttcaggctgatgcccgctcttggtgtctctgtagctgatcagaaggggaagagcaccgtggctagcagcgaggcaaaacccgcggcaactattaggattgtccaagggctgggcgtgatgccccctaaagctggtcagaccatcaccgttgccacccatgcaaaacagggggcatccgtcgcgagcggcagcggtaccgtgcacactagtgccgtgagcctaccttctatgaatgccgcagtgtcgaaaacagtggctgtagcctcaggcgccgcgagtacaccaatctcgatttcaacaggggcacctacggtaaggcaggtgcctgtgtccactacagtggtgtctaccagtcaagccggcaaattgccaaccagaatcacggtgccactctccgtgataagccagcctatgaagggaaagagcgtcgtcacagcccccattattaaaggcaacctgggcgccaacctcagcggactaggcaggaacattattctcaccacaatgccagctgggacaaagctcatcgccggcaataaacccgtgagtttccttacagctcaacagttgcagcagctgcagcagcagggtcaggctacccaggtccgaatacagaccgtccctgcctcccacttgcagcagggtacagcctccgggtcctctaaagccgtgtccacggtagtggtcaccaccgcaccatcacccaagcaggcacctgagcaacagtag

SEQ ID NO: 339700 - DNA, 3900 bp, Artificial Sequence
  derived and/or modified sequence
atggacagcctggaccacatgctgaccgaccccctggagctgggcccctgtggcgacggtcatggtacccgcattatggaggattgtctgctgggcggcaccagggtgagtttacctgaagatttactggaagacccagagatcttttttgacgtagtgagcctgtctacatggcaggaagtcctgagcgactcacagagagagcatctccagcagttcctgccccagtttcccgaggactctgcagagcagcagaacgaactgatcctcgcattgttctcgggcgagaactttaggttcggcaacccattgcatatagcccagaagctcttcagggacgggcactttaatccggaagtggtgaaataccggcagctgtgttttaaaagccagtataagcgctatttgaattctcagcagcagtacttccaccgtctcctgaagcaaatcctggcttctaggtctgacttgctggaaatggcaaggcgctctggccctgcactgccctttcgccagaagcgccctagtccaagtcgaacccccgaggagagagaatggcggacccaacagcgctacctgaaagttctcagggaggtcaaagaagaatgcggcgacaccgccctatcaagtgatgaagaagatctttcgagctggttgccgagcagccctgcccgcagtccttctccagcagtaccactcagggtcgtaccgaccctatcgacaacagacatgaagaccgccgacaaagtagagttaggcgatagcgatctgaagatcatgctgaagaagcaccatgagaagagaaagcatcagcccgatcatcccgacctgctgacaggagacctgacactgaatgacatcatgactcgcgttaacgccggacgaaaaggctccctggctgctctgtacgacctcgccgtgctgaaaaaaaaggtcaaggagaaagaggaaaagaagaagaagaaaattaaaacaattaaatccgaagcagaggatcttgctgagccattgtcttccactgagggagttgctcctctgagccaggcaccatcacctctcgcgattcccgcaattaaggaagagccacttgaagacctgaagccatgtctcggcataaacgaaatatctagttcgttctttagtctgttactggagatcctgctgcttgaatcacaggccagtctcccaatgctggaggaacgcgtgcttgactggcagagctcacccgcctccagtttgaacagctggtttagcgcggcccctaactgggcggaactggtgctcccagctctgcaatacctggccggagaatcgcgtgccgtgccatcctccttttctccattcgtcgagtttaaagagaaaacccagcaatggaagctgctggggcagagtcaggataatgagaaagagctggcagctttgtttcagttgtggctggagacgaaagaccaggccttctgcaaacaggagaatgaggatagcagcgatgccactaccccagtgcccagggtacgaacagattatgttgtgcgcccatcaacgggcgaagaaaagcgcgttttccaggagcaggagagatatagatactcccagccacacaaggcatttacattcaggatgcacgggtttgagagcgtggtaggccctgtgaaaggagtgttcgataaggagacctctcttaataaggcccgcgagcattctctccttcgaagcgatcggcctgcgtacgttaccatcctctcccttgtcagggacgctgctgcccgcctccccaatggtgaggggacgcgagctgagatctgcgagttactgaaagattcgcagttccttgcacccgacgtgacatcaactcaggtaaacactgtggtgagtggggcacttgaccgacttcattacgagaaggacccttgcgtgaaatacgacataggccggaagctgtggatatacttgcatagagaccgtagcgaagaagagtttgaaagaattcaccaggcgcaggctgcagccgccaaggccaggaaagctctacagcagaagcctaagcctccaagcaaggtgaagtcctcatcaaaggagtccagcatcaaagtgctctcatccggtccctccgaacagtctcagatgagcctgagcgactcctcaatgcccccgactccagtaacacctgtcacaccgaccacacccgctttgcccgctattcctattagcccaccacctgtcagcgccgttaataaaagcggcccgtctactgtttcggaacccgctaagagtagctccggcgtgctactcgtctccagccccacgatgccccacctgggcacaatgctgagcccggcctcgtcccagaccgcaccatcgtcacaggcagctgcgagagttgtgagtcactctggctctgccggcctgtcccaggtccgggtggtggcacagccttccctgcctgcggtgccccagcaaagcggtggtcccgcgcagacactcccccaaatgcccgctggcccgcagatccgcgtgccagctactgccacccagacgaaggtcgtaccccaaaccgtaatggccacagtgccggtgaaggcccagacaaccgctgcaactgttcagcgtccaggccctgggcagaccggactaaccgtgacctcccttcctgctaccgcgagccccgtctccaaacctgctacgtcgtcgccagggacatcagcaccttccgcttcaactgcagccgttatacagaatgtgactggccaaaacatcattaagcaagtcgctatcaccggtcaactaggggtcaaaccgcagactggcaattccattccccttaccgccacaaacttccgcattcagggtaaggacgtgctgcggctgccgcccagctctatcaccaccgatgctaagggccagacagttctgcgaatcactccagacatgatggcaacactcgctaaatcacaggttacaaccgttaaactgacccaagacctgtttgggactgggggaaacacaacaggaaaagggatcagcgctacactgcacgtgacgtccaaccctgttcacgcagcagattctcccgcgaaggcaagcagcgccagcgcaccatcgtccaccccgactgggactactgtcgttaaagtgacacccgaccttaagcctactgaggcttcttcatccgctttcaggctcatgcctgctctgggcgtgtccgtggctgatcagaagggcaagtccaccgtggcctcgtcggaggcaaaaccagcagcgactattagaattgttcagggactgggggtcatgccacccaaggccgggcagaccattaccgtggccactcacgctaagcaaggcgccagtgtggcctcgggatcaggaacagttcatacttcagcagtaagcctcccttccatgaacgccgccgtctctaaaacagtggctgttgccagcggagccgcctccactcccattagcatatcaactggagcccctaccgtgcggcaggtacccgtaagcacaacggtcgtatccacaagtcaagcggggaagctgccaacccggatcaccgtgccgctgagtgtgatatcccaaccaatgaaggggaagagcgtggtgacagccccaatcattaagggtaatctgggggcgaacttatcagggctagggcgaaacatcatcctgacgactatgcctgccggtactaaacttattgctgggaataagccagtttcctttttgaccgcacaacagctacagcagctccagcagcagggccaggccacccaagtgaggattcagaccgtgcccgcctcacacctgcagcagggcacagcctccggcagcagcaaagctgtgagtacggtcgtggtgactaccgcaccaagccccaaacaggcaccggaacaacagtag

SEQ ID NO: 339701 - DNA, 3900 bp, Artificial Sequence
  derived and/or modified sequence
atggacagcctggaccacatgctgaccgaccccctggagctgggcccctgcggagacggacacgggactaggataatggaggattgtctgctcggcggtacccgtgtcagtctcccagaggacctgttggaagacccggagatttttttcgatgtggtatcgctgagtacatggcaagaagtactatccgatagccaacgtgaacaccttcagcagtttctgccacagttccccgaagactctgccgagcagcagaacgagctgatcctggccctcttcagcggtgagaatttccgattcggtaaccctttgcatattgcccagaagctgtttcgtgacgggcacttcaatccggaagtggtgaagtacaggcagctgtgctttaagtcgcaatacaaacgctatttgaactcgcaacagcagtactttcataggctcctgaagcagattctggcaagcaggtcagacctcttggaaatggcacggagaagtgggcctgctctcccatttaggcagaagcggccatcaccctctaggacaccagaagagcgggagtggcggacccagcagcggtatctaaaagtgttgagagaagtcaaggaggaatgcggggatacggcactgtctagtgatgaagaggatttgagcagttggctccccagttccccagcccgaagccccagccccgcagtgcccttgcgtgtagtcccgacactgtctaccactgacatgaaaactgcagacaaagtagaactcggcgatagcgatctgaaaataatgcttaagaaacaccatgaaaaaagaaagcaccagccggatcatccggacctgctgaccggggatctgaccctaaacgatatcatgactcgcgtcaacgccggaaggaagggaagcctggccgccctctacgatctcgctgtgctgaagaaaaaagtcaaagagaaggaagaaaagaaaaagaaaaagattaaaaccattaagtccgaggccgaggatctggccgaacccctgtcctcgaccgagggagtcgcccccctgtcccaggccccctcacctctggccattcccgccatcaaagaagaacccctcgaagacttgaagccttgtctgggaatcaatgagatctccagtagctttttttcacttctgctggaaattctgctcctggaaagccaggcaagtctgcctatgctggaagagagggttctggattggcagagttcacccgctagctctttaaacagttggtttagcgccgctccgaactgggctgagctcgtgctgcccgcattgcaatatttggcaggcgaatcccgagccgttcccagttcttttagcccattcgttgagttcaaggaaaaaactcaacagtggaagctcctaggacagagccaggacaatgagaaggagctcgccgcactgttccagctgtggttggagacgaaagaccaagctttctgcaaacaggagaatgaggattcctcggacgccacgactcctgtgccccgggtgcgaactgattacgtcgtccgaccctccaccggagaagagaaacgagtttttcaagagcaggagcggtatcgctattctcagcctcataaagcgtttacattcagaatgcatgggttcgagtcggtggtgggccctgtcaaaggagtgtttgacaaggagacttctctcaataaggccagagaacactcactgttgcgctcagaccgccctgcctatgtgaccattctgtcattggtgcgcgatgcagccgcccgtctgccaaacggggagggtacccgcgcagaaatttgcgagctgctcaaggactcccaatttcttgctcccgatgtgacttccacacaggtcaataccgtggtgagtggggcccttgatcgactccattatgagaaggacccatgtgttaaatatgatattgggaggaaactgtggatctatcttcacagagaccggtccgaagaggagttcgagcgcatccatcaggcccaggcggccgccgctaaggcccgtaaggcgctccagcagaaacccaagccccccagtaaggtcaagtcgagctccaaggagtcatcaatcaaagtgctgtccagtgggccaagcgagcagagccagatgtcactgagcgacagctctatgccaccgaccccagtgacacccgtgacacccactacgcccgcgcttcctgccatccccatatctccgccccccgtgtctgccgtaaataaatccggtcctagcaccgtgtcagagcctgcaaagtcatccagcggagtccttttagtaagctccccgactatgccccacctcggtactatgctgagccccgctagctcgcagacagcaccgtcttcgcaggccgcggctcgggtcgttagccatagtggtagcgccggactgtctcaggtacgagtggtggcacagccgagcctgccggccgtgccacaacaaagcggcggacctgcacaaaccctaccacaaatgcccgcaggcccccagatacgtgtgccagctactgcaacccaaactaaagtggtgccccagactgtcatggcaaccgtgcctgtgaaggctcaaactaccgccgcaaccgtgcagagaccaggccccggccagacaggactaaccgttacctccttgccagccacagcgtccccggtgtccaaacctgccactagctcccccgggacgagcgctccttcagcctcaacagccgctgtgattcagaacgtaactggacagaacattatcaagcaagtggcaataacgggccagttgggcgttaaacctcaaactgggaactctatccctttgactgcaacaaactttagaatccaagggaaggatgtcttgcggctgccaccatcatcaatcactaccgatgccaagggtcaaaccgtgctgaggattacacctgacatgatggcaacactggcaaaaagccaggtgactacggtgaaactaacgcaggatctgtttggaacaggcgggaacaccaccggcaagggcatctccgctactctgcacgtgacttctaatcccgtgcacgccgctgactcacctgctaaggcgagtagtgcctcagccccaagctcaactcctactggcaccactgttgtaaaggtgaccccggaccttaagccgactgaggccagcagcagcgcctttcgtttaatgcccgcgctcggagtcagcgtggcggatcagaagggaaaatccacagtagcctcaagcgaagctaagcccgcagccaccatacgaatcgtgcaggggctcggcgtgatgcctcccaaagcaggccagactattacagtggcaacccacgccaagcagggcgcatcagtagcttcgggtagtgggacagtgcatacctccgccgtttccctgccgtccatgaatgctgctgtcagtaaaacagttgctgtggctagtggggctgcctcaacaccaattagtatatctaccggcgctccaaccgtccggcaggtacctgttagtactaccgtggtgagtaccagtcaggcaggcaaattaccaacacgtatcacagtgccgctgagcgttatttcacaacctatgaaaggaaaatcagtggttacggctccaattattaagggcaacttgggcgcaaacctgtccggcctgggacggaacatcattctgaccaccatgccggctggcacaaaacttatcgccgggaataagccagtgtcatttttgaccgcccagcagctgcagcagctgcagcagcagggccaggctacacaagtgcgcattcaaaccgtgcctgcctcccaccttcagcagggaactgcctctggctcaagtaaagccgtgtctactgtggtcgtgactactgctccctctcctaagcaggcaccagagcagcagtag

SEQ ID NO: 339702 - DNA, 5009 bp, Artificial Sequence
  derived and/or modified sequence
gctgtttagctgtaattagggtgcaaggataaggtgtaagaactggctggaggttgaatgttttcctggaggagtgttagcatcaactagatccctggaatttctgcctttctgtctcaagatgcatgtctttgtccagagtacctgtggagaagaaacaatggattccttagaccatatgctgacagatcctctggaacttggtccgtgtggagatggccatggcacgcgcatcatggaggattgcctcctgggaggcaccagagttagtctgcccgaggaccttctggaggatcctgagatcttctttgatgttgtcagcctctcaacatggcaggaagtgttaagtgattctcaacgtgaacacctccagcagtttctgccccagtttcctgaagacagtgctgagcagcagaatgaactcatcttagccttgttcagtggggagaacttccgctttggaaaccctctgcacattgcccagaagcttttccgagacggacactttaaccccgaggtggtcaagtaccggcagttatgcttcaagtcacagtacaagcgctacctcaactcccagcagcagtatttccatcggctgctgaagcaaattcttgcttcccggagtgatctgctggagatggcccggcggagtggccccgcccttcccttccggcagaaacgcccttcaccatcccgcacacctgaggagcgggagtggcggacccagcagcgctacttgaaggtcttaagggaagtgaaagaggagtgtggtgacacagccctgtcatctgatgaagaggatctcagctcatggcttccgagctctccagcacgttctcctagtcctgcggtgcccctgcgggtggtgcccacactttcaaccacggatatgaaaactgcagataaagtagaactgggggacagtgacctgaagataatgttaaagaagcaccacgagaagcggaaacatcagccagatcacccggaccttttgacaggggacctgactctcaatgacatcatgactcgagtaaatgctggcaggaagggctctctggcagccttatatgacttggctgtccttaaaaaaaaggttaaggaaaaagaggaaaagaagaagaagaaaataaaaacgatcaaatcagaggcagaggacctggccgagccgctaagcagtactgaaggggtcgcacctctctcacaggccccctctccgctggcaattcctgctatcaaggaagagccccttgaagacctcaagccttgccttggaatcaatgaaatatcttccagcttcttctctcttctattagagatcttgctgctggagagtcaggctagccttcctatgctagaggagcgagttttggattggcagtcatcgccagccagctccctcaacagctggttctctgcggcccccaactgggctgagttggtactaccagccctgcagtatcttgctggagaaagtcgagctgttccttccagtttctctccatttgttgaattcaaagagaaaacccagcagtggaagttgcttggccaatcccaagataatgaaaaggaattagctgccctcttccagctatggctagagaccaaagatcaggccttctgtaagcaagaaaatgaagacagctcagatgccacaacacctgtccctcgggtaagaactgactatgtggtgcgtcccagcacgggggaggagaaacgggtttttcaggagcaggagcgttacaggtatagccaaccccataaggcgttcacctttcgcatgcacggctttgagtctgtggtggggccagtgaagggcgtgtttgacaaggagacctcgctcaacaaggctcgggagcactccctgctgcgctccgaccggcctgcctacgtcaccattctgtctcttgttcgggacgctgcggctcgactgcctaatggagaaggcacacgggcagagatctgtgaactgcttaaggactcccagtttcttgcaccagatgtcaccagcactcaggtaaatacagtagtgagtggtgcactggatcggctacattacgaaaaagatccctgtgtgaaatacgacattggacgaaagctgtggatctacctgcatcgtgaccggagtgaagaagagtttgagcggattcaccaagcacaagcagctgcagctaaagccagaaaagctcttcagcaaaaacccaagcccccatccaaggtgaagtccagtagcaaggagagctccataaaggtccttagcagtggcccttctgagcagagccagatgagcctcagtgactccagtatgccacccaccccagtcacacctgtaacccccaccacaccagcattgcccgccattcccatctcccctccacctgtatcggcagtgaacaaaagcggcccttccacagtctcagaaccagctaagtctagctcgggtgttcttctggtgtcttcaccaacaatgccacatctgggaacaatgctttccccagcttccagccagactgcacccagttctcaggctgccgcccgggtcgtgagccactctggctctgctggactgtctcaggtgcgagtggtggcccagcctagccttcctgctgttccccagcagtcgggagggccggcacagacattgccacagatgccagcaggaccgcagatccgggttccagccactgccacacagaccaaagtagtgccccagacagtaatggccactgtgcccgtcaaagcgcagactacggcagccactgtgcagcggcctggacccgggcagacagggctcacggtgacaagtctccctgccacagccagccctgtgagtaagccagccacgagttctcctgggacctctgctcccagtgcctccacggctgccgtcattcaaaatgtcacaggacagaacatcatcaagcaggtggcaatcactgggcagcttggtgtgaagccccaaacaggcaacagcattccactcacagccactaacttccgcatccagggtaaggatgtattgcgtctgccgccctcttccatcaccacagatgccaagggccagacggttctgcgaatcactccggacatgatggccacattggccaagtcccaggttaccacagtcaaattgacccaggacctcttcgggacaggaggcaacactacaggcaaaggcatctctgccaccttacacgtcacttccaatccagtacatgcagctgatagccctgccaaggccagttcagccagtgccccttcatccactccaacaggtaccactgtggtcaaagtgactcctgacctcaagccaacagaagcctcaagttcggcttttcgcttgatgccagctcttggcgtgagtgtggctgaccagaagggaaaaagcacagtggcctcttcagaagcaaaaccagctgccacgatccgcatcgtgcagggactgggagtgatgcctcccaaagcaggccagaccatcaccgttgcaacccacgccaagcaaggggcctcggtggccagtgggtctggaactgtccatacttcagcggtgtccttacccagtatgaatgctgctgtgtccaagactgtagctgtggcttctggggctgcaagcacccccatcagcatcagcacaggagcccccaccgtgcggcaggtccctgtcagcaccacggttgtgtccacgtcccaggctgggaagttgcctacacggatcacagttcccctctctgtgatcagccagccaatgaagggcaagagcgtggtcacagcccccatcatcaaaggcaaccttggagccaacctcagtgggttgggccgcaacatcatcctcacaactatgccagcaggcactaagctcattgctggcaataagcctgttagtttcctcactgctcagcagttgcagcagcttcagcagcaaggtcaggccacacaggtgcgcatccagactgtccctgcatcccatctccaacagggaacagcttctggctcctccaaagcagtctccactgttgttgtgactacagctccgtctcctaaacaggcacctgagcaacaatgattatgagagaggatggcttccgtgaaagaccatgcctggtctgtcctggctgagaagggaccagggaggttgcatcattgttttaagcttgcctgttcaaggcagccaggcgaggggtgatggcaacggtggcctggattcgtggcctggattctgctgccacgtgccatagtggagcaccctgagaaaggttcactccagggttccaaggtctgctctctaccaatctaggagaatattctgttgaaattgcaggaattaccagttacgtccaacaagccagagttctgagagtaagacccccagggaaggcttaccagttgcagagtgcacacagcgaataggctggttctccatgaggattgtattttttggcttctggtcttctccatgactagtggtctggataggagttttgtgtccagaaaattttatgtaatttatttttttaaagaacctgttgtacatctttctcaaatacaaacttgggctttagctgccccctccactaaaccgatgacttacttttttgactagaatgagaaaatggcaagaatcttagtaaggtggtagccagcttggtaactgcatagtaatcgagaggctgtaagatgggaattcatcgtaggcagcgaggtagagtgggtcccctgaaatgggattcgcttggcactgcctcttaaagataggggtgttgggatcttgattgtggccgccccccccagctttacctgcccactttgtccttcttggcaagcctgttcacatggacgtccagagccagtggacagagaggaggggacggacagcagaggtgctgcttttgcagcagaaactttgttgcagttcagagtataccttctgctctgctccagagcaagagttgcaaaccaggcccttggggctggccatttgtttttgtaaataaagttttattggaacacagccc

SEQ ID NO: 339703 - DNA, 4949 bp, Artificial Sequence
  derived and/or modified sequence
caggattccagaattggaaataacgggagggaggacctggtccagcttcccttcctcaaataaggaaattgacacctggcgtgagtacctgtggagaagaaacaatggattccttagaccatatgctgacagatcctctggaacttggtccgtgtggagatggccatggcacgcgcatcatggaggattgcctcctgggaggcaccagagttagtctgcccgaggaccttctggaggatcctgagatcttctttgatgttgtcagcctctcaacatggcaggaagtgttaagtgattctcaacgtgaacacctccagcagtttctgccccagtttcctgaagacagtgctgagcagcagaatgaactcatcttagccttgttcagtggggagaacttccgctttggaaaccctctgcacattgcccagaagcttttccgagacggacactttaaccccgaggtggtcaagtaccggcagttatgcttcaagtcacagtacaagcgctacctcaactcccagcagcagtatttccatcggctgctgaagcaaattcttgcttcccggagtgatctgctggagatggcccggcggagtggccccgcccttcccttccggcagaaacgcccttcaccatcccgcacacctgaggagcgggagtggcggacccagcagcgctacttgaaggtcttaagggaagtgaaagaggagtgtggtgacacagccctgtcatctgatgaagaggatctcagctcatggcttccgagctctccagcacgttctcctagtcctgcggtgcccctgcgggtggtgcccacactttcaaccacggatatgaaaactgcagataaagtagaactgggggacagtgacctgaagataatgttaaagaagcaccacgagaagcggaaacatcagccagatcacccggaccttttgacaggggacctgactctcaatgacatcatgactcgagtaaatgctggcaggaagggctctctggcagccttatatgacttggctgtccttaaaaaaaaggttaaggaaaaagaggaaaagaagaagaagaaaataaaaacgatcaaatcagaggcagaggacctggccgagccgctaagcagtactgaaggggtcgcacctctctcacaggccccctctccgctggcaattcctgctatcaaggaagagccccttgaagacctcaagccttgccttggaatcaatgaaatatcttccagcttcttctctcttctattagagatcttgctgctggagagtcaggctagccttcctatgctagaggagcgagttttggattggcagtcatcgccagccagctccctcaacagctggttctctgcggcccccaactgggctgagttggtactaccagccctgcagtatcttgctggagaaagtcgagctgttccttccagtttctctccatttgttgaattcaaagagaaaacccagcagtggaagttgcttggccaatcccaagataatgaaaaggaattagctgccctcttccagctatggctagagaccaaagatcaggccttctgtaagcaagaaaatgaagacagctcagatgccacaacacctgtccctcgggtaagaactgactatgtggtgcgtcccagcacgggggaggagaaacgggtttttcaggagcaggagcgttacaggtatagccaaccccataaggcgttcacctttcgcatgcacggctttgagtctgtggtggggccagtgaagggcgtgtttgacaaggagacctcgctcaacaaggctcgggagcactccctgctgcgctccgaccggcctgcctacgtcaccattctgtctcttgttcgggacgctgcggctcgactgcctaatggagaaggcacacgggcagagatctgtgaactgcttaaggactcccagtttcttgcaccagatgtcaccagcactcaggtaaatacagtagtgagtggtgcactggatcggctacattacgaaaaagatccctgtgtgaaatacgacattggacgaaagctgtggatctacctgcatcgtgaccggagtgaagaagagtttgagcggattcaccaagcacaagcagctgcagctaaagccagaaaagctcttcagcaaaaacccaagcccccatccaaggtgaagtccagtagcaaggagagctccataaaggtccttagcagtggcccttctgagcagagccagatgagcctcagtgactccagtatgccacccaccccagtcacacctgtaacccccaccacaccagcattgcccgccattcccatctcccctccacctgtatcggcagtgaacaaaagcggcccttccacagtctcagaaccagctaagtctagctcgggtgttcttctggtgtcttcaccaacaatgccacatctgggaacaatgctttccccagcttccagccagactgcacccagttctcaggctgccgcccgggtcgtgagccactctggctctgctggactgtctcaggtgcgagtggtggcccagcctagccttcctgctgttccccagcagtcgggagggccggcacagacattgccacagatgccagcaggaccgcagatccgggttccagccactgccacacagaccaaagtagtgccccagacagtaatggccactgtgcccgtcaaagcgcagactacggcagccactgtgcagcggcctggacccgggcagacagggctcacggtgacaagtctccctgccacagccagccctgtgagtaagccagccacgagttctcctgggacctctgctcccagtgcctccacggctgccgtcattcaaaatgtcacaggacagaacatcatcaagcaggtggcaatcactgggcagcttggtgtgaagccccaaacaggcaacagcattccactcacagccactaacttccgcatccagggtaaggatgtattgcgtctgccgccctcttccatcaccacagatgccaagggccagacggttctgcgaatcactccggacatgatggccacattggccaagtcccaggttaccacagtcaaattgacccaggacctcttcgggacaggaggcaacactacaggcaaaggcatctctgccaccttacacgtcacttccaatccagtacatgcagctgatagccctgccaaggccagttcagccagtgccccttcatccactccaacaggtaccactgtggtcaaagtgactcctgacctcaagccaacagaagcctcaagttcggcttttcgcttgatgccagctcttggcgtgagtgtggctgaccagaagggaaaaagcacagtggcctcttcagaagcaaaaccagctgccacgatccgcatcgtgcagggactgggagtgatgcctcccaaagcaggccagaccatcaccgttgcaacccacgccaagcaaggggcctcggtggccagtgggtctggaactgtccatacttcagcggtgtccttacccagtatgaatgctgctgtgtccaagactgtagctgtggcttctggggctgcaagcacccccatcagcatcagcacaggagcccccaccgtgcggcaggtccctgtcagcaccacggttgtgtccacgtcccaggctgggaagttgcctacacggatcacagttcccctctctgtgatcagccagccaatgaagggcaagagcgtggtcacagcccccatcatcaaaggcaaccttggagccaacctcagtgggttgggccgcaacatcatcctcacaactatgccagcaggcactaagctcattgctggcaataagcctgttagtttcctcactgctcagcagttgcagcagcttcagcagcaaggtcaggccacacaggtgcgcatccagactgtccctgcatcccatctccaacagggaacagcttctggctcctccaaagcagtctccactgttgttgtgactacagctccgtctcctaaacaggcacctgagcaacaatgattatgagagaggatggcttccgtgaaagaccatgcctggtctgtcctggctgagaagggaccagggaggttgcatcattgttttaagcttgcctgttcaaggcagccaggcgaggggtgatggcaacggtggcctggattcgtggcctggattctgctgccacgtgccatagtggagcaccctgagaaaggttcactccagggttccaaggtctgctctctaccaatctaggagaatattctgttgaaattgcaggaattaccagttacgtccaacaagccagagttctgagagtaagacccccagggaaggcttaccagttgcagagtgcacacagcgaataggctggttctccatgaggattgtattttttggcttctggtcttctccatgactagtggtctggataggagttttgtgtccagaaaattttatgtaatttatttttttaaagaacctgttgtacatctttctcaaatacaaacttgggctttagctgccccctccactaaaccgatgacttacttttttgactagaatgagaaaatggcaagaatcttagtaaggtggtagccagcttggtaactgcatagtaatcgagaggctgtaagatgggaattcatcgtaggcagcgaggtagagtgggtcccctgaaatgggattcgcttggcactgcctcttaaagataggggtgttgggatcttgattgtggccgccccccccagctttacctgcccactttgtccttcttggcaagcctgttcacatggacgtccagagccagtggacagagaggaggggacggacagcagaggtgctgcttttgcagcagaaactttgttgcagttcagagtataccttctgctctgctccagagcaagagttgcaaaccaggcccttggggctggccatttgtttttgtaaataaagttttattggaacaca

SEQ ID NO: 339704 - DNA, 3900 bp, Artificial Sequence
  derived and/or modified sequence
atggattctttggaccatatgcttaccgaccccctggaactgggcccttgtggcgacggacacggtacccgcatcatggaagattgtctgcttggcggaacccgcgtgtctctgcccgaagatttacttgaagacccagaaattttcttcgacgtcgttagcctgtctacatggcaggaggtgttgtccgattcacagagagaacacctccagcagttcctccctcagtttcccgaggactcggcagagcaacagaatgagctcatcctcgctctgttcagcggggagaatttccggtttgggaatcccctgcacatcgcgcaaaaactgtttcgtgacggacactttaatccggaggtcgtgaaatacagacagttatgttttaagagtcagtacaagcgctacctgaacagccaacagcagtattttcatcgactactaaagcagatccttgcttcacgttcagaccttcttgagatggctcgcagatcagggcctgctctgccgttcaggcagaaacgacctagtccctcccgtacccctgaggaacgcgaatggcgaacccagcagaggtatcttaaagtgctgcgagaggtgaaagaagaatgcggtgatactgccctctcgtcggacgaggaggatctatccagttggttgccatcctcacccgcacggagccccagcccagcagtgcccctgcgtgtagtccctactctgagcacgaccgacatgaagacagccgataaagttgagctgggagattcggacctcaagattatgctgaaaaaacaccacgaaaaacgcaagcaccagcccgaccaccccgaccttctcaccggagatctgaccttgaatgacataatgacacgagtgaatgccggacggaaaggctcactggccgctttgtatgatctggcagtgcttaagaagaaagtcaaggagaaagaggaaaagaagaaaaaaaagattaagacgattaagagcgaggctgaggatttggctgagcctctttctagcaccgaaggagtcgctcccctgtcgcaagccccttctccactggctatacctgcgattaaagaggaaccccttgaggatttgaaaccctgcctgggtatcaatgagatatcctcctcttttttctctctgctgctggagatcttattgttggaatcccaggcaagcttacccatgctcgaggaacgtgtgctggactggcagtcttctccagctagtagtctgaatagctggttctcagctgccccaaattgggctgagctagtccttcctgcactgcaatacctggcgggagagtcacgagccgtgccgagctcattctccccctttgtggagtttaaagagaaaacccagcagtggaagctcctcggccagtcccaagataacgagaaagagttagccgcactgtttcagttgtggctggaaacaaaagaccaggccttttgtaaacaagaaaatgaggattcaagcgatgcgacaactcctgtgcccagagttcgcaccgactacgtggtgcgccctagcaccggcgaagagaaacgggtctttcaggaacaggagaggtataggtactctcaacctcataaggccttcaccttcaggatgcatggtttcgaatctgtggttgggcctgtcaaaggcgtattcgataaagagacttcactgaacaaggcccgagaacacagcctactgaggagcgatagacccgcttacgtcaccatcctgagtctggttcgagatgctgcagcaagactacctaacggggagggaaccagagccgagatatgcgaactgcttaaagattcccagtttctggctcccgatgtcacctccactcaagtgaataccgtggtatctggggcattggatcggctgcattacgaaaaggacccatgtgtgaagtacgacattggcaggaaattgtggatctacctgcacagagatagatccgaggaagaatttgaacgtatacaccaagcccaggccgcagctgccaaagcccgaaaggccctccagcagaaacctaaacctcctagcaaggtgaagagctcaagcaaagagtccagtattaaagttctctccagcggaccctctgagcagagtcaaatgtctttgagtgattcatccatgccccctacgccagtgacacctgtgacacctacgactccagctctccccgctattccaatttcaccaccaccagtgagtgctgtgaacaagagtgggccaagcacagtctctgaacctgcaaagtcctcctccggtgtcctactcgtcagctctccaactatgccccatctgggaactatgctgagccccgcaagtagccagacggctccaagctcacaggccgcagcccgagtggtgtcacactcgggctctgctgggctgagccaggttcgggtggtggcgcaacctagcctccccgctgtacctcagcagtccggaggtcctgctcaaactctaccccagatgcccgcagggccacagattagggttcctgcaactgctacgcaaacgaaggttgtgccccagaccgtgatggcaaccgtaccagttaaggcacagactaccgccgcaacagttcagagaccaggaccagggcaaacaggcctcacagtgacaagtctcccagctactgcttctcccgtgtccaagccagctacaagctcccctgggacgtcagcgccttctgcctccacagcagcagtcattcaaaatgtgactggacagaacatcattaagcaagtggctatcactgggcaactgggcgtcaagccccagacagggaacagtatcccgttaaccgcaactaattttagaatacaaggcaaggacgtacttagactgcctcctagttccattactaccgatgccaaaggtcaaacggtgcttagaatcacacccgacatgatggctacactcgctaaatcacaggtgacaaccgtgaagttgacccaagacctcttcggcactgggggaaataccacagggaaaggtatcagtgcaaccctacacgtcacaagtaatcctgttcacgctgcagattcacccgcaaaggcgtccagtgcatccgcacctagtagtacccccaccgggacaactgtcgtaaaagtaacaccggatctgaagccaacagaggcttcttctagcgcgttccgactgatgccagccctaggggtctctgtcgctgaccagaaaggaaaaagtacggtagccagtagcgaagctaagcctgccgctacaatccggattgtgcaggggttgggcgtgatgcctcccaaagcaggccagaccatcactgtggcaacacacgccaaacagggcgcaagcgtcgctagtgggtccggcacggtccacacgagcgctgtctcccttccaagcatgaatgcagcggtgtctaaaaccgtagccgtggcttctggggcagccagcaccccaattagcatcagcacgggcgcaccaacagttcggcaagtgccagtgagtacaactgtggtctcaaccagccaggcgggaaaactacccactcggattaccgtacccttgtctgtgatctcccagcccatgaaggggaagtctgtcgtgactgcacctataattaagggcaacctgggggcaaacctgagtggcttggggaggaacattatcctcacgaccatgcctgctggtaccaaattgatagctgggaacaaaccggtgtcttttctcacagctcagcaactacaacagctccagcagcagggtcaggccactcaggtgcggatacagacggtgccagcttctcacctgcagcagggcacagcttccggttcttcaaaagccgtgagcaccgtagtcgttaccactgctcctagcccaaaacaagcacccgaacaacagtag

SEQ ID NO: 339705 - DNA, 3900 bp, Artificial Sequence
  derived and/or modified sequence
atggattccctcgaccatatgttaaccgaccccctggaactaggcccatgcggcgatggccacggcactaggattatggaagattgtctcctcggaggaacccgggtatcattgcccgaggatctactcgaggaccctgaaatctttttcgatgtcgtttctctcagtacatggcaagaggtgctgtcagactcgcagcgggaacacttacagcagtttcttccacaatttcccgaggattcagctgagcagcaaaacgagctgatcctggccctgttcagcggcgagaacttcaggttcggaaatccactccacatcgcacagaaactgttccgggacggtcatttcaatccagaagtggttaagtacaggcagttgtgcttcaagtcgcagtacaagcgctacttgaatagccagcaacagtacttccaccgcttgctgaaacagatcctcgcctctagatcagaccttctggagatggctcggagaagcggtcctgccttgccatttaggcaaaagcggccatcaccctcgagaacaccagaagaacgtgaatggcgcactcagcagcgctacctgaaagtgttgagagaagtaaaagaggaatgcggggatacagctctatcctccgacgaagaagacctctcttcatggcttcctagtagcccggctcgcagtccatcccccgctgttcccctgcgtgtggtacccaccctgtccacgaccgatatgaagacagccgataaggtcgaactgggggacagtgatttaaagattatgctgaaaaagcaccacgaaaaaagaaagcatcagccagaccatcccgaccttttgaccggggatctgacattgaatgacattatgaccagggtcaatgcgggtcggaagggatctttagccgctctgtatgacttggctgtgctgaagaagaaggtgaaggaaaaagaggaaaaaaaaaagaagaaaatcaaaacaatcaaatctgaggcggaagacctggccgagcctctcagttctacagaaggagtggcgcctctttcccaggccccttctccattggcaattccagctatcaaggaggaaccactggaagatctgaagccgtgtttgggcattaacgaaatctccagtagcttcttcagcctcttacttgagatcctgctgctcgaaagccaggcttccctcccaatgcttgaagagcgggtgctggattggcaatcttctcctgcttcaagtttaaattcttggttcagcgcagctccgaactgggcagagctcgtgttacccgctctgcagtacctcgccggagaaagcagagccgtgccttcctctttcagccccttcgttgaatttaaggagaagacacaacagtggaaactcttgggtcagtcacaggataatgaaaaggagcttgccgcactgttccagctgtggctcgaaacaaaggatcaggcgttttgcaagcaggaaaatgaggacagtagcgacgctacaactcccgtgccaagggtgagaacggattatgttgtccggccttcgacaggagaggagaagcgggtcttccaggagcaagaacggtaccggtattctcaaccacacaaggccttcacatttcgtatgcacggttttgaaagcgtggtcggtcccgtaaagggcgttttcgataaagagacttccttaaacaaagcccgagaacatagtctccttcgaagtgataggcctgcatatgtgaccattttaagtctcgtgcgagacgccgctgcaaggctgcctaatggcgaaggaaccagggctgagatctgtgaactgctgaaagatagtcagttcctcgcccctgatgtcacttctacccaggtcaatactgtcgtgagcggagccctggacaggttacattacgagaaagatccatgcgtaaagtacgacatcggtcggaagttgtggatctatctgcatagagacagatctgaggaagagtttgaaagaatacatcaggcccaggccgcagcagctaaggccaggaaagctctacagcagaagcccaaacccccttcaaaggtaaaatcatcaagtaaagagtcttccatcaaggtgctcagttccgggcctagtgagcagtcccaaatgtccctctctgactcatcaatgccgccaacccccgtgacaccagtcactcccaccacgcccgctctgccagcaatcccaatttcacctcccccagtctcagcagttaacaaaagcggcccaagcacggtgagcgagccggcaaagtcgtccagcggtgtactgcttgtgagctccccaactatgcctcacctaggcaccatgcttagcccggctagttctcagactgcgccatccagccaggcggcagccagggtcgtgagtcacagcggcagtgcagggctgagtcaggtccgggtggtagctcagccttctctccctgcagtcccgcagcagtctgggggaccggcacagacacttccccagatgcctgccggaccacagattcgggtacccgctactgcaacccaaacaaaggtggttccacagactgttatggctaccgtacccgtgaaagcccaaaccacagccgcaactgtccagagacctgggccaggtcagaccggcttaaccgttacaagcctacctgccacggcatcaccagtgagtaaacccgcaacctcaagccctgggacgtccgccccttctgcttccactgctgccgtgatccagaatgtgacaggccagaatattatcaagcaggttgcgattacaggacagctgggggtcaagcctcagacagggaacagtattcccttaaccgcgaccaactttcggatccaaggtaaagatgtgcttcgcctgcctccaagtagtataactacagacgctaagggccagaccgtgctgcgaattaccccagatatgatggcaactcttgcaaaaagccaagtcacaaccgtaaagctgactcaagacctttttggaaccggaggcaacaccaccggaaagggcatttcagctacactgcatgtgacttccaatcccgtccacgccgcagatagcccagcgaaggcctcatccgccagtgctccttcctctacccctaccggtactaccgtggtgaaggtcacccccgatctgaagcctaccgaggcaagtagctcagcctttcgtctgatgcctgccctgggagtttctgtagccgaccagaagggaaaaagtaccgtggctagttctgaggctaaaccggcagcaactatcagaatcgtacaagggcttggtgttatgcctcctaaagccggacagactattaccgttgccactcatgcaaaacagggagcctcagtggcctccgggtctggcacagtgcatacatccgctgtgtcccttccatcaatgaacgccgcagttagcaagacggtcgctgtcgcctctggagcagcaagtacgcctatcagcatcagcactggagcaccaacagtgagacaagtgccggtcagcactactgtggtctccacctcccaggccggtaagttaccaacccgcatcacggtgccactgtccgtaatctctcagcccatgaaagggaaatccgtggttaccgcccctataatcaagggaaatcttggtgctaatctgtcaggtttgggcaggaatattatcctgaccacaatgcccgctgggaccaagctgatagctgggaacaagccagttagcttcctgacagcccagcagttgcagcagctgcagcagcagggacaggcaactcaggtgaggatacagacggtgcctgcttctcacctgcagcagggaactgcctctggcagcagcaaagccgtgagcactgtagtcgttactactgctccttctcccaagcaggctccagagcagcagtag

SEQ ID NO: 339706 - DNA, 3900 bp, Artificial Sequence
  derived and/or modified sequence
atggactctctcgatcatatgctgactgatcctctggaattaggcccttgcggcgacggccatggaaccaggattatggaggactgcctgctcggaggaacaagggttagcttgcccgaagaccttctggaggacccagagatatttttcgacgtggttagcctgtcaacatggcaggaggtgctgtccgacagtcaacgcgaacacctacagcaattcctcccacagtttcccgaagacagtgctgaacaacagaatgagttaattttggccctttttagcggcgagaactttcgatttggtaacccactccacatcgcacagaagctgtttcgtgatggtcacttcaatccagaggtagtaaagtacagacagctttgttttaagagtcagtacaagcggtatctcaactcacaacaacagtacttccatcgactgttaaagcagattcttgccagcaggtccgacttgttagagatggcccgacggtcgggcccagccctaccattccgccagaagaggccgagcccaagccggacaccagaagagcgcgaatggcgcacgcaacaacgatacctcaaggtgctccgggaggttaaagaagaatgtggtgataccgcactatcatctgacgaggaggatctcagctcttggctgccaagtagcccggctcgttccccgtcgcctgctgtgcccctacgggtcgtgcctacactgagtacaaccgacatgaagactgcggacaaggttgaactaggagatagtgatctgaaaattatgctgaagaaacatcacgagaagagaaaacatcagcccgaccatccagacttgttgaccggcgatctcactctgaacgatattatgaccagggttaacgcgggtcggaaaggttcacttgcagctctgtacgatctagccgttctcaaaaaaaaggtgaaagagaaggaggagaagaagaaaaagaaaataaagacaattaagagtgaggccgaggacttggctgaaccactgtcctcaaccgagggcgtcgcccctctgtcacaggccccaagccccctggctatccccgcaattaaagaggagccccttgaggatctcaagccatgtcttggcatcaatgaaattagttcctcttttttcagcctgctcctcgagattctgctgcttgagtcgcaggcaagcctccctatgctagaagaaagagtgctcgattggcaatccagcccagccagttctctaaattcgtggtttagcgctgctccaaactgggccgaactcgtactcccagcactgcagtacctcgccggtgaatctcgcgcagtcccgtcctccttttctccatttgtggaattcaaggagaagacccagcagtggaagctcttgggacagagtcaagataacgagaaggaactggccgctctgttccagctgtggctcgagactaaggatcaggccttctgcaaacaagagaacgaggattcctctgatgcaaccacccccgttccacgcgtgagaacggattacgttgtacggccaagtacaggtgaggagaagcgggtgttccaggagcaagagaggtaccggtatagccagcctcataaagctttcacattcaggatgcacgggtttgagtccgtggttggacctgttaagggggtattcgacaaggagactagcttgaacaaagcaagagagcattcactgctgcgatccgaccgcccagcttacgttactattctctcccttgtcagggatgcagccgctcgcctgccaaatggcgaagggactcgagccgagatctgtgagctacttaaagactctcagttccttgcaccagacgtgacctccactcaagttaatactgtagtttcaggggctcttgaccgactccattacgaaaaggacccgtgcgtcaaatacgacattgggagaaagctatggatttaccttcaccgagatcggagtgaggaggagttcgagaggatacatcaagcccaggctgccgctgcaaaggccagaaaggccctgcagcagaagccaaagcctccttccaaagtgaaatcttctagcaaggagagtagcatcaaggtgctctcaagtggacccagcgagcagtcacagatgagcctttctgacagcagtatgccacctactcccgtcacgcccgtgacaccaaccacgcccgctttgcccgcaatccccatttcgccaccccctgtcagcgcagtcaataaatctggcccatcaaccgtaagcgagccagcgaaatctagtagtggggtgttgctagtgtcatctccaaccatgccacacttgggcacaatgctgagcccagcatcatcccagacagctcctagttctcaagcagccgcaagagtagtgagtcactctgggagcgcgggtctctcacaggtgagggtcgtggctcagcccagcttgcccgctgtgccacagcagtccgggggacccgcacagacactaccccagatgccagccggaccgcaaatcagggtgccagcgacagccacacagacaaaggttgtcccccagacagttatggccactgtgccggttaaagctcagactaccgctgcgacggtacagagacctggccctggccagacaggcctaactgtaacatcccttcccgcaacagcgtcgcccgtgagcaagccagctacctcgagtccagggacttccgccccttccgcctccacagctgccgtgattcagaatgtcaccggacagaacataattaagcaggtggctataactggccagcttggcgtaaaaccccagacagggaatagtattcccttgacagccacaaacttccgaatacaggggaaggacgtgcttaggttgccacctagttcgattaccacagatgccaaggggcagaccgtactccgaattactcccgacatgatggccactttagcaaagtcacaggtcacaaccgtcaagctcacacaagacctgtttggcactggaggaaacactactggaaaagggatctcagcaactttgcatgtaactagtaacccagtgcacgcagccgattctcctgctaaggcatccagtgcctccgcaccttcctccacacctacgggtacaacagtggtgaaagtcacccccgacttaaagcccacagaagctagttcttccgctttcagactgatgccagcccttggcgtgtctgtggcagaccaaaagggcaagtccactgtcgcttcatctgaagccaaacccgctgctaccataagaatagttcagggcctcggcgtgatgccacctaaggctggacaaacaattacagtggctacacatgccaagcagggggcatcagtggcatctgggtcaggaaccgttcacacttctgccgtgtcgctcccaagcatgaatgcggcagtcagtaagacagtggcagtggccagcggggcagcgtctactcctataagtatcagtactggggctcctactgtgaggcaggtccccgtgtcaaccacggtggtgtctacctctcaggcaggcaagctgcctacaaggatcaccgtcccgctctctgtgatcagtcagcctatgaagggaaaaagcgtggttacggctcctatcatcaagggcaatttaggggctaacttatctgggctgggcaggaacataatcctgacaacaatgcctgctggtacaaagctgattgcgggtaataagccagtgagttttctgacagctcagcagctgcagcaactccagcaacaggggcaagctacgcaggtgaggattcagaccgtcccagccagtcatcttcaacagggaaccgcatcagggagctcgaaagctgtgtcgaccgtggtagtgaccactgccccttcccctaagcaggctcctgaacagcaatag

SEQ ID NO: 339707 - DNA, 3900 bp, Artificial Sequence
  derived and/or modified sequence
atggacagcctggaccacatgctgaccgaccccctggagctgggcccctgcggcgacggccacggcaccagaatcatggaggactgcctgctgggcggcaccagagtgagcctgcccgaggacctgctggaggaccccgagatcttcttcgacgtggtgagcctgagcacctggcaggaggtgctgagcgacagccagagagagcacctgcagcagttcctgccccagttccccgaggacagcgccgagcagcagaacgagctgatcctggccctgttcagcggcgagaacttcagattcggcaaccccctgcacatcgcccagaagctgttcagagacggccacttcaaccccgaggtggtgaagtacagacagctgtgcttcaagagccagtacaagagatacctgaacagccagcagcagtacttccacagactgctgaagcagatcctggccagcagaagcgacctgctggagatggccagaagaagcggccccgccctgcccttcagacagaagagacccagccccagcagaacccccgaggagagagagtggagaacccagcagagatacctgaaggtgctgagagaggtgaaggaggagtgcggcgacaccgccctgagcagcgacgaggaggacctgagcagctggctgcccagcagccccgccagaagccccagccccgccgtgcccctgagagtggtgcccaccctgagcaccaccgacatgaagaccgccgacaaggtggagctgggcgacagcgacctgaagatcatgctgaagaagcaccacgagaagagaaagcaccagcccgaccaccccgacctgctgaccggcgacctgaccctgaacgacatcatgaccagagtgaacgccggcagaaagggcagcctggccgccctgtacgacctggccgtgctgaagaagaaggtgaaggagaaggaggagaagaagaagaagaagatcaagaccatcaagagcgaggccgaggacctggccgagcccctgagcagcaccgagggcgtggcccccctgagccaggcccccagccccctggccatccccgccatcaaggaggagcccctggaggacctgaagccctgcctgggcatcaacgagatcagcagcagcttcttcagcctgctgctggagatcctgctgctggagagccaggccagcctgcccatgctggaggagagagtgctggactggcagagcagccccgccagcagcctgaacagctggttcagcgccgcccccaactgggccgagctggtgctgcccgccctgcagtacctggccggcgagagcagagccgtgcccagcagcttcagccccttcgtggagttcaaggagaagacccagcagtggaagctgctgggccagagccaggacaacgagaaggagctggccgccctgttccagctgtggctggagaccaaggaccaggccttctgcaagcaggagaacgaggacagcagcgacgccaccacccccgtgcccagagtgagaaccgactacgtggtgagacccagcaccggcgaggagaagagagtgttccaggagcaggagagatacagatacagccagccccacaaggccttcaccttcagaatgcacggcttcgagagcgtggtgggccccgtgaagggcgtgttcgacaaggagaccagcctgaacaaggccagagagcacagcctgctgagaagcgacagacccgcctacgtgaccatcctgagcctggtgagagacgccgccgccagactgcccaacggcgagggcaccagagccgagatctgcgagctgctgaaggacagccagttcctggcccccgacgtgaccagcacccaggtgaacaccgtggtgagcggcgccctggacagactgcactacgagaaggacccctgcgtgaagtacgacatcggcagaaagctgtggatctacctgcacagagacagaagcgaggaggagttcgagagaatccaccaggcccaggccgccgccgccaaggccagaaaggccctgcagcagaagcccaagccccccagcaaggtgaagagcagcagcaaggagagcagcatcaaggtgctgagcagcggccccagcgagcagagccagatgagcctgagcgacagcagcatgccccccacccccgtgacccccgtgacccccaccacccccgccctgcccgccatccccatcagccccccccccgtgagcgccgtgaacaagagcggccccagcaccgtgagcgagcccgccaagagcagcagcggcgtgctgctggtgagcagccccaccatgccccacctgggcaccatgctgagccccgccagcagccagaccgcccccagcagccaggccgccgccagagtggtgagccacagcggcagcgccggcctgagccaggtgagagtggtggcccagcccagcctgcccgccgtgccccagcagagcggcggccccgcccagaccctgccccagatgcccgccggcccccagatcagagtgcccgccaccgccacccagaccaaggtggtgccccagaccgtgatggccaccgtgcccgtgaaggcccagaccaccgccgccaccgtgcagagacccggccccggccagaccggcctgaccgtgaccagcctgcccgccaccgccagccccgtgagcaagcccgccaccagcagccccggcaccagcgcccccagcgccagcaccgccgccgtgatccagaacgtgaccggccagaacatcatcaagcaggtggccatcaccggccagctgggcgtgaagccccagaccggcaacagcatccccctgaccgccaccaacttcagaatccagggcaaggacgtgctgagactgccccccagcagcatcaccaccgacgccaagggccagaccgtgctgagaatcacccccgacatgatggccaccctggccaagagccaggtgaccaccgtgaagctgacccaggacctgttcggcaccggcggcaacaccaccggcaagggcatcagcgccaccctgcacgtgaccagcaaccccgtgcacgccgccgacagccccgccaaggccagcagcgccagcgcccccagcagcacccccaccggcaccaccgtggtgaaggtgacccccgacctgaagcccaccgaggccagcagcagcgccttcagactgatgcccgccctgggcgtgagcgtggccgaccagaagggcaagagcaccgtggccagcagcgaggccaagcccgccgccaccatcagaatcgtgcagggcctgggcgtgatgccccccaaggccggccagaccatcaccgtggccacccacgccaagcagggcgccagcgtggccagcggcagcggcaccgtgcacaccagcgccgtgagcctgcccagcatgaacgccgccgtgagcaagaccgtggccgtggccagcggcgccgccagcacccccatcagcatcagcaccggcgcccccaccgtgagacaggtgcccgtgagcaccaccgtggtgagcaccagccaggccggcaagctgcccaccagaatcaccgtgcccctgagcgtgatcagccagcccatgaagggcaagagcgtggtgaccgcccccatcatcaagggcaacctgggcgccaacctgagcggcctgggcagaaacatcatcctgaccaccatgcccgccggcaccaagctgatcgccggcaacaagcccgtgagcttcctgaccgcccagcagctgcagcagctgcagcagcagggccaggccacccaggtgagaatccagaccgtgcccgccagccacctgcagcagggcaccgccagcggcagcagcaaggccgtgagcaccgtggtggtgaccaccgcccccagccccaagcaggcccccgagcagcagtag

SEQ ID NO: 339708 - DNA, 4114 bp, Artificial Sequence
  derived and/or modified sequence
caggattccagaattggaaataacgggagggaggacctggtccagcttcccttcctcaaataaggaaattgacacctggcgtgagaaggggttttgccatgttcgctaggctggtctcaaactcatggattcaaggggactgcccgcctggacctcccaaagtactgagattagtacctgtggagaagaaacaatggattccttagaccatatgctgacagatcctctggaacttggtccgtgtggagatggccatggcacgcgcatcatggaggattgcctcctgggaggcaccagagttagtctgcccgaggaccttctggaggatcctgagatcttctttgatgttgtcagcctctcaacatggcaggaagtgttaagtgattctcaacgtgaacacctccagcagtttctgccccagtttcctgaagacagtgctgagcagcagaatgaactcatcttagccttgttcagtggggagaacttccgctttggaaaccctctgcacattgcccagaagcttttccgagacggacactttaaccccgaggtggtcaagtaccggcagttatgcttcaagtcacagtacaagcgctacctcaactcccagcagcagtatttccatcggctgctgaagcaaattcttgcttcccggagtgatctgctggagatggcccggcggagtggccccgcccttcccttccggcagaaacgcccttcaccatcccgcacacctgaggagcgggagtggcggacccagcagcgctacttgaaggtcttaagggaagtgaaagaggagtgtggtgacacagccctgtcatctgatgaagaggatctcagctcatggcttccgagctctccagcacgttctcctagtcctgcggtgcccctgcgggtggtgcccacactttcaaccacggatatgaaaactgcagataaagtagaactgggggacagtgacctgaagataatgttaaagaagcaccacgagaagcggaaacatcagccagatcacccggaccttttgacaggggacctgactctcaatgacatcatgactcgagtaaatgctggcaggaagggctctctggcagccttatatgacttggctgtccttaaaaaaaaggttaaggaaaaagaggaaaagaagaagaagaaaataaaaacgatcaaatcagaggcagaggacctggccgagccgctaagcagtactgaaggggtcgcacctctctcacaggccccctctccgctggcaattcctgctatcaaggaagagccccttgaagacctcaagccttgccttggaatcaatgaaatatcttccagcttcttctctcttctattagagatcttgctgctggagagtcaggctagccttcctatgctagaggagcgagttttggattggcagtcatcgccagccagctccctcaacagctggttctctgcggcccccaactgggctgagttggtactaccagccctgcagtatcttgctggagaaagtcgagctgttccttccagtttctctccatttgttgaattcaaagagaaaacccagcagtggaagttgcttggccaatcccaagataatgaaaaggaattagctgccctcttccagctatggctagagaccaaagatcaggccttctgtaagcaagaaaatgaagacagctcagatgccacaacacctgtccctcgggtaagaactgactatgtggtgcgtcccagcacgggggaggagaaacgggtttttcaggagcaggagcgttacaggtatagccaaccccataaggcgttcacctttcgcatgcacggctttgagtctgtggtggggccagtgaagggcgtgtttgacaaggagacctcgctcaacaaggctcgggagcactccctgctgcgctccgaccggcctgcctacgtcaccattctgtctcttgttcgggacgctgcggctcgactgcctaatggagaaggcacacgggcagagatctgtgaactgcttaaggactcccagtttcttgcaccagatgtcaccagcactcaggtaaatacagtagtgagtggtgcactggatcggctacattacgaaaaagatccctgtgtgaaatacgacattggacgaaagctgtggatctacctgcatcgtgaccggagtgaagaagagtttgagcggattcaccaagcacaagcagctgcagctaaagccagaaaagctcttcagcaaaaacccaagcccccatccaaggtgaagtccagtagcaaggagagctccataaaggtccttagcagtggcccttctgagcagagccagatgagcctcagtgactccagtatgccacccaccccagtcacacctgtaacccccaccacaccagcattgcccgccattcccatctcccctccacctgtatcggcagtgaacaaaagcggcccttccacagtctcagaaccagctaagtctagctcgggtgttcttctggtgtcttcaccaacaatgccacatctgggaacaatgctttccccagcttccagccagactgcacccagttctcaggctgccgcccgggtcgtgagccactctggctctgctggactgtctcaggtgcgagtggtggcccagcctagccttcctgctgttccccagcagtcgggagggccggcacagacattgccacagatgccagcaggaccgcagatccgggttccagccactgccacacagaccaaagtagtgccccagacagtaatggccactgtgcccgtcaaagcgcagactacggcagccactgtgcagcggcctggacccgggcagacagggctcacggtgacaagtctccctgccacagccagccctgtgagtaagccagccacgagttctcctgggacctctgctcccagtgcctccacggctgccgtcattcaaaatgtcacaggacagaacatcatcaagcaggtggcaatcactgggcagcttggtgtgaagccccaaacaggcaacagcattccactcacagccactaacttccgcatccagggtaaggatgtattgcgtctgccgccctcttccatcaccacagatgccaagggccagacggttctgcgaatcactccggacatgatggccacattggccaagtcccaggttaccacagtcaaattgacccaggacctcttcgggacaggaggcaacactacaggcaaaggcatctctgccaccttacacgtcacttccaatccagtacatgcagctgatagccctgccaaggccagttcagccagtgccccttcatccactccaacaggtaccactgtggtcaaagtgactcctgacctcaagccaacagaagcctcaagttcggcttttcgcttgatgccagctcttggcgtgagtgtggctgaccagaagggaaaaagcacagtggcctcttcagaagcaaaaccagctgccacgatccgcatcgtgcagggactgggagtgatgcctcccaaagcaggccagaccatcaccgttgcaacccacgccaagcaaggggcctcggtggccagtgggtctggaactgtccatacttcagcggtgtccttacccagtatgaatgctgctgtgtccaagactgtagctgtggcttctggggctgcaagcacccccatcagcatcagcacaggagcccccaccgtgcggcaggtccctgtcagcaccacggttgtgtccacgtcccaggctgggaagttgcctacacggatcacagttcccctctctgtgatcagccagccaatgaagggcaagagcgtggtcacagcccccatcatcaaaggcaaccttggagccaacctcagtgggttgggccgcaacatcatcctcacaactatgccagcaggcactaagctcattgctggcaataagcctgttagtttcctcactgctcagcagttgcagcagcttcagcagcaaggtcaggccacacaggtgcgcatccagactgtccctgcatcccatctccaacagggaacagcttctggctcctccaaagcagtctccactgttgttgtgactacagctccgtctcctaaacaggcacctgagcaacaatgattatgagagaggatggcttcc

SEQ ID NO: 339709 - protein, 1324 aa, Artificial Sequence
  derived and/or modified sequence
MHVFVQSTCGEETMDSLDHMLTDPLELGPCGDGHGTRIMEDCLLGGTRVSLPEDLLEDPEIFFDVVSLSTWQEVLSDSQREHLQQFLPQFPEDSAEQQNELILALFSGENFRFGNPLHIAQKLFRDGHFNPEVVKYRQLCFKSQYKRYLNSQQQYFHRLLKQILASRSDLLEMARRSGPALPFRQKRPSPSRTPEEREWRTQQRYLKVLREVKEECGDTALSSDEEATLDLQEQFSFEDLSSWLPSSPARSPSPAVPLRVVPTLSTTDMKTADKVELGDSDLKIMLKKHHEKRKHQPDHPDLLTGDLTLNDIMTRVNAGRKGSLAALYDLAVLKKKVKEKEEKKKKKIKTIKSEAEDLAEPLSSTEGVAPLSQAPSPLAIPAIKEEPLEDLKPCLGINEISSSFFSLLLEILLLESQASLPMLEERVLDWQSSPASSLNSWFSAAPNWAELVLPALQYLAGESRAVPSSFSPFVEFKEKTQQWKLLGQSQDNEKELAALFQLWLETKDQAFCKQENEDSSDATTPVPRVRTDYVVRPSTGEEKRVFQEQERYRYSQPHKAFTFRMHGFESVVGPVKGVFDKETSLNKAREHSLLRSDRPAYVTILSLVRDAAARLPNGEGTRAEICELLKDSQFLAPDVTSTQVNTVVSGALDRLHYEKDPCVKYDIGRKLWIYLHRDRSEEEFERIHQAQAAAAKARKALQQKPKPPSKVKSSSKESSIKVLSSGPSEQSQMSLSDSSMPPTPVTPVTPTTPALPAIPISPPPVSAVNKSGPSTVSEPAKSSSGVLLVSSPTMPHLGTMLSPASSQTAPSSQAAARVVSHSGSAGLSQVRVVAQPSLPAVPQQSGGPAQTLPQMPAGPQIRVPATATQTKVVPQTVMATVPVKAQTTAATVQRPGPGQTGLTVTSLPATASPVSKPATSSPGTSAPSASTAAVIQNVTGQNIIKQVAITGQLGVKPQTGNSIPLTATNFRIQGKDVLRLPPSSITTDAKGQTVLRITPDMMATLAKSQVTTVKLTQDLFGTGGNTTGKGISATLHVTSNPVHAADSPAKASSASAPSSTPTGTTVVKVTPDLKPTEASSSAFRLMPALGVSVADQKGKSTVASSEAKPAATIRIVQGLGVMPPKAGQTITVATHAKQGASVASGSGTVHTSAVSLPSMNAAVSKTVAVASGAASTPISISTGAPTVRQVPVSTTVVSTSQAGKLPTRITVPLSVISQPMKGKSVVTAPIIKGNLGANLSGLGRNIILTTMPAGTKLIAGNKPVSFLTAQQLQQLQQQGQATQVRIQTVPASHLQQGTASGSSKAVSTVVVTTAPSPKQAPEQQ

SEQ ID NO: 339710 - DNA, 5063 bp, Artificial Sequence
  derived and/or modified sequence
gctgtttagctgtaattagggtgcaaggataaggtgtaagaactggctggaggttgaatgttttcctggaggagtgttagcatcaactagatccctggaatttctgcctttctgtctcaagatgcatgtctttgtccagagtacctgtggagaagaaacaatggattccttagaccatatgctgacagatcctctggaacttggtccgtgtggagatggccatggcacgcgcatcatggaggattgcctcctgggaggcaccagagttagtctgcccgaggaccttctggaggatcctgagatcttctttgatgttgtcagcctctcaacatggcaggaagtgttaagtgattctcaacgtgaacacctccagcagtttctgccccagtttcctgaagacagtgctgagcagcagaatgaactcatcttagccttgttcagtggggagaacttccgctttggaaaccctctgcacattgcccagaagcttttccgagacggacactttaaccccgaggtggtcaagtaccggcagttatgcttcaagtcacagtacaagcgctacctcaactcccagcagcagtatttccatcggctgctgaagcaaattcttgcttcccggagtgatctgctggagatggcccggcggagtggccccgcccttcccttccggcagaaacgcccttcaccatcccgcacacctgaggagcgggagtggcggacccagcagcgctacttgaaggtcttaagggaagtgaaagaggagtgtggtgacacagccctgtcatctgatgaagaggccacgttggatttacaagaacaattttcttttgaagatctcagctcatggcttccgagctctccagcacgttctcctagtcctgcggtgcccctgcgggtggtgcccacactttcaaccacggatatgaaaactgcagataaagtagaactgggggacagtgacctgaagataatgttaaagaagcaccacgagaagcggaaacatcagccagatcacccggaccttttgacaggggacctgactctcaatgacatcatgactcgagtaaatgctggcaggaagggctctctggcagccttatatgacttggctgtccttaaaaaaaaggttaaggaaaaagaggaaaagaagaagaagaaaataaaaacgatcaaatcagaggcagaggacctggccgagccgctaagcagtactgaaggggtcgcacctctctcacaggccccctctccgctggcaattcctgctatcaaggaagagccccttgaagacctcaagccttgccttggaatcaatgaaatatcttccagcttcttctctcttctattagagatcttgctgctggagagtcaggctagccttcctatgctagaggagcgagttttggattggcagtcatcgccagccagctccctcaacagctggttctctgcggcccccaactgggctgagttggtactaccagccctgcagtatcttgctggagaaagtcgagctgttccttccagtttctctccatttgttgaattcaaagagaaaacccagcagtggaagttgcttggccaatcccaagataatgaaaaggaattagctgccctcttccagctatggctagagaccaaagatcaggccttctgtaagcaagaaaatgaagacagctcagatgccacaacacctgtccctcgggtaagaactgactatgtggtgcgtcccagcacgggggaggagaaacgggtttttcaggagcaggagcgttacaggtatagccaaccccataaggcgttcacctttcgcatgcacggctttgagtctgtggtggggccagtgaagggcgtgtttgacaaggagacctcgctcaacaaggctcgggagcactccctgctgcgctccgaccggcctgcctacgtcaccattctgtctcttgttcgggacgctgcggctcgactgcctaatggagaaggcacacgggcagagatctgtgaactgcttaaggactcccagtttcttgcaccagatgtcaccagcactcaggtaaatacagtagtgagtggtgcactggatcggctacattacgaaaaagatccctgtgtgaaatacgacattggacgaaagctgtggatctacctgcatcgtgaccggagtgaagaagagtttgagcggattcaccaagcacaagcagctgcagctaaagccagaaaagctcttcagcaaaaacccaagcccccatccaaggtgaagtccagtagcaaggagagctccataaaggtccttagcagtggcccttctgagcagagccagatgagcctcagtgactccagtatgccacccaccccagtcacacctgtaacccccaccacaccagcattgcccgccattcccatctcccctccacctgtatcggcagtgaacaaaagcggcccttccacagtctcagaaccagctaagtctagctcgggtgttcttctggtgtcttcaccaacaatgccacatctgggaacaatgctttccccagcttccagccagactgcacccagttctcaggctgccgcccgggtcgtgagccactctggctctgctggactgtctcaggtgcgagtggtggcccagcctagccttcctgctgttccccagcagtcgggagggccggcacagacattgccacagatgccagcaggaccgcagatccgggttccagccactgccacacagaccaaagtagtgccccagacagtaatggccactgtgcccgtcaaagcgcagactacggcagccactgtgcagcggcctggacccgggcagacagggctcacggtgacaagtctccctgccacagccagccctgtgagtaagccagccacgagttctcctgggacctctgctcccagtgcctccacggctgccgtcattcaaaatgtcacaggacagaacatcatcaagcaggtggcaatcactgggcagcttggtgtgaagccccaaacaggcaacagcattccactcacagccactaacttccgcatccagggtaaggatgtattgcgtctgccgccctcttccatcaccacagatgccaagggccagacggttctgcgaatcactccggacatgatggccacattggccaagtcccaggttaccacagtcaaattgacccaggacctcttcgggacaggaggcaacactacaggcaaaggcatctctgccaccttacacgtcacttccaatccagtacatgcagctgatagccctgccaaggccagttcagccagtgccccttcatccactccaacaggtaccactgtggtcaaagtgactcctgacctcaagccaacagaagcctcaagttcggcttttcgcttgatgccagctcttggcgtgagtgtggctgaccagaagggaaaaagcacagtggcctcttcagaagcaaaaccagctgccacgatccgcatcgtgcagggactgggagtgatgcctcccaaagcaggccagaccatcaccgttgcaacccacgccaagcaaggggcctcggtggccagtgggtctggaactgtccatacttcagcggtgtccttacccagtatgaatgctgctgtgtccaagactgtagctgtggcttctggggctgcaagcacccccatcagcatcagcacaggagcccccaccgtgcggcaggtccctgtcagcaccacggttgtgtccacgtcccaggctgggaagttgcctacacggatcacagttcccctctctgtgatcagccagccaatgaagggcaagagcgtggtcacagcccccatcatcaaaggcaaccttggagccaacctcagtgggttgggccgcaacatcatcctcacaactatgccagcaggcactaagctcattgctggcaataagcctgttagtttcctcactgctcagcagttgcagcagcttcagcagcaaggtcaggccacacaggtgcgcatccagactgtccctgcatcccatctccaacagggaacagcttctggctcctccaaagcagtctccactgttgttgtgactacagctccgtctcctaaacaggcacctgagcaacaatgattatgagagaggatggcttccgtgaaagaccatgcctggtctgtcctggctgagaagggaccagggaggttgcatcattgttttaagcttgcctgttcaaggcagccaggcgaggggtgatggcaacggtggcctggattcgtggcctggattctgctgccacgtgccatagtggagcaccctgagaaaggttcactccagggttccaaggtctgctctctaccaatctaggagaatattctgttgaaattgcaggaattaccagttacgtccaacaagccagagttctgagagtaagacccccagggaaggcttaccagttgcagagtgcacacagcgaataggctggttctccatgaggattgtattttttggcttctggtcttctccatgactagtggtctggataggagttttgtgtccagaaaattttatgtaatttatttttttaaagaacctgttgtacatctttctcaaatacaaacttgggctttagctgccccctccactaaaccgatgacttacttttttgactagaatgagaaaatggcaagaatcttagtaaggtggtagccagcttggtaactgcatagtaatcgagaggctgtaagatgggaattcatcgtaggcagcgaggtagagtgggtcccctgaaatgggattcgcttggcactgcctcttaaagataggggtgttgggatcttgattgtggccgccccccccagctttacctgcccactttgtccttcttggcaagcctgttcacatggacgtccagagccagtggacagagaggaggggacggacagcagaggtgctgcttttgcagcagaaactttgttgcagttcagagtataccttctgctctgctccagagcaagagttgcaaaccaggcccttggggctggccatttgtttttgtaaataaagttttattggaacacagcccaaaaaaaaaaaaaaaaaa

SEQ ID NO: 339711 - DNA, 3975 bp, Artificial Sequence
  derived and/or modified sequence
atgcacgtcttcgtccagagtacctgcggagaagagaccatggactctcttgaccatatgcttactgatcccctcgaattggggccttgtggagatgggcatgggacccgcatcatggaggactgcctgctcggggggactagggtgagtctaccagaggatctcctggaggatccggaaatcttctttgacgtggtctctctctcgacctggcaggaggttctttcagatagccagcgggaacacctgcagcagtttctgcctcagtttcccgaagacagcgcggagcagcagaacgagctcatcctggcactgttcagcggcgaaaacttcaggttcggcaatccgctccatatcgcacaaaaattgttccgcgacggtcatttcaatcccgaggtagtgaaataccgacagctgtgcttcaagtcccagtataagagatatctgaattctcagcagcaatattttcaccggcttttaaagcaaattttggcaagccgctccgatctgctcgagatggccaggcggtccggtcccgccctgccctttcgccagaaaagaccatcccccagccgcactccggaggaacgggagtggagaactcagcagagataccttaaggtcctccgggaggttaaagaagagtgcggcgacacagctctgtcaagcgacgaggaggccactcttgatctgcaggagcagttcagctttgaggaccttagctcatggctgccgtcttccccagcaagaagtccaagcccagctgtcccactgcgggtggtccccaccttgtcaacaacagatatgaagacagcagacaaagtggaattgggagatagcgacctaaagatcatgttgaagaaacatcatgaaaagagaaaacatcagcctgatcaccccgacttgctaaccggagaccttacactgaatgatattatgacccgggtgaacgccggcaggaaggggtcattagccgcactttatgacctggctgtactgaaaaagaaagtgaaagaaaaggaagagaaaaaaaagaaaaaaataaaaactattaagagcgaagccgaggacctggcagagcccctatcctccacagagggagtggcccctctctcccaggcaccctcccctctagccatccccgctataaaagaggaaccgctggaagatctgaagccctgcctgggcatcaacgaaatttccagttctttttttagcctcttattggaaattctgctgctggagagccaggctagcttgcctatgctggaagaacgagttctggactggcagtcttcccctgcatcaagtcttaacagttggtttagtgctgcacccaactgggcggagctcgttctgcctgccctgcaatacctcgcaggggagagccgtgccgtgcccagcagcttttctccgttcgtggagtttaaggaaaagacccagcagtggaagctcttgggacagtcccaggacaatgaaaaggaactcgcggctctattccagctgtggttggaaacgaaggaccaagctttttgcaagcaggagaatgaagactcttccgatgcgacgacaccagtgccaagggttagaaccgattacgtcgtgcgcccctccaccggtgaggaaaaaagagtgttccaggaacaagaaagataccggtattcccaaccacacaaagccttcacgttcagaatgcatgggtttgaatcagtggtgggaccagtgaagggcgtgttcgataaggaaacctctctcaataaagcccgggagcactccctgctgcgctctgatagacccgcctacgtgaccatcctatctctcgttagagacgcagctgcccgactcccaaacggcgaaggcactagagcggagatatgcgagctgctgaaggatagtcagtttctcgcgccagatgtgacttcgacccaagtcaacacagttgtctctggagccctggaccggctacactatgagaaggatccatgcgtgaagtatgacatcgggcggaaattgtggatctacctgcatagggatcgttccgaggaggagtttgaacgcatccaccaagctcaggcagccgcggctaaggccagaaaagctttacagcagaaacccaaaccaccttccaaagtgaagtcctcctctaaagaatcctctattaaggtactgtcctctggtccaagcgagcagtcacagatgtcactaagtgacagctcgatgccacctactccggtaacacccgtgacccctacaacccccgccctgcctgccattcccattagccctccacccgtgtctgcggtcaacaagtctggtccgagcacagtcagtgaacccgcaaagagctccagtggagttctcctggtgagtagtcctaccatgcctcatctgggtacgatgcttagcccggcctcctcccagactgccccgagttcccaagcagcggccagagtggtgagccactccgggtctgccgggctctctcaagtgcgagttgtcgcacaacccagcctcccggctgtcccacagcagagcggggggccagcccagaccctcccacaaatgcccgcgggcccacaaatcagagtgcctgctactgctacgcagacaaaagtcgtaccacaaacagtcatggctaccgttccagtgaaggcacaaactactgctgctacagtccagcgccctggcccaggccagactggattaacagtgacttcacttccagcaacagcttcaccagtgtcaaaaccggccacatcctctccgggaacttcggcgccttccgcctcaaccgccgcagttattcagaatgtgaccggccagaatatcattaagcaggttgccattaccggccagcttggagttaagccccaaacaggaaatagcatccctttgacggcaacaaactttcgcattcagggtaaagatgtgctgcgactgccaccttcttcgatcaccaccgatgccaaggggcaaacagttctcaggatcacgcccgacatgatggctacgctggcgaagagtcaggtgaccacggtgaagctcacccaggacttgttcggtactggagggaatacgaccgggaaaggaatttccgccaccctgcacgtaacttccaacccagttcacgccgccgactcccctgcgaaagccagttcagctagcgccccgagctcgacaccaaccgggacaacagtcgttaaggtgacgccggatctgaaacctaccgaagcctctagctccgccttccgtcttatgcccgctctgggggtgtccgtcgcagaccagaagggaaaatccactgttgcctcttcggaggctaagcctgccgctacaatcagaattgttcagggcttgggggtaatgcccccaaaagccggccagaccattactgtggccacccacgccaaacagggcgcatcagtagccagcgggtccggcacagttcacacaagtgccgtaagccttcctagcatgaatgcagccgtgtctaagacagtggccgtggcttctggcgcagcttctacacccatctccatcagcaccggcgcaccaactgtccggcaggtaccagtgagtaccactgtggtctctacgtcacaggctgggaagctccccactcgcatcaccgtgcccctatcagtgatcagtcaaccaatgaagggaaaatctgttgtgactgcccccattattaagggtaatctcggggctaatcttagtggcctgggtagaaacatcatcctgacaacaatgcccgctgggactaaactaatcgctggtaacaaaccggtgtctttcctgaccgcccagcaacttcagcagctccagcagcaaggtcaggccacacaggtgagaatacagacagtgccggccagccatctgcagcagggcacagcgtcaggtagttcaaaagcagtgtctaccgtggtagtgacaaccgccccttcccccaagcaggcccctgagcagcagtag

SEQ ID NO: 339712 - DNA, 3975 bp, Artificial Sequence
  derived and/or modified sequence
atgcacgtgtttgtgcagagcacctgtggggaggagaccatggacagcctggaccacatgctgacagaccccctggagctgggcccctgtggagatggccacggcacccgcatcatggaggactgcctgctgggcggcaccagggtgtccctgcctgaggacctgctggaggaccctgagatcttctttgatgtggtgtccctgagcacctggcaggaggtgctgagtgacagccagcgggagcacctgcagcagttcctgccccagtttcctgaggacagcgctgagcagcagaatgaactcatcctggccctcttctctggagagaacttccgctttggaaaccccctgcacatcgcccagaagctgttcagagatggccacttcaaccctgaggtggtgaagtaccggcagctgtgcttcaagagccagtacaagcgctacctgaacagccagcagcagtacttccaccggctgctgaagcagatcctggccagcagaagtgacctgctggagatggccaggagaagtggccctgccctgcccttccggcagaagaggcccagccccagcaggaccccagaggagcgggagtggaggacccagcagcgctacctgaaggtgctgcgggaggtgaaggaggagtgtggggacacagccctgagcagtgatgaggaggccaccctggacctgcaggagcagttctcctttgaggacctgagctcctggctgcccagcagccctgcccggagccccagccctgctgtgcccctgcgggtggtgcccaccctgagcaccacagacatgaagacagctgacaaggtggagctgggggacagcgacctgaagatcatgctgaagaagcaccacgagaagaggaagcaccagcctgaccacccagacctgctgaccggggacctgaccctgaatgacatcatgaccagggtgaatgccggcaggaagggcagcctggccgccctgtatgacctggccgtgctgaagaagaaggtgaaggagaaggaggagaagaagaagaagaagatcaagaccatcaagtctgaggccgaggacctggccgagcccctgagcagcacagaaggagtggcccccctgagccaggcccccagccccctggccatcccagccatcaaggaggagcccctggaggacctgaagccctgcctgggcatcaatgagatcagcagcagcttcttcagcctgctgctggagatcctgctgctggagagccaggccagcctgcccatgctggaggagcgggtgctggactggcagagcagccctgccagcagcctgaacagctggttctctgctgcccccaactgggccgagctggtgctgcctgccctgcagtacctggccggggagagcagagctgtgcccagcagcttcagcccctttgtggagttcaaggagaagacccagcagtggaagctgctgggccagagccaggacaatgagaaggagctggccgccctcttccagctgtggctggagaccaaggaccaggccttctgcaagcaggagaatgaagacagcagtgatgccaccacccctgtgccccgggtgaggacagattatgtggtgcggcccagcactggagaggagaagagggtcttccaggagcaggagcgctaccgctacagccagccccacaaggccttcaccttcaggatgcacggctttgagagcgtggtgggccctgtgaagggcgtgtttgacaaggagaccagcctgaacaaggcccgggagcacagcctgctgcggagtgacaggcctgcctacgtgaccatcctgagcctggtgagagatgctgctgcccggctgcccaatggagagggcaccagggctgagatctgtgagctgctgaaggacagccagttcctggccccagatgtgaccagcacccaggtgaacacagtggtgtctggggccctggaccggctgcactatgagaaggacccctgtgtgaagtatgacattggaaggaagctgtggatctacctgcaccgggacagaagtgaggaggagtttgagcgcatccaccaggcccaggccgccgccgccaaggccaggaaggccctgcagcagaagcccaagccacccagcaaggtgaagagcagcagcaaggagagcagcatcaaggtgctgagcagcggccccagcgagcagagccagatgagcctgagtgacagctccatgccacccacccctgtgacccctgtgacccccaccaccccagccctgcctgccatccccatcagccccccacctgtgtctgctgtgaacaagagcggccccagcacagtgtctgagcccgccaagagcagcagcggcgtgctgctggtgagcagccccaccatgccccacctgggcaccatgctgagccctgccagcagccagacagcccccagcagccaggccgccgcccgggtggtgagccacagcggcagcgctggcctgagccaggtgcgggtggtggcccagcccagcctgcctgctgtgccccagcagagcggcggccctgcccagaccctgccccagatgcctgctggcccccagatccgggtgcctgccacagccacccagaccaaggtggtgccccagacagtgatggccaccgtgcctgtgaaggcccagaccacagctgccaccgtgcagaggcctggccctggccagacaggcctgactgtgaccagcctgcctgccacagccagccctgtgtccaagccagccaccagcagccctggcaccagcgcccccagcgccagcacagctgctgtgatccagaatgtgacaggccagaacatcatcaagcaggtggccatcaccggccagctgggcgtgaagccccagacaggcaacagcatccccctgacagccaccaacttccgcatccagggcaaggatgtgctgcggctgccccccagcagcatcaccacagatgccaagggccagacagtgctgcgcatcaccccagacatgatggccaccctggccaagagccaggtgaccaccgtgaagctgacccaggacctgtttggcaccggcggcaacaccaccgggaagggcatcagcgccaccctgcacgtgaccagcaaccctgtgcacgccgctgacagccctgccaaggccagcagcgccagcgcccccagcagcacccccaccggcaccaccgtggtgaaggtgaccccagacctgaagcccacagaggccagcagcagcgccttccggctgatgcctgccctgggcgtgtctgtggccgaccagaagggcaagagcacagtggccagcagcgaggccaagccagctgccaccatcagaattgtgcagggcctgggcgtgatgccacccaaggccggccagaccatcaccgtggccacccacgccaagcagggcgcctctgtggccagcggcagcggcaccgtgcacaccagcgctgtgtccctgcccagcatgaatgctgctgtgtccaagacagtggccgtggccagcggggccgccagcacccccatcagcatcagcactggagcccccaccgtgcggcaggtgcctgtgtccaccaccgtggtgtccaccagccaggccggcaagctgcccacccgcatcaccgtgcccctgagcgtcatcagccagcccatgaagggcaagtctgtggtgacagcccccatcatcaagggcaacctgggcgccaacctgagcggcctgggcaggaacatcatcctgaccaccatgcctgctggcaccaagctgattgctggcaacaagcctgtgtccttcctgacagcccagcagctgcagcagctgcagcagcagggccaggccacccaggtgcgcatccagacagtgcctgccagccacctgcagcagggcacagccagcggcagcagcaaggctgtgtccacagtggtggtgaccacagcccccagccccaagcaggcccctgagcagcagtag

SEQ ID NO: 339713 - DNA, 3975 bp, Artificial Sequence
  derived and/or modified sequence
atgcacgtgttcgtgcagagcacctgcggcgaggagaccatggactcactagatcacatgctcactgacccgctcgagctaggcccatgcggcgacgggcacgggactagaataatggaagattgcctcctgggtggaacaagagtgagcctgcctgaggatttactggaagatccagagatcttctttgacgtcgtcagtctatccacttggcaagaggttctgtcagatagtcagagagaacatctgcaacagttcctaccacagttccccgaagactccgctgagcagcagaatgagctgatccttgcgttattctcaggggagaatttcaggttcggcaacccactccatatcgctcagaaactgtttagagacggtcatttcaatcctgaggttgtcaagtaccggcagctgtgctttaaatcccaatacaagaggtacctcaactctcaacagcaatacttccatcgcctgctcaagcaaatcctggcttcacgttctgaccttctggagatggccagacgtagcggacccgccctgccgttccggcagaagaggccatcaccctctcggacacccgaagagagggaatggaggacacaacaacggtacttgaaggtgctccgggaagtgaaagaggaatgcggtgatacagcgctgagcagcgacgaggaagccaccctcgatctccaggagcaattttcattcgaggacctgtcgagctggctaccaagctccccagcacggagtccctcgccggccgtcccattgagggtcgtcccaacactctctacaacggatatgaaaactgccgataaggtggaactgggggacagcgaccttaaaatcatgttgaagaagcaccacgagaaacgcaagcatcagcccgaccacccagacctcctgacgggagacctaactctcaatgatatcatgacaagggtgaatgcggggaggaaggggtcgttagcagcactttatgacttggccgtcctaaagaagaaggtcaaagaaaaagaggagaagaaaaaaaaaaaaataaaaaccataaaaagtgaggccgaggaccttgctgagccattaagttcaacagaaggagtcgcccctctttctcaggccccctctcctctggcgattcctgctattaaagaggagcctctggaggatctcaagccttgcctgggcatcaacgagatatcatcgtcttttttcagcctgcttttggagatactcctcttggaatcccaggcgagcctgcccatgctggaggagcgggttctggattggcagtcttccccagcgagcagcctaaacagttggttctccgccgctccaaactgggccgagctagtgttgcctgctctgcagtacctcgccggagagtcgagagccgtcccgtcatctttttccccctttgtggaattcaaggagaaaacccagcaatggaagttgcttggtcagtcccaggacaatgaaaaggagctcgctgcccttttccaactgtggctggagacaaaggaccaggccttttgcaaacaagagaacgaggatagcagcgacgctacgactccggtgcccagagtgcggacagactacgtggtgcgcccttccaccggcgaagaaaagcgagtattccaggaacaggagagatacaggtactcccagccccataaggccttcacctttcgtatgcatggctttgaatcagtggtaggaccagtgaagggcgtttttgacaaagagacatccctgaacaaagccagggagcattcccttctgcgctctgacagaccagcttacgtcaccatcctgtccctggtgcgcgatgcagccgcgcggcttccgaacggggaaggcacacgggccgaaatttgcgaactgctgaaagacagccagtttttagcccctgatgtaaccagtacccaagtaaataccgtggttagcggggctctcgatcgactccactacgagaaagacccgtgcgtaaagtatgatatcggaaggaagctatggatttatttgcaccgggacagatcggaagaggagtttgaacggatccatcaggcacaggccgccgctgctaaggcccggaaggctctgcagcagaaaccgaaacctccgagcaaagtcaaaagtagctcaaaggaatcaagcatcaaagtgctctccagcggcccatccgagcagagccagatgtcattatccgacagcagtatgccccctacgccggtgaccccagtaactcctactacacctgcgctaccagccatccctatcagccctcctccagtgtctgctgtgaacaaatccggccccagtactgtctccgaacctgccaaatccagttccggcgtgctcctggtgagttcccctacaatgccccacctggggaccatgctgagtcccgctagttcccagaccgcaccgtccagccaggccgctgccagagttgtgtcccatagcgggagcgctggactgtcacaggttcgagtggttgcacagccaagtctgccagccgtccctcagcagagtggcggaccagctcaaaccctgccccagatgcccgctggtccgcagatcagagtgccagcgaccgccacgcaaaccaaggtggtcccccaaactgtgatggcaaccgtgccagttaaggcgcagacaactgctgccacagtgcagaggcccgggccaggacagaccggccttactgtaacatccctgcccgcgactgcctcaccagtttctaagcctgcaacaagtagcccaggaacaagtgccccttccgcatctacggctgccgtcatccagaacgtcactggacagaatatcatcaaacaggttgctattactgggcagcttggtgtgaagccccagactggcaactcaatcccactcaccgcgaccaacttccgcatacagggcaaagacgtcctgaggctgcccccaagcagcatcacaacagacgctaaagggcagactgttttacggatcacccccgacatgatggctacattggcgaagtcccaggtcaccacagtaaagttaacacaagatctgttcggaacaggcggtaacaccaccggaaagggcatctcagccaccttgcacgtgacgtctaatcccgttcacgccgccgatagccctgcaaaggcctcaagcgcctctgccccatcttccactcccacaggcaccaccgtagtaaaggttactccagaccttaagccaacggaggcctccagttctgctttccgcctgatgcctgcccttggagtcagtgtagccgaccagaagggcaagagtacagttgctagctcggaggctaagcccgccgctaccatcagaattgtccagggattgggggtcatgcctccaaaggctggccagactattacagttgccacccatgctaaacagggagcttccgtcgcatctgggtctggcaccgtacatacgagtgccgtgtctctgcctagtatgaacgccgcagtctctaagacagtcgcagtggccagtggcgctgcctccacccctatttccatctctaccggagcccctacagtgcggcaggttcctgtgagcacaaccgtcgtaagcaccagccaagccggaaaattgcccacaaggatcaccgtgcctctcagtgtaatctcacaacccatgaagggaaaatccgttgttactgcgcccatcataaagggtaacctgggcgccaacctgagcgggttggggagaaacataattcttaccaccatgcctgccggtaccaagctcatcgcaggcaataagcccgtcagctttctgaccgcccaacaacttcagcagctccagcagcagggtcaggcaacccaggtgaggattcagaccgtccccgccagccacctgcagcaaggcacagcaagtggctcttcaaaggcagtgagcaccgtggtcgtcaccactgcaccttctcctaaacaggctccggagcagcagtag

SEQ ID NO: 339714 - DNA, 4351 bp, Artificial Sequence
  derived and/or modified sequence
gctgtttagctgtaattagggtgcaaggataaggtgtaagaactggctggaggttgaatgttttcctggaggagtgttagcatcaactagatccctggaatttctgcctttctgtctcaagatgcatgtctttgtccagagtacctgtggagaagaaacaatggattccttagaccatatgctgacagatcctctggaacttggtccgtgtggagatggccatggcacgcgcatcatggaggattgcctcctgggaggcaccagagttagtctgcccgaggaccttctggaggatcctgagatcttctttgatgttgtcagcctctcaacatggcaggaagtgttaagtgattctcaacgtgaacacctccagcagtttctgccccagtttcctgaagacagtgctgagcagcagaatgaactcatcttagccttgttcagtggggagaacttccgctttggaaaccctctgcacattgcccagaagcttttccgagacggacactttaaccccgaggtggtcaagtaccggcagttatgcttcaagtcacagtacaagcgctacctcaactcccagcagcagtatttccatcggctgctgaagcaaattcttgcttcccggagtgatctgctggagatggcccggcggagtggccccgcccttcccttccggcagaaacgcccttcaccatcccgcacacctgaggagcgggagtggcggacccagcagcgctacttgaaggtcttaagggaagtgaaagaggagtgtggtgacacagccctgtcatctgatgaagaggccacgttggatttacaagaacaattttcttttgaagatctcagctcatggcttccgagctctccagcacgttctcctagtcctgcggtgcccctgcgggtggtgcccacactttcaaccacggatatgaaaactgcagataaagtagaactgggggacagtgacctgaagataatgttaaagaagcaccacgagaagcggaaacatcagccagatcacccggaccttttgacaggggacctgactctcaatgacatcatgactcgagtaaatgctggcaggaagggctctctggcagccttatatgacttggctgtccttaaaaaaaaggttaaggaaaaagaggaaaagaagaagaagaaaataaaaacgatcaaatcagaggcagaggacctggccgagccgctaagcagtactgaaggggtcgcacctctctcacaggccccctctccgctggcaattcctgctatcaaggaagagccccttgaagacctcaagccttgccttggaatcaatgaaatatcttccagcttcttctctcttctattagagatcttgctgctggagagtcaggctagccttcctatgctagaggagcgagttttggattggcagtcatcgccagccagctccctcaacagctggttctctgcggcccccaactgggctgagttggtactaccagccctgcagtatcttgctggagaaagtcgagctgttccttccagtttctctccatttgttgaattcaaagagaaaacccagcagtggaagttgcttggccaatcccaagataatgaaaaggaattagctgccctcttccagctatggctagagaccaaagatcaggccttctgtaagcaagaaaatgaagacagctcagatgccacaacacctgtccctcgggtaagaactgactatgtggtgcgtcccagcacgggggaggagaaacgggtttttcaggagcaggagcgttacaggtatagccaaccccataaggcgttcacctttcgcatgcacggctttgagtctgtggtggggccagtgaagggcgtgtttgacaaggagacctcgctcaacaaggctcgggagcactccctgctgcgctccgaccggcctgcctacgtcaccattctgtctcttgttcgggacgctgcggctcgactgcctaatggagaaggcacacgggcagagatctgtgaactgcttaaggactcccagtttcttgcaccagatgtcaccagcactcaggtaaatacagtagtgagtggtgcactggatcggctacattacgaaaaagatccctgtgtgaaatacgacattggacgaaagctgtggatctacctgcatcgtgaccggagtgaagaagagtttgagcggattcaccaagcacaagcagctgcagctaaagccagaaaagctcttcagcaaaaacccaagcccccatccaaggtgaagtccagtagcaaggagagctccataaaggtccttagcagtggcccttctgagcagagccagatgagcctcagtgactccagtatgccacccaccccagtcacacctgtaacccccaccacaccagcattgcccgccattcccatctcccctccacctgtatcggcagtgaacaaaagcggcccttccacagtctcagaaccagctaagtctagctcgggtgttcttctggtgtcttcaccaacaatgccacatctgggaacaatgctttccccagcttccagccagactgcacccagttctcaggctgccgcccgggtcgtgagccactctggctctgctggactgtctcaggtgcgagtggtggcccagcctagccttcctgctgttccccagcagtcgggagggccggcacagacattgccacagatgccagcaggaccgcagatccgggttccagccactgccacacagaccaaagtagtgccccagacagtaatggccactgtgcccgtcaaagcgcagactacggcagccactgtgcagcggcctggacccgggcagacagggctcacggtgacaagtctccctgccacagccagccctgtgagtaagccagccacgagttctcctgggacctctgctcccagtgcctccacggctgccgtcattcaaaatgtcacaggacagaacatcatcaagcaggtggcaatcactgggcagcttggtgtgaagccccaaacaggcaacagcattccactcacagccactaacttccgcatccagggtaaggatgtattgcgtctgccgccctcttccatcaccacagatgccaagggccagacggttctgcgaatcactccggacatgatggccacattggccaagtcccaggttaccacagtcaaattgacccaggacctcttcgggacaggaggcaacactacaggcaaaggcatctctgccaccttacacgtcacttccaatccagtacatgcagctgatagccctgccaaggccagttcagccagtgccccttcatccactccaacaggtaccactgtggtcaaagtgactcctgacctcaagccaacagaagcctcaagttcggcttttcgcttgatgccagctcttggcgtgagtgtggctgaccagaagggaaaaagcacagtggcctcttcagaagcaaaaccagctgccacgatccgcatcgtgcagggactgggagtgatgcctcccaaagcaggccagaccatcaccgttgcaacccacgccaagcaaggggcctcggtggccagtgggtctggaactgtccatacttcagcggtgtccttacccagtatgaatgctgctgtgtccaagactgtagctgtggcttctggggctgcaagcacccccatcagcatcagcacaggagcccccaccgtgcggcaggtccctgtcagcaccacggttgtgtccacgtcccaggctgggaagttgcctacacggatcacagttcccctctctgtgatcagccagccaatgaagggcaagagcgtggtcacagcccccatcatcaaaggcaaccttggagccaacctcagtgggttgggccgcaacatcatcctcacaactatgccagcaggcactaagctcattgctggcaataagcctgttagtttcctcactgctcagcagttgcagcagcttcagcagcaaggtcaggccacacaggtgcgcatccagactgtccctgcatcccatctccaacagggaacagcttctggctcctccaaagcagtctccactgttgttgtgactacagctccgtctcctaaacaggcacctgagcaacaatgattatgagagaggatggcttccgtgaaagaccatgcctggtctgtcctggctgagaagggaccagggaggttgcatcattgttttaagcttgcctgttcaaggcagccaggcgaggggtgatggcaacggtggcctggattcgtggcctggattctgctgccacgtgccatagtggagcaccctgagaaaggttcactccagggttccaaggtctgctctctaccaatctaggagaatattctgttgaaattgcag

SEQ ID NO: 339715 - DNA, 3975 bp, Artificial Sequence
  derived and/or modified sequence
atgcacgtgtttgtccagagtacctgcggagaggagactatggacagtctggaccacatgttgaccgacccgttagaactgggaccttgtggcgatgggcacggcacgcgcatcatggaggactgccttcttggagggacccgggtctccctgcctgaagatctgcttgaggatccggaaattttctttgacgtcgtgtccctatctacttggcaagaggtcctgtccgattcacagcgggaacacctccagcagttcctgccgcagttcccggaggacagtgcagaacagcaaaacgagttgatactggccctcttctctggcgaaaattttcggtttggcaacccccttcatatcgcccagaaattgtttcgggatggccatttcaaccccgaggttgtgaaatatcggcagctttgctttaagtctcagtataagcggtacttgaactcacagcaacagtacttccatcgcctcctgaagcaaatcttagccagtagatccgatctgctcgaaatggccagaaggtccggacccgctctcccttttcgtcagaaaagaccgtctccatctcgaacccctgaagagagagagtggagaacccaacagcgatatttgaaggtgctacgagaagtgaaggaggagtgtggcgacacggccctgagtagtgacgaagaagcaacgctagatttgcaggagcaatttagtttcgaagacttgagttcttggctgcccagttcccctgctaggagcccgtcacctgccgttcctttgagagttgtccccacactgagcaccacagatatgaaaacagctgacaaggtcgagttgggggacagcgacctaaaaattatgttaaagaaacaccacgagaaaagaaaacaccaacccgaccaccccgacttgcttaccggagatctaactctcaacgatatcatgaccagggtcaacgctgggcgaaaagggagtctcgcggctctgtatgacctggcagtgcttaagaagaaagtgaaagaaaaggaggaaaaaaaaaaaaagaaaatcaagacaatcaaatcagaagccgaggatctcgccgagcccctcagctcgactgagggggtggcccctctgtcccaggccccttctccactggcaatccccgcaataaaggaggagcccttggaggacctcaaaccgtgtctcggcataaacgaaataagttccagttttttctcccttttgttagagattctgctcctagagtcccaggccagtctgccaatgcttgaggaacgggtgttggactggcagtcatcgccagcatcctcgctcaactcctggttttctgctgctcccaactgggccgagcttgtgttacccgctcttcagtatttggcgggagagtccagagcggtgccgtcatcctttagcccatttgtcgaatttaaagaaaagacccagcaatggaaactcctaggccagagtcaggataatgagaaggaactagcagcgctgtttcagctgtggttggaaacaaaagaccaggcattttgcaaacaggagaatgaagattcaagcgacgccactaccccggtcccacgggttaggaccgattatgtggtcagaccatccaccggggaggagaagagagtgttccaggaacaggagcgctaccgctattcacaaccgcacaaggctttcacatttcggatgcatgggttcgaatctgtggttgggccagtcaagggagtgtttgataaagaaacgtcattaaacaaagctagagagcattctctattgagatctgacagacccgcttatgttaccatactgtctctggtcagagacgctgctgctagactgcctaacggagaaggcacacgggctgagatttgcgagctgctgaaggattcccagtttttggctcctgacgtgaccagcacacaagtgaacacagtggttagcggagcgctggacagactgcactacgaaaaagatccttgtgtgaagtacgatattggtagaaagctttggatctacctccatcgggatcggagtgaggaagagttcgagagaattcaccaggcccaggcggctgctgctaaagccagaaaggccctgcagcagaagcctaagcctccttcaaaagtaaaaagcagttcaaaagagtcttccatcaaagtcctgtcaagcggccctagtgagcagagccagatgagtctgtccgattctagtatgcctccaactcccgtcactccggtcactcctacgactccagccctcccagcaatacctatctcccctccgccagtgtcggcagttaacaaatcgggtcccagcaccgtatctgagccagcgaaaagctcatcgggggtccttctggtatcttccccaacaatgccccacttaggcacgatgctttcacccgctagctctcagactgcgccatcaagccaggctgccgcaagagtggtgtcccactctggctctgccggactaagccaggtaagagtagttgcacagccctcccttcccgctgtgccgcagcagagtgggggaccagcccagacccttcctcagatgcccgctggaccgcagatcagagtgccagccaccgctacacagacaaaagttgtgcctcaaaccgtcatggccactgtccccgtcaaggcccagaccaccgcagccaccgtccagcggccagggcctggccagacaggtttgaccgtgacgtccctgcccgcaactgcttcccccgtgtctaaaccagctaccagctctcccggaacttccgccccttccgcctctactgccgctgttatccagaatgtgaccggacagaacatcattaagcaggttgccattactgggcagctcggcgtgaagcctcagacgggtaattcaattcccctgaccgcaacaaattttcgaattcaaggcaaggacgtgctgaggctgccaccctccagtatcaccactgacgctaagggtcagaccgtcttgcggattacgccagatatgatggcaacacttgctaagtctcaggtaacaactgtgaagctgacccaggacttgttcggcactggaggaaacacgacaggcaaggggatcagtgctactcttcatgtaacttcaaatcctgttcacgccgctgacagcccagccaaagcctccagcgcatccgccccatcttcgactccaaccggcaccaccgtcgtaaaggttacaccagatcttaagccaacggaggctagttcgagcgcgttccgactgatgccggcactcggggtcagtgttgctgaccagaagggaaaaagtacagttgccagctccgaagccaaacccgctgccaccatcaggatcgtgcaagggctgggggttatgcctcctaaggccggtcagaccattactgtggccacccacgcgaagcaaggcgcttctgtggcatcagggtctgggaccgtccatacatctgcagtgtcccttccctccatgaatgctgcagtgtcaaagaccgttgcagtggcttccggcgctgctagcacccctatctcaatcagcaccggagcacccactgtacgccaagtgccagtgtcaactaccgtcgtcagtacctctcaagccggtaagctgccaaccagaataactgtgcccctgtcggtgattagtcagcccatgaagggtaagagtgtggtcactgcacctatcataaaagggaatctgggtgctaatctttcgggcttaggccgtaacatcattttgaccaccatgcctgcaggcaccaaactcatcgctggcaataaaccagtgagtttcctcacagctcagcagctgcagcagctgcaacagcagggacaggctactcaagtgaggattcagaccgtcccagcaagtcacctgcagcaggggactgctagcggctcgtctaaggcagtgtcaaccgtcgtggtgacaacagccccttcccctaaacaggcgccagaacagcagtag

SEQ ID NO: 339716 - DNA, 3975 bp, Artificial Sequence
  derived and/or modified sequence
atgcacgtgttcgtgcagagcacctgcggcgaggagaccatggacagcctggaccacatgctgaccgaccccctggagctgggcccctgcggcgacggccacggcaccagaatcatggaggactgcctgctgggcggcaccagagtgagcctgcccgaggacctgctggaggaccccgagatcttcttcgacgtggtgagcctgagcacctggcaggaggtgctgagcgacagccagagagagcacctgcagcagttcctgccccagttccccgaggacagcgccgagcagcagaacgagctgatcctggccctgttcagcggcgagaacttcagattcggcaaccccctgcacatcgcccagaagctgttcagagacggccacttcaaccccgaggtggtgaagtacagacagctgtgcttcaagagccagtacaagagatacctgaacagccagcagcagtacttccacagactgctgaagcagatcctggccagcagaagcgacctgctggagatggccagaagaagcggccccgccctgcccttcagacagaagagacccagccccagcagaacccccgaggagagagagtggagaacccagcagagatacctgaaggtgctgagagaggtgaaggaggagtgcggcgacaccgccctgagcagcgacgaggaggccaccctggacctgcaggagcagttcagcttcgaggacctgagcagctggctgcccagcagccccgccagaagccccagccccgccgtgcccctgagagtggtgcccaccctgagcaccaccgacatgaagaccgccgacaaggtggagctgggcgacagcgacctgaagatcatgctgaagaagcaccacgagaagagaaagcaccagcccgaccaccccgacctgctgaccggcgacctgaccctgaacgacatcatgaccagagtgaacgccggcagaaagggcagcctggccgccctgtacgacctggccgtgctgaagaagaaggtgaaggagaaggaggagaagaagaagaagaagatcaagaccatcaagagcgaggccgaggacctggccgagcccctgagcagcaccgagggcgtggcccccctgagccaggcccccagccccctggccatccccgccatcaaggaggagcccctggaggacctgaagccctgcctgggcatcaacgagatcagcagcagcttcttcagcctgctgctggagatcctgctgctggagagccaggccagcctgcccatgctggaggagagagtgctggactggcagagcagccccgccagcagcctgaacagctggttcagcgccgcccccaactgggccgagctggtgctgcccgccctgcagtacctggccggcgagagcagagccgtgcccagcagcttcagccccttcgtggagttcaaggagaagacccagcagtggaagctgctgggccagagccaggacaacgagaaggagctggccgccctgttccagctgtggctggagaccaaggaccaggccttctgcaagcaggagaacgaggacagcagcgacgccaccacccccgtgcccagagtgagaaccgactacgtggtgagacccagcaccggcgaggagaagagagtgttccaggagcaggagagatacagatacagccagccccacaaggccttcaccttcagaatgcacggcttcgagagcgtggtgggccccgtgaagggcgtgttcgacaaggagaccagcctgaacaaggccagagagcacagcctgctgagaagcgacagacccgcctacgtgaccatcctgagcctggtgagagacgccgccgccagactgcccaacggcgagggcaccagagccgagatctgcgagctgctgaaggacagccagttcctggcccccgacgtgaccagcacccaggtgaacaccgtggtgagcggcgccctggacagactgcactacgagaaggacccctgcgtgaagtacgacatcggcagaaagctgtggatctacctgcacagagacagaagcgaggaggagttcgagagaatccaccaggcccaggccgccgccgccaaggccagaaaggccctgcagcagaagcccaagccccccagcaaggtgaagagcagcagcaaggagagcagcatcaaggtgctgagcagcggccccagcgagcagagccagatgagcctgagcgacagcagcatgccccccacccccgtgacccccgtgacccccaccacccccgccctgcccgccatccccatcagccccccccccgtgagcgccgtgaacaagagcggccccagcaccgtgagcgagcccgccaagagcagcagcggcgtgctgctggtgagcagccccaccatgccccacctgggcaccatgctgagccccgccagcagccagaccgcccccagcagccaggccgccgccagagtggtgagccacagcggcagcgccggcctgagccaggtgagagtggtggcccagcccagcctgcccgccgtgccccagcagagcggcggccccgcccagaccctgccccagatgcccgccggcccccagatcagagtgcccgccaccgccacccagaccaaggtggtgccccagaccgtgatggccaccgtgcccgtgaaggcccagaccaccgccgccaccgtgcagagacccggccccggccagaccggcctgaccgtgaccagcctgcccgccaccgccagccccgtgagcaagcccgccaccagcagccccggcaccagcgcccccagcgccagcaccgccgccgtgatccagaacgtgaccggccagaacatcatcaagcaggtggccatcaccggccagctgggcgtgaagccccagaccggcaacagcatccccctgaccgccaccaacttcagaatccagggcaaggacgtgctgagactgccccccagcagcatcaccaccgacgccaagggccagaccgtgctgagaatcacccccgacatgatggccaccctggccaagagccaggtgaccaccgtgaagctgacccaggacctgttcggcaccggcggcaacaccaccggcaagggcatcagcgccaccctgcacgtgaccagcaaccccgtgcacgccgccgacagccccgccaaggccagcagcgccagcgcccccagcagcacccccaccggcaccaccgtggtgaaggtgacccccgacctgaagcccaccgaggccagcagcagcgccttcagactgatgcccgccctgggcgtgagcgtggccgaccagaagggcaagagcaccgtggccagcagcgaggccaagcccgccgccaccatcagaatcgtgcagggcctgggcgtgatgccccccaaggccggccagaccatcaccgtggccacccacgccaagcagggcgccagcgtggccagcggcagcggcaccgtgcacaccagcgccgtgagcctgcccagcatgaacgccgccgtgagcaagaccgtggccgtggccagcggcgccgccagcacccccatcagcatcagcaccggcgcccccaccgtgagacaggtgcccgtgagcaccaccgtggtgagcaccagccaggccggcaagctgcccaccagaatcaccgtgcccctgagcgtgatcagccagcccatgaagggcaagagcgtggtgaccgcccccatcatcaagggcaacctgggcgccaacctgagcggcctgggcagaaacatcatcctgaccaccatgcccgccggcaccaagctgatcgccggcaacaagcccgtgagcttcctgaccgcccagcagctgcagcagctgcagcagcagggccaggccacccaggtgagaatccagaccgtgcccgccagccacctgcagcagggcaccgccagcggcagcagcaaggccgtgagcaccgtggtggtgaccaccgcccccagccccaagcaggcccccgagcagcagtag

SEQ ID NO: 339717 - protein, 554 aa, Artificial Sequence
  derived and/or modified sequence
MNVLLFWKTFLLYNQGPEYHYLHQMLGLGLCLSRASASVLNLNCSLILLPMCRTLLAYLRGSQKVPSRRTRRLLDKSRTFHITCGVTICIFSGVHVAAHLVNALNFSVNYSEDFVELNAARYRDEDPRKLLFTTVPGLTGVCMVVVLFLMITASTYAIRVSNYDIFWYTHNLFFVFYMLLTLHVSGGLLKYQTNLDTHPPGCISLNRTSSQNISLPEYFSEHFHEPFPEGFSKPAEFTQHKFVKICMEEPRFQANFPQTWLWISGPLCLYCAERLYRYIRSNKPVTIISVMSHPSDVMEIRMVKENFKARPGQYITLHCPSVSALENHPFTLTMCPTETKATFGVHLKIVGDWTERFRDLLLPPSSQDSEILPFIQSRNYPKLYIDGPFGSPFEESLNYEVSLCVAGGIGVTPFASILNTLLDDWKPYKLRRLYFIWVCRDIQSFRWFADLLCMLHNKFWQENRPDYVNIQLYLSQTDGIQKIIGEKYHALNSRLFIGRPRWKLLFDEIAKYNRGKTVGVFCCGPNSLSKTLHKLSNQNNSYGTRFEYNKESFS

SEQ ID NO: 339718 - DNA, 1665 bp, Artificial Sequence
  derived and/or modified sequence
atgaatgtgctcctgttttggaaaacctttttgctttacaatcagggacctgagtaccattacttgcaccagatgctgggcttgggcctttgcctctctagggctagcgcgagcgtcctaaatctcaactgctcactcatactgctaccaatgtgcagaactttgcttgcctacctcaggggaagtcagaaagtaccaagcaggcgcacaaggcgtctcttggacaaatctcgcacgttccacatcacctgcggcgtaactatttgtatcttttcaggcgtgcatgttgcagcccacctggtgaacgccctgaacttcagcgtgaattatagtgaagatttcgttgagcttaacgcagccagatatcgagatgaggaccctcgcaaacttttgttcaccacagttcccggcctgactggggtatgtatggtggttgtattatttctcatgatcaccgcctccacttatgccattcgtgtgtcgaattacgacatcttctggtacacacacaatctcttctttgtcttttacatgctacttacactgcatgtgtctggtggcctgctaaaataccagaccaatttggacactcacccccccggatgcatcagtctgaatcgaacatcctcccagaatatctcccttccggagtattttagtgagcatttccacgagccgtttcccgagggctttagcaagcccgcagaatttacccagcacaaatttgttaagatatgtatggaggaaccaaggtttcaggccaactttccacagacttggttatggatcagtggccccctgtgcctctattgcgccgagagattgtaccgctatatccgctcaaataagcctgttactattatctccgtaatgtcacatccatcagatgtgatggagattcgaatggtgaaggaaaatttcaaagcgcggcccgggcagtacatcacgcttcactgccccagcgtatctgcactggaaaaccacccctttacattgacaatgtgcccaactgagactaaggcaaccttcggcgtccatctcaaaattgtcggtgattggacagaacggtttcgggaccttctcctgccaccctcgtctcaggacagcgagatattgccttttattcagtctcgtaattacccgaaactttacatcgacgggccgttcgggagcccattcgaggagtcactgaattatgaggtgtcactgtgcgtcgccggaggtattggagttacgccctttgccagcattctgaacacactcctcgacgattggaaaccttacaagctgaggaggctgtacttcatctgggtgtgcagagacattcagagtttcaggtggttcgctgacctcttgtgcatgctccacaacaagttttggcaggaaaataggccggactatgtgaatatccagctatatctgtcccagaccgatggcatccagaagattattggcgaaaagtatcatgcccttaactctcgcctattcatcggacggcctcgctggaagcttctcttcgatgagatcgcaaaatataacaggggcaaaactgttggggtcttttgctgcgggccaaactctctaagcaaaaccttgcataagctctccaatcagaacaatagttacgggacccgttttgagtataataaagagagtttcagctag

SEQ ID NO: 339719 - DNA, 1665 bp, Artificial Sequence
  derived and/or modified sequence
atgaatgtcctcctcttttggaaaacattcttactctataatcagggccccgagtatcactacctacaccagatgctcggtctgggtctatgcctttcccgggcatctgcatcagtcctgaatttgaactgcagcctcatccttttacccatgtgtaggacactgctggcttatttgcgaggcagccagaaggtccctagccgacgcacccggcgtctgctggataaaagtcggaccttccacatcacttgcggagttacaatctgcatcttcagcggagtgcacgtcgcagcgcacttggtaaacgcattgaacttcagtgtcaattacagtgaagacttcgtagaactgaacgctgcccgataccgcgacgaggatcctcggaagttgttgttcacaactgttccaggccttaccggtgtgtgtatggttgtggttctgtttctaatgatcaccgccagcacctacgcaataagggtgtcgaactatgatatcttttggtacactcataacctctttttcgtgttctatatgctgttgacgctgcacgtgtctggcggattgttgaaatatcaaacaaacctggacactcacccccccggatgcataagcctgaaccgaacttcttctcagaatatatcactgcctgaatacttctctgaacattttcacgagcccttccctgaaggattttccaagccagcagagtttacccaacacaaattcgttaagatctgtatggaggaaccgagatttcaggctaatttcccccaaacttggctgtggataagcggccctttgtgtctctattgtgccgagaggctctatcgttatatccgcagcaacaagccagtgacaattatttccgttatgtcccacccttctgatgttatggaaatccgaatggtgaaagagaatttcaaggcccggccaggccagtatatcacgctgcattgcccttcagtcagcgcgctggaaaatcatcctttcaccttgaccatgtgcccaacggaaacaaaagcgacattcggcgtgcatctgaagattgtcggcgattggaccgagcggtttcgggacttactgctgcccccaagctcccaggattctgagatactacctttcatccagagccgaaattatcccaagttgtatatcgatggacccttcggcagtccattcgaggagagccttaattacgaagtgagcttgtgcgtagcaggagggattggtgtgactccatttgcaagtatcctgaataccctgcttgatgactggaaaccctacaaacttcgccggttatactttatatgggtgtgtcgtgatattcaaagcttcagatggtttgccgacctgctctgtatgctccataacaagttttggcaggagaatagacccgattacgttaacatccaactctacctcagccagacggacgggatacagaagatcataggggaaaagtatcacgccttgaatagccgcttgttcatcggaagacctaggtggaaactgctgtttgacgagatcgctaagtataaccggggaaagaccgtgggcgtgttctgctgtggcccaaatagcctatctaaaacgctgcataaactgagtaaccagaataacagctacggaactcgattcgagtacaataaagaaagcttctcctag

SEQ ID NO: 339720 - DNA, 1665 bp, Artificial Sequence
  derived and/or modified sequence
atgaatgtcctgctgttctggaagacctttttgctgtataatcaaggacccgaataccattatcttcaccagatgttgggactagggttgtgcttgtcgagggcctcggcctccgtcctgaacctgaattgtagtctgatcctactgcccatgtgtaggacgctcttggcctacctgagagggagtcagaaggtgccctctcgaagaactaggcgattgcttgataaatctagaacgttccacattacatgcggtgttactatctgcattttctctggcgtccacgtagcagcgcatcttgttaatgctcttaacttcagcgtgaactacagtgaggactttgtggagctcaatgccgcgaggtatagggatgaggatccccgcaagctacttttcaccactgttcccgggctaaccggagtgtgcatggtggtcgtactcttcctgatgataacagcaagcacctatgcaattagagtcagcaactacgatatcttctggtatacccacaacctctttttcgtgttttatatgttgctcaccctgcatgtcagcgggggactgctgaagtaccagaccaatctggatacccaccctccagggtgtatcagccttaataggacttcatcccaaaacatctcactcccagaatacttttccgagcatttccacgagccttttcctgagggtttttctaagcctgctgagttcacccaacataaatttgtgaagatctgcatggaagagccacggttccaggccaacttcccccagacctggctgtggatctccggccccctttgtctgtactgcgctgaacggctatacagatacatccgcagcaacaaacccgttacaattattagcgtgatgtctcacccttcagacgttatggaaatccggatggtcaaggaaaactttaaagcaaggcccggccaatatatcaccctgcactgtccctcagtgtccgcgctcgagaaccaccccttcacactgaccatgtgtccaactgaaactaaggccacctttggagtgcacctgaaaatcgttggggattggaccgagcgatttcgggacctgctgctgccgccctcaagtcaggactcggagatactgccctttattcagagcagaaactaccctaagctttacattgacggccccttcggcagcccgtttgaggagtcactgaactatgaggttagtctttgcgtggctggcggtatcggtgttacaccattcgcttcaattctcaacaccttgctggacgactggaagccctacaagctgcggcgcttatacttcatctgggtctgccgggacatccagagctttcgatggttcgctgacctcctgtgtatgctacataataagttctggcaggaaaaccgacctgactacgtaaacattcagctgtacctctcacagacagacgggatacagaagatcattggcgagaaatatcatgcccttaacagcaggctgttcatcgggcgtcctaggtggaaacttctgttcgatgaaatcgctaaatataatcgcggcaagacagtcggcgtgttctgttgcggcccgaatagtcttagtaaaaccctccacaagttaagtaaccagaataattcttacggaaccagattcgaatataataaagagagcttttcctag

SEQ ID NO: 339721 - DNA, 1665 bp, Artificial Sequence
  derived and/or modified sequence
atgaacgtacttcttttttggaagacatttttgctgtataatcaggggcccgagtaccattacctgcaccagatgctggggcttggcctgtgtctctcgagggctagcgcctccgtgctaaatttgaattgttccctgatattactgcccatgtgccgaaccctcctggcctatctgcggggtagccaaaaagtgccctcccgcaggacacgaaggctcttggataagtctcgcacttttcacattacttgcggagtaacaatttgtatcttcagcggcgtgcatgttgcagctcacttggtgaacgccctgaacttcagcgtaaactattctgaggattttgtggagctaaatgccgcccgctatagagacgaggacccccgcaaactgttattcacaacagtcccgggacttaccggtgtgtgtatggtggtggtgctcttcctaatgataacagcttccacatacgccatacgcgtgtcaaactatgacatcttttggtacacacacaacttgttcttcgtgttttacatgctgttaacattgcatgtgtcaggcggtctgctgaagtaccagactaacctagacacccatcctcccgggtgtatctctcttaatcgcactagcagtcagaacattagtcttccggagtacttcagcgaacacttccacgaaccatttccagaaggattctcaaagcccgctgagttcacacagcataagtttgtgaaaatttgtatggaggagcctcggttccaggcaaatttcccgcagacctggctttggatctctgggcccctctgtctctactgcgcagagcgcttgtatcgctacatccggagtaataaaccagttactatcatcagcgttatgtcacatccctctgatgtcatggaaattcgaatggtcaaggaaaatttcaaggcacggccaggtcagtatattaccctacactgcccgtccgtatccgctcttgaaaatcatccttttaccttaactatgtgtcccacagagacaaaggccacctttggtgttcacttgaagatcgtgggcgattggaccgaaaggttccgtgacctcctgctcccaccgtcatctcaggacagcgagatcttgccgttcattcagagccgaaactatcctaagctgtacattgacgggcccttcggttcccctttcgaggagagcctgaactacgaagtgagcctttgtgtcgccgggggaattggggtgaccccttttgcaagcattcttaacactcttctggacgactggaaaccctataaactgcggaggctctatttcatttgggtctgtagagacatccagtcctttcggtggttcgccgacctgttatgcatgctgcacaataaattctggcaggaaaaccggccagactatgtgaacattcagttgtacttgagtcagactgacggaatccagaaaattattggcgaaaagtatcatgcgttgaacagccgattatttattggccggcccaggtggaagctgctcttcgatgaaatcgctaagtataataggggtaagactgtgggcgtgttctgttgcggtccaaattctctgtccaagacactgcacaaactgtccaatcagaataattcctacggcacccgctttgaatataacaaggaatccttttcatag

SEQ ID NO: 339722 - DNA, 1665 bp, Artificial Sequence
  derived and/or modified sequence
atgaacgtcctgctgttttggaagacattccttttgtacaaccaaggtccagagtaccattacctgcaccagatgctgggcctgggtctgtgtttgtcaagggcatccgcctccgttctcaacctcaattgtagcttaattctgttgccaatgtgccgaactctgcttgcgtacctgcgcggtagtcagaaggtaccgagccgtcgtaccaggaggctcttggacaaatcccggactttccacatcacatgcggcgtgaccatctgtatattcagtggagtgcatgttgccgcccatctggtgaatgcactcaacttctcggtgaactactcagaggactttgttgagctgaacgccgccagatatagggatgaagatcccaggaagcttctgtttacaaccgtgccaggcctcaccggcgtgtgcatggtcgtcgtgctcttcctgatgatcacggctagcacatatgccatccgcgtgagcaattacgatatattctggtatacccacaacctgtttttcgtattctacatgttactgaccctgcatgtgagcgggggtttactgaagtaccagaccaatctggacacccatccaccgggttgcatctctctcaatagaacatccagccaaaacattagcctccctgaatatttctcagaacactttcacgagccatttcctgagggatttagcaagccggcagagttcacacaacacaaatttgtaaaaatttgcatggaggaacccagatttcaggctaatttccctcagacatggctctggatcagcggaccgctgtgcctctattgtgccgagcgattgtacaggtatatacgctcaaacaagccagtcaccatcatttctgtaatgtcccacccttctgacgttatggaaattcgcatggtgaaggagaacttcaaagctcgacccggccaatacattacattgcactgtcccagcgtgagcgctctggaaaatcatcctttcacattgacaatgtgcccaaccgaaaccaaagcaacttttggtgtgcacctgaaaattgtgggagattggaccgaacgcttccgtgatcttcttctgccaccatcatcccaagactctgagatcttgccgttcattcagagccgcaattatccaaagttgtacatcgacgggccctttggcagcccattcgaggaaagcctgaattacgaggtgtctctgtgcgtggcaggcggcatcggagtaactccgtttgcatctattctcaatacgctgctggacgactggaaaccgtataaactgaggcgactgtatttcatatgggtgtgtagagatatccaatctttccgttggttcgcagaccttctgtgtatgttgcataataagttttggcaggaaaaccgtcccgactacgtgaatatccagctctacctgtcacagacagatggtattcagaagattatcggggagaaatatcacgcccttaattcccgactgtttatcggcaggccccgctggaagcttctatttgacgaaattgccaaatacaaccgcgggaaaaccgttggcgtgttttgctgcggtcctaattcgctctcaaaaacgctccacaaacttagtaatcagaataattcctacgggacaaggtttgaatataataaggagagcttttcctag

SEQ ID NO: 339723 - DNA, 1665 bp, Artificial Sequence
  derived and/or modified sequence
atgaatgtgctgctcttctggaagaccttcctgctgtacaaccagggccctgagtaccactacctgcaccagatgctgggcctgggcctgtgcctgagccgggccagcgcctctgtgctgaacctgaactgcagcctcatcctgctgcccatgtgcaggaccctgctggcctacctgcggggcagccagaaggtgcccagcaggaggacccggcggctgctggacaagagcaggaccttccacatcacctgtggggtgaccatctgcatcttcagcggcgtgcacgtggccgcccacctggtgaatgccctgaacttctctgtgaactacagcgaggactttgtggagctgaatgctgcccgctacagagatgaggaccccaggaagctgctcttcaccaccgtgcccggcctgactggagtgtgcatggtggtggtgctcttcctgatgatcacagccagcacctacgccatccgggtgagcaactatgacatcttctggtacacccacaacctcttctttgtgttctacatgctgctgaccctgcacgtgtctgggggcctgctgaagtaccagaccaacctggacacccaccccccaggctgcatcagcctgaacagaaccagcagccagaacatcagcctgcctgagtacttcagcgagcacttccacgagcccttccctgagggcttcagcaagccagctgagttcacccagcacaagtttgtgaagatctgcatggaggagccccgcttccaggccaacttcccccagacctggctgtggatcagcggccccctgtgcctgtactgtgccgagcggctgtaccgctacatccgcagcaacaagcctgtgaccatcatctctgtgatgagccaccccagtgatgtgatggagatccgcatggtgaaggagaacttcaaggcccggcccggccagtacatcaccctgcactgccccagcgtgtctgccctggagaaccaccccttcaccctgaccatgtgccccacagagaccaaggccacctttggagtgcacctgaagatcgtgggggactggacagagcgcttccgggacctgctgctgccccccagcagccaggacagcgagatcctgcccttcatccagagcaggaactaccccaagctgtacattgatggccccttcggcagcccctttgaggagagcctgaactatgaggtgtccctgtgtgtggccggcggcattggagtgaccccatttgccagcatcctgaacaccctgctggatgactggaagccctacaagctgcggcggctgtacttcatctgggtgtgccgggacatccagagcttccgctggtttgctgacctgctgtgcatgctgcacaacaagttctggcaggagaacagaccagactatgtgaacatccagctgtacctgagccagacagatggcatccagaagatcatcggggagaagtaccacgccctgaacagccgcctcttcatcggccggccccgctggaagctgctgtttgatgaaattgccaagtacaacagaggcaagacagtgggcgtcttctgctgcggccccaacagcctgagcaagaccctgcacaagctgagcaaccagaacaacagctatggcaccaggtttgagtacaacaaggagagcttctcctag

SEQ ID NO: 339724 - DNA, 1665 bp, Artificial Sequence
  derived and/or modified sequence
atgaacgtgctgctgttctggaagaccttcctgctgtacaaccaggggccagaataccactatctgcaccagatgttggggctggggctctgtctttccagagcctcagccagcgtcctgaatcttaactgctccctgatcctgctccctatgtgtaggactctgctggcttacctgaggggttcccagaaagtgcccagcagaaggacacgcaggttgctggataagagccggacattccacatcacgtgtggagtgactatctgcatcttttcaggcgtgcatgtagctgcacaccttgtgaatgcactaaatttcagcgtgaactattctgaagattttgttgagctgaacgcagctcgctatagagacgaggaccctcggaagcttctgttcacaacagtaccaggtctgactggcgtatgcatggttgtggtcttgttcctgatgatcaccgcatccacctacgctattagagtttccaactacgatatcttttggtatacccataacctgtttttcgtcttttatatgctgctcacgttacacgtaagtggcgggcttcttaagtaccagacaaacttggacactcaccctcctggttgtattagcctgaaccggacaagtagccaaaatatttcgctacccgagtatttctccgagcacttccatgagccgtttccagaagggtttagtaagcctgccgaattcacacagcacaaatttgtgaagatttgcatggaggagcctcgtttccaggcaaatttcccacaaacatggctttggatctcaggaccgttgtgcttatattgcgctgaaagactttaccgatatattcgatcaaacaagccagtaacgattatttcagtcatgagccaccctagcgacgtgatggaaattcgtatggtgaaagagaatttcaaagccagaccaggtcagtacataacactgcactgtccttcagtgtctgccctagagaatcaccctttcaccctgacgatgtgccctactgaaaccaaagcaacattcggcgtacatctcaagattgtgggagactggacagagcggtttagggatctcctgctacccccctccagccaggacagcgagatcttgccttttatccaaagcagaaactacccgaagctttatatcgacggaccgttcggtagtccattcgaggagtctttgaactatgaagtgagtctgtgtgtggccggcggaataggagtgacccccttcgcttcaattttgaacacgttacttgacgattggaagccatacaaactgcggaggctgtatttcatttgggtgtgcagggatatacagtcctttaggtggtttgcagatctcctgtgcatgctccacaacaagttttggcaggagaacaggccagactatgtaaacatccagctttacctcagccaaaccgatggcattcagaagatcattggtgagaagtatcatgcgctgaattctagacttttcattggaaggccgagatggaagctgctatttgatgaaatcgccaagtataaccgcggcaaaacagtgggcgttttttgctgtgggcctaattcactatctaagaccctgcataagctcagcaaccagaataacagctatgggacccgctttgagtacaacaaagaatccttttcctag

SEQ ID NO: 339725 - DNA, 1665 bp, Artificial Sequence
  derived and/or modified sequence
atgaacgtgctgctgttctggaagaccttcctgctgtacaaccagggccccgaatatcactacttacatcagatgttgggacttggcctctgcttgtcacgcgcttcagctagcgttctcaatttgaattgctcactaatcttacttccaatgtgtcgcaccctacttgcctacttgcgcgggtctcaaaaggtgcccagccggagaacacgccgactcctagacaagtcgaggacattccatattacttgcggcgtgaccatctgcatctttagtggagtgcacgtggctgcccatctggtgaacgcccttaacttctctgttaattattctgaagatttcgtcgaactaaatgccgcccgctaccgcgatgaggacccccgaaagctactatttacaactgtccccggactgactggagtctgcatggtcgtggtgctgttccttatgattacagctagcacctatgctatccgagttagcaattacgacatattctggtacacccataatttgttctttgtgttctatatgctgttaaccctgcacgtcagtggcggattactcaaataccaaactaacctggacacccatcctcctgggtgtatctctctgaacagaacgtcttcccagaacattagtctgccggagtatttcagcgagcacttccacgagccatttccagagggtttctcaaagccagccgaattcacacagcataaatttgtgaaaatttgtatggaagaaccaagattccaggcaaactttccacagacttggctttggatttccggtcccttgtgtttgtattgtgccgagaggttgtaccgctatattcgatccaataaaccagtgaccatcattagtgtaatgtctcatccttctgatgtgatggaaattcgcatggtcaaggaaaattttaaggctcgccctgggcaatacataacccttcattgtccctccgtatccgccttagagaatcacccttttacactgaccatgtgcccaaccgagacaaaagccacttttggggtacacctgaagattgttggggattggacggagcgtttcagggatctgttgctgcccccctcatcccaggactctgaaatactgcctttcatccagagccggaattacccaaagctttatatagacggcccctttggttcgccatttgaggagtctctgaattacgaagtgagcctgtgcgtggccggcgggatcggcgttaccccctttgccagcatcttaaacacactgctcgatgactggaaaccgtataaactccgtaggttatacttcatctgggtatgcagagacatccagtcattccggtggtttgccgatctcctgtgcatgctgcataataagttctggcaggagaatcgcccagattacgttaatatccagctgtacctgtcgcaaacagatggcattcaaaagattattggggagaagtatcacgcactgaactctagactgtttatcgggcgccctaggtggaagttgttgttcgatgagatcgcaaagtacaatcgcggtaagactgttggcgttttctgttgcggtccaaacagtctgtcaaagacattacataagctgtctaatcagaataattcttatggtacaagatttgagtacaataaagaatcctttagctag

SEQ ID NO: 339726 - DNA, 1665 bp, Artificial Sequence
  derived and/or modified sequence
atgaacgtgctgctgttctggaagaccttcctgctgtacaaccaggggccggagtaccactatctgcaccaaatgctgggcctcgggctgtgcctttccagagcttccgcgtcagtactaaatttgaactgtagcctcatattgctgcccatgtgtcgcactttgctggcttacttgcgggggtctcagaaggtgccgagcagacgtacccgccggctgttggacaaaagccgaacgttccatattacatgcggagtcacaatttgcatcttttctggggtgcacgttgcagcacacttagtcaacgccctcaatttttctgtgaactattccgaggacttcgtcgagctgaatgctgcgagatacagagacgaggacccgagaaaacttttgtttacaaccgtacccggcctcacaggggtgtgtatggtcgtcgtcctgttcctaatgatcacagcatccacttatgctatcagggtttccaattatgatatattttggtacacacataatctgttcttcgtgttttatatgctactgacgctccacgtcagcggggggcttctcaaataccagacaaatttagacacgcatccacctggatgcatatctctcaacaggaccagcagccagaatattagcctgcctgagtactttagtgagcattttcatgagccttttcctgagggcttttctaagcccgctgagtttacccagcataagtttgtcaaaatatgcatggaggaacctcgatttcaggccaactttccccagacttggctttggatctcaggccccctttgtctctattgcgctgagaggctttataggtacattcggagtaataaacccgtgactataatcagcgtcatgtctcatccatccgatgttatggaaatccgaatggttaaggagaattttaaagctaggccaggacagtatatcacacttcattgtccaagcgtttctgccctagagaaccacccttttacgctcacaatgtgccccaccgagactaaggctacctttggcgtgcatctgaaaattgtgggagactggacagagcggttccgcgacctcttgctgccaccatcaagccaggattctgaaatcctaccttttatccaatcccggaactaccctaagttgtacattgatggcccctttggttctcccttcgaggaatcgctgaactacgaggttagcctgtgcgtggccggcggcatcggggtcactccatttgcatcaatcctaaataccctgctagatgattggaagccgtacaagcttcgaaggctctatttcatttgggtgtgccgagatatccaatcttttagatggttcgccgatctgctgtgtatgctgcacaataagttttggcaggaaaatcgcccagactatgtaaatatccagctctacttatcacaaactgacggaatccaaaaaatcattggcgagaagtatcacgcgctgaatagccgcttatttatcggccggcctaggtggaaactgctattcgacgaaatagctaagtataatagaggtaagaccgtcggggtgttttgttgcggccctaatagcttgagcaaaaccttgcacaaactgtctaaccaaaacaacagttacggtacccggttcgaatacaataaggaaagtttcagttag

SEQ ID NO: 339727 - DNA, 1665 bp, Artificial Sequence
  derived and/or modified sequence
atgaacgtgctgctgttctggaagaccttcctgctgtacaaccagggacctgagtaccactacctccatcaaatgttaggcctcggactctgcctctcccgtgcttctgcctcagtgctgaatctgaattgttctcttattctgctgccaatgtgtcgtaccctgctggcatatttgcgggggtcacagaaggtgccatctcgtcggacccgacggttactagataaatctaggactttccatattacttgtggggttaccatttgcatcttttctggggttcacgtcgccgctcacttagtcaacgctctcaatttctcagtgaattactcagaggattttgttgaactaaacgcggctcggtaccgggacgaagaccccaggaagctgcttttcaccacagtcccaggattaacaggcgtctgtatggtcgtggtgctgtttctgatgattaccgctagcacgtatgctattagagttagtaactacgatatattctggtatactcataacttattcttcgtgttctacatgctgttaacactgcacgtcagcggcggtttgctaaagtaccagaccaacctggatacacacccacctggatgtatttcgctgaatagaacgtcatcacagaatatctcacttcctgagtatttctcggagcactttcacgagcctttccctgaggggttctccaaacctgccgagtttacccaacataagtttgtgaaaatttgcatggaagagccgagattccaggcaaatttcccccagacctggctttggatttctggccccctgtgtctgtattgcgccgagagactttacaggtatattcggtcaaataaacctgtaactataatttctgtcatgtcccacccctcagatgtaatggagatccggatggtcaaggagaatttcaaggcgagacccggtcaatatatcacactgcattgtcccagcgtaagtgcactggagaaccacccattcactttgacaatgtgcccgacagaaaccaaagccacttttggtgtacatctcaaaatagtgggagattggacagaacgctttcgcgatcttttgctgcctccttcttctcaagacagtgagatcttaccattcatccagtccaggaactaccctaaactttatatagacggccctttcggaagtccattcgaagagagcctgaactatgaggtgtcactttgcgtagccggtggaattggcgtaacaccttttgcgagtatcctcaacacgttactcgacgactggaagccctacaaactccgccgattgtacttcatctgggtatgtcgagatatacagtcttttcgatggttcgccgatctgctgtgcatgttgcataataagttttggcaggagaatcgcccagactacgtgaacatacagctctatctgagccagacagacggaatccagaagattattggggaaaaataccacgcgctaaacagtcgattgtttatcggccgaccgcggtggaagttgctgtttgatgaaatagccaagtacaaccgcgggaaaacagttggggttttttgttgtggacccaatagcttgtctaaaacactccacaagctgtccaaccaaaataacagctatggcacaaggttcgagtacaacaaggaatctttttcttag

SEQ ID NO: 339728 - DNA, 1665 bp, Artificial Sequence
  derived and/or modified sequence
atgaacgtgctgctgttctggaagaccttcctgctgtacaaccagggacctgaatatcactacctgcatcaaatgctcggtttgggcctgtgtctctcacgggctagtgcatctgtgctaaatctgaattgcagcctgattctgcttcccatgtgtcgcaccttactggcgtacctgcgtggctcccaaaaggtgccgtccaggcggaccaggcgcctcttggacaagtccaggacctttcatatcacatgtggcgttactatttgcatcttctctggagtgcacgttgcagctcaccttgtgaatgcgctgaacttttccgttaactattctgaggactttgtggaactgaatgctgccagatacagggatgaggaccctaggaaactgctattcacaaccgtccccgggctaacaggggtatgcatggtggtagtcctgtttctgatgattacggcatcgacttacgccatcagagtatctaattatgatattttttggtatacccataatctgttcttcgtgttttacatgctcttaactctgcacgttagtggggggttgttgaagtaccagaccaatttagacactcacccacccggatgcatttctctgaaccgcaccagcagtcagaacatttccctgcccgagtacttcagcgaacattttcatgagcctttccccgaaggcttctcaaagcctgcggaatttacacaacataaatttgttaaaatatgcatggaagagcctcgtttccaggccaatttcccacagacctggctgtggatcagtggccctctctgcctttactgcgccgagcggttgtataggtatatacggtctaataaacccgtgaccattataagtgtcatgagtcacccctcagatgtcatggagatccggatggtgaaagagaactttaaggctcggccaggccagtacatcaccctgcactgtccgtcagtaagcgctttagaaaaccacccattcacgcttacaatgtgcccaactgaaacgaaggctacatttggtgtgcacctgaagattgtgggcgactggactgaacgctttagagacttgctcctgccccctagcagtcaggactctgagatactgccatttatccaaagcagaaactatccaaagctttacatagacggaccctttggcagtccattcgaagaatcactgaactacgaagtgagcttgtgtgtggcggggggaatcggcgttacccctttcgcctctatcctgaacaccctgctcgacgattggaagccttacaagctgcggaggttgtattttatctgggtatgcagggatatccagagcttccgctggttcgccgatttactgtgcatgctgcataataaattttggcaagaaaaccgccccgactacgtaaatatccagctgtatctgtctcagactgatggcatccaaaagataatcggagagaagtaccacgctctcaactctcggctttttatcggcagacctcgctggaagctgttattcgatgaaatcgctaagtataatcgcggcaaaactgtcggcgtattttgctgcggcccaaattcactcagtaaaactctgcacaaacttagcaaccaaaacaacagctatgggaccagatttgagtataataaggagtcattctcatag

SEQ ID NO: 339729 - DNA, 1665 bp, Artificial Sequence
  derived and/or modified sequence
atgaatgtgctgctgttctggaaaacttttctgttgtataatcaaggacccgaataccactatctccaccagatgctgggactgggactttgcctatcccgagcatctgcctccgttctcaacctcaactgttcactgatactgctcccaatgtgtcgcacactacttgcctacctcaggggcagccagaaggtgccatcacgaagaaccaggaggctgctggacaaaagtagaacattccacataacctgtggagtcaccatttgtatctttagcggtgttcatgtggctgcccacctcgttaatgccctgaatttttcagtgaactattctgaagacttcgtagaattgaatgcagctcgttaccgagacgaagaccctcggaagctgctctttaccaccgtaccaggcctaactggcgtctgtatggttgtggtgctatttctgatgattactgcatcaacatacgcgatacgagtgtccaattatgatatcttctggtacactcacaatctcttttttgtgttctacatgctgcttacattgcatgtctcaggtggtcttcttaagtatcagaccaacctggacacacatccacccggttgcataagcctcaaccggacaagtagccagaacatctcactgcctgagtattttagcgaacactttcacgagccgtttccggaaggcttcagtaagcctgcagaattcactcagcacaagtttgtcaaaatttgcatggaggagccgagatttcaggcgaactttccgcagacttggttgtggatttccggacccctgtgcctgtactgcgctgaacggctgtatcgttacattcgctctaataaaccggtgaccattatctctgttatgagccacccttctgacgtgatggaaattagaatggtgaaggagaatttcaaggccaggccagggcagtatataacactgcactgcccttccgtgtctgctttggaaaaccacccgttcactctcaccatgtgtcctacagaaaccaaggctaccttcggcgtccaccttaagattgttggagactggaccgaacggtttagagatctgttacttcccccatcttcacaggactctgagatattgccatttatacagagcaggaactacccaaagctctacatagacgggccattcggatcccccttcgaagagtcattaaactacgaggtctccctatgcgtcgctggcggaatcggagtcaccccctttgcaagcatcctcaatacattgctggatgactggaaaccatacaaactaaggcgtctgtacttcatctgggtttgtcgcgacatccagtcctttcgatggttcgccgacctgttatgcatgttgcacaacaagttctggcaggaaaacaggcccgactacgttaatatacagctctacctgtcgcagactgacggcatccagaagattatcggcgagaaatatcacgccctgaactcccgcctattcatcgggagaccccgatggaagttgctgtttgatgagatagccaagtataacagaggtaagaccgtcggcgtgttttgttgtggacccaatagtctgtccaagaccttgcacaagctgagtaaccagaacaactcttacgggaccaggttcgagtataataaagagtctttctcatag

SEQ ID NO: 339730 - DNA, 1665 bp, Artificial Sequence
  derived and/or modified sequence
atgaatgtgctactcttctggaaaacttttttgctgtataatcaggggcctgagtatcattatctgcaccaaatgcttggacttggcctctgcctatcccgcgcaagcgcatctgttctgaaccttaactgctccctgatcctattaccaatgtgccgaacactcctggcatatcttagaggatcacagaaagtaccctcccggcgtactaggagactgctggacaagtcaagaaccttccacataacttgcggcgtgactatctgtattttcagcggagtccacgtggccgctcacctcgtcaacgcacttaacttctccgttaactactcggaggattttgtggaattaaatgcggctagatacagggatgaagatcccagaaagctgctgttcacaacggtgcctggcctgacaggcgtatgcatggtcgtcgttctttttctgatgattactgcttctacctacgccatccgtgttagcaattatgacatcttctggtatactcacaatttgttttttgtgttctacatgctgctgacactccatgtgtcggggggtcttctgaagtaccagactaacctcgacacgcacccacccggatgcatctcccttaatcggacaagctctcagaacatttctctccctgagtacttcagcgagcacttccatgagccattcccagaaggattttctaagcccgctgaatttactcaacataaattcgtcaagatatgcatggaggaacccaggttccaggccaatttccctcaaacgtggctttggattagtgggcctctctgcctctattgcgccgagagattgtacagatacataagaagtaataagcctgtgaccattatcagtgttatgtcacaccccagcgacgtcatggaaattcggatggttaaggagaacttcaaagctaggcccggacagtatattacattacactgcccaagcgtctctgctctcgagaatcacccctttactctgaccatgtgccccaccgagacgaaagccaccttcggtgtgcatctcaaaattgtgggtgactggacagagcgattccgcgacctgcttttgcccccttcaagtcaggacagtgagattctgcctttcatccagagcaggaactatccaaaattgtacatcgacgggccattcgggagcccttttgaagagtcactcaattacgaggtttcattatgcgttgctgggggaatcggggtaacgccgttcgcaagtatactgaatactctgctggacgactggaagccgtacaagctgcgccgtttgtattttatttgggtgtgtcgcgatattcagtcttttcggtggtttgctgatttactttgcatgctacacaacaagttttggcaggaaaaccgaccagattacgtgaacatacagctctacctgagccagacggatggcatacagaaaattatcggtgagaagtatcacgctctgaacagcaggctgtttatcggacgtcctaggtggaaattgcttttcgacgaaatcgctaaatataatagaggtaagactgtcggtgtgttttgctgcggtcccaacagtctgagcaaaacacttcacaagctgtctaaccaaaacaactcctacggcaccagatttgagtataataaggagtcctttagctag

SEQ ID NO: 339731 - DNA, 1665 bp, Artificial Sequence
  derived and/or modified sequence
atgaacgtgcttctgttctggaaaactttcctgctgtataatcaaggaccagagtaccattacctgcaccagatgctggggcttggtctctgcctatctcgggcttcagcatctgtcctgaacctcaactgttcactgatattgttgccaatgtgtcgcaccttgctggcatacctacgtggcagccagaaggtaccttcaagacggacaaggcgcttactcgacaaatcccgcacctttcatatcacttgtggggttactatctgcatattcagcggagttcacgtagcggctcatttggttaatgctcttaacttctccgtgaactactctgaggactttgtggaactcaacgcggctcgatacagagatgaggacccacgaaagctcctctttaccacagtgccgggattgacgggagtttgtatggtggtagtgttatttctaatgataacggcttcaacttacgctatcagagtttccaattatgacatcttttggtacacgcataacctgttcttcgtgttctacatgctgctcactctgcacgtatcagggggattactgaagtatcagactaaccttgatactcacccacccggttgtatatcattgaacaggacaagcagtcagaatatctcgttgccggagtacttcagcgaacacttccatgagccgtttcccgagggattctctaaaccagctgagttcacacagcataagttcgttaagatatgcatggaagaaccgaggtttcaggcgaatttcccacagacctggctatggatctccggcccactgtgcctgtattgcgcagaacgactgtataggtacattaggagcaataagcctgttaccataatctccgttatgagtcaccctagtgacgtcatggagattcggatggtcaaggaaaactttaaagcccgtcccggacaatatatcacccttcattgtccaagtgtctccgccctggaaaaccacccattcaccctgaccatgtgccccaccgaaaccaaggctactttcggtgtgcacctgaagatagtaggcgattggaccgagcgcttccgggatctgctgcttccaccttcatcccaagactcagaaattttgcctttcatacagtcaaggaactatcctaagctttacatagatgggccatttggatccccctttgaagagagcctgaattacgaggtgtcactctgtgtggcaggaggaataggtgtgacgccctttgcctccattctgaacaccctgcttgatgactggaagccgtacaagctccggaggctgtatttcatttgggtctgccgcgatatacagtcatttcgttggtttgccgacctgttatgcatgctgcacaacaaattctggcaagagaatcggcctgattatgtcaatatccagctgtatctctctcagaccgacggtattcaaaagataattggcgagaaataccacgccttaaattcgagacttttcatcggccgaccccgatggaaattgttgttcgatgaaatcgctaaatataatcgtggtaagactgtgggagtgttttgctgtggtcccaatagcctgtctaaaacattgcataagctcagtaaccagaataactcttacggtactcgtttcgaatataataaggagagctttagctag

SEQ ID NO: 339732 - DNA, 1665 bp, Artificial Sequence
  derived and/or modified sequence
atgaacgtgctattgttctggaaaacattcctgctctacaaccaaggacctgagtaccactacctacatcaaatgcttggcctggggttatgcctctctcgtgctagtgcaagcgtgctgaacctgaactgttctctgattctcctgcctatgtgcagaacgctattggcttacctccgaggttctcagaaagtcccctctagacgaacacggaggctgctggacaagtcccggacctttcatatcacctgcggggtaaccatctgtattttctccggtgtgcacgtggcggctcacctggtaaacgccctgaatttctcggtcaattatagtgaagattttgttgagctgaatgccgctcgataccgcgacgaggacccacgaaaacttctatttaccacagtccccggtctgacaggcgtctgtatggtggtagtcctattcttgatgattacagcctccacctacgctattcgagtttctaactatgatatattttggtatacacacaacctgttctttgtcttttacatgctgctaaccctacatgtttccggtggactcttgaagtatcagactaatctggatactcatccacctggttgcatcagtcttaaccgaacgagcagccagaacattagtctaccagagtacttttctgagcactttcatgagccattccctgagggctttagcaagcccgctgagtttactcagcacaagttcgttaaaatctgcatggaggagccaagattccaagcaaacttcccacaaacttggctgtggatcagtgggcctctctgcctttactgcgcagaacgcttgtaccgttacattcggtcaaacaaacccgttactattataagcgtcatgagccacccctcggacgtgatggagattaggatggtgaaggagaattttaaggccagacccggtcagtacataacactgcattgtcccagtgtgtccgccctggagaaccacccgttcacactgaccatgtgcccgaccgagactaaggcgacattcggcgttcacctgaagatagtcggtgattggaccgagcggtttagggacctgctgctgccaccctcctcccaggattccgagatcttaccatttatacaatccagaaattacccaaagctgtatattgacgggccttttggttcacccttcgaggagagcttgaattatgaggttagtttatgtgttgcgggaggtatcggagtgacccctttcgccagtatcctgaacaccttattggacgactggaagccttataagctgagacgtctgtacttcatttgggtgtgccgggatatccagtcattcaggtggtttgctgacttactctgcatgttgcataataaattctggcaggagaaccggcctgattatgttaatatccagctgtatttaagtcaaacggacggcatacagaaaatcatcggtgaaaagtaccacgctcttaatagccggttattcatcggtcgaccacgatggaagctactattcgacgaaatcgccaagtataaccgtggcaagacagtgggcgtcttttgttgtgggcctaattccctctcaaagaccctgcacaagctgtctaatcagaacaactcatacggaacccgctttgaatataacaaagagtccttctcctag

SEQ ID NO: 339733 - DNA, 1665 bp, Artificial Sequence
  derived and/or modified sequence
atgaatgtgttgctcttctggaagacgttcctcctctacaaccagggtcctgagtatcactatctgcaccagatgctgggcttgggtttatgcctgtcccgggcatctgcctctgtcctgaatcttaattgcagtctgatcctccttccaatgtgtcgaacgttgttggcttatttgcgaggttcacagaaggtgccttcgaggcgtacacgacgcctgctcgataagtcgagaactttccatataacatgcggagtaactatctgtatattcagcggagtccatgtagcagcccatctggtcaacgccctgaacttctccgtgaactatagtgaagacttcgtggaactcaacgccgctcggtatagagacgaggaccccaggaagcttctgttcaccacagtgcccggtttaacaggagtttgtatggtggtggtcctgtttctgatgatcactgcttctacatacgcaataagggtgtcgaattatgacatcttttggtacacccacaatctgtttttcgtcttctacatgttactgacgcttcacgtctctggcggactcttgaaatatcagaccaatctcgatacccatcctcctggctgtatatctctcaatcggaccagttcccagaacatatctctcccagagtatttttccgagcattttcacgagcccttccccgagggcttttcaaagcccgcagaattcacacagcataagttcgttaagatatgcatggaggagccccgttttcaggctaattttccacagacgtggctctggatctctggacctttatgtttgtactgtgctgagcgcttatacaggtacattcggtcgaataaacccgtcaccatcatctccgttatgtcccatcctagtgacgtaatggagattcgcatggtgaaggaaaattttaaggccaggcccggtcagtatatcactctgcactgtccttctgtctccgctctagagaatcaccccttcactctgacaatgtgcccaacagagacaaaagccacttttggtgtccaccttaaaatcgttggcgattggacagagagattccgtgatttgctactaccaccatccagccaggactcggagatccttccgtttatccagtctcgtaactatcccaagctttacattgacggaccgtttggaagtcccttcgaagagagtctcaattatgaggtgtccctgtgcgtggccggaggtatcggagtgactcctttcgcctccatcctcaatactctgctggatgactggaaaccgtacaaactccgacggctctacttcatttgggtctgtagggatatccaaagcttcagatggttcgccgacctcttgtgtatgctgcacaataagttttggcaagaaaatagacctgactacgtgaacattcaactttacctgagccagacagacggaattcagaaaattattggggagaaatatcatgctctcaacagcaggctcttcatcggcagacctaggtggaagctactgttcgacgagattgcaaagtacaatcggggaaagactgtgggtgtgttttgctgtgggccaaacagcctgtccaagacactgcataaactttcaaaccagaataattcctatgggacccggtttgaatacaacaaggaatcattctcttag

SEQ ID NO: 339734 - DNA, 1665 bp, Artificial Sequence
  derived and/or modified sequence
atgaacgtgctgctgttctggaagaccttcctgctgtacaaccagggccccgagtaccactacctgcaccagatgctgggcctgggcctgtgcctgagcagagccagcgccagcgtgctgaacctgaactgcagcctgatcctgctgcccatgtgcagaaccctgctggcctacctgagaggcagccagaaggtgcccagcagaagaaccagaagactgctggacaagagcagaaccttccacatcacctgcggcgtgaccatctgcatcttcagcggcgtgcacgtggccgcccacctggtgaacgccctgaacttcagcgtgaactacagcgaggacttcgtggagctgaacgccgccagatacagagacgaggaccccagaaagctgctgttcaccaccgtgcccggcctgaccggcgtgtgcatggtggtggtgctgttcctgatgatcaccgccagcacctacgccatcagagtgagcaactacgacatcttctggtacacccacaacctgttcttcgtgttctacatgctgctgaccctgcacgtgagcggcggcctgctgaagtaccagaccaacctggacacccacccccccggctgcatcagcctgaacagaaccagcagccagaacatcagcctgcccgagtacttcagcgagcacttccacgagcccttccccgagggcttcagcaagcccgccgagttcacccagcacaagttcgtgaagatctgcatggaggagcccagattccaggccaacttcccccagacctggctgtggatcagcggccccctgtgcctgtactgcgccgagagactgtacagatacatcagaagcaacaagcccgtgaccatcatcagcgtgatgagccaccccagcgacgtgatggagatcagaatggtgaaggagaacttcaaggccagacccggccagtacatcaccctgcactgccccagcgtgagcgccctggagaaccaccccttcaccctgaccatgtgccccaccgagaccaaggccaccttcggcgtgcacctgaagatcgtgggcgactggaccgagagattcagagacctgctgctgccccccagcagccaggacagcgagatcctgcccttcatccagagcagaaactaccccaagctgtacatcgacggccccttcggcagccccttcgaggagagcctgaactacgaggtgagcctgtgcgtggccggcggcatcggcgtgacccccttcgccagcatcctgaacaccctgctggacgactggaagccctacaagctgagaagactgtacttcatctgggtgtgcagagacatccagagcttcagatggttcgccgacctgctgtgcatgctgcacaacaagttctggcaggagaacagacccgactacgtgaacatccagctgtacctgagccagaccgacggcatccagaagatcatcggcgagaagtaccacgccctgaacagcagactgttcatcggcagacccagatggaagctgctgttcgacgagatcgccaagtacaacagaggcaagaccgtgggcgtgttctgctgcggccccaacagcctgagcaagaccctgcacaagctgagcaaccagaacaacagctacggcaccagattcgagtacaacaaggagagcttcagctag

SEQ ID NO: 339735 - protein, 231 aa, Artificial Sequence
  derived and/or modified sequence
MAVSWRSWLANEGVKHLCLFIWLSMNVLLFWKTFLLYNQGPEYHYLHQMLGCPTETKATFGVHLKIVGDWTERFRDLLLPPSSQDSEILPFIQSRNYPKDDWKPYKLRRLYFIWVCRDIQSFRWFADLLCMLHNKFWQENRPDYVNIQLYLSQTDGIQKIIGEKYHALNSRLFIGRPRWKLLFDEIAKYNRGKTVGVFCCGPNSLSKTLHKLSNQNNSYGTRFEYNKESFS

SEQ ID NO: 339736 - DNA, 696 bp, Artificial Sequence
  derived and/or modified sequence
atggctgtgtcttggagatcttggttggcaaacgaaggcgtcaaacatctgtgtctcttcatttggctgtcaatgaatgtgttactgttctggaagacattcctgctctacaatcagggccctgagtatcattatcttcatcagatgctcggttgccccacggagacaaaggccacgtttggggtccacctcaagatcgtcggtgactggaccgagcgattccgcgacttactgctgcccccttcaagtcaggactccgaaatattacctttcattcagtccagaaattaccctaaagatgattggaaaccctacaaactccgaagactgtatttcatttgggtttgtcgggacattcagagctttcggtggtttgctgacctgctgtgtatgttacataataagttttggcaagagaatagaccagactatgttaatattcagttatatctgtcacagacggacggcatacagaaaatcatcggcgaaaagtaccacgcacttaatagtcgcctgttcatcggtcggccacgttggaagcttctcttcgacgagatcgccaagtacaatcgcggcaaaactgtaggggtattctgctgtggccctaattctctctctaaaacactgcacaagctgtctaaccaaaacaattcctacggcacccgcttcgagtacaataaagaaagtttttcctag

SEQ ID NO: 339737 - DNA, 696 bp, Artificial Sequence
  derived and/or modified sequence
atggctgtgtcctggaggtcctggctggccaatgaaggagtgaagcacctgtgcctcttcatctggctgtccatgaatgtgctgctcttctggaagaccttcctgctgtacaaccagggccctgagtaccactacctgcaccagatgctgggctgccccacagagaccaaggccaccttcggcgtgcacctgaagatcgtgggggactggacagagcgcttccgggacctgctgctgccccccagcagccaggacagcgagatcctgcccttcatccagagcaggaactaccccaaggatgactggaagccctacaagctgcggcggctgtacttcatctgggtgtgccgggacatccagagcttccgctggtttgctgacctgctgtgcatgctgcacaacaagttctggcaggagaacagaccagactatgtgaacatccagctgtacctgagccagacagatggcatccagaagatcattggagagaagtaccacgccctgaacagccgcctcttcatcggccggccccgctggaagctgctgtttgatgagatcgccaagtacaacagaggcaagacagtgggcgtcttctgctgcggccccaacagcctgagcaagaccctgcacaagctgagcaaccagaacaacagctatggcaccaggtttgagtacaacaaggagagcttctcctag

SEQ ID NO: 339738 - DNA, 696 bp, Artificial Sequence
  derived and/or modified sequence
atggctgtgtcctggaggagctggctcgccaacgaaggggttaaacacctctgcctgttcatctggctctccatgaatgtcctgcttttctggaaaaccttcttgctgtataaccaagggccagagtatcactacctccaccagatgttggggtgtccaactgaaaccaaagcaacatttggggttcatcttaaaatagtaggagactggacagaacgatttcgagatttactactgcctccatctagtcaagactccgaaattctgcccttcattcaatctagaaattatcccaaggatgactggaaaccatacaagcttagaagactatactttatttgggtatgcagagatatccagtccttccgttggtttgcagatttactctgtatgttgcataacaagttttggcaagagaacagacctgactatgtcaacatccagctgtacctcagtcaaacagatgggatacagaagataattggagaaaaatatcatgcactgaattcaagactgtttataggacgtcctcggtggaaacttttgtttgatgaaatagcaaaatataacagaggaaaaacagttggtgttttctgttgtggacccaattcactatccaagactcttcataaactgagtaaccagaacaactcatatgggacaagatttgaatacaataaagagtctttcagctga

SEQ ID NO: 339739 - DNA, 696 bp, Artificial Sequence
  derived and/or modified sequence
atggccgtgagctggcggagctggctggccaacgagggcgtgaagcatctctgccttttcatctggctgtccatgaatgtgttattattctggaagaccttcctcctgtacaatcagggtccagagtaccactatctccatcagatgcttggctgtcctacggaaacaaaagcaacttttggcgtgcatctcaagatcgtaggggactggacagaacgattccgcgatttgctcttaccaccatctagtcaggacagcgaaattctcccatttattcagtccaggaattaccccaaggatgactggaaaccgtacaaactgaggcgactttacttcatttgggtgtgcagagacatccagtccttccgatggttcgcagacctcttatgtatgctgcataacaaattctggcaggagaaccgccctgactatgtgaacattcagctgtacctgagtcagaccgatggaattcagaagattataggcgaaaaataccatgcgctgaacagtagactgtttatcgggcggccccgatggaaactgctgtttgacgagattgcgaaatacaacaggggcaagacagtgggagtgttttgttgcgggcccaactccctgtccaaaacattgcataaattgagcaatcagaataactcttacggaacacgtttcgaatataacaaagagtccttttcttag

SEQ ID NO: 339740 - DNA, 696 bp, Artificial Sequence
  derived and/or modified sequence
atggcggtctcatggcgatcttggctggccaacgaaggtgttaagcacctatgtctattcatctggctgtcgatgaacgtgctcctgttctggaagaccttcttactctacaatcagggccctgagtaccattaccttcaccagatgctaggatgccccacggagaccaaggccacttttggggtccatctgaagattgtgggggactggactgaacgctttagagatctcctcctgcccccatcatcccaggattccgagatcctccctttcattcaaagccgaaattacccgaaggatgattggaagccatataaactccggaggctgtacttcatctgggtatgccgagacatccagagtttccgctggtttgccgatttgctctgcatgctacacaataaattctggcaggagaatcgcccagattatgtgaatatccagttatacctgtctcaaaccgacggcattcagaaaattattggagagaaatatcatgcactgaattctaggcttttcatcggcagacctcgatggaagctgctgtttgatgaaatagccaagtacaatcgtgggaagactgtgggcgtcttctgctgtgggccaaactcactgtcaaagaccctgcacaaattgtcaaatcagaataacagttatggaacaagattcgagtacaataaggagagctttagttag

SEQ ID NO: 339741 - DNA, 696 bp, Artificial Sequence
  derived and/or modified sequence
atggccgtgagctggagaagctggctggccaacgagggcgtgaagcacctgtgcctgttcatctggctgagcatgaacgtgctgctgttctggaagaccttcctgctgtacaaccagggccccgagtaccactacctgcaccagatgctgggctgccccaccgagaccaaggccaccttcggcgtgcacctgaagatcgtgggcgactggaccgagagattcagagacctgctgctgccccccagcagccaggacagcgagatcctgcccttcatccagagcagaaactaccccaaggacgactggaagccctacaagctgagaagactgtacttcatctgggtgtgcagagacatccagagcttcagatggttcgccgacctgctgtgcatgctgcacaacaagttctggcaggagaacagacccgactacgtgaacatccagctgtacctgagccagaccgacggcatccagaagatcatcggcgagaagtaccacgccctgaacagcagactgttcatcggcagacccagatggaagctgctgttcgacgagatcgccaagtacaacagaggcaagaccgtgggcgtgttctgctgcggccccaacagcctgagcaagaccctgcacaagctgagcaaccagaacaacagctacggcaccagattcgagtacaacaaggagagcttcagctag

SEQ ID NO: 339742 - DNA, 816 bp, Artificial Sequence
  derived and/or modified sequence
atggcagttagttggcgctcatggctggccaacgaaggggtcaagcacctgtgcctgttcatttggctatctatgaacgtattgctcttttggaaaactttcttgttgtacaatcagggacctgaataccactacttgcatcagatgcttggctgcccgaccgagaccaaagccacttttggcgtgcatctgaaaattgtaggcgactggacggagagattcagggatttactgctccccccctcttcacaggattctgagatcctccccttcatacaatcaaggaattatccgaaactgtacatagacggaccctttggctccccctttgaggaaagtttgaactacgaggtgagcttatgtgttgcaggcggtattggcgttacaccgtttgcctccattttaaatacactcttggatgactggaaaccttacaagttgcgccggctgtattttatttgggtgtgtcgcgacatccaatccttcaggtggtttgcggacttgctttgcatgttgcacaacaaattttggcaggaaaacaggcctgactatgtgaatatccagctgtatctgtcacagacagacggaattcagaagattattggcgaaaaatatcatgccttgaatagtagactgtttatcggtcgcccccggtggaaactgttatttgacgaaattgctaaatacaaccgtggaaagacagtcggcgtgttttgctgtggaccaaattctctgagtaagactctgcataagttgtctaaccaaaataattcatacggaactagatttgagtataataaggagagcttttcgtag

SEQ ID NO: 339743 - DNA, 816 bp, Artificial Sequence
  derived and/or modified sequence
atggctgtgtcctggaggtcctggctggccaatgaaggagtgaagcacctgtgcctcttcatctggctgtccatgaatgtgctgctcttctggaagaccttcctgctgtacaaccagggccctgagtaccactacctgcaccagatgctgggctgccccacagagaccaaggccaccttcggcgtgcacctgaagatcgtgggggactggacagagcgcttccgggacctgctgctgccccccagcagccaggacagcgagatcctgcccttcatccagagcaggaactaccccaagctgtacattgatggccccttcggcagcccctttgaggagagcctgaactatgaggtgtccctgtgtgtggccggcggcatcggcgtgaccccatttgccagcatcctgaacaccctgctggatgactggaagccctacaagctgcggcggctgtacttcatctgggtgtgccgggacatccagagcttccgctggtttgctgacctgctgtgcatgctgcacaacaagttctggcaggagaacagaccagactatgtgaacatccagctgtacctgagccagacagatggcatccagaagatcattggagagaagtaccacgccctgaacagccgcctcttcatcggccggccccgctggaagctgctgtttgatgagatcgccaagtacaacagaggcaagacagtgggcgtcttctgctgcggccccaacagcctgagcaagaccctgcacaagctgagcaaccagaacaacagctatggcaccaggtttgagtacaacaaggagagcttctcctag

SEQ ID NO: 339744 - DNA, 816 bp, Artificial Sequence
  derived and/or modified sequence
atggctgtgtcctggaggagctggctcgccaacgaaggggttaaacacctctgcctgttcatctggctctccatgaatgtcctgcttttctggaaaaccttcttgctgtataaccaagggccagagtatcactacctccaccagatgttggggtgtccaactgaaaccaaagcaacatttggggttcatcttaaaatagtaggagactggacagaacgatttcgagatttactactgcctccatctagtcaagactccgaaattctgcccttcattcaatctagaaattatcccaagctgtatattgatggtccttttggaagtccatttgaggaatcactgaactatgaggtcagcctctgcgtggctggaggcattggagtaactccatttgcatcaatactcaacaccctgttggatgactggaaaccatacaagcttagaagactatactttatttgggtatgcagagatatccagtccttccgttggtttgcagatttactctgtatgttgcataacaagttttggcaagagaacagacctgactatgtcaacatccagctgtacctcagtcaaacagatgggatacagaagataattggagaaaaatatcatgcactgaattcaagactgtttataggacgtcctcggtggaaacttttgtttgatgaaatagcaaaatataacagaggaaaaacagttggtgttttctgttgtggacccaattcactatccaagactcttcataaactgagtaaccagaacaactcatatgggacaagatttgaatacaataaagagtctttcagctga

SEQ ID NO: 339745 - DNA, 816 bp, Artificial Sequence
  derived and/or modified sequence
atggccgtgagctggcggagctggctggccaacgagggcgtgaagcacctgtgccttttcatttggctctcgatgaacgtcctgctgttctggaagacatttttgctctacaaccagggacccgaataccactatctgcatcaaatgcttggatgcccaaccgaaaccaaagcaacctttggcgtgcatcttaaaattgtgggagactggaccgagcgcttccgcgatctgttactgccacccagcagtcaggatagcgagatcctccctttcatacagtcaagaaattatcccaagttatacatcgatggcccattcggttcgccttttgaggaaagtctcaattatgaggtctctttatgcgtggctggcggaataggggtcacaccattcgcctccatcctgaacacactcctcgacgactggaaaccttataagttacggaggctgtactttatctgggtgtgcagagacattcagtcttttcggtggttcgccgacctgctgtgtatgcttcacaacaagttttggcaagagaatcgacccgactacgtgaacatccagctttatctctcccagaccgatggcatccagaaaataataggggaaaaatatcatgcgctgaattctaggctgtttatcggacggcccagatggaaactactgtttgacgaaatcgcgaagtacaatcgcggaaagaccgtgggcgtgttttgctgcggcccaaacagccttagtaaaaccctccataagttatctaatcagaacaatagctatggcactagatttgagtacaataaggagagcttctcctag

SEQ ID NO: 339746 - DNA, 816 bp, Artificial Sequence
  derived and/or modified sequence
atggcagtctcatggaggtcttggctggccaacgaaggtgtcaagcacctgtgcctgttcatttggcttagtatgaacgtgcttctgttttggaagaccttcctgctgtataaccagggacccgaataccactatctacatcagatgctgggatgtcctaccgagacaaaggccactttcggcgtgcacttgaagatcgttggagactggacagaaagatttcgagatctccttttgccaccttcgagccaagactccgagatcctgccttttatccagtccaggaattaccccaagctgtacatcgatggccctttcgggtcaccttttgaggagagtctgaattacgaggttagtctatgtgtcgctggaggtatcggggttacaccttttgcgtccatcctgaacacgctcctagacgattggaaaccctacaaactgaggaggctgtattttatttgggtctgtcgcgacatacagagtttcaggtggtttgctgacctcctgtgcatgctccataataaattttggcaggagaacagacccgattatgtgaatattcagctgtatctgagccagacagacggaattcagaagatcatcggcgagaaatatcacgccctcaactccagactgttcattgggaggcctcgctggaaactcctgttcgacgagattgccaaatacaatcgaggaaaaactgtcggcgtgttctgttgtggccctaactctctcagcaaaaccttgcacaaactctctaatcagaacaactcgtatgggacccgctttgaatataacaaagagagcttcagttag

SEQ ID NO: 339747 - DNA, 816 bp, Artificial Sequence
  derived and/or modified sequence
atggccgtgagctggagaagctggctggccaacgagggcgtgaagcacctgtgcctgttcatctggctgagcatgaacgtgctgctgttctggaagaccttcctgctgtacaaccagggccccgagtaccactacctgcaccagatgctgggctgccccaccgagaccaaggccaccttcggcgtgcacctgaagatcgtgggcgactggaccgagagattcagagacctgctgctgccccccagcagccaggacagcgagatcctgcccttcatccagagcagaaactaccccaagctgtacatcgacggccccttcggcagccccttcgaggagagcctgaactacgaggtgagcctgtgcgtggccggcggcatcggcgtgacccccttcgccagcatcctgaacaccctgctggacgactggaagccctacaagctgagaagactgtacttcatctgggtgtgcagagacatccagagcttcagatggttcgccgacctgctgtgcatgctgcacaacaagttctggcaggagaacagacccgactacgtgaacatccagctgtacctgagccagaccgacggcatccagaagatcatcggcgagaagtaccacgccctgaacagcagactgttcatcggcagacccagatggaagctgctgttcgacgagatcgccaagtacaacagaggcaagaccgtgggcgtgttctgctgcggccccaacagcctgagcaagaccctgcacaagctgagcaaccagaacaacagctacggcaccagattcgagtacaacaaggagagcttcagctag

SEQ ID NO: 339748 - protein, 1287 aa, Artificial Sequence
  derived and/or modified sequence
MHPDLGPLCTLLYVTLTILCSSVSSDLAPYFTSEPLSAVQKLGGPVVLHCSAQPVTTRISWLHNGKTLDGNLEHVKIHQGTLTILSLNSSLLGYYQCLANNSIGAIVSGPATVSVAVLGDFGSSTKHVITAEEKSAGFIGCRVPESNPKAEVRYKIRGKWLEHSTENYLILPSGNLQILNVSLEDKGSYKCAAYNPVTHQLKVEPIGRKLLVSRPSSDDVHILHPTHSQALAVLSRSPVTLECVVSGVPAPQVYWLKDGQDIAPGSNWRRLYSHLATDSVDPADSGNYSCMAGNKSGDVKYVTYMVNVLEHASISKGLQDQIVSLGATVHFTCDVHGNPAPNCTWFHNAQPIHPSARHLTAGNGLKISGVTVEDVGMYQCVADNGIGFMHSTGRLEIENDGGFKPVIITAPVSAKVADGDFVTLSCNASGLPVPVIRWYDSHGLITSHPSQVLRSKSRKSQLSRPEGLNLEPVYFVLSQAGASSLHIQAVTQEHAGKYICEAANEHGTTQAEASLMVVPFETNTKAETVTLPDAAQNDDRSKRDGSETGLLSSFPVKVHPSAVESAPEKNASGISVPDAPIILSPPQTHTPDTYNLVWRAGKDGGLPINAYFVKYRKLDDGVGMLGSWHTVRVPGSENELHLAELEPSSLYEVLMVARSAAGEGQPAMLTFRTSKEKTASSKNTQASSPPVGIPKYPVVSEAANNNFGVVLTDSSRHSGVPEAPDRPTISTASETSVYVTWIPRANGGSPITAFKVEYKRMRTSNWLVAAEDIPPSKLSVEVRSLEPGSTYKFRVIAINHYGESFRSSASRPYQVVGFPNRFSSRPITGPHIAYTEAVSDTQIMLKWTYIPSSNNNTPIQGFYIYYRPTDSDNDSDYKRDVVEGSKQWHMIGHLQPETSYDIKMQCFNEGGESEFSNVMICETKVKRVPGASEYPVKDLSTPPNSLGSGGNVGPATSPARSSDMLYLIVGCVLGVMVLILMVFIAMCLWKNRQQNTIQKYDPPGYLYQGSDMNGQMVDYTTLSGASQINGNVHGGFLTNGGLSSGYSHLHHKVPNAVNGIVNGSLNGGLYSGHSNSLTRTHVDFEHPHHLVNGGGMYTAVPQIDPLECVNCRNCRNNNRCFTKTNSTFSSSPPPVVPVVAPYPQDGLEMKPLSHVKVPVCLTSAVPDCGQLPEESVKDNVEPVPTQRTCCQDIVNDVSSDGSEDPAEFSRGQEGMINLRIPDHLQLAKSCVWEGDSCAHSETEINIVSWNALILPPVPEGCAEKTMWSPPGIPLDSPTEVLQQPRET

SEQ ID NO: 339749 - DNA, 3864 bp, Artificial Sequence
  derived and/or modified sequence
atgcaccccgatctcgggcccctctgtaccctgttatacgtcaccctgacaattctctgctcatcagtgagttctgatttagccccttattttaccagtgaacctctgtccgcagttcagaaacttggcgggccagtggttctgcattgttcggcacaacctgtgacaacccgaatttcttggctgcataacgggaaaactctcgatggcaatctggagcatgtgaagattcatcaggggaccctgacaatcctgtccttgaatagctctctattagggtattaccaatgcttggctaataacagtatcggcgctattgtctccgggcccgccactgtgtccgtggccgtgttgggtgatttcggttcatctactaaacatgttattacagcagaagaaaaatctgccggattcattggatgcagggtgccagaatccaatcctaaggcggaagtcaggtataaaatccggggcaaatggttggagcactctaccgaaaactaccttatcctaccttccgggaacctgcagattctcaacgtatctttagaggataaagggtcttacaaatgtgccgcctacaaccccgtcacccaccagctaaaggttgaacccattgggaggaagctccttgtgtccagaccctcctcagacgatgtccatatcctgcatcctactcatagccaggcacttgcagtgctaagcaggagcccagtcacactcgaatgtgtggtttccggtgtcccagccccacaggtgtattggctgaaagatggccaggacatcgcaccaggcagtaactggcggagattatacagtcatctggctaccgacagtgtggaccctgccgatagcgggaactatagctgcatggctggaaacaaaagtggcgacgtcaaatatgtgacttacatggtcaatgtcctcgagcatgcaagtatctccaagggattgcaggatcaaattgtcagtttgggggcaacggttcacttcacttgcgacgtgcacggtaaccccgctcccaactgtacctggtttcacaatgcgcaacctattcatccttccgctcgtcacttgaccgctggtaatggcctcaagatcagcggagtcacagtggaagatgtcggcatgtaccagtgtgttgctgacaacggtattggcttcatgcactcaactggacggcttgagattgagaatgacggtggcttcaagcctgtaataatcaccgcccctgtgagcgctaaagtggctgatggcgactttgtgaccctgtcatgtaatgcctccgggttgccagtgccagtaatacgctggtatgactcccatggcttaattacgtctcacccatcccaggtgctacggtctaagtcaagaaagagtcaactttccagaccagaggggcttaacctggaaccagtttatttcgtactcagccaagcaggcgctagctctcttcacatccaagcggtgacgcaggagcatgcgggcaaatatatctgcgaggctgcaaacgaacatggtaccacgcaggccgaagcctcactgatggtggtgcctttcgaaacgaataccaaggctgaaactgttacccttcccgacgcagcacaaaacgatgacagatccaagcgggatgggtcggaaaccggcctgctgtccagcttcccagtcaaagtgcatccttccgccgtcgaatccgcacccgagaagaatgcaagtgggatctctgtgcctgacgccccaattattttatcacccccacagacccatacacctgacacctacaacctggtgtggcgtgctgggaaagatggcggactgccgataaacgcatactttgtgaagtatcgtaagcttgacgatggcgtagggatgctcgggtcctggcacacggtgcgcgtccctgggagcgaaaacgagttacacttggctgagcttgagcccagttctctgtatgaagtgctgatggtcgcccggtcagccgctggagagggccaacctgcaatgcttacattcagaaccagtaaggagaagacagcttcgtccaaaaatacccaagccagcagccctccagttgggattcctaagtatccagtggtgtcagaggctgccaacaacaactttggagtggtgctgaccgactcctctcggcattcgggcgtgccagaagcccctgataggcctacaatatccaccgcgtcggagacatcagtgtatgtgacgtggatcccacgggccaatggcggcagtcccataaccgcatttaaagtcgaatacaaaaggatgaggacttctaattggctggtggccgctgaggatatccccccttcaaaactctctgtagaagtgagaagtctggaacctggctcaacctataaatttcgcgtgattgctattaaccactacggcgaaagttttaggtctagcgctagcaggccgtaccaagttgttggatttcctaacagatttagttccagaccaattacaggacctcacatcgcatataccgaggccgtgtctgacacccagatcatgctgaaatggacttacataccctcttcaaataataatacaccaatccaggggttttatatctattacaggcctaccgacagcgataacgacagtgattataaacgggacgtcgtggaaggatccaagcagtggcacatgattggccatctgcagcccgagacatcctacgatattaagatgcagtgctttaatgaaggaggagagagtgaattcagtaacgtcatgatttgtgagacaaaggttaagagagtgcctggcgcatccgagtatcccgtcaaagaccttagcaccccccctaacagtctgggaagcggcggcaacgtaggccccgcaactagtcctgctaggtccagcgatatgctttacttaattgtcgggtgcgtgcttggggtcatggttctgatacttatggtctttatagctatgtgcttgtggaagaatcggcagcagaacacaattcagaagtacgatcccccgggctatctttaccaggggtcagacatgaatggtcagatggtcgactacacaaccttatcaggcgccagtcagatcaatggaaatgtccacggcggcttcttgaccaatggggggctctcgtccggttattcccacctgcatcacaaagtgcccaacgccgtcaacggtattgtgaacgggtcccttaacggaggcctgtactccggccatagcaatagccttacacggacacatgtagactttgagcatccccaccacctggtcaacggaggggggatgtacacagcagtccctcagatcgaccccctggaatgtgtgaactgtagaaattgccgcaacaataatcgctgtttcactaaaactaactccaccttttccagttctcctcccccagtagtgcccgttgtggccccttacccccaggacggcctagaaatgaaacccttatcgcatgtgaaggttccggtatgtttgacctcagccgttccggattgtggacaactccccgaagagagtgtcaaggacaatgtggagccagttcctacccagcgaacttgttgtcaggacatagtgaatgatgtgtcctcggacggcagcgaggatccagccgagttttctcggggtcaggagggcatgatcaacctgcgcattcctgatcacctccagctcgcaaaatcatgtgtgtgggagggcgactcatgtgcccattctgagacagagatcaacatcgtgtcatggaatgccctgattttgcctcccgtcccagagggatgtgcagaaaagaccatgtggagcccccccggaatccctctggattctccaacagaagtactgcagcagccgagggagacctag

SEQ ID NO: 339750 - DNA, 3864 bp, Artificial Sequence
  derived and/or modified sequence
atgcacccagacctgggccccctgtgcaccctgctgtatgtgaccctgaccatcctgtgcagctctgtgtccagtgacctggccccctacttcaccagcgagcccctgtctgctgtgcagaagctgggcggccctgtggtgctgcactgcagcgcccagcctgtgaccacccgcatctcctggctgcacaacgggaagaccctggatggcaacctggagcacgtgaagatccaccagggcaccctgaccatcctgagcctgaacagcagcctgctgggctactaccagtgcctggccaacaacagcattggagccatcgtgtctggccctgccaccgtgtctgtggccgtgctgggggactttggcagcagcaccaagcacgtgatcacagctgaggagaagtctgctggcttcatcggctgccgggtgcctgagagcaaccccaaggccgaggtgcgctacaagatccggggcaagtggctggagcacagcacagagaactacctgatcctgcccagcggcaacctgcagatcctgaatgtgtccctggaggacaagggcagctacaagtgtgccgcctacaaccctgtgacccaccagctgaaggtggagcccatcggcaggaagctgctggtgtcccggcccagcagtgatgatgtgcacatcctgcaccccacccacagccaggccctggccgtgctgagccgcagccctgtgaccctggagtgtgtggtgtctggagtgcctgccccccaggtgtactggctgaaggatggccaggacatcgcccctggcagcaactggaggcggctgtacagccacctggccacagattctgtggaccctgctgacagcggcaactacagctgcatggccggcaacaagtctggagatgtgaagtatgtgacctacatggtgaatgtgctggagcacgccagcatcagcaagggcctgcaggaccagatcgtgtccctgggcgccaccgtgcacttcacctgtgatgtgcacggcaacccagcccccaactgcacctggttccacaatgcccagcccatccaccccagcgcccggcacctgacagctggaaatggcctgaagatcagcggcgtgacagtggaggatgtgggcatgtaccagtgtgtggccgacaatggcatcggcttcatgcacagcacaggccgcctggagattgaaaatgatggcggcttcaagcctgtgatcatcacagcccctgtgtctgccaaggtggctgatggagactttgtgaccctgagctgcaatgccagcggcctgcctgtgcctgtgatccgctggtatgacagccacggcctcatcaccagccaccccagccaggtgctgcggagcaagagcaggaagagccagctgagcaggcctgagggcctgaacctggagcctgtgtactttgtgctgagccaggccggggccagcagcctgcacatccaggccgtgacccaggagcacgccggcaagtacatctgtgaggccgccaatgagcacggcaccacccaggccgaggccagcctgatggtggtgccctttgagaccaacaccaaggccgagaccgtgaccctgcctgatgctgcccagaatgatgacaggagcaagagagatggcagcgagaccggcctgctgagcagcttccctgtgaaggtgcaccccagcgctgtggagagcgcccctgagaagaatgccagcggcatctctgtgcctgatgcccccatcatcctgagccccccccagacccacaccccagacacctacaacctggtgtggagggctgggaaggatggcggcctgcccatcaatgcctactttgtgaagtacaggaagctggatgatggagtgggcatgctgggctcctggcacacagtgcgggtgcccggctctgaaaatgagctgcacctggccgagctggagcccagcagcctgtatgaggtgctgatggtggcccggtctgctgctggggagggccagcctgccatgctgaccttccgcaccagcaaggagaagacagccagcagcaagaacacccaggccagcagcccccctgtgggcatccccaagtaccctgtggtgtctgaggccgccaacaacaactttggagtggtgctgacagacagcagccgccacagcggcgtgcctgaggccccagaccggcccaccatcagcacagccagcgagacctctgtgtatgtgacctggatcccccgggccaacggcggcagccccatcacagccttcaaggtggagtacaagaggatgaggaccagcaactggctggtggccgctgaggacatcccccccagcaagctgtctgtggaggtgcgcagcctggagcccggcagcacctacaagttccgggtcatcgccatcaaccactatggagagagcttccgcagcagcgccagccggccctaccaggtggtgggcttccccaaccgcttcagcagccggcccatcaccggcccccacatcgcctacacagaagctgtgtctgacacccagatcatgctgaagtggacctacatccccagcagcaacaacaacacccccatccagggcttctacatctactaccggcccacagacagcgacaatgacagcgactacaagagagatgtggtggagggcagcaagcagtggcacatgattggccacctgcagcctgagaccagctatgacatcaagatgcagtgcttcaatgaaggaggagagagcgagttcagcaatgtgatgatctgtgagaccaaggtgaagagggtgcctggggccagcgagtaccctgtgaaggacctgagcaccccacccaacagcctgggcagcggcggcaatgtgggccctgccaccagccctgcccggagcagtgacatgctgtacctgattgtgggctgtgtgctgggcgtgatggtgctgatcctgatggtgttcatcgccatgtgcctgtggaagaaccggcagcagaacaccatccagaagtatgaccccccaggctacctgtaccagggcagtgacatgaatggccagatggtggactacaccaccctgagcggggccagccagatcaatggaaatgtgcatggaggcttcctgaccaatggaggcctgagcagcggctacagccacctgcaccacaaggtgcccaatgctgtgaatggcatcgtgaatggcagcctgaatggaggcctgtacagcggccacagcaacagcctgaccaggacccacgtggactttgagcacccccaccacctggtgaatggaggcggcatgtacacagctgtgccccagattgaccccctggagtgtgtgaactgcaggaactgcaggaacaacaaccgctgcttcaccaagaccaacagcaccttcagcagcagccccccacctgtggtgcctgtggtggccccctacccccaggacggcctggagatgaagcccctgagccacgtgaaggtgcctgtgtgcctgaccagcgctgtgcctgactgtggccagctgcctgaggagagcgtgaaggacaacgtggagcctgtgcccacccagaggacctgctgccaggacatcgtgaatgatgtgtccagtgatggctctgaagatcctgctgagttcagccggggccaggagggcatgatcaacctgcgcatcccagaccacctgcagctggccaagagctgtgtgtgggagggggacagctgtgcccacagcgagacagagatcaacatcgtgtcctggaatgccctgatcctgccccctgtgcctgagggctgtgccgagaagaccatgtggagccccccaggcatccccctggacagccccacagaggtgctgcagcagccccgggagacctag

SEQ ID NO: 339751 - DNA, 3864 bp, Artificial Sequence
  derived and/or modified sequence
atgcaccccgacctgggccccctgtgcaccctgctgtacgtgaccttaaccatcttgtgttcttccgtgagctctgacctagcgccttattttacctcggagccccttagtgccgtgcaaaagcttggcggccccgtagtgctccattgttcagctcaacccgtcacaacccggatttcatggctgcacaacggaaaaacattggacggtaatctggaacacgtaaagatccatcagggtactctgacgattctgtcattaaactcttctctgttgggttactatcagtgtctggcaaataattccataggtgccatcgttagcggtccagcaacagtctccgtggccgtgctgggcgacttcggctcttctacgaaacacgtgattaccgccgaggaaaagagtgcaggcttcataggctgcagggtgccagaatcaaatcctaaggcggaagttcggtacaagatccgaggcaagtggctagagcattccaccgaaaactatttgatcctgccaagtggcaacctccagatattgaatgtgagcctggaggataagggatcgtataaatgcgccgcctataatccagtcacccaccagttaaaagtggagcctattgggaggaagttactggtatctcggccatcttcagacgatgtccatattttacaccccacgcactcacaggctttagcagtcctaagtcgttccccggtgacgttggaatgcgtggtgtccggggtgcctgccccccaggtgtattggcttaaggacggacaggacattgcgcccggatcaaactggcgacgcttgtactcccacctggccactgattcggtggatcccgctgattcaggcaattattcttgcatggcgggtaataaaagtggggacgttaagtatgtaacctatatggttaacgtcctcgagcacgcttcaatttcaaagggactccaggaccaaatcgtctccttaggagccacagtccatttcacgtgcgacgtccacggtaaccctgcccctaattgtacctggttccacaatgcccagcccattcatccctctgcccgccatcttaccgctgggaatggtcttaaaatctccggcgtaactgtagaggacgtggggatgtaccagtgcgtcgcggataacgggattggatttatgcattccacaggtaggctggaaatagaaaacgacggcggatttaaaccagttataatcacggccccagtttccgcgaaagtagccgatggcgattttgtcacattgagttgcaatgcatccggtctgccagtgcctgtgatcaggtggtacgattctcacggtctgattacaagccacccaagccaggtcttacgctcaaagagtcgaaagagccagctgagtcggccagaaggccttaacctggagcctgtttacttcgtcctcagtcaagccggagcctcctcccttcatattcaggctgtcacacaggaacatgccggcaaatatatctgcgaagctgccaacgagcacggcactactcaggccgaggctagtctgatggttgtacctttcgagactaatacaaaggctgaaactgtgactttgccagatgctgctcaaaacgatgatagatcaaaaagggatgggtcggaaacgggattgttgtcttccttcccggtcaaggtgcacccttccgcagtggaatctgcaccagagaagaacgcgtctgggattagcgtcccggacgccccaatcatactcagtcctccccaaacgcatacacccgatacatacaatctcgtatggcgcgccggaaaggacggtggtctgccgatcaacgcttatttcgttaagtaccgaaaattggacgacggtgttgggatgctcggctcttggcatacagtgagagtgccaggtagcgagaatgagctgcacctggcagagctggagcccagtagcctttacgaagttctgatggttgccaggagtgccgccggagagggtcagcccgctatgcttacattcagaacctcaaaggagaagactgcctcttccaaaaacacccaggcttcctcccctccagtgggaattcccaagtatcccgttgtgagcgaagccgccaataataatttcggcgtggtgctgaccgattcaagtaggcactcaggcgtgccagaggcacctgaccgcccaactatctccaccgcctccgagacttcggtctatgtgacctggattcctagagcgaacggcggatctccaatcaccgcctttaaggttgaatacaagagaatgagaacctctaattggctcgtagccgccgaggacatacccccgtctaagctaagcgtggaagtccgttctctggagcccggatccacctataagtttagagtgatagccatcaatcactatggggagtccttccgctcatctgccagccggccctatcaagtagtcggcttcccaaaccgtttttcctctcggcctattaccggcccacatattgcttatacagaggctgttagcgacactcagatcatgctcaagtggacctatatcccctctagtaataataatacacctattcaaggattttacatttattaccgcccaactgattcggataacgacagcgattacaagcgagacgttgtggagggatcaaaacagtggcacatgattggacacctgcaacccgagacctcttacgacatcaaaatgcagtgctttaatgagggcggagagagcgaattttctaacgtgatgatctgcgagacaaaggtgaagagagttccaggggcttctgaatacccagtgaaggacctgagtaccccaccgaactcgctcggctccggcggaaacgtgggcccagccactagcccagcgcgaagtagcgacatgctttacctcatcgtcggctgcgtcctgggcgtgatggtcctaattcttatggtgtttatcgctatgtgcctgtggaagaaccgacagcagaacactatacagaagtatgatccgccaggttatctgtaccaagggagtgacatgaatggtcagatggtggattacactacactgtccggcgcatctcaaattaatggaaatgtacacgggggcttccttactaatggagggctgagctccggctactcacatctgcatcacaaagtcccaaatgcggttaatggtattgttaatggcagtctgaatggtggcctgtactcaggccacagcaacagcctgaccagaactcacgtggattttgaacaccctcatcacctcgtaaacggggggggtatgtatacagctgttcctcagattgaccccctggaatgtgtgaattgcaggaattgtagaaataacaacaggtgcttcaccaagaccaactcaacatttagtagcagtcctccacccgtcgtgcccgttgtggccccatatccgcaggacggtcttgaaatgaagcctctgtctcacgtgaaagtgcccgtgtgcctgaccagtgccgttcccgactgtggccagcttcccgaggaatccgtaaaagacaacgtggagcccgttccgacacaacgtacttgttgccaggatatcgtgaacgacgtcagcagtgacgggagcgaggaccccgctgaatttagcagagggcaggaaggtatgattaatttacgcatccctgatcatttgcagctcgcgaagtcgtgcgtgtgggagggagatagctgtgcccatagtgagacagagatcaatatagtatcctggaacgctctgatcttgccccctgtgccagagggatgcgccgagaaaacaatgtggagtccaccaggcatccctctcgactctcccaccgaagtcctacagcagccacgtgaaacttag

SEQ ID NO: 339752 - DNA, 3864 bp, Artificial Sequence
  derived and/or modified sequence
atgcaccccgaccttggcccattatgcaccttattatacgtgaccctaacaattctttgttcatcagttagtagtgacctggcgccttacttcactagcgagcctctttcagcagtgcagaaactcggcggacctgttgttctgcactgttccgcgcaacccgtcacaacaaggattagctggttgcataacgggaagacactggatggcaatctggagcacgtaaagatccaccaagggacgcttaccattcttagtctgaacagttcactgcttggctactatcaatgcctggctaacaattccatcggcgctatcgtcagcggtccagcgacggtctctgtagcagtgttgggggacttcggcagctccaccaagcatgtgataaccgcagaggaaaagagcgcaggattcatcggatgccgcgtgcccgagagcaatcctaaggccgaggtccgttataaaatcagagggaagtggctggagcactcaactgagaattatctcatcctgccatctggcaacttgcagatccttaacgtctctctcgaagataaaggcagttacaaatgtgcagcttacaatccagtcacacaccaattgaaggtagagcctataggcaggaagctgttagtgtcccgcccaagctcagacgacgtacatatcctgcaccccactcattcacaggctctggctgtcctgtcaaggagccctgttacccttgaatgtgtagtatccggcgtgccagctccgcaagtgtactggcttaaggatggacaggacattgcacctgggagcaactggcgccgtctgtatagccacctagcaaccgactctgttgatccagcagatagtgggaactactcatgtatggctgggaataagtcaggagatgtcaagtacgtgacatatatggtcaatgtgctggagcacgctagtataagcaaaggactacaggaccagattgtgtccctgggggctacggttcatttcacctgcgatgtccacgggaaccccgctccgaactgtacctggttccacaacgctcagcccatccaccctagcgcccgacacctgaccgcgggaaacgggctgaagatctccggggttaccgtggaagacgtagggatgtaccaatgcgtcgcggacaatgggatcggattcatgcactccacaggcagactggaaattgagaacgacggtggctttaaacccgttattatcacagcccctgtgagtgcaaaggttgcggacggggactttgtgaccctgagttgtaacgcttccggtctgccagtgcccgtcatcaggtggtatgactctcacgggctcatcacctcacacccgtcccaggtcctccggtctaagtctagaaagagccagctatccagaccggaagggctcaacctagaaccagtgtattttgtgctctcgcaggcaggagcatcctcactacacatccaggccgtcacccaggagcatgccggaaaatatatctgcgaagccgcaaacgaacacggaacaacccaggcagaagcatcacttatggtggttccatttgaaaccaatactaaggccgagacagtcacacttccagacgcggcacagaatgacgacagatcaaaacgtgatgggtccgagactggactcctctcttctttcccagtcaaagttcatccaagcgccgtggaaagtgcacctgagaagaatgccagtggtatctccgtgcctgacgcaccgatcattctctcccccccacagacccatacaccagatacctataacctggtatggcgggctggaaaggatggcggactgcctatcaacgcttatttcgtcaaatacaggaagctggacgacggtgtcggcatgctgggctcatggcacactgttcgtgtgccaggatccgagaatgaactgcacctggcagagctcgaaccttcaagcttgtatgaagttctcatggtagcccgttccgcggcaggcgaagggcagccagccatgttgacgttccggacaagtaaggaaaagacagcttcctcaaaaaatacccaggcttcttcacctccagttgggatccccaagtaccctgtggtaagcgaggccgcaaacaataatttcggggtcgtgctgacagattccagcaggcactccggagtccctgaagcacccgatagacccacgatcagcacagcttctgagacatccgtttatgtgacctggattcccagggccaacggaggcagtcccataacagcattcaaagtcgaatacaaaaggatgaggacatctaattggctggtcgctgcagaagatatcccgccaagtaagttgtccgtggaagtgcgatctctcgagcctgggtcaacctacaaatttcgagtcatcgcgatcaaccactatggggaaagcttcaggtcttctgcaagccggccatatcaggttgtggggtttcctaataggttcagcagcagacccatcaccggtccgcacatcgcctacactgaggcagtgagcgacactcagatcatgcttaaatggacgtacatcccatcctcaaacaacaacacccctattcaaggcttttacatctattaccgaccgacggatagtgataacgattctgattacaagcgagatgtcgtcgagggatccaagcaatggcacatgattggtcatttgcagcccgaaacaagctacgatatcaagatgcagtgttttaatgagggtggcgagagcgagttctccaacgtgatgatttgcgagaccaaggtcaaaagagtgcctggagctagcgaatatcccgtgaaagacctcagcactcccccaaatagcctcggaagtgggggaaacgttgggccagccactagccctgctagatcttccgacatgctatacctgatcgttgggtgtgtgctgggggtgatggtccttattctaatggtgttcatcgcaatgtgtctctggaagaatcggcaacagaacaccattcagaaatacgaccctccgggatatttgtaccagggttctgatatgaacggtcagatggtggactatacgaccctctcaggggcttctcagatcaacggaaacgtccatgggggattccttaccaacgggggacttagctcgggatatagccatcttcatcacaaggttcctaatgctgtaaatggaatagtaaatggttccttaaacggcggactgtattcgggacactctaattccttgaccaggactcatgtcgattttgaacacccccaccacctagtgaacggagggggtatgtacaccgctgtaccacagatagatcctctagaatgcgtcaattgtcggaactgtaggaataataataggtgtttcacaaaaactaattcaaccttttcctctagccctcctcctgtggttccagtcgtggccccatacccacaggatggactggagatgaaacccctgtcgcacgtcaaagttccagtatgtctcacctctgcagtgcccgattgcggacagctacctgaggaaagtgtgaaggataatgtggaacctgtacccacccagagaacctgttgccaggatatcgtgaatgacgtgagttccgatggcagcgaggaccctgcggaattctcgaggggacaggagggtatgattaacctgcgaatccccgaccacctgcagctcgctaagagctgcgtttgggaaggggatagttgcgcccacagtgagactgagatcaatatagtgagctggaatgcactaatcttaccccctgtgccagagggctgtgctgaaaagacaatgtggagccctccaggcattcccctagactctccaaccgaggtgctgcagcaacctcgcgagacgtag

SEQ ID NO: 339753 - DNA, 9138 bp, Artificial Sequence
  derived and/or modified sequence
gtctctccaagggaatgaaaggtgaggggagcgtgagtgcaggcatgatgggaatctccgtgacttgtgaaccaaggactgggttttgctctggaagcctgtcctgattgcttctgtaatctggcgctatgcatccggatcttggacccttatgtacactgctgtatgttactcttacaattctgtgctcttctgtgagttcagacttggcaccttattttacttctgagccgctctctgctgtccagaaacttggtggacctgtagtactgcattgttctgctcaacctgtgaccactcgtatctcatggctgcataacggaaaaacattggatggaaacctggaacatgttaagattcatcaggggactctgacaattctttctctcaactcctctcttttgggttactaccagtgccttgccaacaatagcatcggtgccattgtgagtggccctgcgacagtatctgtggcagttcttggtgattttggttcatccacaaagcatgttattacagcagaagaaaaaagtgctggtttcattggctgcagggtaccggagagtaaccccaaagctgaggtgcgctataaaatccggggaaaatggctggaacattccacagagaattacttaatccttccatcaggaaatcttcagattttgaatgtatccttagaggacaagggatcatacaaatgtgcagcttataatcctgtcacacatcaattaaaagttgaacctattggccgaaagctccttgtgagtcgtccttcttcagatgatgttcacattcttcaccccacccattcacaggcattagctgttctttctcgtagccctgtaaccttggagtgtgtggtgagtggggtcccggctcctcaagtgtattggctaaaggacgggcaggacattgcaccaggaagcaactggagaaggttgtattctcatcttgccactgatagcgttgacccggcggactccggaaactattcctgcatggcgggaaacaagtctggagatgtaaaatatgtgacttacatggttaatgtacttgaacatgcttccatttctaaaggactacaggatcagatagtgtctctgggtgccacagtacactttacctgcgacgttcatgggaacccagcccccaactgtacctggtttcacaatgcacagcctattcatccttctgcacgacatctaactgcaggaaacggactgaaaatcagtggggttactgtggaagatgttgggatgtatcagtgtgtagcagataatgggattggatttatgcactctactggaagacttgaaattgaaaatgacggtggattcaagccagttataattacggcaccagtaagtgcaaaggttgcagacggagactttgttactctgtcctgcaatgccagtgggctgccggttccggtcattcgttggtatgacagccatggattgataaccagccatccatctcaagtcctgagatcgaaatcccgaaaatcacagttatcaagacctgagggcttgaacctggagcctgtgtacttcgtcctgtcccaagctggtgcaagctctctccatattcaggctgtgactcaggaacatgcggggaaatacatctgcgaagctgcaaatgaacatggtaccacacaggcagaagcatctctcatggttgttccttttgaaacaaatacaaaagcagagacagtcacacttcctgatgctgctcagaatgatgacagaagtaagagagatggttcagaaactgggttactgagctcatttccggtgaaggtccatcccagtgcagtggaatcagcaccagagaaaaacgccagcggcatctctgttcctgatgcccccatcatactgagccccccacagacccacacaccagacacgtacaacctggtgtggagggcaggcaaggatggtgggctgcccatcaatgcttactttgtgaagtatcgaaagctggatgatggggttggcatgctgggaagctggcacacggttcgagtcccaggaagtgaaaatgagctccatttagctgagctggagccatctagtctttatgaagtcttgatggtagcaagaagcgcagcaggtgaaggccaacctgccatgcttaccttccgaaccagcaaagaaaaaacagcgtcatcaaaaaacacccaggcatcctctccacccgtgggcatccctaagtatcccgttgtttcagaggctgcaaacaacaattttggagtggtacttacagattcctctaggcacagtggagttccagaggcaccagatcggcctaccatctccactgcatcagagacatcagtctatgtcacttggattcctcgggcaaacgggggttctccaatcactgccttcaaagtcgaatataaacggatgaggaccagcaattggctggtggcagctgaagacatccctccttccaaactttcagtggaagttcgtagtttagaaccaggttcaacatacaaatttagggtcattgccatcaaccattatggtgagagttttcggagttcagcatctcgtccttatcaagtggttgggttccccaatcgcttttccagccgtccaataactggacctcacattgcatacacagaggctgtcagcgatactcagatcatgctaaagtggacgtacattccatcaagtaacaataacactcccattcaaggattttatatctattaccgaccaacagatagtgacaatgacagtgattacaagagggatgttgtagaaggttcaaagcagtggcacatgattggccacctgcagccagaaacctcctatgacattaaaatgcaatgcttcaatgaaggaggagaaagtgaatttagcaatgtgatgatctgcgagactaaagtgaaacgtgttcctggagcttctgaatatcctgtcaaagacttgagtacccctccaaattctttgggaagtggaggaaatgtggggcctgcaaccagccctgccagaagcagtgacatgttatatctgatcgttggctgtgtgctgggcgtcatggtcctcattctgatggttttcattgcaatgtgcctgtggaagaatcgccagcagaataccatacaaaaatatgacccaccaggatatctctaccaaggatcagatatgaacgggcagatggtggactacaccactctctcaggagcaagtcagataaatggaaatgttcacggaggcttcctaaccaatggcggtctcagcagtggctattcccaccttcaccataaggtccccaatgcagtcaatggaattgtgaatgggagcctaaatggagggctttactccgggcacagcaactctctaaccaggacacacgtggattttgaacatcctcatcatctagtgaatggtggtggaatgtacacggccgtgcctcagattgaccctctggagtgtgttaactgccgaaattgtcgaaacaacaataggtgtttcaccaaaaccaacagcactttcagcagcagccctcctcctgtggtccctgtggtagcaccttatcctcaggatggtttggaaatgaagcccctcagtcacgtgaaggtgcctgtatgcctgacttccgcagtccctgattgtggccagttgccggaggagagcgtcaaggacaatgtggaaccagtccctactcagcgtacctgctgtcaggacattgtaaatgacgtcagctctgatggctcagaagatccagcagagttcagcagaggtcaggaaggcatgatcaaccttaggattccagatcatcttcagttagctaagagctgtgtatgggaaggagacagctgtgcccattcagaaacagagatcaacattgtaagttggaatgctcttattttgccacctgtccccgagggctgtgctgagaagacaatgtggtctccacctggcattcctttagacagcccgacagaggtccttcagcagccccgggaaacctgaggacatgcaaacaaccagtcatgttccaacttcaagccggtaactgcacacaacaggcctgggagcgaactgtgtgaaggaccttaattcaaatcagagaaaatcattatttatttttttgtagtagtaatgtcatatgaatgtatcttaaaacgtgtgcccttttatattatttatgccttaaatgttttcttccccattccttcctccccctcggtaggaaacaaccttgttttgcatagtattcagtcacctggagggcagaggggtccttccatgttttctaacagctatagtgacagcaagagctcctcatgcaaaggatcccatctcttggctgcttcggctaggagggaatgcaggggcccgttgaaggttgccaccagctgggttttcaggtggaaaatggtctttcaatagtgtattctcagacttttttttgtttgttttttgagatggagtcttgctgtcatccaggctggagtgcaatggctcgatcttggctcactgcaacctccgcctcccaggttcaagcaattctcccgcctcagcctcctgagtagctgggactacaggcacctgccaccacgtccagctaattgtcttgtatttttattagagacaaggtttcaggctggttttgaactcctgacctcaagtgatccacccgcctccgcctcccaaagtgcgaggattacaggcgtgagccaccacgtctggcctgtattatcagacttcctgagaacactttgaaatcaactgcagttgtgacccatgtttataataacagacctggctgacggattttacaagagtgccttccacagaagtggtaatgtgacctgttgactttgtatctgcacgtgggcacgagtgatgttcagtttgctaggcactagtcatagtgttatggacgtggtggagtgtaaggtcttgatgaattacggcagtatgcagaaaaggaaccaaggccagagagacaaataatgcctcatgtcccactgctttaaaattacattaatttataaaatggccactatgggctctttttgactgtttctcggagtaggaacaaaataagacattaaatggtggcttgaagagaaagatacacattttcagaagaaagaaaggggagggctgcagggagcctgtcttggcgggagctctccagtctgttggattagcacagggacacgcttatggtgccatgacgccgaaactagtcatcccccatctccagcataggcaacggcctgcaggggtgagtgtcagaaaagacttactttggaagaaaagggtttttttttgtttgtttgttttttgtttttttttgtttgtttgttttgggtttttttcctgaaatttcctgatacctttttcagaatgtcacccttgtaaataggcacctaaagccaagttggtcagcagagctcctgaccacggctgcctctgcgtgacaaggacatttgcagctgcctttggaaggctcttcacattaaaaaacaataattatgtaagtgtgtttcatagcttgagtcaagctttcaaggatcactgctcctttgtgcattgtgcatccctttggggaaagaaacagaaaattattctctttctatagagtcaagcaattccagcagaagtgaagaaatgttagtttcccagaaatcgcagtggaatagaatacaatactgtgttaaccaactttctgtataaatgcatcagtattcccttacatatgtctatatattttataatagaactgttagtgaaaatgtgcttgtttaagctgggtcactatgcaagagttacttccagtagaatgtagtgaatgtaattccctagtcggatattagggatgctgtagacccaagttctacattccagatgtccgtgcctatagtatactggatttattcttcatgttgcttaaatgcagttagctctggagggggatagctgcatcccttacttctgtgactagcaaaggacaaagtcccagcgcacagaatatgaaaacataccctgtgttagccaatcaagttacagcaatgctgtcacaaagggagttttagaaaactggggagtcattgtccgtagacagccattttgatttaggaaacaggtgtattagcatgagccttaggtcatgaactgcttttaaagattgagtttgaatatgggatctgtccacgaggaagagaaaatggctttacctttaggacaatctcattgtggactgctttatttatattattagtaacgctgttttaagtgttattctttttattgtattttatttataaaaaatgcctttatatattgaaatatataaatatatatatataaacacacacacacacacacacacacacatatatatatatatatataattgcctttatatttaggcggtatgagttctccctaagcgtgagttggctctgccctgcacaggcacccaaacagtcctacctaatgtcacttcaccaggaaatgagaggacatggtacagtgtgggagacagcactaacacgtgctgaataactactgtgtaccaggcactgtgctcggtgcttgttactgttaactcatttaacccccacaactcatctacaaagttggcattaaaatccccaagtcactcagtgagccatgggacctgaatccgaacctagtttatctggagccataatctgggctcctcccatttttccatactgctttccaaaagcattgtggttcactctttggatggaaccagtcccgttccgtatgctgtgatctatccctgccgtggaattcctccgaggctccaactccgcagccagagaagctgctctctggcctccgcgggcagagctctgcttatgacttcgtcttccagaggtccacatttctccccttgacgccccctgtctaccacctccacctggaaatttgatctttactgtgctcagtgatcacgaaattggtcaagcctattcatgttccttctcatctagaattctgtgtgattgttttagcataaactgccccgctcccactgtatcatttcacgatctccttttaatgtttttctttcagttttgcactgacagtctggtgacaggtgctgccagggtgcaagttacattgcaatgttctaaaccttttgaagtgttcttagcaaaagcctttctttctgggtgtttttgtcgaatgagtctatgaagactcaatgcatccatcttgggctgatcatgccacagatctcattccagctatagtactgccaagaagtgaagtttatcattgaattttacctgtgttgctctcttttaaagtaatgactttgagatgcatgctttgtatcatattgaaaagtatgttttattttccttaaagttgtaatattgtgtgtgaaactgtacatattttaaatgatgtagctttggcaggttttatttggttgatatgattttatattaaaagagaaggctgctttcatatagcatagcccctgaaggtgggaatactccctgtttgtacaacgctgcttatagtttgtgattggggtgggcgaatgtcttcctctgaaattctttggaaccccccacccctgtcctcccctgaaactcccctgtgcacacccctctgttctgactgcagagatcaaggccctgaaggagcaggatcttgggcaagtgttttaggggacgctgagaacatacctgaccctgggggcgatgtggaggcaggcccacctcctcggggcaactttgcgtttccttggagggaagggaggtgggtaggagaggagcttgggaggatgaggaggagcggtcccgcctcacacattgtctatttttaccattaaccgagcgccacatgtttatgaacttcaggatagaaatttagcctccttgtgaaaacgttttgttttactgccctaagaaaatacacatctctaggcttgtctgaccagaaagccagcaaagtcttttgcatcgggtgtggcccttttgtattttatttcccatatttaaataagccttccttaaaccctagccccagtcctgagagctttgagggtagccgaaaccccttatctaataaagtctaactctgtgagaaccacagaatcttcttaagcttctcaattttctgtctcctttcaggcgccacgtcccttgtgctggcgggtcccccgttggctttcttgccgtttcttctcatctgtgtctcctgcagaggcggctcggagtcccgagtcttctagtcagttgaacaagcattcatttgtgttttcacccagattacagacacacacacaaacagacacacacacttggagctagtgagtcatgctggcagctgacattgtgactctggaacagccccggtgctctgtgggccagctcccccagcctgggggcgggaagctacatctgcagtacctctgctccgtatcttgtgggctgcgactcctggagtcggaccactgcagcgtcagtgatgttcgtaagctatggttgagcaaaggaacacacacctacacaccttgcttcttcccactagccaaacctgggacccagccatcagcctgtctctgtgggagtcgcaatggaagtagccctctattggcgtgaacatcagctctgatttatttaggaattgctccatccacagactttttttctggaagcagctagcttgctcatacttctatagcaccacagatccttcccagtaccatggctttcacttgccctcagacacccagagatccctgtctccccattgtgggtcctcttccttgtcctgccacctctgtcttccacaaggtgggccagggcttctcttgtaaccatgtcacttagggacactgcagctgggccttgtaccagttgtgaagactgggtattaagtgaaagtggtagttggtgtcttagctacgttggttttatgaccaaagtctgacagaagggctcttcccaaatcccacctgccctccctaagcctatttgcatcttcctctttgggccttatggtgttgcagtcactgtgatggtgacattcactggagaatccgtggtttcttgtgcaggatccaaacctggggtggtggttggtgtttcaaggcctatgaagagcatatgtgggc

SEQ ID NO: 339754 - DNA, 3864 bp, Artificial Sequence
  derived and/or modified sequence
atgcaccccgacctgggccccctgtgcaccctgctgtacgtgaccctgaccatcctgtgcagcagcgtgagcagcgacctggccccctacttcaccagcgagcccctgagcgccgtgcagaagctgggcggccccgtggtgctgcactgcagcgcccagcccgtgaccaccagaatcagctggctgcacaacggcaagaccctggacggcaacctggagcacgtgaagatccaccagggcaccctgaccatcctgagcctgaacagcagcctgctgggctactaccagtgcctggccaacaacagcatcggcgccatcgtgagcggccccgccaccgtgagcgtggccgtgctgggcgacttcggcagcagcaccaagcacgtgatcaccgccgaggagaagagcgccggcttcatcggctgcagagtgcccgagagcaaccccaaggccgaggtgagatacaagatcagaggcaagtggctggagcacagcaccgagaactacctgatcctgcccagcggcaacctgcagatcctgaacgtgagcctggaggacaagggcagctacaagtgcgccgcctacaaccccgtgacccaccagctgaaggtggagcccatcggcagaaagctgctggtgagcagacccagcagcgacgacgtgcacatcctgcaccccacccacagccaggccctggccgtgctgagcagaagccccgtgaccctggagtgcgtggtgagcggcgtgcccgccccccaggtgtactggctgaaggacggccaggacatcgcccccggcagcaactggagaagactgtacagccacctggccaccgacagcgtggaccccgccgacagcggcaactacagctgcatggccggcaacaagagcggcgacgtgaagtacgtgacctacatggtgaacgtgctggagcacgccagcatcagcaagggcctgcaggaccagatcgtgagcctgggcgccaccgtgcacttcacctgcgacgtgcacggcaaccccgcccccaactgcacctggttccacaacgcccagcccatccaccccagcgccagacacctgaccgccggcaacggcctgaagatcagcggcgtgaccgtggaggacgtgggcatgtaccagtgcgtggccgacaacggcatcggcttcatgcacagcaccggcagactggagatcgagaacgacggcggcttcaagcccgtgatcatcaccgcccccgtgagcgccaaggtggccgacggcgacttcgtgaccctgagctgcaacgccagcggcctgcccgtgcccgtgatcagatggtacgacagccacggcctgatcaccagccaccccagccaggtgctgagaagcaagagcagaaagagccagctgagcagacccgagggcctgaacctggagcccgtgtacttcgtgctgagccaggccggcgccagcagcctgcacatccaggccgtgacccaggagcacgccggcaagtacatctgcgaggccgccaacgagcacggcaccacccaggccgaggccagcctgatggtggtgcccttcgagaccaacaccaaggccgagaccgtgaccctgcccgacgccgcccagaacgacgacagaagcaagagagacggcagcgagaccggcctgctgagcagcttccccgtgaaggtgcaccccagcgccgtggagagcgcccccgagaagaacgccagcggcatcagcgtgcccgacgcccccatcatcctgagccccccccagacccacacccccgacacctacaacctggtgtggagagccggcaaggacggcggcctgcccatcaacgcctacttcgtgaagtacagaaagctggacgacggcgtgggcatgctgggcagctggcacaccgtgagagtgcccggcagcgagaacgagctgcacctggccgagctggagcccagcagcctgtacgaggtgctgatggtggccagaagcgccgccggcgagggccagcccgccatgctgaccttcagaaccagcaaggagaagaccgccagcagcaagaacacccaggccagcagcccccccgtgggcatccccaagtaccccgtggtgagcgaggccgccaacaacaacttcggcgtggtgctgaccgacagcagcagacacagcggcgtgcccgaggcccccgacagacccaccatcagcaccgccagcgagaccagcgtgtacgtgacctggatccccagagccaacggcggcagccccatcaccgccttcaaggtggagtacaagagaatgagaaccagcaactggctggtggccgccgaggacatcccccccagcaagctgagcgtggaggtgagaagcctggagcccggcagcacctacaagttcagagtgatcgccatcaaccactacggcgagagcttcagaagcagcgccagcagaccctaccaggtggtgggcttccccaacagattcagcagcagacccatcaccggcccccacatcgcctacaccgaggccgtgagcgacacccagatcatgctgaagtggacctacatccccagcagcaacaacaacacccccatccagggcttctacatctactacagacccaccgacagcgacaacgacagcgactacaagagagacgtggtggagggcagcaagcagtggcacatgatcggccacctgcagcccgagaccagctacgacatcaagatgcagtgcttcaacgagggcggcgagagcgagttcagcaacgtgatgatctgcgagaccaaggtgaagagagtgcccggcgccagcgagtaccccgtgaaggacctgagcaccccccccaacagcctgggcagcggcggcaacgtgggccccgccaccagccccgccagaagcagcgacatgctgtacctgatcgtgggctgcgtgctgggcgtgatggtgctgatcctgatggtgttcatcgccatgtgcctgtggaagaacagacagcagaacaccatccagaagtacgacccccccggctacctgtaccagggcagcgacatgaacggccagatggtggactacaccaccctgagcggcgccagccagatcaacggcaacgtgcacggcggcttcctgaccaacggcggcctgagcagcggctacagccacctgcaccacaaggtgcccaacgccgtgaacggcatcgtgaacggcagcctgaacggcggcctgtacagcggccacagcaacagcctgaccagaacccacgtggacttcgagcacccccaccacctggtgaacggcggcggcatgtacaccgccgtgccccagatcgaccccctggagtgcgtgaactgcagaaactgcagaaacaacaacagatgcttcaccaagaccaacagcaccttcagcagcagccccccccccgtggtgcccgtggtggccccctacccccaggacggcctggagatgaagcccctgagccacgtgaaggtgcccgtgtgcctgaccagcgccgtgcccgactgcggccagctgcccgaggagagcgtgaaggacaacgtggagcccgtgcccacccagagaacctgctgccaggacatcgtgaacgacgtgagcagcgacggcagcgaggaccccgccgagttcagcagaggccaggagggcatgatcaacctgagaatccccgaccacctgcagctggccaagagctgcgtgtgggagggcgacagctgcgcccacagcgagaccgagatcaacatcgtgagctggaacgccctgatcctgccccccgtgcccgagggctgcgccgagaagaccatgtggagcccccccggcatccccctggacagccccaccgaggtgctgcagcagcccagagagacctag

SEQ ID NO: 339755 - protein, 1264 aa, Artificial Sequence
  derived and/or modified sequence
MHPDLGPLCTLLYVTLTILCSSVSSDLAPYFTSEPLSAVQKLGGPVVLHCSAQPVTTRISWLHNGKTLDGNLEHVKIHQGTLTILSLNSSLLGYYQCLANNSIGAIVSGPATVSVAVLGDFGSSTKHVITAEEKSAGFIGCRVPESNPKAEVRYKIRGKWLEHSTENYLILPSGNLQILNVSLEDKGSYKCAAYNPVTHQLKVEPIGRKLLVSRPSSDDVHILHPTHSQALAVLSRSPVTLECVVSGVPAPQVYWLKDGQDIAPGSNWRRLYSHLATDSVDPADSGNYSCMAGNKSGDVKYVTYMVNVLEHASISKGLQDQIVSLGATVHFTCDVHGNPAPNCTWFHNAQPIHPSARHLTAGNGLKISGVTVEDVGMYQCVADNGIGFMHSTGRLEIENDGGFKPVIITAPVSAKVADGDFVTLSCNASGLPVPVIRWYDSHGLITSHPSQVLRSKSRKSQLSRPEGLNLEPVYFVLSQAGASSLHIQAVTQEHAGKYICEAANEHGTTQAEASLMVVPFETNTKAETVTLPDAAQNDDRSKRDGSETGLLSSFPVKVHPSAVESAPEKNASGISVPDAPIILSPPQTHTPDTYNLVWRAGKDGGLPINAYFVKYRKLDDGVGMLGSWHTVRVPGSENELHLAELEPSSLYEVLMVARSAAGEGQPAMLTFRTSKEKTASSKNTQASSPPVGIPKYPVVSEAANNNFGVVLTDSSRHSGVPEAPDRPTISTASETSVYVTWIPRANGGSPITAFKVEYKRMRTSNWLVAAEDIPPSKLSVEVRSLEPGSTYKFRVIAINHYGESFRSSASRPYQVVGFPNRFSSRPITGPHIAYTEAVSDTQIMLKWTYIPSSNNNTPIQGFYIYYRPTDSDNDSDYKRDVVEGSKQWHMIGHLQPETSYDIKMQCFNEGGESEFSNVMICETKVKRVPGASEYPVKDLSTPPNSLGSGGNVGPATSPARSSDMLYLIVGCVLGVMVLILMVFIAMCLWKNRQQNTIQKYDPPGYLYQGSDMNGQMVDYTTLSGASQINGNVHGGFLTNGGLSSGYSHLHHKVPNAVNGIVNGSLNGGLYSGHSNSLTRTHVDFEHPHHLVNGGGMYTAVPQIDPLECVNCRNCRNNNRCFTKTNSTFSSSPPPVVPVVAPYPQDGLEMKPLSHVKVPVCLTSAVPDCGQLPEESVKDNVEPVPTQRTCCQDIVNDVSSDGSEDPAEFSRGDSCAHSETEINIVSWNALILPPVPEGCAEKTMWSPPGIPLDSPTEVLQQPRET

SEQ ID NO: 339756 - DNA, 3795 bp, Artificial Sequence
  derived and/or modified sequence
atgcaccccgacctgggacctctgtgcactctactatacgtgactcttaccatcctttgctcgagcgtgtcttcggacctggcgccatattttacttccgaaccactctctgccgtgcagaaacttggagggcctgttgttctgcattgctccgcacagcctgtgacaactcgcatcagttggctgcacaatggaaaaactctcgatggtaacctggaacacgtaaaaattcaccaaggaacattgactatcttatccttaaactcctctctactgggctactaccaatgtctagcaaataatagcatcggagcaatagtctcaggaccggcgactgtctctgtagccgtcctcggagattttggtagttcaacaaagcacgtgataaccgcagaagagaagtctgcaggcttcatcggatgtcgggtcccggaatctaatcccaaggccgaggtgaggtacaagattcgcggcaaatggttagagcacagtaccgagaattatctgatcctcccaagcgggaacttgcagatccttaatgtctcactggaggataagggctcttataagtgcgccgcttacaatcccgtcacccaccagctgaaagtcgaacccatcgggagaaaactgctagtcagccgcccttcgagcgacgacgttcacatacttcacccaacacattctcaggccttggctgtcctgtctagaagtccagtcacgctggagtgcgttgtgtctggggtacctgcaccccaggtatattggctcaaggacggccaagatatcgcacccggttctaactggcgtcggctgtatagccatttggcaacggatagcgtggacccagcagactccggaaactattcgtgtatggcgggaaataagtcgggagacgtcaaatacgtgacgtacatggtaaacgtgctcgaacacgctagtatttccaaggggcttcaggatcaaattgttagtcttggtgctacagttcactttacctgtgacgttcacggcaacccagcccccaactgcacctggttccataacgcccaacccatccacccgtccgccaggcaccttactgcgggcaacggtctgaaaatctcaggcgtgacagtggaggacgtaggcatgtatcagtgcgtcgccgataatgggattggctttatgcattctacgggtcgactcgagatagaaaatgatggtgggttcaaacctgtgatcataacggcgcctgtgagtgcaaaagttgccgacggtgatttcgtgacattgtcctgcaacgccagcggcctgcctgttcctgtgatccgctggtacgattctcatggcctgattacgtcccatccatctcaagtgcttaggtccaaatctcgcaagagccagctgtctcgtcccgaggggcttaacttggaacctgtgtactttgtgctgtcccaggccggcgcttcctctctccacatccaggccgtaacgcaggaacatgccgggaaatacatctgtgaggccgctaacgaacatggaactactcaagccgaagctagcctgatggtagtcccattcgaaacaaacactaaggccgaaactgttaccctgcccgatgcggcccagaacgatgacagatctaagcgcgacgggtcagagactggcctcctgtctagctttcccgttaaggtccacccatcagctgttgagagtgctcccgagaaaaatgcttccggaatatctgtgcctgatgctccaatcattctgtccccccctcaaacacacaccccagacacctataatctcgtgtggagagccggaaaggatggcgggctcccaataaatgcttactttgttaagtatcgcaagcttgacgatggagtcggtatgctcggcagctggcacacagtgagagtacctggatctgagaacgagctgcatctggccgagctagagcctagctccttatacgaggttctaatggtagctcgctcggctgctggagaagggcagcccgcaatgctgacctttcgtacatccaaagagaaaactgcttcaagcaaaaacacccaggccagctccccgcctgtgggaatacccaagtacccggtcgttagcgaagctgccaacaataattttggcgtcgtactgacggacagcagtaggcactcaggagtcccagaggccccagacagaccgactatctccacggctagcgaaaccagtgtttatgtgacttggattccacgagcgaatggagggtccccaattacagcatttaaggtggagtataagcgcatgcgcacctctaattggttagttgctgcagaggacatcccaccctctaaactgagcgttgaggtaagaagtcttgaaccaggctcaacatacaaattcagggtaatcgcgatcaaccattatggcgagtctttcagatcctctgcaagtcgcccctatcaggtcgttggcttccccaacagattttcctcgagacctataaccggaccccacatagcctatactgaggctgtgtctgacacccagatcatgctcaaatggacatacattccctctagcaacaataacacccccatacagggcttttacatatattatcgacctactgactctgataacgactccgactataagcgtgacgtagtggaaggaagtaaacagtggcacatgataggacacctgcagcctgaaaccagctatgacatcaaaatgcaatgtttcaacgagggaggtgagagtgagttctccaacgtgatgatctgcgaaaccaaagtcaaaagggtgcccggagcttcagaatatcccgtgaaggatctgtccacccccccaaactcattgggatccggaggcaatgtcggacccgctacctctcccgcgagaagttccgacatgctgtacctgatcgtagggtgcgtactgggcgtgatggtcctgattctgatggtcttcatcgcaatgtgtctgtggaaaaacagacagcagaacaccatacagaagtacgatccgccaggctacctgtaccagggatcagatatgaacggccagatggtagactacactaccctaagtggggctagccagatcaacggtaatgtccatggaggcttcttaactaacggtggactgagttctggctatagccacctccaccataaagtgcccaatgccgtgaatggaatcgtcaatggaagcctcaacggcggtctctactctggccactctaacagcctgacccggactcacgtcgatttcgagcatccacaccatcttgttaatggaggtggcatgtacactgctgttccccagattgatcccctggaatgtgtgaattgtaggaattgcaggaacaacaacagatgttttaccaagacaaattccacattttcttcatctccaccaccagtggtaccagttgtggcgccatatccgcaggacggtttggagatgaagcccctgtctcacgtgaaagtgcccgtgtgcctcacatccgccgtgcctgattgcggtcaactcccagaagagtccgtgaaggataacgtagaacctgtccccacacagagaacctgttgtcaagacatagtgaacgatgtgtcaagcgatgggtccgaggatcctgcggaatttagccggggagattcctgcgcccatagtgaaacagaaatcaatatcgtatcttggaacgctctgatcctcccacctgtcccggagggttgtgccgaaaaaaccatgtggagcccccccggtatcccattggattcaccaaccgaggtgcttcagcaaccaagggagacatag

SEQ ID NO: 339757 - DNA, 3795 bp, Artificial Sequence
  derived and/or modified sequence
atgcacccagacctgggccccctgtgcaccctgctgtatgtgaccctgaccatcctgtgcagctctgtgtccagtgacctggccccctacttcaccagcgagcccctgtctgctgtgcagaagctgggcggccctgtggtgctgcactgcagcgcccagcctgtgaccacccgcatctcctggctgcacaacgggaagaccctggatggcaacctggagcacgtgaagatccaccagggcaccctgaccatcctgagcctgaacagcagcctgctgggctactaccagtgcctggccaacaacagcattggagccatcgtgtctggccctgccaccgtgtctgtggccgtgctgggggactttggcagcagcaccaagcacgtgatcacagctgaggagaagtctgctggcttcatcggctgccgggtgcctgagagcaaccccaaggccgaggtgcgctacaagatccggggcaagtggctggagcacagcacagagaactacctgatcctgcccagcggcaacctgcagatcctgaatgtgtccctggaggacaagggcagctacaagtgtgccgcctacaaccctgtgacccaccagctgaaggtggagcccatcggcaggaagctgctggtgtcccggcccagcagtgatgatgtgcacatcctgcaccccacccacagccaggccctggccgtgctgagccgcagccctgtgaccctggagtgtgtggtgtctggagtgcctgccccccaggtgtactggctgaaggatggccaggacatcgcccctggcagcaactggaggcggctgtacagccacctggccacagattctgtggaccctgctgacagcggcaactacagctgcatggccggcaacaagtctggagatgtgaagtatgtgacctacatggtgaatgtgctggagcacgccagcatcagcaagggcctgcaggaccagatcgtgtccctgggcgccaccgtgcacttcacctgtgatgtgcacggcaacccagcccccaactgcacctggttccacaatgcccagcccatccaccccagcgcccggcacctgacagctggaaatggcctgaagatcagcggcgtgacagtggaggatgtgggcatgtaccagtgtgtggccgacaatggcatcggcttcatgcacagcacaggccgcctggagattgaaaatgatggcggcttcaagcctgtgatcatcacagcccctgtgtctgccaaggtggctgatggagactttgtgaccctgagctgcaatgccagcggcctgcctgtgcctgtgatccgctggtatgacagccacggcctcatcaccagccaccccagccaggtgctgcggagcaagagcaggaagagccagctgagcaggcctgagggcctgaacctggagcctgtgtactttgtgctgagccaggccggggccagcagcctgcacatccaggccgtgacccaggagcacgccggcaagtacatctgtgaggccgccaatgagcacggcaccacccaggccgaggccagcctgatggtggtgccctttgagaccaacaccaaggccgagaccgtgaccctgcctgatgctgcccagaatgatgacaggagcaagagagatggcagcgagaccggcctgctgagcagcttccctgtgaaggtgcaccccagcgctgtggagagcgcccctgagaagaatgccagcggcatctctgtgcctgatgcccccatcatcctgagccccccccagacccacaccccagacacctacaacctggtgtggagggctgggaaggatggcggcctgcccatcaatgcctactttgtgaagtacaggaagctggatgatggagtgggcatgctgggctcctggcacacagtgcgggtgcccggctctgaaaatgagctgcacctggccgagctggagcccagcagcctgtatgaggtgctgatggtggcccggtctgctgctggggagggccagcctgccatgctgaccttccgcaccagcaaggagaagacagccagcagcaagaacacccaggccagcagcccccctgtgggcatccccaagtaccctgtggtgtctgaggccgccaacaacaactttggagtggtgctgacagacagcagccgccacagcggcgtgcctgaggccccagaccggcccaccatcagcacagccagcgagacctctgtgtatgtgacctggatcccccgggccaacggcggcagccccatcacagccttcaaggtggagtacaagaggatgaggaccagcaactggctggtggccgctgaggacatcccccccagcaagctgtctgtggaggtgcgcagcctggagcccggcagcacctacaagttccgggtcatcgccatcaaccactatggagagagcttccgcagcagcgccagccggccctaccaggtggtgggcttccccaaccgcttcagcagccggcccatcaccggcccccacatcgcctacacagaagctgtgtctgacacccagatcatgctgaagtggacctacatccccagcagcaacaacaacacccccatccagggcttctacatctactaccggcccacagacagcgacaatgacagcgactacaagagagatgtggtggagggcagcaagcagtggcacatgattggccacctgcagcctgagaccagctatgacatcaagatgcagtgcttcaatgaaggaggagagagcgagttcagcaatgtgatgatctgtgagaccaaggtgaagagggtgcctggggccagcgagtaccctgtgaaggacctgagcaccccacccaacagcctgggcagcggcggcaatgtgggccctgccaccagccctgcccggagcagtgacatgctgtacctgattgtgggctgtgtgctgggcgtgatggtgctgatcctgatggtgttcatcgccatgtgcctgtggaagaaccggcagcagaacaccatccagaagtatgaccccccaggctacctgtaccagggcagtgacatgaatggccagatggtggactacaccaccctgagcggggccagccagatcaatggaaatgtgcatggaggcttcctgaccaatggaggcctgagcagcggctacagccacctgcaccacaaggtgcccaatgctgtgaatggcatcgtgaatggcagcctgaatggaggcctgtacagcggccacagcaacagcctgaccaggacccacgtggactttgagcacccccaccacctggtgaatggaggcggcatgtacacagctgtgccccagattgaccccctggagtgtgtgaactgcaggaactgcaggaacaacaaccgctgcttcaccaagaccaacagcaccttcagcagcagccccccacctgtggtgcctgtggtggccccctacccccaggacggcctggagatgaagcccctgagccacgtgaaggtgcctgtgtgcctgaccagcgctgtgcctgactgtggccagctgcctgaggagagcgtgaaggacaacgtggagcctgtgcccacccagaggacctgctgccaggacatcgtgaatgatgtgtccagtgatggctctgaagatcctgctgagttcagcagaggagacagctgtgcccacagcgagacagagatcaacatcgtgtcctggaatgccctgatcctgccccctgtgcctgagggctgtgccgagaagaccatgtggagccccccaggcatccccctggacagccccacagaggtgctgcagcagccccgggagacctag

SEQ ID NO: 339758 - DNA, 3795 bp, Artificial Sequence
  derived and/or modified sequence
atgcaccccgacctgggccccctgtgcaccctgctgtacgtgaccctgactatcctatgttcttcagtatcctcagacctggctccttatttcactagcgagccattgtcagccgttcagaaattgggggggccggtggttttacactgctctgcccagcctgttaccactaggatctcttggctgcacaatgggaaaactttggacgggaaccttgagcacgtgaaaattcaccagggcactcttaccatcctcagcctcaactcatccctgctggggtattaccaatgcctggccaataactctattggcgctatcgtgtctgggcccgctaccgttagcgtggccgtgcttggggacttcgggtcgtctaccaaacacgtgattacagccgaagagaaatcagccgggtttattggctgtagagtacctgaaagcaatccaaaggccgaagtccgatacaagatccgaggtaagtggctggaacatagtacagaaaactacctcatcctaccttccggaaacctgcagatccttaatgtgagtctcgaggataagggtagctacaaatgcgcagcttacaatcctgttacacatcagcttaaggttgaacctattggcagaaaactactcgtttccagacccagttccgacgacgtacatatattgcacccaacccatagccaagcattggcagtgctgtctcggtcacctgtgacactggagtgcgtggtgagcggagtgcccgccccacaggtctactggctgaaggacggccaggatatagccccaggctctaattggaggcgcctgtatagccatctagccacagattctgtcgaccctgcagatagtggtaactacagttgcatggccgggaataaaagtggcgatgtaaagtacgtgacctatatggtcaacgtcttggagcacgcatccatttcaaaaggcctgcaggatcaaattgttagcctcggcgcaaccgtccacttcacatgtgatgtgcacggtaatcctgcacctaactgcacatggttccataatgcccagccgattcatccgagtgcgcgccatttgaccgccggcaatggtctcaagatctccggtgttaccgttgaagacgtggggatgtaccagtgtgtggccgacaacggcatcggcttcatgcacagcacaggccggctagaaattgagaatgatgggggattcaagcctgtgatcatcaccgctcccgtgtcagctaaggtagccgatggagacttcgtgactctgtcatgcaatgccagtggcctacccgtgcccgtcatcaggtggtacgatagccacggtttgatcaccagccacccatcccaggtactgcgctctaaatccaggaagtctcagctgagtcgacccgaaggactgaacctcgaaccagtctacttcgttctgtcacaagccggtgcatctagcttgcacatccaagcagtgacccaggagcacgccggcaagtatatctgcgaggcggcaaacgagcatggaaccacgcaagccgaggcctcactcatggtggtgccgttcgaaactaataccaaggccgaaacagtgacgctgcctgatgcagctcagaacgacgaccgcagcaagagggacggctccgagacgggcctacttagctcttttccagtcaaggtgcatccaagtgccgtggagtccgcaccagagaagaatgcaagtggcattagcgtgcctgatgcaccaattattttgagtcccccgcagacacatactcccgacacctacaatctggtgtggagagcgggaaaagatggcggtctgcctatcaatgcgtacttcgtgaagtatcgcaagctggatgacggagtgggtatgctcggatcttggcacacagtgcgagtgccagggtcagaaaacgagctccacctggctgaactggagccctccagcctctacgaagtcctgatggtggcaagatccgccgccggtgagggacagcctgcaatgttaaccttcagaacttcaaaggagaaaacagccagcagtaagaacacccaggcttcaagccccccagttggaataccaaagtacccagtcgtaagtgaggcagctaacaataatttcggagtggtgcttactgattcctcacgccattctggagtcccagaagccccagataggccaactattagtacggcctcagaaaccagcgtctatgtgacttggatacctcgcgcaaacggggggtccccgatcaccgcttttaaagtcgagtacaagagaatgcgaacttccaattggctggtcgctgctgaggacatcccacctagcaaactctcagtggaggtgcgcagcttggagcccggtagcacgtacaagtttagagtcattgcgataaaccactacggagagtcctttagatcaagcgcctctaggccataccaagtcgtaggatttcctaaccgtttctcctccaggccaataaccggcccgcacatcgcctacacggaggctgtgagtgacactcagattatgctgaaatggacatacatcccctcgtcaaacaacaacacacctatccaaggtttttacatttactatcgccccaccgattccgataacgactccgactacaaacgagacgtcgtggaaggatccaaacagtggcacatgatcgggcatctccagccagaaaccagttatgacattaaaatgcagtgtttcaatgagggcggagaatcagaattttctaatgtaatgatatgcgaaaccaaggttaagcgggtgcctggggcgtcagaatatccagtgaaagatctctccacaccgcctaattccctgggcagcggagggaacgtcggcccagccacgtccccagctagatccagcgacatgttgtacctgatcgtgggatgcgtccttggcgtcatggtgctcattcttatggtttttatcgcgatgtgtttgtggaaaaacagacagcagaacacaatccagaaatacgatcctcctgggtatttataccagggatccgacatgaatggacagatggtcgactataccaccctctctggagcctcacagataaatggcaatgtgcacggcggcttcctgacaaatggtggtctttctagcggatacagtcacttgcatcacaaggttccaaatgctgtgaacggcatcgtaaatggatccctgaacggagggttgtattcaggccactcaaactccctgacgcggacacacgtggactttgagcatccacaccacctggtgaatggcggtggaatgtatacagccgtgccacagatagaccctctcgagtgtgtgaactgccggaattgccgcaacaacaataggtgttttactaaaacgaacagtaccttcagttcttcccctcctcctgtggttccggtggtggccccctatccccaagatgggctggagatgaaaccattatcacatgtgaaggtccctgtttgtctaacctcggctgttcctgattgcgggcaactacccgaagagtcggttaaagacaacgtggaaccggtccctacacagaggacatgctgccaggatatagtaaacgacgtaagttctgacggatcagaggatcctgccgaattttcacgtggtgacagctgtgctcactccgagacagagattaacatagtaagctggaatgcactgatcctgccccctgtgccagaaggctgtgcagaaaaaacgatgtggtctcctccgggcatccccctagatagtcctacagaagtgctccagcagccacgggaaacctag

SEQ ID NO: 339759 - DNA, 3795 bp, Artificial Sequence
  derived and/or modified sequence
atgcaccctgacctgggaccgttatgcacgctcctgtatgtcaccctgactatcttatgtagtagtgtttcaagcgatctggctccatacttcacttctgagccactttctgcagtgcagaagctcggcggacccgtggtgcttcactgttctgcccagcctgtcacaaccagaatttcctggctccacaacggcaaaaccctcgacggaaatctggagcacgtcaagattcaccagggcactctgacgatactgagcctgaatagcagcttgctgggatactaccagtgtcttgctaataacagcataggggcaatagtgtctgggcctgccactgtctcagtggcagtgctgggcgatttcggctcatctactaagcatgttataaccgcagaagagaagagcgccggtttcattggctgtcgcgtgccagagagcaacccgaaggctgaagtgaggtacaaaatcaggggcaaatggctagaacatagtactgaaaattatcttattttgccttcaggaaatttgcagattctgaatgtgagcttagaggataagggaagctacaagtgtgctgcctataatcccgtgactcaccagcttaaagtggaacctatcgggagaaagctactggtgtctcgaccttcttccgacgacgtgcacatcctgcatccaactcacagccaggctctggctgtactttcgcggtcccctgtgactctggaatgtgtggtctcaggcgtccccgctccacaggtgtattggttaaaagacggacaggacattgctcctggctccaactggcggcgtctgtattcccacctcgcaaccgactccgtagatcctgctgactctggcaattattcttgtatggccggaaacaagtccggggacgtaaagtacgtcacgtatatggtgaacgttctggagcacgcgtctatttctaaaggtctgcaggaccagatcgtgtcccttggcgctacggttcacttcacctgcgacgtgcacggaaatccagccccaaattgtacctggtttcacaatgcccagcccatccacccttcagctcggcacctaaccgccggtaatggactgaagatcagcggtgtgactgtagaagatgtcggcatgtatcagtgcgtggcagacaacgggattggtttcatgcacagcaccggcaggcttgagattgagaatgacggaggattcaagcctgtgattattaccgcaccagtcagcgccaaggttgccgacggcgactttgtgactctcagctgtaatgctagcggcctgccggtgcccgttatccggtggtatgatagtcatgggcttatcacaagccacccgtcccaggtgcttcgttctaagtccagaaagagtcagctctctagacccgagggattaaatctggaacccgtctatttcgttctgtctcaggccggagcctcatcgctgcatattcaggccgtcacacaggagcatgccggaaagtatatttgtgaggccgctaacgaacacggcaccacccaggctgaagcctccctgatggtagttccatttgagactaatactaaggcagaaaccgtgacgctacctgacgcagcccagaacgacgaccggtccaagcgggatgggtctgaaacaggcctcctctcctcgttccctgttaaggttcaccccagtgcagtcgaatctgctcctgagaagaatgcttcaggtatcagtgtccctgatgcgccaatcatcctgagcccaccccagacccacacccctgacacctacaacctggtgtggagggccggaaaggacggcggacttccgataaacgcatactttgtgaaatatcggaagttagacgacggggtaggcatgctgggttcttggcatactgtgcgggtcccaggtagcgagaatgaactgcacctggccgagttggaaccctcttctctttatgaggtcctgatggtggcccgatctgcggctggggaagggcaaccggctatgctgacgtttaggacgtccaaagagaaaaccgcatcatccaagaacactcaggctagcagtcctcctgttggtatacccaaataccctgtggtgtcagaagcagcaaataataacttcggcgtcgtgctgacggattcgtcacggcattcaggcgttccagaggctcccgaccgacctacaatctccacggcctccgaaacctccgtgtatgtgacatggataccaagggctaatggaggatcaccaatcacagcgttcaaggtggagtataaaaggatgagaacatccaactggctcgtggcagctgaagatatccccccttccaagctttctgtggaggttaggagtctggagcctggaagtacttacaagttccgagtaattgcaatcaaccattacggagagtcgtttagaagctccgcatcacggccttaccaggtggtaggcttccccaaccgcttttccagtcggcctatcaccggtccgcacattgcgtacactgaggcagtgagcgacacccagattatgctgaagtggacttacataccgagtagcaataacaatactccaatccagggattctatatttactatcgcccaacagattctgataacgactcagactacaagcgggacgttgtggagggatccaagcagtggcatatgatcggtcacctgcagcctgagacctcttacgacattaaaatgcagtgcttcaatgagggcggtgagagcgaattttccaacgtgatgatttgtgagaccaaggtgaaaagagtccctggcgcatccgagtacccagtcaaggacctgtccacccctcccaacagcctgggttccggcggaaatgttggtcccgctacatcacccgcaagatctagtgacatgctctatctgatcgttgggtgtgtccttggcgttatggtcctgatcctgatggtatttattgctatgtgtttgtggaaaaataggcaacagaacacaatacagaagtatgacccacctggctatctttaccagggaagcgatatgaacgggcagatggtcgactacacaaccctctcgggcgctagccagattaatggcaacgtccatggcggatttctgacaaacggtgggttaagcagcggatattcacacctgcaccacaaagtgccaaacgccgtgaatggaatagtcaacggtagcttgaacggcggtttatacagcggccattcaaactctcttacaaggacccacgtggacttcgagcacccgcatcacctggtgaacggaggaggaatgtataccgcagtgcctcagatagacccacttgaatgcgttaactgtaggaattgccgcaacaacaaccgatgttttaccaaaaccaattcaaccttcagcagctcccctcccccagttgtcccagtggtggccccatatccacaggacggattggagatgaaaccactgagtcacgttaaggtacccgtgtgcttgacatccgcagtccccgactgtggtcagctgccggaagaaagcgtgaaggacaacgtggaacccgttccaacccagagaacctgctgccaggatattgtgaacgatgtctccagtgacggatccgaggacccagcagagttttcaagaggggacagctgtgcccacagcgagacggagatcaacatcgtcagctggaacgcgctcatcctcccccctgtgcccgagggctgtgccgagaagaccatgtggtcccctcctggaatcccgctggatagccccactgaagtgcttcaacagcctcgggagacatag

SEQ ID NO: 339760 - DNA, 4186 bp, Artificial Sequence
  derived and/or modified sequence
gtctctccaagggaatgaaaggtgaggggagcgtgagtgcaggcatgatgggaatctccgtgacttgtgaaccaaggactgggttttgctctggaagcctgtcctgattgcttctgtaatctggcgctatgcatccggatcttggacccttatgtacactgctgtatgttactcttacaattctgtgctcttctgtgagttcagacttggcaccttattttacttctgagccgctctctgctgtccagaaacttggtggacctgtagtactgcattgttctgctcaacctgtgaccactcgtatctcatggctgcataacggaaaaacattggatggaaacctggaacatgttaagattcatcaggggactctgacaattctttctctcaactcctctcttttgggttactaccagtgccttgccaacaatagcatcggtgccattgtgagtggccctgcgacagtatctgtggcagttcttggtgattttggttcatccacaaagcatgttattacagcagaagaaaaaagtgctggtttcattggctgcagggtaccggagagtaaccccaaagctgaggtgcgctataaaatccggggaaaatggctggaacattccacagagaattacttaatccttccatcaggaaatcttcagattttgaatgtatccttagaggacaagggatcatacaaatgtgcagcttataatcctgtcacacatcaattaaaagttgaacctattggccgaaagctccttgtgagtcgtccttcttcagatgatgttcacattcttcaccccacccattcacaggcattagctgttctttctcgtagccctgtaaccttggagtgtgtggtgagtggggtcccggctcctcaagtgtattggctaaaggacgggcaggacattgcaccaggaagcaactggagaaggttgtattctcatcttgccactgatagcgttgacccggcggactccggaaactattcctgcatggcgggaaacaagtctggagatgtaaaatatgtgacttacatggttaatgtacttgaacatgcttccatttctaaaggactacaggatcagatagtgtctctgggtgccacagtacactttacctgcgacgttcatgggaacccagcccccaactgtacctggtttcacaatgcacagcctattcatccttctgcacgacatctaactgcaggaaacggactgaaaatcagtggggttactgtggaagatgttgggatgtatcagtgtgtagcagataatgggattggatttatgcactctactggaagacttgaaattgaaaatgacggtggattcaagccagttataattacggcaccagtaagtgcaaaggttgcagacggagactttgttactctgtcctgcaatgccagtgggctgccggttccggtcattcgttggtatgacagccatggattgataaccagccatccatctcaagtcctgagatcgaaatcccgaaaatcacagttatcaagacctgagggcttgaacctggagcctgtgtacttcgtcctgtcccaagctggtgcaagctctctccatattcaggctgtgactcaggaacatgcggggaaatacatctgcgaagctgcaaatgaacatggtaccacacaggcagaagcatctctcatggttgttccttttgaaacaaatacaaaagcagagacagtcacacttcctgatgctgctcagaatgatgacagaagtaagagagatggttcagaaactgggttactgagctcatttccggtgaaggtccatcccagtgcagtggaatcagcaccagagaaaaacgccagcggcatctctgttcctgatgcccccatcatactgagccccccacagacccacacaccagacacgtacaacctggtgtggagggcaggcaaggatggtgggctgcccatcaatgcttactttgtgaagtatcgaaagctggatgatggggttggcatgctgggaagctggcacacggttcgagtcccaggaagtgaaaatgagctccatttagctgagctggagccatctagtctttatgaagtcttgatggtagcaagaagcgcagcaggtgaaggccaacctgccatgcttaccttccgaaccagcaaagaaaaaacagcgtcatcaaaaaacacccaggcatcctctccacccgtgggcatccctaagtatcccgttgtttcagaggctgcaaacaacaattttggagtggtacttacagattcctctaggcacagtggagttccagaggcaccagatcggcctaccatctccactgcatcagagacatcagtctatgtcacttggattcctcgggcaaacgggggttctccaatcactgccttcaaagtcgaatataaacggatgaggaccagcaattggctggtggcagctgaagacatccctccttccaaactttcagtggaagttcgtagtttagaaccaggttcaacatacaaatttagggtcattgccatcaaccattatggtgagagttttcggagttcagcatctcgtccttatcaagtggttgggttccccaatcgcttttccagccgtccaataactggacctcacattgcatacacagaggctgtcagcgatactcagatcatgctaaagtggacgtacattccatcaagtaacaataacactcccattcaaggattttatatctattaccgaccaacagatagtgacaatgacagtgattacaagagggatgttgtagaaggttcaaagcagtggcacatgattggccacctgcagccagaaacctcctatgacattaaaatgcaatgcttcaatgaaggaggagaaagtgaatttagcaatgtgatgatctgcgagactaaagtgaaacgtgttcctggagcttctgaatatcctgtcaaagacttgagtacccctccaaattctttgggaagtggaggaaatgtggggcctgcaaccagccctgccagaagcagtgacatgttatatctgatcgttggctgtgtgctgggcgtcatggtcctcattctgatggttttcattgcaatgtgcctgtggaagaatcgccagcagaataccatacaaaaatatgacccaccaggatatctctaccaaggatcagatatgaacgggcagatggtggactacaccactctctcaggagcaagtcagataaatggaaatgttcacggaggcttcctaaccaatggcggtctcagcagtggctattcccaccttcaccataaggtccccaatgcagtcaatggaattgtgaatgggagcctaaatggagggctttactccgggcacagcaactctctaaccaggacacacgtggattttgaacatcctcatcatctagtgaatggtggtggaatgtacacggccgtgcctcagattgaccctctggagtgtgttaactgccgaaattgtcgaaacaacaataggtgtttcaccaaaaccaacagcactttcagcagcagccctcctcctgtggtccctgtggtagcaccttatcctcaggatggtttggaaatgaagcccctcagtcacgtgaaggtgcctgtatgcctgacttccgcagtccctgattgtggccagttgccggaggagagcgtcaaggacaatgtggaaccagtccctactcagcgtacctgctgtcaggacattgtaaatgacgtcagctctgatggctcagaagatccagcagagttcagcagaggagacagctgtgcccattcagaaacagagatcaacattgtaagttggaatgctcttattttgccacctgtccccgagggctgtgctgagaagacaatgtggtctccacctggcattcctttagacagcccgacagaggtccttcagcagccccgggaaacctgaggacatgcaaacaaccagtcatgttccaacttcaagccggtaactgcacacaacaggcctgggagcgaactgtgtgaaggaccttaattcaaatcagagaaaatcattatttatttttttgtagtagtaatgtcatatgaatgtatcttaaaacgtgtgcccttttatattatttatgccttaaatgttttcttccccattccttcctccccctcggtaggaaacaaccttgttttgcatagtattcagtcacctggagggca

SEQ ID NO: 339761 - DNA, 3795 bp, Artificial Sequence
  derived and/or modified sequence
atgcaccccgacctgggccccctgtgcaccctgctgtacgtgaccctgaccatcctgtgcagcagcgtgagcagcgacctggccccctacttcaccagcgagcccctgagcgccgtgcagaagctgggcggccccgtggtgctgcactgcagcgcccagcccgtgaccaccagaatcagctggctgcacaacggcaagaccctggacggcaacctggagcacgtgaagatccaccagggcaccctgaccatcctgagcctgaacagcagcctgctgggctactaccagtgcctggccaacaacagcatcggcgccatcgtgagcggccccgccaccgtgagcgtggccgtgctgggcgacttcggcagcagcaccaagcacgtgatcaccgccgaggagaagagcgccggcttcatcggctgcagagtgcccgagagcaaccccaaggccgaggtgagatacaagatcagaggcaagtggctggagcacagcaccgagaactacctgatcctgcccagcggcaacctgcagatcctgaacgtgagcctggaggacaagggcagctacaagtgcgccgcctacaaccccgtgacccaccagctgaaggtggagcccatcggcagaaagctgctggtgagcagacccagcagcgacgacgtgcacatcctgcaccccacccacagccaggccctggccgtgctgagcagaagccccgtgaccctggagtgcgtggtgagcggcgtgcccgccccccaggtgtactggctgaaggacggccaggacatcgcccccggcagcaactggagaagactgtacagccacctggccaccgacagcgtggaccccgccgacagcggcaactacagctgcatggccggcaacaagagcggcgacgtgaagtacgtgacctacatggtgaacgtgctggagcacgccagcatcagcaagggcctgcaggaccagatcgtgagcctgggcgccaccgtgcacttcacctgcgacgtgcacggcaaccccgcccccaactgcacctggttccacaacgcccagcccatccaccccagcgccagacacctgaccgccggcaacggcctgaagatcagcggcgtgaccgtggaggacgtgggcatgtaccagtgcgtggccgacaacggcatcggcttcatgcacagcaccggcagactggagatcgagaacgacggcggcttcaagcccgtgatcatcaccgcccccgtgagcgccaaggtggccgacggcgacttcgtgaccctgagctgcaacgccagcggcctgcccgtgcccgtgatcagatggtacgacagccacggcctgatcaccagccaccccagccaggtgctgagaagcaagagcagaaagagccagctgagcagacccgagggcctgaacctggagcccgtgtacttcgtgctgagccaggccggcgccagcagcctgcacatccaggccgtgacccaggagcacgccggcaagtacatctgcgaggccgccaacgagcacggcaccacccaggccgaggccagcctgatggtggtgcccttcgagaccaacaccaaggccgagaccgtgaccctgcccgacgccgcccagaacgacgacagaagcaagagagacggcagcgagaccggcctgctgagcagcttccccgtgaaggtgcaccccagcgccgtggagagcgcccccgagaagaacgccagcggcatcagcgtgcccgacgcccccatcatcctgagccccccccagacccacacccccgacacctacaacctggtgtggagagccggcaaggacggcggcctgcccatcaacgcctacttcgtgaagtacagaaagctggacgacggcgtgggcatgctgggcagctggcacaccgtgagagtgcccggcagcgagaacgagctgcacctggccgagctggagcccagcagcctgtacgaggtgctgatggtggccagaagcgccgccggcgagggccagcccgccatgctgaccttcagaaccagcaaggagaagaccgccagcagcaagaacacccaggccagcagcccccccgtgggcatccccaagtaccccgtggtgagcgaggccgccaacaacaacttcggcgtggtgctgaccgacagcagcagacacagcggcgtgcccgaggcccccgacagacccaccatcagcaccgccagcgagaccagcgtgtacgtgacctggatccccagagccaacggcggcagccccatcaccgccttcaaggtggagtacaagagaatgagaaccagcaactggctggtggccgccgaggacatcccccccagcaagctgagcgtggaggtgagaagcctggagcccggcagcacctacaagttcagagtgatcgccatcaaccactacggcgagagcttcagaagcagcgccagcagaccctaccaggtggtgggcttccccaacagattcagcagcagacccatcaccggcccccacatcgcctacaccgaggccgtgagcgacacccagatcatgctgaagtggacctacatccccagcagcaacaacaacacccccatccagggcttctacatctactacagacccaccgacagcgacaacgacagcgactacaagagagacgtggtggagggcagcaagcagtggcacatgatcggccacctgcagcccgagaccagctacgacatcaagatgcagtgcttcaacgagggcggcgagagcgagttcagcaacgtgatgatctgcgagaccaaggtgaagagagtgcccggcgccagcgagtaccccgtgaaggacctgagcaccccccccaacagcctgggcagcggcggcaacgtgggccccgccaccagccccgccagaagcagcgacatgctgtacctgatcgtgggctgcgtgctgggcgtgatggtgctgatcctgatggtgttcatcgccatgtgcctgtggaagaacagacagcagaacaccatccagaagtacgacccccccggctacctgtaccagggcagcgacatgaacggccagatggtggactacaccaccctgagcggcgccagccagatcaacggcaacgtgcacggcggcttcctgaccaacggcggcctgagcagcggctacagccacctgcaccacaaggtgcccaacgccgtgaacggcatcgtgaacggcagcctgaacggcggcctgtacagcggccacagcaacagcctgaccagaacccacgtggacttcgagcacccccaccacctggtgaacggcggcggcatgtacaccgccgtgccccagatcgaccccctggagtgcgtgaactgcagaaactgcagaaacaacaacagatgcttcaccaagaccaacagcaccttcagcagcagccccccccccgtggtgcccgtggtggccccctacccccaggacggcctggagatgaagcccctgagccacgtgaaggtgcccgtgtgcctgaccagcgccgtgcccgactgcggccagctgcccgaggagagcgtgaaggacaacgtggagcccgtgcccacccagagaacctgctgccaggacatcgtgaacgacgtgagcagcgacggcagcgaggaccccgccgagttcagcagaggcgacagctgcgcccacagcgagaccgagatcaacatcgtgagctggaacgccctgatcctgccccccgtgcccgagggctgcgccgagaagaccatgtggagcccccccggcatccccctggacagccccaccgaggtgctgcagcagcccagagagacctag

SEQ ID NO: 339762 - protein, 695 aa, Artificial Sequence
  derived and/or modified sequence
MTELKAKGPRAPHVAGGPPSPEVGSPLLCRPAAGPFPGSQTSDTLPEVSAIPISLDGLLFPRPCQGQDPSDEKTQDQQSLSDVEGAYSRAEATRGAGGSSSSPPEKDSGLLDSVLDTLLAPSGPGQSQPSPPACEVTSSWCLFGPELPEDPPAAPATQRVLSPLMSRSGCKVGDSSGTAAAHKVLPRGLSPARQLLLPASESPHWSGAPVKPSPQAAAVEVEEEDGSESEESAGPLLKGKPRALGGAAAGGGAAAVPPGAAAGGVALVPKEDSRFSAPRVALVEQDAPMAPGRSPLATTVMDFIHVPILPLNHALLAARTRQLLEDESYDGGAGAASAFAPPRSSPCASSTPVAVGDFPDCAYPPDAEPKDDAYPLYSDFQPPALKIKEEEEGAEASARSPRSYLVAGANPAAFPDFPLGPPPPLPPRATPSRPGEAAVTAAPASASVSSASSSGSTLECILYKAEGAPPQQGPFAPPPCKAPGASGCLLPRDGLPSTSASAAAAGAAPALYPALGLNGLPQLGYQAAVLKEGLPQVYPPYLNYLRPDSEASQSPQYSFESLPQKICLICGDEASGCHYGVLTCGSCKVFFKRAMEGQHNYLCAGRNDCIVDKIRRKNCPACRLRKCCQAGMVLGGFRNLHIDDQITLIQYSWMSLMVFGLGWRSYKHVSGQMLYFAPDLILNDSFGRATKSNPV

SEQ ID NO: 339763 - protein, 690 aa, Artificial Sequence [sequence omitted]

SEQ ID NO: 339764 - DNA, 879 bp, Artificial Sequence
  derived and/or modified sequence
atgcagcccagcagagaggccctggagctgagaggcctgcccaagagcgtgagcaccgtgagcagcaccaagccccccctgaccacccccagcagcaccaaccccagcagacagctggccctggaggactgcgtgcagctgagagccgccctggacctgggctacggccccgagtgctgctgccaccacctgcccgaggtggcccacaagagcagcgccagcgccggcgcccccagcgccagactgcccctgcagccccacagcctgggcaccagaaccaagctgccccccagcctgtgcctgcccggccccggcagaaccagactgaccaccgagcccttccccggcgcccccttctgcagcgacagctgcagccccgccctgtgctgcgtgctgctgacccccggcagaggcagaggcagcgtggcccccctgggcagcagccaggacggcagaggcggctgctgccccaccgacaccgtgcccgccgcccagggcatggacgccagctggaccgtggcccccgcccaggagtggctgggccaccccctgcagagctgcccccagagcgccagcagaggccacctgcccctgcccctgcccacccccaccaccccctgcatcagccagccccccggcagaagatgcagaccccactgcggcaaggagctgttcagagcccccggcgccctgcacttcctgcccagaagacaccccgccgccgtgagacacagatggaccagagcctgccccgagggccccagaatgcacatcccccagggctggctgctgagcagccccagcctgctgaccgactggttcagcatggacagcttcaagccccccagcctggccagcggccagatcagcaagacctag

SEQ ID NO: 339765 - DNA, 879 bp, Artificial Sequence
  derived and/or modified sequence
atgcagccttctcgggaggcacttgaacttaggggactgcccaagagcgtctccacagtctccagcacaaagcctccactcacaacacctagctccacaaatccctctagacagctggccttggaggactgtgtgcagcttagggctgcgctggacctgggctacggaccggagtgttgttgccatcacttgcctgaagtggcccacaaaagttccgccagcgcaggagcaccctctgccagactcccattgcagccccactctctgggcacaaggactaaattaccaccttcactctgtctccccggacccggccgaacaagactgaccactgaaccgttcccaggagcccccttttgcagtgactcatgctctccagctctgtgctgtgtgctgttaacacctgggaggggccgtggctccgtggcacccttagggtcgagccaggacgggcgcggtggttgctgtcccacagatactgtaccagcagcccaggggatggacgcctcttggacagtcgcacctgcacaggaatggctgggacaccccttacaaagctgtccccagagtgcaagcagaggccacctaccacttcccttgcccaccccgaccaccccttgcatctctcagccacccggtcgccggtgtcgcccgcattgtggaaaggagttgtttagagctccaggcgccttgcattttctccctagaagacaccctgccgccgtgaggcacaggtggacacgcgcctgccccgagggaccccgcatgcacattcctcaagggtggctgctctcgtcaccttctttattaacagattggttctccatggactctttcaagccccccagcctggccagtggccagatctctaaaacctag

SEQ ID NO: 339766 - DNA, 879 bp, Artificial Sequence
  derived and/or modified sequence
atgcagcccagccgggaggccctggagctgcggggcctgcccaagtctgtgagtaccgtgagcagcacgaagcctccattgaccactccttcctcaaccaatccatctagacagctggctctagaagactgtgtgcagctgagggccgctctggatctcgggtacgggcctgaatgttgctgtcatcacttgcccgaggttgctcataagtcctcagcctctgctggcgctcctagcgcgaggctgccattgcagccgcactctctggggacgagaaccaagctccctcccagcctgtgcctccctgggcccgggcgcacaaggctgacgacagagccattcccgggggcccccttctgctccgacagctgctctccggcattgtgctgtgttttgttgactcccgggagggggcgcggctcggttgcacctctgggctctagtcaagatggtcgcggcggctgctgccccacagacacggttccagcagcacagggtatggatgcttcttggactgtggctccagcgcaggagtggctgggacaccccttgcagagctgcccccagagcgcctccagaggacacctgccactgccactgcccacgcccactacaccctgtatttcacagcctcccggaaggcggtgccgaccccactgtgggaaggagttgtttcgcgccccaggcgccctccattttctgcctagaagacaccctgcggctgtgagacaccgctggactcgagcttgcccagagggccctcgcatgcatattcctcagggatggctgctaagttcccccagtttattaaccgactggttttctatggactcattcaagcccccttctctggcttcaggacagatttccaagacatag

SEQ ID NO: 339767 - DNA, 879 bp, Artificial Sequence
  derived and/or modified sequence
atgcagccttctcgcgaagccttggagcttcgtggtttgccaaagagcgtttccacagtaagcagtactaaaccccctctcaccaccccctcctcaactaacccttcaaggcaactggcacttgaagattgcgttcaactccgtgcagccttggacctggggtacgggcctgaatgttgctgtcatcacctccccgaggtcgcccacaagtccagtgcaagcgccggtgcgccatcagctcgcttgcccctgcagccgcacagtctcggcaccaggacaaagctaccaccgtcactgtgtctgcccggtcccggtcgcacacgcctgaccacggaaccattccccggagcgcctttctgctctgactcatgcagccctgctctttgctgtgtactccttactccgggaagggggcgaggatctgtcgctccactgggaagtagccaagatggcagaggcggatgctgccccaccgatacagttcccgctgcgcaggggatggacgcctcttggaccgttgcccctgctcaggagtggctaggacacccactgcagtcgtgcccccagagtgctagtagggggcatctgcccctaccgctgcctactcccactaccccttgtatcagccagccaccaggtcgaaggtgccggccacattgcggcaaggagctatttagggcacccggtgctctacattttttaccaaggcggcatccagctgcagtgcgtcaccgctggaccagggcgtgccccgagggccctaggatgcacatccctcaagggtggctgctgtcaagcccctcactgctgactgactggtttagcatggatagttttaagcccccatcactcgccagtggccagatctctaagacttag

SEQ ID NO: 339768 - protein, 151 aa, Artificial Sequence
  derived and/or modified sequence
MSIPFSNTHYRIPQGFGNLLEGLTREILREQPDNIPAFAAAYFESLLEKREKTNFDPAEWGSKVEDRFYNNHAFEEQEPPEKSDPKQEESQISGKEEETSVTILDSSEEDKEKEEVAAVKIQAAFRGHIAREEAKKMKTNSLQNEEKEENK

SEQ ID NO: 339769 - DNA, 456 bp, Artificial Sequence
  derived and/or modified sequence
atgtctataccattctcaaatacacactacaggattccacagggcttcggcaatcttctggaaggactgaccagggagattctccgggaacagcctgacaatattcccgcgtttgcggcagcctacttcgagagcctcctcgaaaaacgcgaaaagacgaattttgatccggcagaatggggctcaaaggtcgaggatcgcttttacaataaccacgccttcgaggaacaggagccaccggagaaaagtgaccctaagcaagaggaaagccagatttccggaaaagaagaggaaacatctgtaacaattctcgactcatcagaggaagataaagagaaggaggaggtcgcagcggtgaagattcaggctgctttccgcgggcatatagcccgagaggaagctaagaaaatgaagactaatagcctccaaaacgaggaaaaggaagaaaacaaatag

SEQ ID NO: 339770 - DNA, 456 bp, Artificial Sequence
  derived and/or modified sequence
atgagcatccccttcagcaacacccactaccgcatcccccagggcttcggcaacctgctggagggcctgacccgggagatcctgcgggagcagcctgacaacatcccagcctttgctgctgcctactttgagagcctgctggagaagcgggagaagaccaactttgatcctgctgagtggggcagcaaggtggaggaccgcttctacaacaaccacgcctttgaggagcaggagcccccagagaagagtgaccccaagcaggaggagagccagatcagcggcaaggaggaggagacctctgtgaccatcctggacagcagcgaggaggacaaggagaaggaggaggtggccgctgtgaagatccaggccgccttccggggccacatcgcccgggaggaggccaagaagatgaagaccaacagcctgcagaatgaggagaaggaggagaacaagtag

SEQ ID NO: 339771 - DNA, 456 bp, Artificial Sequence
  derived and/or modified sequence
atgagcatccccttcagcaacacccactaccggatcccccagggcttcggaaatctgctggagggtcttacccgggaaattttgcgagagcagccagataacattcctgcctttgccgcggcatatttcgagagcctgctggagaaacgagaaaagactaacttcgaccctgctgagtggggctcaaaggtcgaagatagattttacaacaatcatgcgtttgaggaacaagaacctcctgaaaagtctgatcctaagcaggaggaaagtcagatttcaggtaaggaggaagagacctcagtaactattttggactcatcagaggaagataaggaaaaggaggaggttgccgctgtgaagatccaggctgcattcagaggtcacatcgcaagggaagaagccaaaaaaatgaaaactaatagtctgcagaacgaagaaaaggaggaaaacaagtag

SEQ ID NO: 339772 - DNA, 456 bp, Artificial Sequence
  derived and/or modified sequence
atgtccataccattctccaatacccattacagaattccccagggatttggcaatttgctagaaggactgacccgcgagatcctcagggaacagcccgacaatatccctgcttttgccgctgcctattttgagtccctcctcgaaaagcgcgaaaagactaatttcgatccggctgaatgggggagcaaagtggaggataggttttacaacaaccacgctttcgaagagcaggagccccctgaaaagagtgaccccaaacaagaagagtctcaaatatctggtaaggaggaagaaaccagcgtgacgatcctggattcttctgaggaggataaggagaaggaggaggttgccgcagtcaagattcaggccgcttttaggggccatatcgctcgggaggaggccaaaaagatgaagactaatagcctgcagaatgaggaaaaagaagagaataagtag

SEQ ID NO: 339773 - DNA, 456 bp, Artificial Sequence
  derived and/or modified sequence
atgagcatccccttcagcaacacccactacagaatcccccagggcttcggcaacctgctggagggcctgaccagagagatcctgagagagcagcccgacaacatccccgccttcgccgccgcctacttcgagagcctgctggagaagagagagaagaccaacttcgaccccgccgagtggggcagcaaggtggaggacagattctacaacaaccacgccttcgaggagcaggagccccccgagaagagcgaccccaagcaggaggagagccagatcagcggcaaggaggaggagaccagcgtgaccatcctggacagcagcgaggaggacaaggagaaggaggaggtggccgccgtgaagatccaggccgccttcagaggccacatcgccagagaggaggccaagaagatgaagaccaacagcctgcagaacgaggagaaggaggagaacaagtag

SEQ ID NO: 339774 - DNA, 456 bp, Artificial Sequence
  derived and/or modified sequence
atgtcgataccatttagcaatacccactaccgcatccctcagggatttggcaacttgctcgaaggcctcacaagggaaatcctgagggagcagcccgacaacattcctgcctttgccgctgcttactttgaatcacttctcgagaaaagggagaaaaccaatttcgacccggccgaatggggttcaaaagtggaggaccgattctataacaaccatgcattcgaagagcaggagccaccagaaaagagcgatcctaagcaggaagaatcacagataagtgggaaagaggaagagacaagcgtcaccattcttgatagcagcgaggaggacaaggaaaaagaggaagtagccgcggtgaaaatccaggctgcatttagaggccatattgcccgcgaggaggcaaaaaagatgaaaacaaatagccttcagaatgaagaaaaagaagagaacaagtag

SEQ ID NO: 339775 - DNA, 853 bp, Artificial Sequence
  derived and/or modified sequence
ttttgcagtcctcgcagcctcccgcgacctcaggactgggctgtactcgccccttctcggccgccgtagtttttttttttttttaaagaaaaaacggttacccagcaactagaaaaacaaccggaaccggcggcaccagctcggagagaaaggaggttccataggcagttcttaccaagaagatgtcgattccattctccaacacccactaccgaattccacaaggatttgggaatcttcttgaagggctgacacgcgagattctgagagagcaaccggacaatataccagcttttgcagcagcctattttgagagccttctagagaaaagagagaaaaccaactttgatccagcagaatgggggagtaaggtagaagaccgcttctataacaatcatgcattcgaggagcaagaaccacctgagaaaagtgatcctaaacaagaagagtctcagatatctgggaaggaggaagagacatcagtcaccatcttagactcttctgaggaagataaggaaaaagaagaggttgctgctgtcaaaatccaagctgccttccggggacacatagccagagaggaggcaaagaaaatgaaaacaaatagtcttcaaaatgaggaaaaagaggaaaacaagtgaggacactggttttacctccaggaaacatgaaaaataatccaaatccatcaaccttcttattaatgtcatttcttcctgaggaaggaagatttgatgttgtgaaataacattcgttactgttgtgaaaatctgtcatgagcatttgtttaataagcataccattgaaacatgccacttgaagatttctctgagatcatgagtttgtttacacttgt

SEQ ID NO: 339776 - DNA, 456 bp, Artificial Sequence
  derived and/or modified sequence
atgagcatccccttcagcaacacccactaccggatcccccagggctttggtaacttgctcgaaggactgacaagggagatcctgcgcgagcaacccgacaacattccagctttcgctgccgcttacttcgagagtttgctggaaaagcgggagaagactaatttcgatccagctgagtggggaagcaaagttgaggacaggttttataataaccacgcatttgaagagcaggagcctcccgagaaatcagacccaaagcaggaggaaagccaaatctccgggaaagaagaagagaccagtgtcactatcctggactcgagcgaagaagataaggagaaagaggaagtcgctgcagtcaagatccaagctgcctttcgggggcacatagcccgggaggaagccaagaagatgaagaccaattccctccaaaacgaggagaaagaagagaacaaatag

SEQ ID NO: 339777 - DNA, 456 bp, Artificial Sequence
  derived and/or modified sequence
atgtcaatccccttttccaatacccattataggatcccacaggggtttgggaatttgctggagggtctgacccgtgagatcctccgcgagcagcctgataatatcccagccttcgctgcagcttattttgagtcactactggaaaaaagagagaagactaacttcgaccctgccgagtgggggtcaaaggtggaggaccggttttataacaaccatgcgtttgaggagcaggaaccccctgagaaatcagaccccaaacaggaggagtcacaaatcagcggtaaggaagaagagacatccgttactatcctagactcctccgaggaggacaaggaaaaggaggaagttgcagctgtgaaaatacaagcagcctttagaggacatatcgccagggaggaggctaaaaagatgaaaactaatagcctgcaaaatgaggaaaaggaagagaataagtag

SEQ ID NO: 339778 - DNA, 4949 bp, Artificial Sequence
  derived and/or modified sequence
tcgccccttctcggccgccgtagtttttttttttttttaaagaaaaaacggttacccagcaactagaaaaacaaccggaaccggcggcaccagctcggagagaaaggaggtgaggccgcttccccacttcctctccgataccaagacctagccttttcccttcgtctctcttattctctcagcatcccagacacagcctcggagccctgggccgtttgggagccgaggcagcccattctgcgcgagtctgaaatcccaggtcctcaacatcccgcccccgactagacccgtctgccccctccgcccgccctcctctgcccacattggttcagaatctcgccagctcttttcaccactctagaatggttcgatacccccatctactgctccctcagaaaaagcaaaagagaggagtcaggcgtggtggcgcgcgcctgtaatcccaattgctcgggaggctgaggcgggatcatcgctggagcccaggagttcgaggccagagaccccctctcaaagaaaaaaaaagcgatgaaacgagaaccctccatagtctgagcctcattaaaccgtccagttctcccaacctggacccctaccacggcctccgcctctattccgcattgacgcacactctcacattaacaggccaggtcccggaggattcttttcatactcagtagtagctcagcccgctgcttagcagctacccttaatctagcccttgtatttcaagacagaaagagacaacctgatcaagaagaaaccgaaaaatataagaattctaaaactttagaggctgggatttcaaaatcatgacacacagccccatcccatcccatccctccctcacacacacgcacgcacaaccccattccacagtacgaaggtgttcgaagcattgtgggtcatgcttcagaagtggcagcaaggggaaagattgtgcaacttcttcattcaacaaattaatttctagaaccaggactaatttctactctttaaaaaaaaatagacctcaaagaaggtcttctcagcaattgacaatgaatttaactttttagcaatcattctctctaaattcctgtgtgatagcaaaaattacccttaccttttgagcatataaagggtaaagagagaaaaagtcatattgaaaattatgggttttttgcaggattttaaatgatttggcctagtgaatgggtctgtgtttgtattatactaattcacaatggagatttcaaaactctttggaagaaatggatgggcttgggttgtgttagggaaaaaagaattcaagtccagatgtatgagtctcagaaataatttgttggcatagttgtgattatataagtaaaatcagacaaatttaaagacagtactctttaatgaatctttaggttccataggcagttcttaccaagaagatgtcgattccattctccaacacccactaccgaattccacaaggatttgggaatcttcttgaagggctgacacgcgagattctgagagagcaaccggacaatataccagcttttgcagcagcctattttgagagccttctagagaaaagagagaaaaccaactttgatccagcagaatgggggagtaaggtagaagaccgcttctataacaatcatgcattcgaggagcaagaaccacctgagaaaagtgatcctaaacaagaagagtctcagatatctgggaaggaggaagagacatcagtcaccatcttagactcttctgaggaagataaggaaaaagaagaggttgctgctgtcaaaatccaagctgccttccggggacacatagccagagaggaggcaaagaaaatgaaaacaaatagtcttcaaaatgaggaaaaagaggaaaacaagtgaggacactggttttacctccaggaaacatgaaaaataatccaaatccatcaaccttcttattaatgtcatttcttcctgaggaaggaagatttgatgttgtgaaataacattcgttactgttgtgaaaatctgtcatgagcatttgtttaataagcataccattgaaacatgccacttgaagatttctctgagatcatgagtttgtttacacttgtctcaagcctatctatagagacccttggatttagaattatagaactaaagtatctgagattacagagatctcagaggttatgtgttctaactattatcaaatgaataaatcctctctatcacatcccccaaaaatgttctttagctcctgtttcactcctagtggtaaagaatttcactgctttttaaggatagtctatttaattttggaatttttagaaagataagctgggacaaaaatctgcctccttcagcctggccaacatggtgaaaccccatgtctactaaaagtacaaaaattggccaggcgtggtgcgcacacctgtaatcccagctactcgggaggctgaggcaggagaatcgcttgaacctgggaagtggaggctgcagtaagccgagatcgcaccactgcactccagcctgggcgacagagcaagactctgtctcaaaaacaaaacaaaacaaaaaaaagcctctgcctccttgtaagtttaacccactggttttcatttatcatacatgtattcaatcatttattgaaaatgtattgagtactattcatgtgctgggaattagtagtgaatacttgttcttacactcatacaacttacaatgctttattgttttgctctccagaaccacacagaacaagactaataacatcatattgtaaaaagcaaaagctatcatatcatgctgccttcttcagttaaaacttcccaagtttttaaatatacaatggtaatgcctgtttaacaaactcagaggctttatctcttttatgttttcaatgattcattcaaatccctagtgccttagttttagaaagttccgtctctcctttttgaggcctctccacccttgattgtccaagaaactgagggttcatgtcttagaccaaagggtgcagttctcttcccaatacaaaaggtagaaagtggagtcttaccatttagttaatgctgttgccttctaccataatgttgtagcatagtccagcagactgaggtgattctctggctggttccaattcctgcctgcaccatagtggatggcccatgatttagttccaggattacatctctcttggtttatagtcacaaagccagtgttcccccaaagcttaaaaacaagccaggatggctcagtcctgaggagattctaaaaccaggtctatgttgtcacaacaaatactctcctacaaacactttgatccttgtcctaggcttagacatgctctttctgcaaagcagttttatttcaggtgcctcactgcccttccctggcactgagcctttatcaggctctgcaacagaggttcccccaagtgatcgccactcaaacacagttgattcacaccaaccctttcaaggttgtggctttcattctctaatgtccactcatacaggcagcctttctccttccaaaatcttgctgccactgtagagagtttcatgctagctaaacacaagtctctaatatcccccttcctctcctccttaacccctctcctccaggcttacagaggaaaagaaatcagttctcctccaggattccagctgttcgtccctcccattccactgaaagcaccagcttctaacaccttcccctctcagacagagccatcctgcttagcggattgtcaaggggggacccagaatttatgcaaagacttagattccctgacctggagagatcagaagaggaaaaaagggattttttccctagtgagtatatagcaggaaaaaaaaaaaagatgagttagctttttcagtaattctcctgttatacacataaagtgactagcactatgcattccatacacacacacacacacacacagatctcatggtagtgatattggtagtgaaggaggaaaaggaaaaggtgagcaatggatgtgatattatgagaacaacacatatgaatgacactttattagaacttatctggttttcctcttatctctctggctgttccttctcaattcccttcactggtaactcttcaactccccaaccactaaatgctaagtgcccttaggctcagtctttcgaccccatttctacactcacttgatttcctgcagtttcatagctttaaaatccaatcttcttaatgatcactcccagacctttctctcctctgcctgcgaacttctatattcaactgcctacataacatccccatttggatgtctataggcatctcaaaagtaacatataaaaaatgaatcctgatattgcccccaaatctgaaacttcccccacacccaagtttttccattcaaaaatggctgctccattcttccatttgctcaggccaaaaaccttggattcatctttaatgcgtcactttctttcacaccccatatacaatctatcagcaaaacctgtgggctgtacctataaaataatactcagaatctgcctacttctaaccacttccattgttaccgccttggtcctagttcccatgatagccttgtgaattattgcaataacctatattggccagtgattatctcactactactgcacaacccattccaaagttagtggtttaagacaattatattttctcctgggtctgtaggtcagtggtaatgtagctaagctaggctggactacaatctcaaggttaggttcaggtcagctctaagctgtgggtttgtgggctgacaggaaggtctgcttcaggctgtgggcccaagggtcagctgcagcacagtgcctctgcttcacgtgtccttttctgagcccctgctgaaagacgttatccaggacaagctcttctcatgctggtcacagaagacaagcaggaaaacccagcatgcaagaatatttcaagcttttgctc

SEQ ID NO: 339779 - protein, 1026 aa, Artificial Sequence
  derived and/or modified sequence
MASSWKLMLFLSVTMCLSESVDYGPVFVQEPDDIIFPTDSDEKKVALNCEVRGNPVPSYRWLRNGTEIDLESDYRYSLIDGTFIISNPSEAKDSGHYQCLATNTVGSILSREATLQFAYLGNFSGRTRSAVSVREGQGVVLMCSPPPHSPEIIYSWVFNEFPSFVAEDSRRFISQETGNLYISKVQTSDVGSYICLVKNTVTNARVLSPPTPLTLRNDGVMGEYEPKIEVHFPFTVTAAKGTTVKMECFALGNPVPTITWMKVNGYIPSKARLRKSQAVLEIPNVQLDDAGIYECRAENSRGKNSFRGQLQVYTYPHWVEKLNDTQLDSGSPLRWECKATGKPRPTYRWLKNGVPLSPQSRVEMVNGVLMIHNVNQSDAGMYQCLAENKYGAIYASAELKILASAPTFALNQLKKTIIVTKDQEVVIECKPQGSPKPTISWKKGDRAVRENKRIAILPDGSLRILNASKSDEGKYVCRGENVFGSAEIIASLSVKEPTRIELTPKRTELTVGESIVLNCKAIHDASLDVTFYWTLKGQPIDFEEEGGHFESIRAQASSADLMIRNILLMHAGRYGCRVQTTADSVSDEAELLVRGPPGPPGIVIVEEITESTATLSWSPAADNHSPISSYNLQARSPFSLGWQTVKTVPEIITGDMESAMAVDLNPWVEYEFRVVATNPIGTGDPSTPSRMIRTNEAVPKTAPTNVSGRSGRRHELVIAWEPVSEEFQNGEGFGYIVAFRPNGTRGWKEKMVTSSEASKFIYRDESVPPLTPFEVKVGVYNNKGDGPFSQIVVICSAEGEPSAAPTDVKATSVSVSEILVAWKHIKESLGRPQGFEVGYWKDMEQEDTAETVKTRGNESFVILTGLEGNTLYHFTVRAYNGAGYGPPSSEVSATTKKSPPSQAPSNLRWEQQGSQVSLGWEPVIPLANESEVVGYKVFYRQEGHSNSQVIETQKLQAVVPLPDAGVYIIEVRAYSEGGDGTASSQIRVPSYSGGKITSAQSTLHSLSTSSSSVTLLLALMIPSTSW

SEQ ID NO: 339780 - DNA, 3081 bp, Artificial Sequence
  derived and/or modified sequence
atggcatctagttggaaactcatgttatttctctcagtgacaatgtgtctttccgaatccgtggattatggccccgtttttgttcaggagcctgatgacattatcttcccaaccgatagcgacgagaaaaaggttgcattgaattgcgaggtgagggggaaccctgtaccaagctatcgttggctgcgaaacggtaccgagatcgatctggagtcggactatagatattccctcatcgatggaacatttatcatctccaacccaagcgaagccaaagactccggccattatcaatgcctcgcaacaaacaccgtgggaagcatcctgagtagagaagccacattgcagtttgcatacctgggcaacttcagtggacggacgaggagcgcagtttcagttcgagagggacagggggtcgtgttaatgtgttcccccccgccacacagccccgaaattatctattcctgggtttttaatgaattcccgtctttcgtcgccgaagacagccgtcgattcatctcccaggagactgggaacctgtacatctcaaaggtacagacttcagacgtgggcagctatatatgcctggtgaagaatacagtgacgaacgcccgcgtgctatcacccccaaccccgttaacactgcgcaacgacggggttatgggagaatatgaacccaagattgaggttcattttccatttactgtaactgcagcaaagggcacaacagttaagatggagtgctttgccctgggcaaccctgtgccgacaatcacctggatgaaagtgaacggctatatcccctcaaaggcccggctgaggaaaagccaagccgtgctcgaaatccctaacgtccagttagatgatgctggaatctacgagtgccgggcggaaaattcccgagggaagaattccttccgaggccagctgcaagtctacacctacccacactgggtagagaaattgaatgatacacagctagatagcggctctcctttgagatgggaatgtaaggcaaccggaaaacccagaccaacctatcgatggctcaagaatggagtgcctttgtcccctcagagcagagttgaaatggtgaatggtgttctcatgatccacaacgtcaatcagtccgacgctggtatgtaccagtgtctggcagagaacaaatatggtgcaatctacgcttcagcggagctcaaaatcctggcctctgccccgaccttcgcgcttaatcaactgaagaagactatcatcgttacgaaggatcaggaggtagttatcgagtgtaaaccgcagggttccccaaagccaactataagctggaagaagggcgatcgggcagtccgcgagaacaagaggatagccattctgcctgatggcagcctcagaatactgaacgccagtaagtcggacgagggtaagtatgtgtgcaggggcgaaaatgtgttcggaagtgctgaaataattgcatctctgagtgtgaaagagccaacccgaatcgagcttacacccaagcgaaccgagctgacagtaggggaatccatcgtgctgaactgcaaggcaatacacgacgcctcactggacgtcacattctattggacgctgaaaggtcagcctatcgattttgaggaagaagggggccactttgagtccatccgtgcccaggcctctagtgccgatctcatgattcggaatatattactgatgcacgccgggagatatggctgtcgtgtacagactaccgccgactccgtatctgatgaggccgagctcctcgtcagagggcctccaggtccccccggcatcgtgatcgttgaagaaatcacagaatctactgcaaccctttcatggtcacctgctgctgataaccacagtccaattagcagctataacctccaggccagatcacctttctcgcttggatggcagaccgtcaagaccgttcctgagatcatcacaggagacatggagtcagccatggcggtcgacctcaatccgtgggtggagtatgaattccgcgtcgttgctactaacccgataggaaccggcgacccttccaccccctcacgcatgattagaaccaatgaagccgtccccaaaacggctcccaccaatgtatccggacgctccgggcgccgacacgagctggttatcgcttgggagccagtatccgaggagtttcagaatggggagggtttcggctacattgtcgccttcaggcccaacggtacgcggggatggaaagaaaagatggtcacatcttcagaggcctccaaatttatttatcgtgatgagtctgttccccctctgactcctttcgaagtaaaagtcggcgtgtacaacaataagggcgatggccctttctcacagatcgtggttatttgctctgcggaaggagaaccttccgcagccccgaccgatgtgaaagcaacctcagtgagtgtaagtgaaattctggttgcctggaaacacatcaaagagagtctggggaggcctcagggtttcgaagtgggctactggaaggatatggagcaggaagatactgccgagaccgtgaagacacggggaaatgaaagctttgtgatcctgacaggtttggaggggaacaccctctatcatttcactgttcgggcatataacggggccggctacgggccaccctcctctgaagttagcgcgactaccaaaaaatcccctccatcccaggctccgtctaacctccggtgggaacagcaagggtctcaggtgtcgctaggctgggagccagtgataccactggctaacgagtccgaagtggtgggttataaagtgttttatcgccaggaaggccactctaactcccaggttatagaaacccagaaactgcaggcagtagtccctctgcctgacgctggagtatatatcatcgaggtgcgggcgtacagcgagggcggcgacggcaccgcaagtagccaaatccgcgtgccaagttattcaggcgggaaaattacaagcgctcagagcacactccacagcttatccacttccagttccagcgtgacattattattggccttaatgatcccctcgacgtcatggtag

SEQ ID NO: 339781 - DNA, 3081 bp, Artificial Sequence
  derived and/or modified sequence
atggccagctcctggaagctgatgctgttcctgtctgtgaccatgtgcctgtctgagagcgtggactatggccctgtgtttgtgcaggagccagatgacatcatcttccccacagacagtgatgagaagaaggtggccctgaactgtgaggtgcggggcaaccctgtgcccagctaccgctggctgagaaatggaacagaaattgacctggagagtgactaccgctacagcctgattgatggcaccttcatcatcagcaaccccagcgaggccaaggacagcggccactaccagtgcctggccaccaacacagtgggcagcatcctgagccgggaggccaccctgcagtttgcctacctgggcaacttcagcggccgcaccaggtctgctgtgtctgtgcgggagggccagggcgtggtgctgatgtgcagccccccaccccacagccctgagatcatctacagctgggtgttcaatgagttccccagctttgtggccgaggacagccgccgcttcatcagccaggagactggaaacctgtacatcagcaaggtgcagaccagtgatgtgggcagctacatctgcctggtgaagaacacagtgaccaatgcccgggtgctgagcccccccacccccctgaccctgagaaatgatggagtgatgggagaatatgagcccaagattgaggtgcacttccccttcaccgtgacagctgccaagggcaccaccgtgaagatggagtgctttgccctgggcaaccctgtgcccaccatcacctggatgaaggtgaatggctacatccccagcaaggcccggctgaggaagagccaggccgtgctggagatccccaacgtgcagctggatgatgctggcatctatgagtgcagagctgagaacagccggggcaagaacagcttccggggccagctgcaggtgtacacctacccccactgggtggagaagctgaatgacacccagctggacagcggcagccccctgcgctgggagtgcaaggccaccgggaagccccggcccacctaccgctggctgaagaatggagtgcccctgagcccccagagccgggtggagatggtgaatggagtgctgatgatccacaacgtgaaccagagtgatgctggcatgtaccagtgcctggccgagaacaagtacggggccatctatgccagcgctgagctgaagatcctggccagcgcccccacctttgccctgaaccagctgaagaagaccatcatcgtgaccaaggaccaggaggtggtgattgagtgcaagccccagggcagccccaagcccaccatctcctggaagaagggggacagagctgtgcgggagaacaagagaattgccatcctgcctgatggcagcctgcgcatcctgaatgccagcaagagtgatgagggcaagtatgtgtgccgcggggagaatgtgtttggatctgctgagatcatcgccagcctgtctgtgaaggagcccacccgcatcgagctgacccccaagaggacagagctgactgtgggggagagcatcgtgctgaactgcaaggccatccatgatgccagcctggatgtgaccttctactggaccctgaagggccagcccatcgactttgaggaggagggcggccactttgagagcatccgggcccaggccagcagcgctgacctgatgatccggaacatcctgctgatgcatgctggccgctatggctgccgggtgcagaccacagctgacagcgtgtctgatgaagctgagctgctggtgcggggccccccaggccccccaggcatcgtcatcgtggaggagatcacagagagcacagccaccctgtcctggagccctgctgctgacaaccacagccccatcagcagctacaacctgcaggcccggagccccttcagcctgggctggcagacagtgaagacagtgcctgagatcatcactggagacatggagagcgccatggctgtggacctgaacccctgggtggagtatgagttccgggtggtggccaccaaccccatcggcaccggggaccccagcacccccagcaggatgatccgcaccaatgaagctgtgcccaagacagcccccaccaacgtgtctggccgcagcggcagaagacatgagctggtgattgcctgggagcctgtgtctgaggagttccagaatggagagggcttcggctacatcgtggccttccggcccaacggcacccggggctggaaggagaagatggtgaccagcagcgaggccagcaagttcatctacagagatgagagcgtgccccccctgaccccatttgaggtgaaggtgggcgtgtacaacaacaagggagatggccccttcagccagatcgtggtgatctgcagcgctgagggggagcccagcgctgcccccacagatgtgaaggccacctctgtgtctgtgtctgagatcctggtggcctggaagcacatcaaggagagcctgggccggccccagggctttgaggtgggctactggaaggacatggagcaggaggacacagctgagaccgtgaagaccagaggaaatgaaagctttgtgatcctgaccggcctggagggcaacaccctgtaccacttcaccgtgcgggcctacaacggggccggctacggcccccccagcagcgaggtgtctgccaccaccaagaagagcccccccagccaggcccccagcaacctgcgctgggagcagcagggcagccaggtgtccctgggctgggagcccgtcatccccctggccaatgaaagtgaggtggtgggctacaaggtgttctaccggcaggagggccacagcaacagccaggtgattgagacccagaagctgcaggccgtggtgcccctgcctgatgctggggtgtacatcatcgaggtgcgggcctacagcgagggcggagatggaacagccagcagccagatccgggtgcccagctacagcggcggcaagatcaccagcgcccagagcaccctgcacagcctgagcaccagcagcagctctgtgaccctgctgctggccctgatgatccccagcacctcctggtag

SEQ ID NO: 339782 - DNA, 3081 bp, Artificial Sequence
  derived and/or modified sequence
atggccagcagctggaagctgatgctgttcctgagcgtgaccatgtgcctgagcgaatctgtcgattatggccctgtattcgtgcaggaaccggatgatatcatctttcctaccgacagtgatgagaagaaggtggcactgaactgcgaggttcggggtaatccggtgccaagctataggtggttgagaaacggtaccgagatcgatctggagagtgattatcggtattccttaatcgacggaaccttcattatatccaatcctagcgaagcgaaggattccgggcactaccaatgtctcgctactaacactgtggggagcatcttaagcagggaagcgacgctgcagtttgcctacctcggcaatttctctggaaggactagatccgccgtgtctgtgcgcgagggccagggcgtcgtattgatgtgtagccctccacctcactcacccgaaataatttatagctgggtgttcaacgaattcccgtcatttgtggccgaggattcccggaggtttattagccaggagaccggaaacctgtatattagcaaagtgcaaacatccgacgtgggttcctatatatgtctcgtgaagaatacagtcacaaacgccagagtgctgtcaccccccaccccattgaccttgaggaacgacggggtaatgggtgagtacgagcctaagattgaggtgcatttcccgttcactgtgaccgccgccaagggcactactgtgaaaatggagtgctttgctctgggcaatcctgttcccacaattacatggatgaaagtaaatggttacataccttcgaaagcccggttaaggaagagtcaggcagttttagaaataccaaatgtgcaacttgacgacgccggtatttatgaatgcagggctgagaatagccgcggtaaaaattcatttcgtggacagttgcaggtttatacctatccacactgggtcgaaaaactgaatgacacacagcttgattccgggagtccgctccggtgggaatgtaaggccacaggaaagccccggccaacttacagatggttgaagaatggggtgcccttgagcccacaatcacgggtcgaaatggtgaatggcgttcttatgatacataatgtaaatcagtcagacgctggaatgtatcagtgtctggcagagaacaagtatggagccatatacgcaagtgccgaactaaaaatcctggcaagtgctcctactttcgccttgaaccagctgaagaaaactatcatagtgacaaaggatcaggaagttgtcatcgaatgcaaaccccagggtagtcctaaacctactatctcatggaaaaaaggcgatcgggccgtgcgcgaaaacaaacgcatcgccatactgccggacggcagccttcggattctgaacgcttctaaatcagatgagggcaagtacgtgtgccggggggagaacgtgttcgggtcagctgaaatcattgccagcctgagtgtgaaagagcctaccaggattgaactgaccccaaaaagaaccgagctgaccgttggcgaatcaatcgtgctgaactgtaaggccatccacgacgccagcctcgatgtgacattttactggaccctgaagggtcaaccaatagattttgaagaagaaggaggacattttgaaagcattagggcccaggcctcttctgcggatctgatgatccgcaacattctgctcatgcatgccggtaggtacggatgcagggttcagaccactgcagacagtgtgtccgacgaagcagaacttctcgtgcggggcccaccgggaccacccggaatcgtcatcgtagaggagatcactgaatcaaccgctaccctaagctggtctcccgccgctgacaaccacagccctatatctagctacaatcttcaagccaggagtcctttctctctgggctggcagaccgttaaaactgttccagaaattatcacaggggacatggaatctgcgatggccgttgatctgaatccctgggtcgaatatgagtttagagtggtcgctacaaacccgattgggacaggagacccgtcaaccccttcacgaatgatcagaacaaatgaggcagtaccaaagactgcgcccacgaacgtgagtggtcgcagcggcaggagacatgagctcgtcatcgcctgggagcccgtgtcagaggagtttcagaacggggagggttttggatacattgtagccttcaggcctaacggaactagggggtggaaagagaaaatggtgaccagcagcgaagcctctaaatttatctacagagacgagagcgtgcctccactgacgccattcgaggttaaggtgggggtgtataacaacaagggtgacggacccttctcccagatcgtggtgatttgcagcgctgagggcgagccctctgctgcacccacagatgtgaaggccacgagcgtgagcgtgtccgagatcctggtggcttggaagcacattaaagaatccctgggcaggccccaaggcttcgaagttgggtactggaaggacatggaacaagaggacacagccgagacggtcaaaacacgcggaaacgagtcattcgttatactcaccggactggaaggaaacactctgtaccattttacagtcagggcatataacggggccggctacggcccgccatcatctgaggtctctgctaccaccaaaaaatctcccccttcgcaggcaccgagcaatctcagatgggagcagcagggatcacaggtgtccctcggctgggagcctgtgatcccactggcgaacgagtccgaggtggtgggatataaggtattttatcggcaggaggggcactccaacagtcaggtgatcgaaacccagaagcttcaggccgtcgttcctcttccagatgcgggtgtgtacatcattgaggtgagggcttacagtgagggtggagacggcaccgcctcctcacagatcagggtgccaagttactctggcgggaagataacgagtgctcaatcgacactgcactccctttccacctcttcctccagtgttaccctgctcctagccctaatgatcccttcgactagttggtag

SEQ ID NO: 339783 - DNA, 3081 bp, Artificial Sequence
  derived and/or modified sequence
atggcttcttcgtggaagcttatgctttttctgtccgtgactatgtgtctgagcgagagcgtagactacggtcccgtgtttgtccaggaaccagatgatatcatctttcccacagactcggacgaaaaaaaagtcgctcttaattgtgaggtccggggtaaccccgtccccagctatcgatggctgcgaaacgggaccgaaattgacttagaatccgattacagatactcgctcatagacggcacatttatcattagcaatccaagcgaggctaaagactccggccactatcagtgcctggcaaccaatactgtgggatcaatcttgtcacgtgaagcgacacttcagtttgcctatctgggcaacttcagtggcagaacccgctccgctgtgtctgtgcgggagggccagggtgtggtcctgatgtgttctcccccaccacatagtccagaaatcatttatagctgggtgtttaacgagttcccgagctttgtggcagaagattccaggcgcttcatcagccaggagacaggcaacttgtacattagcaaagtccaaacgtctgacgtgggatcatacatttgcctcgtgaaaaatacagtgaccaatgcccgagttctgagtcctccaacacccctcactctgaggaatgacggtgtgatgggggagtacgaaccgaaaatagaagtgcattttccttttaccgttactgctgccaaagggaccacggtcaaaatggagtgctttgcattgggtaatccggtcccaaccatcacctggatgaaagtcaatggatacatcccaagcaaggcccgactgcgcaagtctcaagcagtactggagatccccaacgtccagttggatgatgctggcatctacgaatgtagagccgagaactccagagggaagaattctttcagaggacaattgcaagtctacacatatccacattgggtcgagaaattgaatgacacacagctggacagcggctcacccctgcgctgggagtgcaaagcgaccggaaaaccacgccctacctatcggtggctgaaaaacggagtccctttatctcctcaatcaagagtggagatggtaaatggcgtactaatgatccataacgttaaccagtcagatgcagggatgtaccagtgtttagctgagaacaagtatggagccatctacgctagcgccgagctcaagatcttagctagtgcacccaccttcgccctgaaccagctcaagaaaactattatagtgacaaaagaccaagaggtagtgatcgagtgcaagccccaggggtcccctaagccaaccatatcctggaagaagggagatcgcgcagtgcgagaaaataagaggatcgcaatcttacccgacggatcccttcggattctcaacgctagcaagtcggatgaagggaaatacgtttgtcgaggggagaatgtcttcggaagcgcggaaattatcgcatctctgtcggtgaaagaacctaccaggatagagctcacacccaaacgtaccgagcttacggtcggcgaaagcattgtgctcaattgcaaggcaatccacgacgcgtccctcgacgtgaccttctactggacactgaagggacagccaattgactttgaggaggagggaggacattttgagagcattagagctcaggctagctcagcagacctaatgatccggaacattctcttgatgcacgcagggaggtacggatgccgcgtgcagaccaccgccgacagcgtgagtgatgaggctgagttgctcgttcgcggaccgcctggccctcccggtatcgtgatcgtcgaagagataaccgaaagcacagcaaccctgtcgtggagccccgctgctgacaaccactctcccatatcctcatataacctgcaagctcgcagcccattcagtctgggttggcagaccgtgaagacagtgcccgagattataaccggcgacatggaatcggccatggctgtggacctgaacccatgggtggaatatgagtttagagtggtggccaccaacccaataggcaccggcgacccttctacaccttctaggatgatccgcacaaatgaggcagtgcccaagactgccccaactaatgtgtcagggaggtccggacgcagacatgaactggttattgcctgggagcctgtgtccgaggaatttcagaatggagaaggctttggctatattgtggcctttcgaccaaacgggacccggggttggaaagaaaaaatggtcacaagttcagaggcttccaagtttatctaccgcgatgagtcagtgccccctctgaccccatttgaggtcaaagtcggcgtctacaacaacaagggtgatggcccattttcacaaattgtcgtgatttgtagtgctgagggagagccatcagctgctccaaccgacgtcaaggcaaccagcgtgtctgtgtccgagatactggtagcatggaagcatattaaggaatccctgggacgccctcagggcttcgaagtgggctattggaaggatatggagcaggaggacactgcagagactgtaaaaacgcgcggaaatgaatctttcgtcatcctgaccggacttgagggcaacactctgtatcatttcacggtgagagcttacaacggggcagggtacggtccaccaagttcagaagtaagcgcaaccacaaagaaatcccctcccagtcaggccccttccaacttacgctgggagcaacaggggtctcaagtttcactcgggtgggagccagtgatccccttggcgaacgagagcgaggttgtgggctacaaggtgttctataggcaggaggggcatagcaatagccaggttattgaaacccagaaactgcaagccgttgtgcctctgccagacgcaggcgtgtacattattgaggttcgggcatacagcgagggaggcgatggaacagccagttctcaaatccgcgtcccgtcctactcgggcggaaagataacatctgcccagagcactctgcactcgctatcaaccagtagttctagcgtgaccctcctgctggctctgatgattccttccacttcgtggtag

SEQ ID NO: 339784 - DNA, 3679 bp, Artificial Sequence
  derived and/or modified sequence
aaacagggcactctttaatgaagaaacaccagagctgttaaacacattgagacacagaagattctagtgactgaggatggcttcctcttggaaactaatgctgtttctgtcagtcaccatgtgtctttcagaaagtgtggactatgggccagtttttgtgcaagaaccagatgatattatttttccaactgattctgatgaaaagaaggtagcattgaattgtgaagttcgtggcaatccagttcccagttacagatggcttcgaaatggaacagaaatagatctggaaagtgattatcgctacagtttgatagatggcaccttcattataagcaatccaagtgaagcaaaggattctggtcattatcagtgtttagcaaccaacactgtggggagtattcttagtagagaagctacactgcagtttgcctatctgggaaattttagtggccggacaagaagtgcagtctctgtgagggaaggccagggtgtcgttctgatgtgctctcctccgccacattcaccagagatcatctatagctgggtatttaatgagttcccttcctttgtggcggaagacagccggcggttcatctcccaggagacaggcaacctttatatttctaaagtccaaacatcagatgttggcagctatatttgtctggtgaaaaacacagtgacgaatgctagagtccttagtcctccaacgccactcactctgcgtaatgatggtgtgatgggagaatatgagccgaaaattgaggtccattttcctttcacggttacagctgctaaaggaacaactgttaagatggaatgctttgcacttggcaaccccgttccaacaatcacatggatgaaggttaatggttatattcctagtaaggcacgtctgcggaaatctcaggcggtgctggaaataccgaatgtacagctggatgatgcaggcatttatgagtgcagagctgaaaactcacgtggaaaaaattcctttcgtggacaattacaagtatacacctacccacactgggtagaaaaactgaatgatactcagttagacagtgggagccctctccgatgggaatgtaaggctactggaaaacccagacccacgtatcgttggctgaagaatggagtacccctctcacctcagagtagggttgagatggttaatggagtattgatgatccacaatgtgaatcaatcagatgctggaatgtatcagtgtttggctgaaaataagtatggagccatttacgctagtgctgagctgaagattctagcttcagctcccacttttgcactgaatcaactgaagaaaacaataattgttaccaaagaccaagaagttgtcatagagtgcaaaccccaaggctctccaaaaccaaccatctcttggaagaaaggagacagagcagttagagaaaacaaaagaatagctattcttccagacgggagtctacggatcctaaatgcttccaaatcagacgagggaaagtacgtttgccgaggggaaaacgtctttggttctgctgaaattatagcttcgctatctgtaaaagaacctacaaggatagaacttactcctaaaagaacagaattgacagtgggagaaagcattgtccttaattgcaaagcaattcacgatgctagtttggatgtcactttctactggactctgaaaggacagcctattgatttcgaggaagagggtggacattttgaaagcatcagggcccaagcatcctctgcagatttaatgatcaggaacatccttctgatgcatgctgggagatatggctgcagggtacagaccacagcagacagtgtgtcagatgaggcagaacttcttgttaggggacccccaggcccacctgggatagtaattgttgaggaaataaccgaaagtacggccacactgtcctggagcccagcagctgacaaccacagcccaatctcctcctacaaccttcaagctcgcagcccattttccctgggctggcaaacagtaaagacagtcccagaaatcataacaggggacatggagtcagccatggctgtggacctaaatccctgggtggaatatgaatttcgagtggtagccaccaaccctattgggacaggagatccaagcaccccatctcgaatgatccgcacaaatgaagcagttccgaagacagcacccaccaatgtaagcggaagaagtggaagaaggcatgagttagtcattgcctgggagccagtatctgaagagtttcagaatggggaaggcttcggctatattgtggctttcagacccaatggaacacgtggctggaaggaaaaaatggtgacatcctctgaagcttccaaattcatttatcgagatgaaagtgtccctcctcttactccctttgaagtgaaagttggcgtttataacaataaaggagatgggccttttagtcaaattgtggtcatctgttcagctgaaggagaacccagtgctgctcccacagatgtcaaggcgacaagtgtgtctgtgtcagagattcttgttgcatggaaacacattaaagagagtctaggaagaccacagggatttgaggttggttactggaaagacatggaacaggaagatacagcagaaacagtcaaaactagagggaatgagtctttcgtcatcctaacaggattagaaggaaatacgttatatcacttcacagtgagggcttacaatggagctggatatgggccacctagcagtgaagtgagtgcaaccaccaagaaatcccctcctagtcaagcacctagcaacctcaggtgggagcagcaaggctctcaggtttctctgggctgggaacccgtcataccattagccaacgaatctgaagttgtgggttacaaggttttttataggcaagagggtcacagcaacagccaagttattgaaacacagaaacttcaagcagtagtaccactcccagatgctggagtctatattattgaagttcgagcatatagtgaaggaggagatggaacagctagttctcaaattagggtaccatcatattcaggtggaaaaatcacaagtgcacagtcgacccttcactctctctccacatcttcgtcatcagtcaccttgctcttggcattgatgattccttcaacttcctggtgaaaactgctgacttaatttgcttttgtttgctttagcttggtaacagcggtgaatagagtgtagtgtaagtggagaaccaggatcctgagatgagcttgagctttaaaaacttgggactatacatggtgaacttacaggaggttaggggggaaatattacttatccatcaggtttctctttggtttttgtaaacggagaggacagttcttagtccagtaaaaatatgcagattgtatgtaatgaatttttgtaaacaaaggtaatttctgtcaaatgtattctttacttttttaatatgttgggattttattttatatctgatgactccgagtgtgtgccatccatttgttaagtaactggcctttagcagatctgtttcaaaaacaaatacaaaaatgagaatgaaaagtttgcttaagactaagtccagtgtttttcattttccctttggctgaatatttcaattgacaaaccagcaggacatatgaaaaatgcttcagtgatgtggtccattataagata

SEQ ID NO: 339785 - DNA, 3081 bp, Artificial Sequence
  derived and/or modified sequence
atggccagcagctggaagctgatgctgttcctgagcgtgaccatgtgcctgagcgagagcgtggactacggccccgtgttcgtgcaggagcccgacgacatcatcttccccaccgacagcgacgagaagaaggtggccctgaactgcgaggtgagaggcaaccccgtgcccagctacagatggctgagaaacggcaccgagatcgacctggagagcgactacagatacagcctgatcgacggcaccttcatcatcagcaaccccagcgaggccaaggacagcggccactaccagtgcctggccaccaacaccgtgggcagcatcctgagcagagaggccaccctgcagttcgcctacctgggcaacttcagcggcagaaccagaagcgccgtgagcgtgagagagggccagggcgtggtgctgatgtgcagcccccccccccacagccccgagatcatctacagctgggtgttcaacgagttccccagcttcgtggccgaggacagcagaagattcatcagccaggagaccggcaacctgtacatcagcaaggtgcagaccagcgacgtgggcagctacatctgcctggtgaagaacaccgtgaccaacgccagagtgctgagcccccccacccccctgaccctgagaaacgacggcgtgatgggcgagtacgagcccaagatcgaggtgcacttccccttcaccgtgaccgccgccaagggcaccaccgtgaagatggagtgcttcgccctgggcaaccccgtgcccaccatcacctggatgaaggtgaacggctacatccccagcaaggccagactgagaaagagccaggccgtgctggagatccccaacgtgcagctggacgacgccggcatctacgagtgcagagccgagaacagcagaggcaagaacagcttcagaggccagctgcaggtgtacacctacccccactgggtggagaagctgaacgacacccagctggacagcggcagccccctgagatgggagtgcaaggccaccggcaagcccagacccacctacagatggctgaagaacggcgtgcccctgagcccccagagcagagtggagatggtgaacggcgtgctgatgatccacaacgtgaaccagagcgacgccggcatgtaccagtgcctggccgagaacaagtacggcgccatctacgccagcgccgagctgaagatcctggccagcgcccccaccttcgccctgaaccagctgaagaagaccatcatcgtgaccaaggaccaggaggtggtgatcgagtgcaagccccagggcagccccaagcccaccatcagctggaagaagggcgacagagccgtgagagagaacaagagaatcgccatcctgcccgacggcagcctgagaatcctgaacgccagcaagagcgacgagggcaagtacgtgtgcagaggcgagaacgtgttcggcagcgccgagatcatcgccagcctgagcgtgaaggagcccaccagaatcgagctgacccccaagagaaccgagctgaccgtgggcgagagcatcgtgctgaactgcaaggccatccacgacgccagcctggacgtgaccttctactggaccctgaagggccagcccatcgacttcgaggaggagggcggccacttcgagagcatcagagcccaggccagcagcgccgacctgatgatcagaaacatcctgctgatgcacgccggcagatacggctgcagagtgcagaccaccgccgacagcgtgagcgacgaggccgagctgctggtgagaggcccccccggcccccccggcatcgtgatcgtggaggagatcaccgagagcaccgccaccctgagctggagccccgccgccgacaaccacagccccatcagcagctacaacctgcaggccagaagccccttcagcctgggctggcagaccgtgaagaccgtgcccgagatcatcaccggcgacatggagagcgccatggccgtggacctgaacccctgggtggagtacgagttcagagtggtggccaccaaccccatcggcaccggcgaccccagcacccccagcagaatgatcagaaccaacgaggccgtgcccaagaccgcccccaccaacgtgagcggcagaagcggcagaagacacgagctggtgatcgcctgggagcccgtgagcgaggagttccagaacggcgagggcttcggctacatcgtggccttcagacccaacggcaccagaggctggaaggagaagatggtgaccagcagcgaggccagcaagttcatctacagagacgagagcgtgccccccctgacccccttcgaggtgaaggtgggcgtgtacaacaacaagggcgacggccccttcagccagatcgtggtgatctgcagcgccgagggcgagcccagcgccgcccccaccgacgtgaaggccaccagcgtgagcgtgagcgagatcctggtggcctggaagcacatcaaggagagcctgggcagaccccagggcttcgaggtgggctactggaaggacatggagcaggaggacaccgccgagaccgtgaagaccagaggcaacgagagcttcgtgatcctgaccggcctggagggcaacaccctgtaccacttcaccgtgagagcctacaacggcgccggctacggcccccccagcagcgaggtgagcgccaccaccaagaagagcccccccagccaggcccccagcaacctgagatgggagcagcagggcagccaggtgagcctgggctgggagcccgtgatccccctggccaacgagagcgaggtggtgggctacaaggtgttctacagacaggagggccacagcaacagccaggtgatcgagacccagaagctgcaggccgtggtgcccctgcccgacgccggcgtgtacatcatcgaggtgagagcctacagcgagggcggcgacggcaccgccagcagccagatcagagtgcccagctacagcggcggcaagatcaccagcgcccagagcaccctgcacagcctgagcaccagcagcagcagcgtgaccctgctgctggccctgatgatccccagcaccagctggtag

SEQ ID NO: 339786 - protein, 160 aa, Artificial Sequence
  derived and/or modified sequence
MRDEIATTVFFVTRLVKKHDKLSKQQIEDFAEKLMTILFETYRSHWHSDCPSKGQAFRCIRINNNQNKDPILERACVESNVDFSHLGLPKEMTIWVDPFEVCCRYGEKNHPFTVASFKGRWEEWELYQQISYAVSRASSDVSSGTSCDEESCSKEPRVIP

SEQ ID NO: 339787 - protein, 202 aa, Artificial Sequence
  derived and/or modified sequence
MDADKEKDLQKFLKNVDEISNLIQEMNSDDPVVQQKAVLETEKRLLLMEEDQEEDECRTTLNKTMISPPQTAMKSAEEINSEAFLASVEKDAKERAKRRRENKVLADALKEKGNEAFAEGNYETAILRYSEGLEKLKDMKVLYTNRAQAYMKLEDYEKALVDCEWALKCDEKCTKAYFHMGKANLALKNYSVSRECYKKILE

SEQ ID NO: 339788 - protein, 732 aa, Artificial Sequence
  derived and/or modified sequence
MDADKEKDLQKFLKNVDEISNLIQEMNSDDPVVQQKAVLETEKRLLLMEEDQEEDECRTTLNKTMISPPQTAMKSAEEINSEAFLASVEKDAKERAKRRRENKVLADALKEKGNEAFAEGNYETAILRYSEGLEKLKDMKVLYTNRAQAYMKLEDYEKALVDCEWALKCDEKCTKAYFHMGKANLALKNYSVSRECYKKILEINPKLQTQVKGYLNQVDLQEKADLQEKEAHELLDSGKNTAVTTKNLLETLSKPDQIPLFYAGGIEILTEMINECTEQTLFRMHNGFSIISDNEVIRRCFSTAGNDAVEEMVCVSVLKLWQAVCSRNEENQRVLVIHHDRARLLAALLSSKVLAIRQQSFALLLHLAQTESGRSLIINHLDLTRLLEALVSFLDFSDKEANTAMGLFTDLALEERFQVWFQANLPGVLPALTGVLKTDPKVSSSSALCQCIAIMGNLSAEPTTRRHMAACEEFGDGCLSLLARCEEDVDLFREVIYTLLGLMMNLCLQAPFVSEVWAVEVSRRCLSLLNSQDGGILTRAAGVLSRTLSSSLKIVEEALRAGVVKKMMKFLKTGGETASRYAIKILAICTNSYHEAREEVIRLDKKLSVMMKLLSSEDEVLVGNAALCLGNCMEVPNVASSLLKTDLLQVLLKLAGSDTQKTAVQVNAGIALGKLCTAEPRVPAESSHLQFGRESAAPEALSPRRWEEMFHMLVFSLSSVDPPPPPPQTCYP

SEQ ID NO: 339789 - DNA, 2199 bp, Artificial Sequence
  derived and/or modified sequence
atggacgccgacaaggagaaggacctgcagaagttcctgaagaacgtggacgagatcagcaacctgatccaggagatgaacagcgacgaccccgtggtgcagcagaaggccgtgctggagaccgagaagagactgctgctgatggaggaggaccaggaggaggacgagtgcagaaccaccctgaacaagaccatgatcagccccccccagaccgccatgaagagcgccgaggagatcaacagcgaggccttcctggccagcgtggagaaggacgccaaggagagagccaagagaagaagagagaacaaggtgctggccgacgccctgaaggagaagggcaacgaggccttcgccgagggcaactacgagaccgccatcctgagatacagcgagggcctggagaagctgaaggacatgaaggtgctgtacaccaacagagcccaggcctacatgaagctggaggactacgagaaggccctggtggactgcgagtgggccctgaagtgcgacgagaagtgcaccaaggcctacttccacatgggcaaggccaacctggccctgaagaactacagcgtgagcagagagtgctacaagaagatcctggagatcaaccccaagctgcagacccaggtgaagggctacctgaaccaggtggacctgcaggagaaggccgacctgcaggagaaggaggcccacgagctgctggacagcggcaagaacaccgccgtgaccaccaagaacctgctggagaccctgagcaagcccgaccagatccccctgttctacgccggcggcatcgagatcctgaccgagatgatcaacgagtgcaccgagcagaccctgttcagaatgcacaacggcttcagcatcatcagcgacaacgaggtgatcagaagatgcttcagcaccgccggcaacgacgccgtggaggagatggtgtgcgtgagcgtgctgaagctgtggcaggccgtgtgcagcagaaacgaggagaaccagagagtgctggtgatccaccacgacagagccagactgctggccgccctgctgagcagcaaggtgctggccatcagacagcagagcttcgccctgctgctgcacctggcccagaccgagagcggcagaagcctgatcatcaaccacctggacctgaccagactgctggaggccctggtgagcttcctggacttcagcgacaaggaggccaacaccgccatgggcctgttcaccgacctggccctggaggagagattccaggtgtggttccaggccaacctgcccggcgtgctgcccgccctgaccggcgtgctgaagaccgaccccaaggtgagcagcagcagcgccctgtgccagtgcatcgccatcatgggcaacctgagcgccgagcccaccaccagaagacacatggccgcctgcgaggagttcggcgacggctgcctgagcctgctggccagatgcgaggaggacgtggacctgttcagagaggtgatctacaccctgctgggcctgatgatgaacctgtgcctgcaggcccccttcgtgagcgaggtgtgggccgtggaggtgagcagaagatgcctgagcctgctgaacagccaggacggcggcatcctgaccagagccgccggcgtgctgagcagaaccctgagcagcagcctgaagatcgtggaggaggccctgagagccggcgtggtgaagaagatgatgaagttcctgaagaccggcggcgagaccgccagcagatacgccatcaagatcctggccatctgcaccaacagctaccacgaggccagagaggaggtgatcagactggacaagaagctgagcgtgatgatgaagctgctgagcagcgaggacgaggtgctggtgggcaacgccgccctgtgcctgggcaactgcatggaggtgcccaacgtggccagcagcctgctgaagaccgacctgctgcaggtgctgctgaagctggccggcagcgacacccagaagaccgccgtgcaggtgaacgccggcatcgccctgggcaagctgtgcaccgccgagcccagagtgcccgccgagagcagccacctgcagttcggcagagagagcgccgcccccgaggccctgagccccagaagatgggaggagatgttccacatgctggtgttcagcctgagcagcgtggaccccccccccccccccccccagacctgctacccctag

SEQ ID NO: 339790 - DNA, 2199 bp, Artificial Sequence
  derived and/or modified sequence
atggacgccgacaaagagaaggatctgcagaagtttctcaagaacgtcgacgaaatatccaacctgattcaggaaatgaattccgacgacccagtcgtgcaacagaaggcagtgttggagactgaaaagcggctgctgctgatggaagaggatcaagaggaagacgaatgccggactaccctcaacaagacaatgatctcacctcctcagaccgccatgaaatctgcagaggagataaactctgaagccttcctggcgagcgtggagaaagacgcaaaggaaagggccaagaggagacgagagaacaaggtgctggctgacgccctgaaagaaaaggggaacgaagcatttgctgagggtaattatgagacagccatactgcgttattcagaggggctggaaaagctgaaggacatgaaagtactgtataccaaccgtgcccaagcatatatgaagttagaagattacgaaaaagcgctagtggattgcgaatgggccctcaagtgcgacgagaagtgcacaaaggcttatttccatatgggaaaagcaaacctggccctgaagaattattccgtgtcgcgcgaatgctacaaaaaaatcctagagatcaaccccaagctgcagactcaagtcaagggatacctcaaccaagtggatctgcaggagaaggccgacctgcaggagaaggaggcccatgaactcctggatagtgggaaaaacaccgccgtgactacaaaaaatttgctggagaccctgagcaagccggaccagatacctctgttttatgccggagggatcgagatcctgaccgagatgattaacgagtgtacagaacagacactgtttcgtatgcataacggatttagtattataagtgacaatgaagtgattcgccgatgctttagcaccgccggcaatgacgcagtcgaggaaatggtctgcgtgagcgttctgaagctctggcaagcagtctgtagcagaaacgaagaaaatcagagagtcctggtcatccaccacgacagggcaaggctgctcgccgccctgctctcatctaaggtgcttgcgatacggcagcagagcttcgcactcctcttgcatctcgcacagaccgagtcgggtaggtccctgatcattaaccatctcgatctgacccggttattagaggcactagtgtccttcctcgacttctcagacaaagaagctaacactgctatgggcctgttcaccgacttagcactcgaagagcgattccaggtgtggtttcaagcaaatctgcccggggtgttgcctgcgctcacaggagtgctgaagacagacccaaaagtatctagctcatccgctctgtgccagtgcatcgccataatgggcaaccttagcgccgaacccacaacccgacgccatatggccgcgtgcgaggagtttggcgacgggtgcctgtccctgctggcacgttgcgaggaagacgtggacctgttccgcgaggttatctatactctcctgggactgatgatgaacttgtgtctgcaggctccatttgtaagcgaagtgtgggcggttgaagtgtcacggaggtgcctgtccttgttaaactcgcaggatggtggcatcctgacaagagccgctggtgtgctgagccgcacactgtcctcgtcactgaagattgttgaggaagccctccgggccggagttgtcaaaaaaatgatgaaatttttgaaaaccggcggcgagacagcctcccgatacgccattaagattctcgcaatctgtaccaattcttaccacgaagccagagaggaggtcatcagacttgacaaaaaactttccgtgatgatgaagctgctgtccagcgaggatgaggttctcgtggggaatgcagcgttgtgtctaggaaattgcatggaggtccccaacgtggcaagttccctcctgaaaaccgatttactccaggttttgctgaagctcgccggctcggacactcagaaaactgctgttcaggtgaatgcgggcatcgccctgggcaagctatgcaccgctgagccacgagtgccagccgagagctcgcacctgcagtttggtcgcgaatctgccgcacctgaagccctgagcccccgcaggtgggaggagatgtttcatatgctggtattttccctcagcagcgttgacccaccgcccccccctccgcaaacgtgttatccctag

SEQ ID NO: 339791 - DNA, 2199 bp, Artificial Sequence
  derived and/or modified sequence
atggatgctgacaaggagaaggacctgcagaagttcctgaagaatgtggatgagatcagcaacctgatccaggagatgaacagtgatgatcctgtggtgcagcagaaggctgtgctggagacagagaagaggctgctgctgatggaggaggaccaggaggaggatgagtgcaggaccaccctgaacaagaccatgatcagccccccccagacagccatgaagtctgctgaggagatcaacagcgaggccttcctggcctctgtggagaaggatgccaaggagcgggccaagagaagaagagagaacaaggtgctggctgatgccctgaaggagaagggaaatgaggcctttgctgagggcaactatgaaacagccatcctgcgctacagcgagggcctggagaagctgaaggacatgaaggtgctgtacaccaacagagcccaggcctacatgaagctggaggactatgagaaggccctggtggactgtgagtgggccctgaagtgtgatgagaagtgcaccaaggcctacttccacatgggcaaggccaacctggccctgaagaactacagcgtgtcccgggagtgctacaagaagatcctggagatcaaccccaagctgcagacccaggtgaagggctacctgaaccaggtggacctgcaggagaaggctgacctgcaggagaaggaggcccacgagctgctggacagcggcaagaacacagctgtgaccaccaagaacctgctggagaccctgagcaagccagaccagatccccctcttctacgccggcggcatcgagatcctgacagagatgatcaatgaatgtacagagcagaccctcttcaggatgcacaacggcttcagcatcatcagtgacaatgaggtgatccgccgctgcttcagcacagctggaaatgatgctgtggaggagatggtgtgtgtgtctgtgctgaagctgtggcaggccgtgtgcagcagaaatgaggagaaccagagggtgctggtgatccaccacgaccgggcccggctgctggccgccctgctgagcagcaaggtgctggccatccggcagcagagctttgccctgctgctgcacctggcccagacagagagcggccgcagcctcatcatcaaccacctggacctgacccggctgctggaggccctggtgtccttcctggacttcagtgacaaggaggccaacacagccatgggcctcttcacagacctggccctggaggagcgcttccaggtgtggttccaggccaacctgcccggggtgctgcctgccctgactggagtgctgaagacagaccccaaggtgagcagcagcagcgccctgtgccagtgcatcgccatcatgggcaacctgtctgctgagcccaccaccaggaggcacatggccgcctgtgaggagtttggagatggctgcctgagcctgctggcccgctgtgaagaagatgtggacctcttccgggaggtgatctacaccctgctgggcctgatgatgaacctgtgcctgcaggccccctttgtgtctgaggtgtgggccgtggaggtgtcccggcgctgcctgagcctgctgaacagccaggacggcggcatcctgaccagggctgctggggtgctgagcaggaccctgagcagcagcctgaagatcgtggaggaggccctgcgggccggcgtggtgaagaagatgatgaagttcctgaagacaggaggagaaacagccagccgctatgccatcaagatcctggccatctgcaccaacagctaccacgaggcccgggaggaggtgatccggctggacaagaagctgtctgtgatgatgaagctgctgagcagtgaagatgaggtgctggtgggcaatgctgccctgtgcctgggcaactgcatggaggtgcccaacgtggccagcagcctgctgaagacagacctgctgcaggtgctgctgaagctggccggcagtgacacccagaagacagctgtgcaggtgaatgccggcatcgccctgggcaagctgtgcacagctgagccccgggtgcctgctgagagcagccacctgcagtttggccgggagagcgctgcccctgaggccctgagcccccggcgctgggaggagatgttccacatgctggtgttcagcctgagctctgtggaccccccacctcctccaccccagacctgctacccctag

SEQ ID NO: 339792 - DNA, 2199 bp, Artificial Sequence
  derived and/or modified sequence
atggacgccgacaaggagaaggacctgcagaagttcctgaagaacgtggacgagattagcaatcttatccaagagatgaacagcgatgatcccgttgtgcagcagaaagcggtcttagaaacagaaaaaagacttctgctcatggaggaggatcaagaggaggatgagtgccggaccactctgaacaagacaatgatatctcccccacaaacagctatgaagtcagcagaagagatcaacagcgaagcatttctcgcatcagtggaaaaagacgctaaggagagggcgaaacggaggagagaaaacaaggtcctcgctgatgccttaaaagagaaagggaatgaggctttcgctgaaggaaactatgagaccgccatactcagatactccgaaggcctggaaaagctaaaagatatgaaggtcctgtataccaaccgcgcccaggcttatatgaagttggaggattatgaaaaggcactggttgactgcgagtgggcgctgaagtgtgacgaaaaatgtactaaggcctatttccatatgggcaaggccaatctggcacttaagaactatagtgtgtcacgagaatgttacaagaagattttagagatcaatccaaaactccaaacacaggttaagggatatctcaatcaggtagatttacaggagaaagccgatctgcaggaaaaggaggctcacgagctcctggactctgggaagaacaccgccgtcaccaccaaaaacttgcttgagaccctttccaagcctgaccaaatccctttgttttatgcagggggcattgaaatactcacagagatgattaatgagtgcacggaacagactctgtttagaatgcacaacggattttcaatcatatcggataacgaagtcattcgtcgctgcttttctacagcaggaaacgatgccgtggaggagatggtatgtgttagcgtgctgaagctgtggcaggctgtgtgctctagaaatgaagagaatcagcgtgtgcttgtaatccaccacgatcgcgctcgtttactagctgcgctgttgagttccaaggtgctggccatacggcagcagtcctttgctcttctgctccacctcgcacagaccgagtccggccgcagcttaattattaaccacctggacctgacaaggctgttggaggcgctggttagctttctggacttttctgacaaggaggctaatacagccatggggctgttcacagacttggccctggaggaacgctttcaggtttggtttcaggctaatcttcccggtgtgctgccagccctgaccggggtgctgaagaccgatcccaaggtgtcttcttcatctgccttatgccaatgcatcgcaatcatgggaaacctgagcgctgagcctacaacccgacgccacatggccgcatgcgaggaatttggggacggctgcctgtccctgttggccagatgtgaagaggatgttgatttgttccgggaggtcatctacaccctgcttggactgatgatgaacctctgcctgcaagccccattcgtcagcgaggtctgggccgtggaagtctctcgccggtgtctgtccttacttaattctcaggatggcggtatcctcacacgggccgccggcgttctctccagaaccctctcctcaagcttgaagattgtcgaggaagcgcttagggccggcgttgtgaaaaagatgatgaagttcctcaaaaccggcggcgagactgcttctcggtacgccataaaaatcttagcaatttgtaccaattcttatcatgaggctagagaggaagttatccgccttgataagaaactgagtgtgatgatgaagttactgagttcagaagatgaggtattggtgggcaatgctgcattgtgtttgggcaattgcatggaggtgcccaacgtggccagttccctgctaaaaacagatctgctgcaggtgcttctaaaactagcaggttccgatacccagaagactgccgtgcaggtgaacgctggtatcgctctcgggaaactgtgcaccgccgagcctcgcgtaccagccgagtcctctcacctgcagtttggcagggagtcagccgcccccgaagcactctcccccaggaggtgggaggagatgttccacatgctggtgttctccctgtcctccgtagacccgccacccccacctccgcaaacatgctacccttag

SEQ ID NO: 339793 - DNA, 2199 bp, Artificial Sequence
  derived and/or modified sequence
atggatgccgacaaagagaaggacttgcagaagtttctgaaaaacgtagatgaaatatccaacctgattcaggaaatgaatagcgacgatcctgttgtccagcagaaggcggtattagagaccgaaaagcgcctgttgttaatggaagaagatcaggaggaagatgagtgtcgtaccaccctgaataagaccatgatttcacctccccaaacagcaatgaagagcgctgaggagattaatagcgaagctttccttgccagtgtggaaaaggatgcaaaagaacgggctaagagaagaagggaaaacaaggtattggctgatgccctgaaagaaaagggaaatgaggcatttgcagaaggtaactatgaaactgcgattctccgctatagcgaggggttggagaagctcaaggacatgaaagtgctctacacgaaccgcgcacaggcatacatgaagctcgaggattatgagaaagccctggtggactgtgaatgggccctgaaatgcgatgaaaagtgtactaaggcctactttcatatggggaaggccaacctagcactgaagaactacagcgtgagccgggagtgttataagaaaatccttgagattaaccctaagttacagacgcaggtgaaaggctatttgaatcaggtcgatctgcaggagaaggcagatctgcaggaaaaggaggcacatgagctcctggacagcgggaaaaataccgcggtgacgactaaaaacctgctggaaaccctgagtaagcctgaccaaatccccctgttctatgccggaggcatcgagattctcaccgaaatgattaacgagtgcacagagcagaccctcttccgaatgcacaacggtttttccattatcagtgataacgaggtcatccgacgttgcttttcaaccgccggaaacgatgctgtcgaggagatggtgtgtgtgagcgttctgaaactttggcaggccgtgtgttccagaaatgaagagaaccagcgggtgcttgtcatccaccatgacagagccagactactggcagccctgctgtctagtaaagttctggctatccgccagcagtcatttgccctgctgctgcatttagcccaaacggaaagcggaagatctcttatcattaatcaccttgatcttacaagactgctggaagcgttagtgtcgtttctggatttttccgataaagaggccaacaccgcaatgggccttttcacagatctcgcactcgaggagagatttcaggtttggtttcaggctaatctgcccggtgttctgcccgcactgacaggtgtgctgaagaccgatcccaaagttagtagctcctcagccctctgccagtgtattgccatcatgggtaacctgtcagctgagcccactacacggcgacacatggccgcttgtgaagagttcggagatggctgcctttccctgttagccagatgcgaggaagacgtggatctcttccgagaggtgatatatactctgcttggcctgatgatgaatctgtgtctgcaagccccttttgttagcgaagtgtgggctgtggaggtgtcaagacgctgtctctcgctcctgaactctcaggatggcggtatcttgactcgggctgccggagttctgtctaggaccctcagttcttcattaaagatagtggaggaagccctgcgagctggcgtcgtcaaaaagatgatgaagtttctgaagactggcggagagacggcaagtagatacgcgatcaagattctcgctatctgcaccaacagctaccacgaagcaagggaggaagtcatcaggctagacaagaagctgagcgtgatgatgaaacttttaagcagcgaggatgaggtgttagtgggcaacgcggctctatgcctgggcaattgcatggaagtaccaaacgtggcatcatccctcctgaaaaccgatctcttgcaagtcttactgaagttagcaggctccgatacgcagaaaactgccgtgcaggtgaacgcgggtatcgctttaggcaaactgtgcaccgcagagccaagggtacctgccgagtccagccacctccaattcggcagagaatcagccgctcccgaggctctttcgcctaggagatgggaagagatgttccatatgttggtgttctccttgtcatccgttgatccacctccccctcctccccagacttgctatccatag

SEQ ID NO: 339794 - DNA, 2250 bp, Artificial Sequence
  derived and/or modified sequence
actgcgccatttcctgtccaaagctgggcgaatcagggattccggttcacaatggatgctgataaagagaaagatttgcagaaatttcttaaaaatgtggatgaaatctccaatttaattcaggagatgaattctgatgacccagttgtgcaacagaaagctgtcctggagacagaaaagagactactgcttatggaggaagaccaggaggaggatgaatgcaggaccaccttgaacaagactatgatcagtcctccacaaactgctatgaagagtgcagaagaaataaactcagaggccttcttggcatctgtggagaaggatgcaaaggaacgagccaagagaagaagggaaaacaaagtcttggcggatgccctaaaagaaaaagggaatgaagcatttgctgaaggcaattatgaaacagctatcctgcgctacagtgagggtttggagaagctgaaggacatgaaagtgctgtacaccaaccgagcccaggcttatatgaaacttgaggactatgagaaggcactggtggattgtgagtgggctctcaagtgtgatgaaaaatgcacaaaagcatattttcacatgggaaaagccaacctggccctgaagaactacagtgtgtctagagagtgttataagaagatcttagaaataaaccccaagctgcaaacccaggtgaaaggttacctgaatcaagtagatcttcaggaaaaagcagaccttcaagaaaaggaagcccacgaactgctggattcaggaaagaacacagccgtgaccaccaagaacctcctggagaccctttccaagcctgaccagatccccttgttctatgctggggggattgagatcctgactgaaatgataaatgagtgcacagaacaaactttattcagaatgcacaatggatttagtatcatcagtgacaacgaggtcataagaaggtgtttttccacagcaggaaatgatgcagttgaagaaatggtctgtgtgtctgttctcaagctctggcaagcagtgtgcagcaggaacgaggaaaaccagcgtgtgctagtgatacaccatgacagggccaggctgttggccgccctcttgtcctccaaggtcctggccatccggcagcagagctttgccctgctgctgcatctcgcccagactgagagcggacggagcctgatcatcaaccaccttgacctgaccagattattggaagcgctggtgtcatttcttgatttctcggataaggaggccaacactgctatgggactgttcacagacttggctctggaagaaagattccaagtctggttccaggccaaccttccaggtgttctccctgcactcacaggcgttctgaagacagatcccaaggtaagcagctcctcggctctgtgccagtgcattgccatcatgggaaacctcagtgctgagcccactacccgaagacacatggcggcctgtgaggaatttggggatggctgcttgagcctcctggccaggtgtgaggaggatgtggacctgttcagagaggttatctacacactcctgggactcatgatgaacctgtgtcttcaggctccctttgtctctgaggtttgggctgtggaggtgagcagaaggtgcctgtctttactaaacagccaggatggaggaatcctgacaagagctgctggtgttctgagccggaccctttcttcctctctgaaaattgttgaggaggccttgcgagcaggagtggtaaagaaaatgatgaaattcctgaagacaggaggtgagactgcatcacgttatgctataaagatactagctatctgcacgaatagttatcatgaagctcgggaagaagtaataagactggataaaaagttgagcgttatgatgaagctgctcagctcggaggatgaggttctggtgggcaacgctgccctctgccttggtaactgcatggaggtgcccaacgttgcgtcttccctgctaaagacggaccttttgcaggtcttgttaaagcttgcaggcagtgacacacagaagacggccgtgcaggtgaacgcaggcattgctctggggaagctgtgcacagctgagcccagagtgcctgccgagagcagtcatctccaatttggaagagagtctgctgcacctgaagctctgtctcctcgcaggtgggaagagatgtttcacatgctagtattctccctctccagtgtggatccacccccgccaccgccccaaacttgttacccctaa

SEQ ID NO: 339795 - DNA, 324 bp, Artificial Sequence
  derived and/or modified sequence
atggacgccgacaaggagaaggacctgcagaagttcctgaagaacgtggacgagatcagcaacctgatccaggagatgaacagcgacgaccccgtggtgcagcagaaggccgtgctggagaccgagaagagactgctgctgatggaggaggaccaggaggaggacgagtgcagaaccaccctgaacaagaccatgatcagccccccccagaccgccatgaagagcgccgaggagatcaacagcgaggccttcctggccagcgtggagaaggacgccaaggagagagccaagagaagaagagagaacaaggtgctggccgactag

SEQ ID NO: 339796 - DNA, 609 bp, Artificial Sequence
  derived and/or modified sequence
atggacgccgacaaggagaaggacctgcagaagttcctgaagaacgtggacgagatcagcaacctgatccaggagatgaacagcgacgaccccgtggtgcagcagaaggccgtgctggagaccgagaagagactgctgctgatggaggaggaccaggaggaggacgagtgcagaaccaccctgaacaagaccatgatcagccccccccagaccgccatgaagagcgccgaggagatcaacagcgaggccttcctggccagcgtggagaaggacgccaaggagagagccaagagaagaagagagaacaaggtgctggccgacgccctgaaggagaagggcaacgaggccttcgccgagggcaactacgagaccgccatcctgagatacagcgagggcctggagaagctgaaggacatgaaggtgctgtacaccaacagagcccaggcctacatgaagctggaggactacgagaaggccctggtggactgcgagtgggccctgaagtgcgacgagaagtgcaccaaggcctacttccacatgggcaaggccaacctggccctgaagaactacagcgtgagcagagagtgctacaagaagatcctggagtag

SEQ ID NO: 339797 - DNA, 504 bp, Artificial Sequence
  derived and/or modified sequence
atggacgccgacaaggagaaggacctgcagaagttcctgaagaacgtggacgagatcagcaacctgatccaggagatgaacagcgacgaccccgtggtgcagcagaaggccgtgctggagaccgagaagagactgctgctgatggaggaggaccaggaggaggacgagtgcagaaccaccctgaacaagaccatgatcagccccccccagaccgccatgaagagcgccgaggagatcaacagcgaggccttcctggccagcgtggagaaggacgccaaggagagagccaagagaagaagagagaacaaggtgctggccgacgccctgaaggagaagggcaacgaggccttcgccgagggcaactacgagaccgccatcctgagatacagcgagggcctggagaagctgaaggacatgaaggtgctgtacaccaacagagcccaggcctacatgaagctggaggactacgagaaggccctggtggactgcgagtgggccctgtag

SEQ ID NO: 339798 - DNA, 324 bp, Artificial Sequence
  derived and/or modified sequence
atggacgccgacaaggagaaggatctgcagaagtttttgaaaaacgtggacgaaatctctaatcttatccaggagatgaactctgatgaccctgtcgtccagcagaaggcagtgttggagaccgaaaaacggctactgctgatggaagaggaccaggaggaagacgagtgcaggaccaccctcaataaaactatgatctccccaccacagactgcaatgaagtcagcggaggagattaattctgaagcgttcttagccagcgtagagaaagacgctaaggaacgcgctaaaagacgaagagagaacaaggtcttggctgattag

SEQ ID NO: 339799 - DNA, 609 bp, Artificial Sequence
  derived and/or modified sequence
atggacgccgacaaggaaaaagatctgcagaagttcctcaagaatgtggatgagatctcaaatcttattcaagagatgaactctgacgaccctgtcgtgcaacagaaagccgtccttgaaacagagaaaagactcctgcttatggaggaggatcaggaagaagacgaatgtagaaccactttaaacaaaacaatgatttcacccccacagacagctatgaagagcgctgaggagattaatagcgaagcttttctggcctcagttgaaaaagacgcaaaggagcgagccaaaaggaggcgcgagaataaggttctcgctgatgctctgaaggagaagggcaatgaagccttcgcggaaggcaattacgagactgctattttaagatactcggagggactggagaaacttaaggacatgaaggttctctacaccaaccgggcccaggcatatatgaagctcgaggactacgaaaaggcacttgtggactgtgaatgggcactgaagtgcgatgagaagtgcactaaagcttattttcacatggggaaggctaaccttgcactgaagaactattccgtatcaagggaatgttacaaaaaaatcctggagtag

SEQ ID NO: 339800 - DNA, 504 bp, Artificial Sequence
  derived and/or modified sequence
atggatgccgacaaggagaaggacctccagaagtttctgaagaacgtcgacgaaattagtaatctgattcaggagatgaacagcgatgaccctgttgtccagcaaaaggctgtcttggagactgaaaaaagactcttgttgatggaggaagatcaggaggaagatgaatgtcggactactctcaataagacaatgattagtcccccacaaaccgctatgaagtcggccgaagagatcaatagtgaagcttttctggctagtgtggaaaaagacgctaaagaacgcgcgaaacgtcggagagaaaacaaggtgctggcagacgctcttaaggagaagggcaacgaggcgttcgccgagggcaattatgaaaccgccattcttagatactccgaggggctggagaaactcaaagacatgaaggtgctatacacgaatcgcgcccaggcttacatgaagctcgaggactacgaaaaagccctcgtggattgcgagtgggcactatag

SEQ ID NO: 339801 - DNA, 324 bp, Artificial Sequence
  derived and/or modified sequence
atggatgctgacaaggagaaggacctgcagaagttcctgaagaatgtggatgagatcagcaacctgatccaggagatgaacagtgatgatcctgtggtgcagcagaaggctgtgctggagacagagaagaggctgctgctgatggaggaggaccaggaggaggatgagtgcaggaccaccctgaacaagaccatgatcagccccccccagacagccatgaagtctgctgaggagatcaacagcgaggccttcctggcctctgtggagaaggatgccaaggagcgggccaagagaagaagagagaacaaggtgctggccgactag

SEQ ID NO: 339802 - DNA, 609 bp, Artificial Sequence
  derived and/or modified sequence
atggatgctgacaaggagaaggacctgcagaagttcctgaagaatgtggatgagatcagcaacctgatccaggagatgaacagtgatgatcctgtggtgcagcagaaggctgtgctggagacagagaagaggctgctgctgatggaggaggaccaggaggaggatgagtgcaggaccaccctgaacaagaccatgatcagccccccccagacagccatgaagtctgctgaggagatcaacagcgaggccttcctggcctctgtggagaaggatgccaaggagcgggccaagagaagaagagagaacaaggtgctggctgatgccctgaaggagaagggaaatgaggcctttgctgagggcaactatgaaacagccatcctgcgctacagcgagggcctggagaagctgaaggacatgaaggtgctgtacaccaacagagcccaggcctacatgaagctggaggactatgagaaggccctggtggactgtgagtgggccctgaagtgtgatgagaagtgcaccaaggcctacttccacatgggcaaggccaacctggccctgaagaactacagcgtgtcccgggagtgctacaagaagatcctggagtag

SEQ ID NO: 339803 - DNA, 504 bp, Artificial Sequence
  derived and/or modified sequence
atggatgctgacaaggagaaggacctgcagaagttcctgaagaatgtggatgagatcagcaacctgatccaggagatgaacagtgatgatcctgtggtgcagcagaaggctgtgctggagacagagaagaggctgctgctgatggaggaggaccaggaggaggatgagtgcaggaccaccctgaacaagaccatgatcagccccccccagacagccatgaagtctgctgaggagatcaacagcgaggccttcctggcctctgtggagaaggatgccaaggagcgggccaagagaagaagagagaacaaggtgctggctgatgccctgaaggagaagggaaatgaggcctttgctgagggcaactatgaaacagccatcctgcgctacagcgagggcctggagaagctgaaggacatgaaggtgctgtacaccaacagagcccaggcctacatgaagctggaggactatgagaaggccctggtggactgtgagtgggccctgtag

SEQ ID NO: 339804 - DNA, 324 bp, Artificial Sequence
  derived and/or modified sequence
atggacgccgacaaggagaaggacctgcagaagttcctgaagaacgtggatgagattagcaacctgatccaagagatgaacagtgacgaccccgtcgttcagcagaaggccgtcctagagaccgaaaagcggctccttttgatggaggaggatcaggaggaggatgaatgtaggacgactctgaacaaaacaatgatatctcctcctcagacagctatgaagtcagctgaggagatcaactccgaggctttcctcgctagtgtggagaaagatgccaaagagcgcgccaaacgccggcgagagaataaggtgttagccgactag

SEQ ID NO: 339805 - DNA, 609 bp, Artificial Sequence
  derived and/or modified sequence
atggacgccgacaaggagaaggacctgcagaagttcctgaagaacgtcgatgaaataagcaacctcatccaggagatgaattctgatgatccagtggttcagcagaaggccgtcctagaaacagagaaacgcctgctgctgatggaggaggaccaagaggaggacgagtgccgtactacgctaaacaagacaatgataagccctccgcagacggctatgaagagcgctgaggaaatcaatagcgaagcgtttcttgcctctgtcgagaaggacgccaaggaacgcgccaaaaggagacgtgagaacaaggtgctagcagatgcattgaaagagaagggcaatgaggcatttgccgagggaaattatgagaccgcgatacttcggtactccgagggcctggagaaactgaaagacatgaaggttttatacactaacagagcacaggcctatatgaagctcgaggactatgagaaagccctcgtggactgtgagtgggcactgaaatgtgacgaaaagtgcacaaaggcatactttcacatggggaaagccaatcttgctcttaaaaattacagtgtctctcgagaatgttataagaaaattctcgaatag

SEQ ID NO: 339806 - DNA, 504 bp, Artificial Sequence
  derived and/or modified sequence
atggacgccgacaaggagaaggacctgcagaagttcctgaagaacgtggacgagatcagcaacttaattcaggagatgaatagtgatgatcctgtggtgcagcaaaaagctgtgcttgaaacagaaaaacggctgctacttatggaggaagaccaagaagaagatgagtgcaggacgactttgaacaagactatgattagcccccctcagacagccatgaaaagcgcagaagaaattaatagcgaggcttttttagcatccgtagaaaaggacgctaaagaacgtgccaaacgtaggagagaaaataaagtgctcgccgacgcattgaaagaaaagggaaacgaggcttttgcagagggcaattacgaaacggctatattaaggtacagcgaagggctggaaaagctcaaagacatgaaagtcctttacacaaaccgtgctcaggcttacatgaagctcgaagattacgaaaaagccctggtcgactgcgagtgggctctctag

SEQ ID NO: 339807 - DNA, 324 bp, Artificial Sequence
  derived and/or modified sequence
atggacgcagataaggagaaggatcttcagaaattccttaaaaatgtcgacgaaatctccaatcttatccaggagatgaacagcgacgatcccgttgtacaacagaaagcagtattggagaccgaaaaaagactgctgttgatggaggaggaccaggaggaagatgagtgccgtacaaccctgaataaaacaatgatctctccgcctcagaccgccatgaagagtgccgaggagatcaactccgaggccttcctggcctccgtcgagaaggacgctaaagaacgtgctaagcgtcgtagggagaataaggtgctcgccgactag

SEQ ID NO: 339808 - DNA, 609 bp, Artificial Sequence
  derived and/or modified sequence
atggatgcggataaagagaaggacttacagaaattcctgaaaaatgtcgatgaaattagcaacctgatccaggaaatgaacagtgatgaccccgtggtgcaacagaaggccgtcttagagacagaaaaacgccttctcctgatggaggaagaccaggaggaggacgagtgcaggaccacattgaacaagaccatgatatctccaccacagactgctatgaagtcagccgaggaaatcaactcggaggcttttctggcctctgtggagaaagacgctaaggagagggccaagagacggcgagagaacaaggtgctggcagatgctttgaaggagaagggtaacgaggcttttgccgagggaaactacgaaaccgcaattttgcggtacagcgaagggctggagaaactcaaagatatgaaggtcctctacaccaatagagctcaggcctacatgaagctggaagactatgaaaaggcattagtggattgcgaatgggcattaaagtgcgacgagaagtgtacgaaagcctacttccacatggggaaagccaacctggctcttaagaactattctgtctccagagaatgttataagaagattctggaatag

SEQ ID NO: 339809 - DNA, 504 bp, Artificial Sequence
  derived and/or modified sequence
atggatgcggacaaagagaaggacttgcaaaagtttctcaagaatgttgacgagatcagtaaccttatccaggaaatgaatagtgatgacccagtggtgcagcagaaggccgttttagagacagagaagcgcctgcttctgatggaagaggatcaggaagaggatgaatgtcggaccacactgaataaaactatgatcagtcctccacaaaccgccatgaagagtgccgaggagattaatagcgaggcatttttagcatcagttgagaaggacgctaaggagagggctaaaagacgccgagaaaacaaggtgctcgcagacgcactgaaagagaaaggcaatgaggcatttgctgaaggaaactacgagacggcaatactccgctatagcgagggcctagagaagctgaaagacatgaaagtgctgtatacgaacagggcacaggcatacatgaaactggaagactatgagaaagctcttgtcgattgtgaatgggccttgtag

SEQ ID NO: 339810 - DNA, 669 bp, Artificial Sequence
  derived and/or modified sequence
ggtcactgcgccatttcctgtccaaagctgggcgaatcaggtccctaaatcgccggggttgatgttggctttggaagaactatttgcagagcgttttctgcactggaaggagggctggaagctttctggaagcattgccgcacgtaaatgagtgcctcttggcctaaaacagcagttggaatgaaagggatcaccctgctgttattcattgacataaacaaaactgtcataaaaataatcacttggctcttagttttagaaggctaataagcctgaccgttctgtttagtgctttattattattaatttcaccattatgctgcatcccttagggattccggttcacaatggatgctgataaagagaaagatttgcagaaatttcttaaaaatgtggatgaaatctccaatttaattcaggagatgaattctgatgacccagttgtgcaacagaaagctgtcctggagacagaaaagagactactgcttatggaggaagaccaggaggaggatgaatgcaggaccaccttgaacaagactatgatcagtcctccacaaactgctatgaagagtgcagaagaaataaactcagaggccttcttggcatctgtggagaaggatgcaaaggaacgagccaagagaagaagggaaaacaaagtcttggcggatg

SEQ ID NO: 339811 - DNA, 764 bp, Artificial Sequence
  derived and/or modified sequence
ggtcactgcgccatttcctgtccaaagctgggcgaatcaggtccctaaatcgccggggttgatgttggctttggaagaactatttgcagagcgttttctgcactggaaggagggctggaagctttctggaagcattgccgcacggattccggttcacaatggatgctgataaagagaaagatttgcagaaatttcttaaaaatgtggatgaaatctccaatttaattcaggagatgaattctgatgacccagttgtgcaacagaaagctgtcctggagacagaaaagagactactgcttatggaggaagaccaggaggaggatgaatgcaggaccaccttgaacaagactatgatcagtcctccacaaactgctatgaagagtgcagaagaaataaactcagaggccttcttggcatctgtggagaaggatgcaaaggaacgagccaagagaagaagggaaaacaaagtcttggcggatgccctaaaagaaaaagggaatgaagcatttgctgaaggcaattatgaaacagctatcctgcgctacagtgagggtttggagaagctgaaggacatgaaagtgctgtacaccaaccgagcccaggcttatatgaaacttgaggactatgagaaggcactggtggattgtgagtgggctctcaagtgtgatgaaaaatgcacaaaagcatattttcacatgggaaaagccaacctggccctgaagaactacagtgtgtctagagagtgttataagaagatcttagaa

SEQ ID NO: 339812 - DNA, 830 bp, Artificial Sequence
  derived and/or modified sequence
gtctggggcaggctccgcgcggggctcgggcacaggtccccgctgccgcagccctaccgagtgaagcactgagcgcggcgccgcttcgccatcacctggctctggccctctcaccctagcgtaggggggcactggccaggcagtgaggaccctgagatccatgccctgggagacagaggttgtctcctgtccatgcacccgcgcgcctgccttctaaccttcataccgttgggcagattaattcactggactaggcctctgttccgtgggagttgaaaagatttgacctggaagaaaccctagcgattattcaggattccggttcacaatggatgctgataaagagaaagatttgcagaaatttcttaaaaatgtggatgaaatctccaatttaattcaggagatgaattctgatgacccagttgtgcaacagaaagctgtcctggagacagaaaagagactactgcttatggaggaagaccaggaggaggatgaatgcaggaccaccttgaacaagactatgatcagtcctccacaaactgctatgaagagtgcagaagaaataaactcagaggccttcttggcatctgtggagaaggatgcaaaggaacgagccaagagaagaagggaaaacaaagtcttggcggatgccctaaaagaaaaagggaatgaagcatttgctgaaggcaattatgaaacagctatcctgcgctacagtgagggtttggagaagctgaaggacatgaaagtgctgtacaccaaccgagcccaggcttatatgaaacttgaggactatgagaaggcactggtggattgtgagtgggctctca

SEQ ID NO: 339813 - protein, 215 aa, Artificial Sequence
  derived and/or modified sequence
MPAFNRLFPLASLVLIYWVSVCFPVCVEVPSETEAVQGNPMKLRCISCMKREEVEATTVVEWFYRPEGGKDFLIYEYRNGHQEVESPFQGRLQWNGSKDLQDVSITVLNVTLNDSGLYTCNVSREFEFEAHRPFVKTTRLIPLRVTEEAGEDFTSVVSEIMMYILLVFLTLWLLIEMIYCYRKVSKAEEAAQENASDYLAIPSENKENSAVPVEE

SEQ ID NO: 339814 - protein, 141 aa, Artificial Sequence
  derived and/or modified sequence
MPAFNRLFPLASLVLIYWVSVCFPVCVEVPSETEAVQGNPMKLRCISCMKREEVEATTVVEWFYRPEGGKDFLIYEYRNGHQEVESPFQGRLQWNGSKDLQDVSITVLNVTLNDSGLYTCNVSREFEFEAHRPFVKTTRLI

SEQ ID NO: 339815 - DNA, 648 bp, Artificial Sequence
  derived and/or modified sequence
atgccggccttcaatcgtctctttccattggcaagtctcgtgctaatctactgggtgtccgtgtgcttcccagtgtgcgtggaagttcccagcgagacagaggctgtgcaaggcaaccctatgaaacttaggtgtatttcttgcatgaaaagagaggaggtggaagcgaccactgtcgtcgagtggttttacaggcctgagggaggcaaagatttcctgatctacgaataccgcaacggtcaccaagaggtggagtctccttttcagggacgcctccagtggaacggctctaaagacctccaggatgtgtctattacagttcttaatgtgactctgaatgatagcggactgtacacctgtaacgtgagcagggagttcgagtttgaagcccacagacccttcgtgaagacaacacgcctgattcctcttcgcgtgacggaggaggccggcgaggattttacaagcgttgtgtccgaaatcatgatgtatatcttgctcgtgttcctgacactctggctgctcatagaaatgatctactgttaccgaaaggtatctaaggccgaagaggccgcccaagagaacgcctcggactatctggccataccatctgagaataaggaaaacagtgccgttccagtggaggagtag

SEQ ID NO: 339816 - DNA, 648 bp, Artificial Sequence
  derived and/or modified sequence
atgccagcttttaataggctgtttccactagcctctttggtgcttatctattgggtgtctgtttgcttccccgtgtgcgtagaagtcccaagtgaaacagaagcagtccagggcaatcctatgaagctgcgctgtatctcatgtatgaaacgcgaggaggtggaggctactacagtggttgagtggttttataggccagaaggggggaaggattttctgatctacgaatatagaaacggccaccaggaagtagaatcaccattccaaggccgattgcagtggaatggaagtaaggatctccaggacgtttctatcaccgtacttaatgtcactctgaatgacagtgggctgtatacctgtaatgtgagtcgagaattcgagtttgaggctcacaggccgtttgtgaagactactcgcctgatcccactgagggtaaccgaggaagctggggaggactttacaagcgtggtctccgagattatgatgtacatacttctggtgttcctgaccctgtggctgctcatagaaatgatttactgctatagaaaggttagcaaagccgaagaagccgcccaggagaacgcctcagactatctcgctattccgagcgaaaataaagaaaactctgccgtcccagtggaagagtag

SEQ ID NO: 339817 - DNA, 426 bp, Artificial Sequence
  derived and/or modified sequence
atgcccgcctttaaccggctcttcccgcttgcatctttggttctaatttattgggtcagtgtgtgtttccccgtttgcgtcgaggtccccagtgaaacagaggccgtacagggtaatcccatgaagttaagatgcatttcctgtatgaaacgggaggaggtagaggccaccacagtagttgagtggttttatagacccgaaggggggaaagattttctgatatatgagtacaggaatggacatcaggaggtagagagtcccttccagggccgcctgcagtggaatgggtccaaggacctccaggacgtcagcattacagttcttaacgtgactctgaatgactcaggcctctacacttgcaacgtctcacgagagttcgaatttgaggcccacaggcccttcgtgaaaacaaccaggctcatatag

SEQ ID NO: 339818 - DNA, 648 bp, Artificial Sequence
  derived and/or modified sequence
atgccggccttcaaccggctgttcccgctggcgagtttggtcctgatatactgggtttcagtttgctttcccgtctgcgtggaagttccaagcgaaaccgaggccgtgcaagggaaccctatgaagctgaggtgtatttcttgtatgaaacgcgaagaggtggaggccaccacagtagtggaatggttctacagaccagagggggggaaagatttcctcatttatgagtatcgcaacggacaccaagaggtggaatccccattccaggggcgcctacagtggaacggaagtaaagatttgcaggacgtatccataaccgtcctcaatgtgactttgaacgacagtggcctgtacacgtgcaatgtgtcccgggagtttgaattcgaggcgcaccggcccttcgttaaaacaactcggctgatccctcttcgtgtcacagaggaggctggcgaagatttcaccagcgtcgtgtctgaaatcatgatgtatattcttctcgtcttcttgaccctgtggttactgatcgagatgatatattgctaccggaaggttagtaaggccgaagaggcggctcaggaaaatgcctccgattatcttgcaataccaagcgaaaacaaggagaatagtgccgtgcctgtcgaagagtag

SEQ ID NO: 339819 - DNA, 648 bp, Artificial Sequence
  derived and/or modified sequence
atgcctgccttcaacagactcttccccctggccagcctggtgctgatctactgggtgtctgtgtgcttccctgtgtgtgtggaggtgcccagcgagacagaagctgtgcagggcaaccccatgaagctgcgctgcatcagctgcatgaagcgggaggaggtggaggccaccaccgtggtggagtggttctacagacctgagggcggcaaggacttcctgatctatgagtacagaaatggccaccaggaggtggagagccccttccagggccgcctgcagtggaatggcagcaaggacctgcaggatgtgtccatcaccgtgctgaatgtgaccctgaatgattctggcctgtacacctgcaatgtgtcccgggagtttgaatttgaggcccaccggccctttgtgaagaccaccaggctcatccccctgcgggtgacagaggaggccggggaggacttcacctctgtggtgtctgagatcatgatgtacatcctgctggtgttcctgaccctgtggctgctgattgagatgatctactgctacaggaaggtgtccaaggccgaggaggccgcccaggagaatgccagtgactacctggccatccccagcgagaacaaggaaaattctgctgtgcctgtggaggagtag

SEQ ID NO: 339820 - DNA, 426 bp, Artificial Sequence
  derived and/or modified sequence
atgcctgccttcaacagactcttccccctggccagcctggtgctgatctactgggtgtctgtgtgcttccctgtgtgtgtggaggtgcccagcgagacagaagctgtgcagggcaaccccatgaagctgcgctgcatcagctgcatgaagcgggaggaggtggaggccaccaccgtggtggagtggttctacagacctgagggcggcaaggacttcctgatctatgagtacagaaatggccaccaggaggtggagagccccttccagggccgcctgcagtggaatggcagcaaggacctgcaggatgtgtccatcaccgtgctgaatgtgaccctgaatgattctggcctgtacacctgcaatgtgtcccgggagtttgaatttgaggcccaccggccctttgtgaagaccaccaggctcatctag

SEQ ID NO: 339821 - DNA, 648 bp, Artificial Sequence
  derived and/or modified sequence
atgcccgccttcaaccggctgttccccctggccagcctggtgctgatttactgggtatctgtctgtttcccagtttgtgtggaggtgccgtccgaaacggaggcggtccaggggaacccgatgaaactgcggtgtatatcgtgcatgaaaagggaggaggtcgaagccaccactgtggtcgagtggttctaccgaccagaagggggtaaagattttttgatatatgaataccgcaacggccaccaggaggttgaatccccattccaaggcaggctgcagtggaacggatcaaaggatttgcaagatgtgtcaattactgtgcttaatgtgactctcaacgacagcggcttatatacttgtaacgtcagcagagagtttgagttcgaggcgcaccgtccatttgttaaaacaactagactgattccactgagggtgacggaggaggctggcgaggactttacctcagtggtctcagagatcatgatgtatatcctactcgttttcttgactctttggctcctgatcgaaatgatctactgctacaggaaagttagcaaagccgaggaggctgcccaagaaaatgctagcgactatctggccattccaagcgaaaataaagaaaattcagcggtccccgtggaagaatag

SEQ ID NO: 339822 - DNA, 648 bp, Artificial Sequence
  derived and/or modified sequence
atgcccgccttcaaccggctgttccccctggccagcctggtgctgatttattgggtgtccgtatgcttccctgtgtgcgtagaagtcccttccgagaccgaagccgtgcagggaaatccgatgaagctgcggtgtatatcatgtatgaaaagggaggaagtggaagccaccacggttgtagagtggttttatcgccctgagggaggaaaagattttctcatttatgagtatagaaacgggcaccaggaggtggagagtcctttccaggggcgtctgcagtggaatggttccaaggatctgcaggacgtctccatcaccgtcttgaacgtgactctgaatgactctggactgtatacttgcaatgtgtccagggagttcgaatttgaggcccatcgccctttcgtcaaaaccacaaggctgataccattgcgggtgacagaggaagcaggagaagacttcaccagcgtagtcagcgaaatcatgatgtatattttgctggtgtttctgacgctgtggctgctgatagaaatgatctattgctaccgtaaggttagcaaagctgaagaggccgcccaggagaatgcatctgattatttggccatcccaagcgagaacaaagagaacagcgcagtacctgtggaagagtag

SEQ ID NO: 339823 - DNA, 426 bp, Artificial Sequence
  derived and/or modified sequence
atgcccgccttcaaccggctgttccccctggccagcctggtgctgatttattgggtgagcgtatgtttcccagtgtgcgttgaggttccctccgagactgaggctgtgcagggaaatccgatgaagttgcggtgtatcagttgcatgaaacgggaggaggtcgaggccacaactgtcgttgagtggttctatcgccccgaagggggaaaggattttctgatttacgagtaccgcaacggccatcaggaagtagaaagtcctttccaggggcgccttcagtggaatgggagcaaggacctccaggacgtttctataactgtgctgaatgttactttaaatgactccggtctgtatacctgcaacgtgtccagggaatttgagtttgaggcccataggccatttgttaaaacgacgcgcctcatctag

SEQ ID NO: 339824 - DNA, 648 bp, Artificial Sequence
  derived and/or modified sequence
atgcccgccttcaaccggctgttccccctggccagcctggtgctgatatactgggtcagtgtgtgcttcccagtgtgtgtagaagttccttcagaaacagaggctgtacagggtaaccctatgaaactacggtgcatttcctgcatgaaacgtgaggaggtggaagccaccaccgtcgtggaatggttctatagaccagaaggtggcaaggactttctgatctacgaatatcgtaacggacaccaggaagtggagtcacctttccagggtagattgcagtggaacgggtccaaggacctgcaggatgtgtccattactgttctgaatgtgactctgaatgatagcggattatatacttgtaacgtgtcacgtgagttcgaatttgaggcccatcgtccgttcgttaagacgacgaggctgattcctcttagagtgaccgaggaagctggagaggatttcaccagtgtggtcagtgagatcatgatgtatattctcctggtctttctgaccctttggctgctgattgaaatgatttattgttataggaaggtgtcaaaggccgaggaggccgcccaggaaaatgcaagcgactatctagcaataccatctgaaaataaagaaaactccgccgtccccgtggaggagtag

SEQ ID NO: 339825 - DNA, 648 bp, Artificial Sequence
  derived and/or modified sequence
atgcctgctttcaatagactttttccactagctagtcttgttctaatttattgggtgagtgtatgcttccctgtgtgcgttgaggtgccgagcgaaaccgaggccgtgcagggcaacccaatgaagctcagatgcattagttgcatgaaacgtgaggaggtggaggctaccactgtcgtggaatggttctacagaccggagggtggaaaagacttcttgatttatgagtaccggaacgggcaccaagaggttgagtcccccttccagggcaggctgcagtggaacggaagcaaggacctgcaggacgtctctatcacagtgctaaatgtgactctgaacgatagtggtctgtatacatgtaatgtttctcgcgagtttgagttcgaggcacaccggccttttgttaagactacgcgcctcatacccctgcgagtcacagaggaggcaggcgaggacttcacatctgttgtctctgaaattatgatgtatatcttgttggtgtttctgactctgtggctcttaattgaaatgatttattgctacagaaaagtatctaaggcggaagaggccgcacaggaaaacgcgagcgactacctggccattccctcagagaacaaggaaaactcagccgttcccgtggaagagtag

SEQ ID NO: 339826 - DNA, 648 bp, Artificial Sequence
  derived and/or modified sequence
atgcccgcttttaacagactcttcccattggctagtctggtgttgatttattgggtctccgtctgctttccggtatgcgtggaagtgccttctgagaccgaggccgtacaagggaaccctatgaagcttcggtgcatatcatgtatgaagagggaggaggtcgaggccaccaccgtggtggaatggttctatcgtcctgaaggaggtaaggattttctcatctacgagtaccgaaatggtcaccaggaagtcgaaagccctttccagggccgtcttcagtggaatggttctaaggacctgcaagacgtcagcatcacggtgctcaacgtgacattaaatgactctggtttatatacctgtaacgtgtctagggagtttgagttcgaggcccaccggccattcgtgaaaacaacgaggttaatacctttgagggtgactgaagaggctggtgaagacttcaccagtgtggtttccgaaatcatgatgtatattttactggtctttctgacgctatggctcttaatcgagatgatttattgttaccgtaaggtgtctaaggcagaggaggctgcccaggagaatgctagcgattaccttgcaataccctctgagaataaagaaaactcagccgtacccgtcgaagagtag

SEQ ID NO: 339827 - DNA, 426 bp, Artificial Sequence
  derived and/or modified sequence
atgcctgcttttaataggcttttcccactggcctcattggtcttgatctactgggtgtctgtgtgtttcccagtatgcgttgaagtaccttcggaaaccgaggcagtgcaaggcaaccccatgaagttacgctgtatctcttgcatgaaaagagaagaggtggaggctactacagtggtagagtggttttaccgaccggaagggggaaaggacttcctgatttatgagtaccggaacggacaccaggaggttgagtctccatttcaggggaggttacagtggaatggatccaaagatctgcaggacgtctccatcaccgttttaaacgtcacattgaacgactccggattatacacctgcaacgtgtctcgggagtttgaattcgaggcacaccggccatttgtcaaaacaacacgtctgatctag

SEQ ID NO: 339828 - DNA, 648 bp, Artificial Sequence
  derived and/or modified sequence
atgccagcctttaaccgactatttccacttgcatcactggtgctgatatattgggtgagcgtttgctttccagtctgcgtagaagtccctagcgagaccgaagccgttcaggggaaccctatgaaactcaggtgtatctcttgcatgaagagagaagaagtggaggctacgaccgttgtcgaatggttctacaggcctgaaggcggtaaggactttctgatatatgagtaccggaacggccatcaggaagttgaaagcccattccagggtagactgcaatggaacggaagcaaagatctccaggacgttagtattaccgtgctgaacgttacgttgaatgatagcggcttatatacctgcaacgtgagccgagaattcgagtttgaggctcaccgtccatttgttaaaaccacgagactaataccactgcgcgtgactgaagaagctggtgaagatttcacctccgtcgtgtctgaaataatgatgtatatactcctggtctttctgacactgtggctgctgatcgaaatgatttattgctataggaaggtcagcaaggcagaggaggctgcacaggagaacgcatcagactaccttgccataccatccgagaataaggaaaactcggccgtcccagttgaagagtag

SEQ ID NO: 339829 - DNA, 5665 bp, Artificial Sequence
  derived and/or modified sequence
tgtcagggctgacagcacacacggcctgggggcctagagaagggttgctgatcacctgccacccagggtcggggccccgcaccatccgggggcgagctcccgggaaggggctccgcctctacacccaccccccaacctctgacatcgccggccgaacgggagctgccgcttccttcccggccccgctgcacctccccagggagccgagggcgggcgtggacgggaccgacgtggaacgcattctgtagcccagacgggcggccccggcggcttcgggagtggggtcacgcccagctggagaagcagttagggcggacgaagcaggagccgcggggctgggaggattccagtcggaacgcaaccgatcctggggaggcgagagccttggaagccgccagccccagaagatgcctgccttcaatagattgtttcccctggcttctctcgtgcttatctactgggtcagtgtctgcttccctgtgtgtgtggaagtgccctcggagacggaggccgtgcagggcaaccccatgaagctgcgctgcatctcctgcatgaagagagaggaggtggaggccaccacggtggtggaatggttctacaggcccgagggcggtaaagatttccttatttacgagtatcggaatggccaccaggaggtggagagcccctttcaggggcgcctgcagtggaatggcagcaaggacctgcaggacgtgtccatcactgtgctcaacgtcactctgaacgactctggcctctacacctgcaatgtgtcccgggagtttgagtttgaggcgcatcggccctttgtgaagacgacgcggctgatccccctaagagtcaccgaggaggctggagaggacttcacctctgtggtctcagaaatcatgatgtacatccttctggtcttcctcaccttgtggctgctcatcgagatgatatattgctacagaaaggtctcaaaagccgaagaggcagcccaagaaaacgcgtctgactaccttgccatcccatctgagaacaaggagaactctgcggtaccagtggaggaatagaacaggagcagtgtgacatgaggtggcctgaacacctgagggactggacatcccatgttcagcaatgtcaatggcatcaggagggcgccccaagggccccatcgcttcccttcatgcatccattgttctgttcattcattcatccatacatccacctgcctctgagctttcacctctgactccctaactccatcagacctctacgcaccataagactctgccagaactgagaagccaacatttctacatagactcaacctcaccctctcctagttttccaacaagacactccaaagccaactggatttctcccctgtgctccaaatgactttgtacaagtgctggagttagcacctccctctgcccttaactggctggaactggttcattctccattactgcaagagaatggaagtcttaatagaaggaagcaggagtgattagttcgggttaaagcaaaagtgtgtcatgaacttggattccctgaagtcagttttgtcaggttcatggcccactttgctacagcatcagagtgaagcacgcctgtctaggttctccagtgacagaaagatcctgaagcatggactaacatgctctctggagcttagtactccagagctagatcctgatgggtctctaaggttccctccaagaagacaaggacaggagacttgggaaggaccaatggtaatttaagtggctcttaaaaagtcatgcaacatgtttctggacacgttcctgatcctattgcgataatgtatgtgtgccctccctgtgggcacaccacctgggcattaggactgaaattcctgagttcttcctctcaaaatttctgtgcaccagtattattcctcattttacatacaggaggcaactaagactcatacagggctcaactgaataagaggcttaagaggataaactggagcagaaataagccttaggtgctgcccagtttacacttcctgggatggatgtttttgtttgttttgttttttgttttttttgtttgagatggagtctcactctgtcacctaggctagagtgcagtggtgtgatctcggctcactgcaacctctgcctcttgggttcaagcaattctcatgcctcggcctctccagtagctgggattacaggtgtgcaccaccacgcctggctaaattttgtatttttagtacagacagggtttgactatgttggccaggctagtcttgaactcctgacctcaaatgacccacccacctcagcctcccaaagtgctgagattacaggcgtgaggcactgcgcccggtggataactttgtttctgaaaagactgacattgaacttgtctatggcaatgcttctttcacaagcacggactgggctgaggtcaactctgatagattcagatgactagaaattggccaaaaaagcagggagaagaacatgaggtagacttaaagaacttcctttatgtaaagatctgtgactctgaaatatcctccaaaaggagagtgcatctgagactgatatttaaactaagaaaaatgtttagtctgagatggatcataagtaaatgagcagtgtgagaggggagggatgggtaggtgctttccaaatacttcgcctatgaatgcataattttcagatttttttcccctagattttgagggagcagagaaactggaaaaaactttagtcaatatctcgtgtttcattttaattaagtgacaggtccaagtgtgacatccttcagcacccagggacaagagaggggaaagatgctttatggaatgtaagaagatgaaggtgactgggattcagcgagagagaggtccctcagacctgggacctccctttatagggaaagaccatattccataggtttagggctttaccttaaaagctcatttttttcattcttccatccctaggaaagtacttaaaaccagacttttaaatttttatttatttattattatttttttgagacagattctcactctgtctcccaggctagagtgcagtggtgcaatctcagctcactgcagcctcaactgccccaggtttaagcaatcctcccacctcagcccccaggtaactgggactacaggcatgcaccaccatgcctggctaatttttgtattttatgtagagacaggggtcttgccatgtcgcccaggctgatcttgaactcctgggctcaagcaatctgccagcctcagcctctcaaagtgctgggattacaggcctgagcaactgtgcctggcccaaaaccagaccgttaacacattaaagagtctgattttgttgaagaaaatatttgcaataaattcaagactcttcttattggtaattttccacacaatccctctgaaataagggagaggatatagacctttttaactttatagttagaaaaattggcctcagtgtgaaatttttccagtcccatagctcatggatgccaccagcttgcggtagtagcaagatgcttactaccacaccgttttcctcggtggcccaatagctcgtgtatctaagttgaacccggcagtatgcatgattgcctttttctcttctttttaaaaaaacccaactcagatgctgcttgcgtggcttttaatgaagctgaatggtatctatcacttatttatccttgacaggttatcttccccactcttcctttttctaacttctccattcttctcattcttgacactttcattagaactatatggtttacgaagtattttcacttaactattttatttcttctctataactggtcctgtgaggtcacattacaaaagaagaaactgagggtctctgaggttaagtagctttactaaattataaggaaacctagctggtaggtagacagcaagaatccaggtcttctgactcctctttcagttctctttccacttagaccatagctgcttccttttcttattttttagcttccatctaaccattgcctatcttgcctgtcctaatgttctccatcttctctcacccctaatcccactcactgcttctctaccactttgctttttggtggatgctagcaatgtgctttgagagtcagtcctattttggttctctttctagttggtttgtacatcattatttctcctgaattgcaattaaactccttcctgggagatttgataatgactgtaaatcaataaggtactgtgatcaccagcctacttccaatctccacccacctccctgtctcttcccataatcctacgaaagacccagactagatgtctgtttctctggaagctttatctggcatgatgttgcttattaaagggcttagaagagttctcaagggctattaatatcactttagaaaccccatctgttgtcttggtgctggatatttcccatgtctgatcctcaataacacaattcactaaaggccaagcttggctcaatctgattttcccattcttactacttcacagccatgaatgtgattgctcaatccagttggccctgagagcaccttgccctgctgaccttcactgtcacctcggtcttgaatcagagccccaacccaaacactccctgcctgtccctaccccagcctttattctcaccacttgtttaacggcatgaccttttagtttctccattcccagacacccacacacccagacttccttctgagttgcaggtttctccttagatgtccaactagaaatattactaggaaagttacttttcaaagcaggaatgtgctgggaagtaggagacagcaactccctcctctctccccaaaattattggatcaaaaaagaaattccatccatctcagaatctgtgagtcctcctcacataaatctgagggaaaaggctgtgtcactgcatctttgcaggaagaaagagaagcaagagctagacacacttcagaatatatcttagtttcccctttcccagtttaacatgaaaatgaaaaaagaaaaaaatgaaaaacaaaaacaaaagaagccttcctctcacctcattttgtaaatgaaaaatccctaattcagtgaattcacctagtcactgcaaatgtatctgaatagtgcttggtgtgcttgccagtctgatcatccactcattctactaacatctttttgcacccactctgtcaagctctagcctagacctttagtgtgccatgcagtcacaggtctgaaaagcagcatcatccaaaccttacttaatctctaaaatctcagctggtggacagctcatgattagttcagcccacttcctcccccttagttgagtttgcagcaggacgcaggagataagcacttccaagcaagtctgatttatatatcaaactcggtctccatcccaggccagctgaccctcagagccagcaatgctctgtgcttcctccctgcgtcacggcttggcaagagctgcctctgctgagcagtgtgtgtgatggagacggaggccgctgaaggccgagtgcttgcaggcttgtgaactgccatcgaacacaatccaaactctggaaatgttcctgaccacctaagccctcaacaacgtaatgcctgtatgtgctgtttttcagtaaactccttgttcatgtcaataaagtatccctgaaaacc

SEQ ID NO: 339830 - DNA, 6061 bp, Artificial Sequence
  derived and/or modified sequence
cagggctgacagcacacacggcctgggggcctagagaagggttgctgatcacctgccacccagggtcggggccccgcaccatccgggggcgagctcccgggaaggggctccgcctctacacccaccccccaacctctgacatcgccggccgaacgggagctgccgcttccttcccggccccgctgcacctccccagggagccgagggcgggcgtggacgggaccgacgtggaacgcattctgtagcccagacgggcggccccggcggcttcgggagtggggtcacgcccagctggagaagcagttagggcggacgaagcaggagccgcggggctgggaggattccagtcggaacgcaaccgatcctggggaggcgagaggtgaatcaacctggacccttccacagcctggctgctaggccagcagtgcgactcccttccgagctgagcttaccctgggcgcaaacgagcgaggcaggggcgcgagtggaagctggagttccggggtgggcggggaggcgactgtccgtggtgctgagcgccggcgagagcgggcgcggagcggctgatcggctccctcgaactggggaggtccagtggggtcgcttagggcccaaagcccccacccggctccaaaagctcccagggcctccccaggcaccggtgctcggcccttccttcggtcagaaagtcgccccctgggggcagttcgtcccaaagggtttcctcgaaagaatctgagagggcgcagtccttgaccgagggaatctctctgtgtagccttggaagccgccagccccagaagatgcctgccttcaatagattgtttcccctggcttctctcgtgcttatctactgggtcagtgtctgcttccctgtgtgtgtggaagtgccctcggagacggaggccgtgcagggcaaccccatgaagctgcgctgcatctcctgcatgaagagagaggaggtggaggccaccacggtggtggaatggttctacaggcccgagggcggtaaagatttccttatttacgagtatcggaatggccaccaggaggtggagagcccctttcaggggcgcctgcagtggaatggcagcaaggacctgcaggacgtgtccatcactgtgctcaacgtcactctgaacgactctggcctctacacctgcaatgtgtcccgggagtttgagtttgaggcgcatcggccctttgtgaagacgacgcggctgatccccctaagagtcaccgaggaggctggagaggacttcacctctgtggtctcagaaatcatgatgtacatccttctggtcttcctcaccttgtggctgctcatcgagatgatatattgctacagaaaggtctcaaaagccgaagaggcagcccaagaaaacgcgtctgactaccttgccatcccatctgagaacaaggagaactctgcggtaccagtggaggaatagaacaggagcagtgtgacatgaggtggcctgaacacctgagggactggacatcccatgttcagcaatgtcaatggcatcaggagggcgccccaagggccccatcgcttcccttcatgcatccattgttctgttcattcattcatccatacatccacctgcctctgagctttcacctctgactccctaactccatcagacctctacgcaccataagactctgccagaactgagaagccaacatttctacatagactcaacctcaccctctcctagttttccaacaagacactccaaagccaactggatttctcccctgtgctccaaatgactttgtacaagtgctggagttagcacctccctctgcccttaactggctggaactggttcattctccattactgcaagagaatggaagtcttaatagaaggaagcaggagtgattagttcgggttaaagcaaaagtgtgtcatgaacttggattccctgaagtcagttttgtcaggttcatggcccactttgctacagcatcagagtgaagcacgcctgtctaggttctccagtgacagaaagatcctgaagcatggactaacatgctctctggagcttagtactccagagctagatcctgatgggtctctaaggttccctccaagaagacaaggacaggagacttgggaaggaccaatggtaatttaagtggctcttaaaaagtcatgcaacatgtttctggacacgttcctgatcctattgcgataatgtatgtgtgccctccctgtgggcacaccacctgggcattaggactgaaattcctgagttcttcctctcaaaatttctgtgcaccagtattattcctcattttacatacaggaggcaactaagactcatacagggctcaactgaataagaggcttaagaggataaactggagcagaaataagccttaggtgctgcccagtttacacttcctgggatggatgtttttgtttgttttgttttttgttttttttgtttgagatggagtctcactctgtcacctaggctagagtgcagtggtgtgatctcggctcactgcaacctctgcctcttgggttcaagcaattctcatgcctcggcctctccagtagctgggattacaggtgtgcaccaccacgcctggctaaattttgtatttttagtacagacagggtttgactatgttggccaggctagtcttgaactcctgacctcaaatgacccacccacctcagcctcccaaagtgctgagattacaggcgtgaggcactgcgcccggtggataactttgtttctgaaaagactgacattgaacttgtctatggcaatgcttctttcacaagcacggactgggctgaggtcaactctgatagattcagatgactagaaattggccaaaaaagcagggagaagaacatgaggtagacttaaagaacttcctttatgtaaagatctgtgactctgaaatatcctccaaaaggagagtgcatctgagactgatatttaaactaagaaaaatgtttagtctgagatggatcataagtaaatgagcagtgtgagaggggagggatgggtaggtgctttccaaatacttcgcctatgaatgcataattttcagatttttttcccctagattttgagggagcagagaaactggaaaaaactttagtcaatatctcgtgtttcattttaattaagtgacaggtccaagtgtgacatccttcagcacccagggacaagagaggggaaagatgctttatggaatgtaagaagatgaaggtgactgggattcagcgagagagaggtccctcagacctgggacctccctttatagggaaagaccatattccataggtttagggctttaccttaaaagctcatttttttcattcttccatccctaggaaagtacttaaaaccagacttttaaatttttatttatttattattatttttttgagacagattctcactctgtctcccaggctagagtgcagtggtgcaatctcagctcactgcagcctcaactgccccaggtttaagcaatcctcccacctcagcccccaggtaactgggactacaggcatgcaccaccatgcctggctaatttttgtattttatgtagagacaggggtcttgccatgtcgcccaggctgatcttgaactcctgggctcaagcaatctgccagcctcagcctctcaaagtgctgggattacaggcctgagcaactgtgcctggcccaaaaccagaccgttaacacattaaagagtctgattttgttgaagaaaatatttgcaataaattcaagactcttcttattggtaattttccacacaatccctctgaaataagggagaggatatagacctttttaactttatagttagaaaaattggcctcagtgtgaaatttttccagtcccatagctcatggatgccaccagcttgcggtagtagcaagatgcttactaccacaccgttttcctcggtggcccaatagctcgtgtatctaagttgaacccggcagtatgcatgattgcctttttctcttctttttaaaaaaacccaactcagatgctgcttgcgtggcttttaatgaagctgaatggtatctatcacttatttatccttgacaggttatcttccccactcttcctttttctaacttctccattcttctcattcttgacactttcattagaactatatggtttacgaagtattttcacttaactattttatttcttctctataactggtcctgtgaggtcacattacaaaagaagaaactgagggtctctgaggttaagtagctttactaaattataaggaaacctagctggtaggtagacagcaagaatccaggtcttctgactcctctttcagttctctttccacttagaccatagctgcttccttttcttattttttagcttccatctaaccattgcctatcttgcctgtcctaatgttctccatcttctctcacccctaatcccactcactgcttctctaccactttgctttttggtggatgctagcaatgtgctttgagagtcagtcctattttggttctctttctagttggtttgtacatcattatttctcctgaattgcaattaaactccttcctgggagatttgataatgactgtaaatcaataaggtactgtgatcaccagcctacttccaatctccacccacctccctgtctcttcccataatcctacgaaagacccagactagatgtctgtttctctggaagctttatctggcatgatgttgcttattaaagggcttagaagagttctcaagggctattaatatcactttagaaaccccatctgttgtcttggtgctggatatttcccatgtctgatcctcaataacacaattcactaaaggccaagcttggctcaatctgattttcccattcttactacttcacagccatgaatgtgattgctcaatccagttggccctgagagcaccttgccctgctgaccttcactgtcacctcggtcttgaatcagagccccaacccaaacactccctgcctgtccctaccccagcctttattctcaccacttgtttaacggcatgaccttttagtttctccattcccagacacccacacacccagacttccttctgagttgcaggtttctccttagatgtccaactagaaatattactaggaaagttacttttcaaagcaggaatgtgctgggaagtaggagacagcaactccctcctctctccccaaaattattggatcaaaaaagaaattccatccatctcagaatctgtgagtcctcctcacataaatctgagggaaaaggctgtgtcactgcatctttgcaggaagaaagagaagcaagagctagacacacttcagaatatatcttagtttcccctttcccagtttaacatgaaaatgaaaaaagaaaaaaatgaaaaacaaaaacaaaagaagccttcctctcacctcattttgtaaatgaaaaatccctaattcagtgaattcacctagtcactgcaaatgtatctgaatagtgcttggtgtgcttgccagtctgatcatccactcattctactaacatctttttgcacccactctgtcaagctctagcctagacctttagtgtgccatgcagtcacaggtctgaaaagcagcatcatccaaaccttacttaatctctaaaatctcagctggtggacagctcatgattagttcagcccacttcctcccccttagttgagtttgcagcaggacgcaggagataagcacttccaagcaagtctgatttatatatcaaactcggtctccatcccaggccagctgaccctcagagccagcaatgctctgtgcttcctccctgcgtcacggcttggcaagagctgcctctgctgagcagtgtgtgtgatggagacggaggccgctgaaggccgagtgcttgcaggcttgtgaactgccatcgaacacaatccaaactctggaaatgttcctgaccacctaagccctcaacaacgtaatgcctgtatgtgctgtttttcagtaaactccttgttcatgtcaataaagtatccctgaaaacc

SEQ ID NO: 339831 - DNA, 566 bp, Artificial Sequence
  derived and/or modified sequence
gagaactggaaggcatggggtctgggaggcgaagccaggaaccgcgtacggcgcgccttgcagatgacatcattgcctgaaagagctctggcccttctcttcccggagctacacccgccttggaagccgccagccccagaagatgcctgccttcaatagattgtttcccctggcttctctcgtgcttatctactgggtcagtgtctgcttccctgtgtgtgtggaagtgccctcggagacggaggccgtgcagggcaaccccatgaagctgcgctgcatctcctgcatgaagagagaggaggtggaggccaccacggtggtggaatggttctacaggcccgagggcggtaaagatttccttatttacgagtatcggaatggccaccaggaggtggagagcccctttcaggggcgcctgcagtggaatggcagcaaggacctgcaggacgtgtccatcactgtgctcaacgtcactctgaacgactctggcctctacacctgcaatgtgtcccgggagtttgagtttgaggcgcatcggccctttgtgaagacgacgcggctgatcc

SEQ ID NO: 339832 - DNA, 3984 bp, Artificial Sequence
  derived and/or modified sequence
tgtcagggctgacagcacacacggcctgggggcctagagaagggttgctgatcacctgccacccagggtcggggccccgcaccatccgggggcgagctcccgggaaggggctccgcctctacacccaccccccaacctctgacatcgccggccgaacgggagctgccgcttccttcccggccccgctgcacctccccagggagccgagggcgggcgtggacgggaccgacgtggaacgcattctgtagcccagacgggcggccccggcggcttcgggagtggggtcacgcccagctggagaagcagttagggcggacgaagcaggagccgcggggctgggaggattccagtcggaacgcaaccgatcctggggaggcgagagccttggaagccgccagccccagaagatgcctgccttcaatagattgtttcccctggcttctctcgtgcttatctactgggtcagtgtctgcttccctgtgtgtgtggaagtgccctcggagacggaggccgtgcagggcaaccccatgaagctgcgctgcatctcctgcatgaagagagaggaggtggaggccaccacggtggtggaatggttctacaggcccgagggcggtaaagatttccttatttacgagtatcggaatggccaccaggaggtggagagcccctttcaggggcgcctgcagtggaatggcagcaaggacctgcaggacgtgtccatcactgtgctcaacgtcactctgaacgactctggcctctacacctgcaatgtgtcccgggagtttgagtttgaggcgcatcggccctttgtgaagacgacgcggctgatccccctaagagtcaccgaggaggctggagaggacttcacctctgtggtctcagaaatcatgatgtacatccttctggtcttcctcaccttgtggctgctcatcgagatgatatattgctacagaaaggtctcaaaagccgaagaggcagcccaagaaaacgcgtctgactaccttgccatcccatctgagaacaaggagaactctgcggtaccagtggaggaatagaacaggagcagtgtgacatgaggtgacctacaggaacatgggaggggaaggcagatgtggatggcaggttgtacaagtgactttgttgcccacaactgaagtgactttaaatttggtcccttaggtcactgtctaccctgcctggggtccccgccctcagggtaattctttaagtcagaaagctctgtatgatgtcagcgcttcggaaggtgaactgctttgacctgagtgtcgaggcaatctgaacttgcccatggtaacagaggcacaggattctccaactcccttctttggtcaaagaatttttgggctgggctgggctggactgggtgggaaattctcagtgagttattttatctttggtaggtggcctgaacacctgagggactggacatcccatgttcagcaatgtcaatggcatcaggagggcgccccaagggccccatcgcttcccttcatgcatccattgttctgttcattcattcatccatacatccacctgcctctgagctttcacctctgactccctaactccatcagacctctacgcaccataagactctgccagaactgagaagccaacatttctacatagactcaacctcaccctctcctagttttccaacaagacactccaaagccaactggatttctcccctgtgctccaaatgactttgtacaagtgctggagttagcacctccctctgcccttaactggctggaactggttcattctccattactgcaagagaatggaagtcttaatagaaggaagcaggagtgattagttcgggttaaagcaaaagtgtgtcatgaacttggattccctgaagtcagttttgtcaggttcatggcccactttgctacagcatcagagtgaagcacgcctgtctaggttctccagtgacagaaagatcctgaagcatggactaacatgctctctggagcttagtactccagagctagatcctgatgggtctctaaggttccctccaagaagacaaggacaggagacttgggaaggaccaatggtaatttaagtggctcttaaaaagtcatgcaacatgtttctggacacgttcctgatcctattgcgataatgtatgtgtgccctccctgtgggcacaccacctgggcattaggactgaaattcctgagttcttcctctcaaaatttctgtgcaccagtattattcctcattttacatacaggaggcaactaagactcatacagggctcaactgaataagaggcttaagaggataaactggagcagaaataagccttaggtgctgcccagtttacacttcctgggatggatgtttttgtttgttttgttttttgttttttttgtttgagatggagtctcactctgtcacctaggctagagtgcagtggtgtgatctcggctcactgcaacctctgcctcttgggttcaagcaattctcatgcctcggcctctccagtagctgggattacaggtgtgcaccaccacgcctggctaaattttgtatttttagtacagacagggtttgactatgttggccaggctagtcttgaactcctgacctcaaatgacccacccacctcagcctcccaaagtgctgagattacaggcgtgaggcactgcgcccggtggataactttgtttctgaaaagactgacattgaacttgtctatggcaatgcttctttcacaagcacggactgggctgaggtcaactctgatagattcagatgactagaaattggccaaaaaagcagggagaagaacatgaggtagacttaaagaacttcctttatgtaaagatctgtgactctgaaatatcctccaaaaggagagtgcatctgagactgatatttaaactaagaaaaatgtttagtctgagatggatcataagtaaatgagcagtgtgagaggggagggatgggtaggtgctttccaaatacttcgcctatgaatgcataattttcagatttttttcccctagattttgagggagcagagaaactggaaaaaactttagtcaatatctcgtgtttcattttaattaagtgacaggtccaagtgtgacatccttcagcacccagggacaagagaggggaaagatgctttatggaatgtaagaagatgaaggtgactgggattcagcgagagagaggtccctcagacctgggacctccctttatagggaaagaccatattccataggtttagggctttaccttaaaagctcatttttttcattcttccatccctaggaaagtacttaaaaccagacttttaaatttttatttatttattattatttttttgagacagattctcactctgtctcccaggctagagtgcagtggtgcaatctcagctcactgcagcctcaactgccccaggtttaagcaatcctcccacctcagcccccaggtaactgggactacaggcatgcaccaccatgcctggctaatttttgtattttatgtagagacaggggtcttgccatgtcgcccaggctgatcttgaactcctgggctcaagcaatctgccagcctcagcctctcaaagtgctgggattacaggcctgagcaactgtgcctggcccaaaaccagaccgttaacacattaaagagtctgattttgttgaagaaaatatttgcaataaattcaagactcttcttattggtaattttccacacaatccctctgaaataagggagaggatatagacctttttaactttatagttagaaaaattggcctcagtgtgaaatttttccagtcccatagctcatggatgccaccagcttgcggtagtagcaagatgcttactaccacaccgttttcctcggtggcccaatagctcgtgtatctaagttgaacccggcagtatgcatgattgcctttttctcttctttttaaaaaaacccaactca

SEQ ID NO: 339833 - DNA, 648 bp, Artificial Sequence
  derived and/or modified sequence
atgcccgccttcaacagactgttccccctggccagcctggtgctgatctactgggtgagcgtgtgcttccccgtgtgcgtggaggtgcccagcgagaccgaggccgtgcagggcaaccccatgaagctgagatgcatcagctgcatgaagagagaggaggtggaggccaccaccgtggtggagtggttctacagacccgagggcggcaaggacttcctgatctacgagtacagaaacggccaccaggaggtggagagccccttccagggcagactgcagtggaacggcagcaaggacctgcaggacgtgagcatcaccgtgctgaacgtgaccctgaacgacagcggcctgtacacctgcaacgtgagcagagagttcgagttcgaggcccacagacccttcgtgaagaccaccagactgatccccctgagagtgaccgaggaggccggcgaggacttcaccagcgtggtgagcgagatcatgatgtacatcctgctggtgttcctgaccctgtggctgctgatcgagatgatctactgctacagaaaggtgagcaaggccgaggaggccgcccaggagaacgccagcgactacctggccatccccagcgagaacaaggagaacagcgccgtgcccgtggaggagtag

SEQ ID NO: 339834 - DNA, 426 bp, Artificial Sequence
  derived and/or modified sequence
atgcccgccttcaacagactgttccccctggccagcctggtgctgatctactgggtgagcgtgtgcttccccgtgtgcgtggaggtgcccagcgagaccgaggccgtgcagggcaaccccatgaagctgagatgcatcagctgcatgaagagagaggaggtggaggccaccaccgtggtggagtggttctacagacccgagggcggcaaggacttcctgatctacgagtacagaaacggccaccaggaggtggagagccccttccagggcagactgcagtggaacggcagcaaggacctgcaggacgtgagcatcaccgtgctgaacgtgaccctgaacgacagcggcctgtacacctgcaacgtgagcagagagttcgagttcgaggcccacagacccttcgtgaagaccaccagactgatctag

SEQ ID NO: 339835 - DNA, 237 bp, Artificial Sequence
  derived and/or modified sequence
atgggtcagggccagcaagcaatgtgccatgaagcactgagccacatttgggttccatttgatctcaaacgatggctgttgtacacattttgcaactggtttgacgtaacatttcagcttcagctctgtatcctccgaaccctaaagagattctgtcgatcaattctctataaccttaaggacagaaagacattctggctgcctcaggcatacctatcttttctgctcattcaatag

SEQ ID NO: 339836 - DNA, 1104 bp, Artificial Sequence
  derived and/or modified sequence
ggggaagagggggcgggagccgaggcccgggcgggggcagccagcgagttagggttaggacgggaggattcggcttcccggcggcagagggcgcctggcgctgcggtctggcgcgccagagtcgcccgcgcgggcgccgagaggagaggcgaggcggggagcgcaagcggcggcggccactgccacgtattcccggcagtggtggcggcggcggcggcggcgcccgcgggcaggaataactcaagtcacctgtactggaaatcagtttgctgaaattaatcaacgattcttgaagttgaagaaaaggaggttccagccttggcaagaggagtgtggcccttcctggaatccctctggacacaccctcctagcatcctctaggaaagatgcggcagctcaaagggaagcccaagaaggagacctccaaggacaagaaggagcggaagcaagccatgcaggaggcccggcagcagatcactacagtggtgctgcccacgctggccgtggtcgtgctcttgatcgtggtgtttgtgtacgtggccacgcgccccaccatcaccgagtgagccccgcagccggctgcggaccccatcggcagggagaggaggcgcgggagggggacgcaaacaaaaaatggctttcatattcagagatgttcatgttgctgagctgtaagcaggagcaccctgtcttctctggtctttgacttgattaaagtatctccgctttcttgggagggaataggggatgttttatcagtgaatgtgccatacaccttatggtccacttcatgtgcctttcagacttcaaagcgcgcgcgcatgtgtgtgtgtgtgtgtgtgtgtgtgtgtgtgtgtgtgtgcttctttttctctcctaaaaatcgataagtagctccacctgaagagggatggaacctctgggtcaggaaacagctggaatccacactcacctcattcccattgtttggatcatgcttctttccaacacgtgttcacaatctccaaagggactgtatttcttctctgtgcttaatgtgatttgaaatatgttgaatcaaagtgaaatatttattttttgaataaaggagataatagccttaaa

SEQ ID NO: 339837 - DNA, 374 bp, Artificial Sequence
  derived and/or modified sequence
gcggggagcgcaagcggcggcggccactgccacgtattcccggcagtggtggcggcggcggcggcggcgcccgcgggcaggaataactcaagtcacctgtactggaaatcagtttgctgaaattaatcaacgattcttgaagttgaagaaaaggaggttccagccttggcaagaggagtgtggcccttcctggaatccctctggacacaccctcctagcatcctctaggaaagatgcggcagctcaaagggaagcccaagaaggagacctccaaggacaagaaggagcggaagcaagccatgcaggaggcccggcagcagatcactacagtggtgctgcccacgctggccgtggtcgtgctcttgatcgtggtg

SEQ ID NO: 339838 - DNA, 472 bp, Artificial Sequence
  derived and/or modified sequence
ggaggaagccaggttacctctgttggacctgcctgctcccagcatctccagcaacaagctgtctctgccggaataactcaagtcacctgtactggaaatcagtttgctgaaattaatcaacgattcttgaagttgaagaaaaggaggttccagccttggcaagaggagtgtggcccttcctggaatccctctggacacaccctcctagcatcctctaggaaagatgcggcagctcaaagggaagcccaagaaggagacctccaaggacaagaaggagcggaagcaagccatgcaggaggcccggcagcagatcactacagtggtgctgcccacgctggccgtggtcgtgctcttgatcgtggtgtttgtgtacgtggccacgcgccccaccatcaccgagtgagccccgcagccggctgcggaccccatcggcagggagaggaggcgcgggagggggacgcaaacaaaaaat

SEQ ID NO: 339839 - DNA, 180 bp, Artificial Sequence
  derived and/or modified sequence
atgagacagttgaagggaaaacccaaaaaggaaacgagtaaggacaaaaaggagagaaaacaagccatgcaggaggcccggcagcaaataaccaccgtcgtactgcctaccctagctgtagtggtcctgctgatcgttgtctttgtttacgtagcaaccagacctactattaccgagtag

SEQ ID NO: 339840 - DNA, 180 bp, Artificial Sequence
  derived and/or modified sequence
atgcggcaacttaaaggcaagcctaagaaggaaaccagcaaagataaaaaggagcgcaagcaggccatgcaggaagccagacaacagataacaacggtagttctgccaacacttgccgtggtcgtcctgctgattgtggtgtttgtttacgtcgccacgcggcctactattaccgaatag

SEQ ID NO: 339841 - DNA, 144 bp, Artificial Sequence
  derived and/or modified sequence
atgcggcagctgaaaggcaagcccaaaaaggagacaagcaaggataagaaagaaagaaagcaggccatgcaggaggccaggcaacagataaccactgttgtactgccaaccctggccgtggtggtactcctgattgtggtctag

SEQ ID NO: 339842 - DNA, 180 bp, Artificial Sequence
  derived and/or modified sequence
atgagacagcttaaaggcaagccaaaaaaggagaccagcaaggacaaaaaggagaggaaacaggccatgcaggaagccaggcagcagattaccacggtggtgctgcctactctcgccgtcgtcgtcctgctgattgtagtctttgtctacgtagcgacgagacctactattaccgagtag

SEQ ID NO: 339843 - DNA, 159 bp, Artificial Sequence
  derived and/or modified sequence
atgcgccaactcaaaggtaaaccaaaaaaggaaaccagtaaagataaaaaagagagaaagcaagcgatgcaggaggctcgacagcagataactactgtcgtgctgcctaccctcgccgtggtggtgctgttaatagtggtcttcgtgtatgttgcttag

SEQ ID NO: 339844 - DNA, 180 bp, Artificial Sequence
  derived and/or modified sequence
atgcggcagctgaagggcaagcccaagaaggagaccagcaaggacaagaaggagcgcaaacaagccatgcaagaggctcggcagcaaatcacaacagtcgttctccccactctggcggtagttgtactgctcatcgtggtgttcgtgtacgtggctaccaggcctacaatcactgagtag

SEQ ID NO: 339845 - DNA, 180 bp, Artificial Sequence
  derived and/or modified sequence
atgcggcagctgaagggcaagcccaagaaggagaccagcaaggacaaaaaggagcggaagcaggctatgcaggaggcaaggcaacagatcactactgtggtccttcccaccctggccgtggttgtgctacttatcgtggtcttcgtctatgtggcgacccgcccaacaatcaccgaatag

SEQ ID NO: 339846 - DNA, 180 bp, Artificial Sequence
  derived and/or modified sequence
atgcggcagctgaagggcaagcccaagaaggagaccagcaaggacaagaaggaaaggaagcaggccatgcaggaggcccgtcaacagataaccacagtggtgcttcccaccctagccgtggtggttctcttaattgtggtctttgtgtatgtggctacccggccaacgattacagagtag

SEQ ID NO: 339847 - DNA, 159 bp, Artificial Sequence
  derived and/or modified sequence
atgcggcagctgaagggcaagcccaagaaggagaccagcaaggacaagaaagagagaaaacaggcaatgcaggaggcccgccaacagattaccactgtggtgctgcccactttggcagtggtcgttctgcttatcgtggtcttcgtctacgtagcttag

SEQ ID NO: 339848 - DNA, 180 bp, Artificial Sequence
  derived and/or modified sequence
atgagacagctgaagggaaagcctaaaaaagagacttccaaggacaagaaggaacggaaacaagcaatgcaggaagccagacagcagatcactaccgtcgtcctgcctactctggccgtggtggtgctgctgatcgtggtctttgtgtacgtcgccacgaggccgacaataaccgaatag

SEQ ID NO: 339849 - DNA, 144 bp, Artificial Sequence
  derived and/or modified sequence
atgaggcagctgaagggtaaacctaaaaaggagaccagcaaagacaagaaagaacgcaaacaggccatgcaggaagcccgtcagcagattaccactgttgtccttcctacactggctgtcgtcgtcctcctgatagtggtgtag

SEQ ID NO: 339850 - DNA, 180 bp, Artificial Sequence
  derived and/or modified sequence
atgaggcagcttaagggaaaacccaagaaagaaacttcgaaagacaaaaaggagagaaagcaggcaatgcaggaagctagacagcaaattaccaccgtcgtgctgcccacgttagccgtggtggtcctgctgatcgtggtcttcgtatacgtagctacgcggcctaccataacggaatag

SEQ ID NO: 339851 - DNA, 159 bp, Artificial Sequence
  derived and/or modified sequence
atgcgtcagctcaagggtaaacctaaaaaggaaacaagtaaggataagaaggaacgcaagcaagccatgcaggaggcccgtcaacagatcactacagtggtgcttccaactctggctgtggtagttctgctgatcgtagtctttgtctatgtagcctag

SEQ ID NO: 339852 - DNA, 889 bp, Artificial Sequence
  derived and/or modified sequence
caggaataactcaagtcacctgtactggaaatcagtttgctgaaattaatcaacgattcttgaagttgaagaaaagttgttctctctacaggaggttccagccttggcaagaggagtgtggcccttcctggaatccctctggacacaccctcctagcatcctctaggaaagatgcggcagctcaaagggaagcccaagaaggagacctccaaggacaagaaggagcggaagcaagccatgcaggaggcccggcagcagatcactacagtggtgctgcccacgctggccgtggtcgtgctcttgatcgtggtgtttgtgtacgtggccacgcgccccaccatcaccgagtgagccccgcagccggctgcggaccccatcggcagggagaggaggcgcgggagggggacgcaaacaaaaaatggctttcatattcagagatgttcatgttgctgagctgtaagcaggagcaccctgtcttctctggtctttgacttgattaaagtatctccgctttcttgggagggaataggggatgttttatcagtgaatgtgccatacaccttatggtccacttcatgtgcctttcagacttcaaagcgcgcgcgcatgtgtgtgtgtgtgtgtgtgtgtgtgtgtgtgtgtgtgtgcttctttttctctcctaaaaatcgataagtagctccacctgaagagggatggaacctctgggtcaggaaacagctggaatccacactcacctcattcccattgtttggatcatgcttctttccaacacgtgttcacaatctccaaagggactgtatttcttctctgtgcttaatgtgatttgaaatatgttgaatcaaagtgaaatatttattttttgaataaaggagataatagccttaaa

SEQ ID NO: 339853 - DNA, 355 bp, Artificial Sequence
  derived and/or modified sequence
cctcttcaaagacctaatcagcgtctagtgggaataactcaagtcacctgtactggaaatcagtttgctgaaattaatcaacgattcttgaagttgaagaaaagttgttctctctacaggaggttccagccttggcaagaggagtgtggcccttcctggaatccctctggacacaccctcctagcatcctctaggaaagatgcggcagctcaaagggaagcccaagaaggagacctccaaggacaagaaggagcggaagcaagccatgcaggaggcccggcagcagatcactacagtggtgctgcccacgctggccgtggtcgtgctcttgatcgtggtgtttgtgtacgtggcc

SEQ ID NO: 339854 - DNA, 3225 bp, Artificial Sequence
  derived and/or modified sequence
atgagcgcctacagcgtgcccagcaccttcgcccaggccagcctgcccgtgcacaaccaggtgctgcccagcatcgagagcgtggacggcagcgaccccctggccaccctgcagacccccctgggcagactggaggccaaggaggaggaggacgaggacgaggacgaggacaccgaggaggacgaggaggaggacggcgaggacaccgacctggacgactgggagcccgacccccccagacccttcgacccccacgacctgtggtgcgaggagtgcaacaacgcccacgccagcgtgtgccccaagcacggccccctgcaccccatccccaacagacccgtgctgaccagagccagagccagcctgcccctggtgctgtacatcgacagattcctgggcggcgtgttcagcaagagaagaatccccaagagaacccagttcggccccgtggagggccccctggtgagaggcagcgagctgaaggactgctacatccacctgaaggtgagcctggacaagggcgacagaaaggagagagacctgcacgaggacctgtggttcgagctgagcgacgagaccctgtgcaactggatgatgttcgtgagacccgcccagaaccacctggagcagaacctggtggcctaccagtacggccaccacgtgtactacaccaccatcaagaacgtggagcccaagcaggagctgaaggtgtggtacgccgccagctacgccgagttcgtgaaccagaagatccacgacatcagcgaggaggagagaaaggtgctgagagagcaggagaagaactggccctgctacgagtgcaacagaagattcatcagcagcgagcagctgcagcagcacctgaacagccacgacgagaagctggacgtgttcagcagaaccagaggcagaggcagaggcagaggcaagagaagattcggccccggcagaagacccggcagaccccccaagttcatcagactggagatcaccagcgagaacggcgagaagagcgacgacggcacccaggacctgctgcacttccccaccaaggagcagttcgacgaggccgagcccgccaccctgaacggcctggaccagcccgagcagaccaccatccccatcccccagctgccccaggagacccagagcagcctggagcacgagcccgagacccacaccctgcacctgcagccccagcacgaggagagcgtggtgcccacccagagcaccctgaccgccgacgacatgagaagagccaagagaatcagactggagctgcagaacgccgccctgcagcacctgttcatcagaaagagcttcagacccttcaagtgcctgcagtgcggcaaggccttcagagagaaggacaagctggaccagcacctgagattccacggcagagagggcaactgccccctgacctgcgacctgtgcaacaagggcttcatcagcagcaccagcctggagagccacatgaagctgcacagcgaccagaagacctacagctgcatcttctgccccgagagcttcgacagactggacctgctgaaggaccacgtggccatccacatcaacgacggctacttcacctgccccacctgcaagaagagattccccgacttcatccaggtgaagaagcacgtgagaagcttccacagcgagaagatctaccagtgcaccgagtgcgacaaggccttctgcagacccgacaagctgagactgcacatgctgagacacagcgacagaaaggacttcctgtgcagcacctgcggcaagcagttcaagagaaaggacaagctgagagagcacatgcagagaatgcacaaccccgagagagaggccaagaaggccgacagaatcagcagaagcaagaccttcaagcccagaatcaccagcaccgactacgacagcttcaccttcaagtgcagactgtgcatgatgggcttcagaagaagaggcatgctggtgaaccacctgagcaagagacaccccgacatgaagatcgaggaggtgcccgagctgaccctgcccatcatcaagcccaacagagactacttctgccagtactgcgacaaggtgtacaagagcgccagcaagagaaaggcccacatcctgaagaaccaccccggcgccgagctgccccccagcatcagaaagctgagacccgccggccccggcgagcccgaccccatgctgagcacccacacccagctgaccggcaccatcgccaccccccccgtgtgctgcccccactgcagcaagcagtacagcagcaagaccaagatggtgcagcacatcagaaagaagcaccccgagttcgcccagctgagcaacaccatccacacccccctgaccaccgccgtgatcagcgccacccccgccgtgctgaccaccgacagcgccaccggcgagaccgtggtgaccaccgacctgctgacccaggccatgaccgagctgagccagaccctgaccaccgactacagaaccccccagggcgactaccagagaatccagtacatccccgtgagccagagcgccagcggcctgcagcagccccagcacatccagctgcaggtggtgcaggtggccagcgccaccagcccccaccagagccagcagagcaccgtggacgtgggccagctgcacgacccccagccctacccccagcacgccatccaggtgcagcacatccaggtgagcgagcccaccgccagcgcccccagcagcgcccaggtgagcggccagcccctgagccccagcgcccagcaggcccagcagggcctgagccccagccacatccagggcagcagcagcacccagggccaggccctgcagcagcagcagcagcagcagcagaacagcagcgtgcagcacacctacctgcccagcgcctggaacagcttcagaggctacagcagcgagatccagatgatgaccctgccccccggccagttcgtgatcaccgacagcggcgtggccacccccgtgaccaccggccaggtgaaggccgtgaccagcggccactacgtgctgagcgagagccagagcgagctggaggagaagcagaccagcgccctgagcggcggcgtgcaggtggagccccccgcccacagcgacagcctggacccccagaccaacagccagcagcagaccacccagtacatcatcaccaccaccaccaacggcaacggcagcagcgaggtgcacatcaccaagccctag

SEQ ID NO: 339855 - DNA, 3225 bp, Artificial Sequence
  derived and/or modified sequence
atgagcgcctattctgtgccatccacatttgcccaagcttcactccccgtccataaccaggttctgcctagcatcgaaagcgtggatgggtcggaccccctagcaactttgcaaacccctctcggcagactagaagctaaggaggaggaagacgaagacgaggatgaggacacagaggaagatgaggaagaagatggtgaggatacagacctagatgactgggagcctgatcctcctagaccattcgatcctcacgatctgtggtgcgaggagtgtaataatgctcatgcttcagtgtgtccaaaacacggcccactccaccctattcctaatcgtcctgtgctgactagagcaagggcatcgctgcccttggtgctgtacatcgatagatttctggggggagtttttagtaaaagacggattcccaagagaacccagtttggtcctgtcgaggggcctctcgtgcggggctcagagctgaaggactgctacattcatctgaaagtgtcacttgataagggcgacagaaaggagcgtgatctgcatgaggacctctggttcgagctgtccgatgaaaccttgtgcaactggatgatgtttgtcaggcctgctcagaatcatctggaacagaacctggttgcttatcaatacgggcaccatgtgtactacaccacaatcaagaacgtggagccaaagcaggagctgaaggtttggtacgctgcctcctacgctgaattcgtgaatcagaaaattcacgatattagcgaggaggagaggaaggtcttgagagagcaagagaaaaattggccctgttacgaatgcaacaggagattcattagttccgagcagctgcaacagcacttgaatagccatgatgaaaaactggatgttttttccagaacgagaggccgaggtcggggcagaggaaaaaggcgctttggcccaggaagacggccaggccgtccaccaaaattcatcaggctggaaatcacgtccgaaaatggagagaaatcagacgatgggactcaggaccttcttcactttcccacgaaagaacagtttgatgaggccgaaccggcaaccctaaacggcctagatcaacccgagcagactacgattcccatcccccagttaccacaggagacccaaagctccctggaacatgaaccggaaacacacacgttgcatttacagcctcagcatgaggagtctgtggtacctactcagtctaccctgactgccgacgacatgcgcagagccaagagaatccgtcttgagctacaaaatgctgccttacagcacttgtttattagaaagtcgtttcgcccttttaagtgcctacagtgtgggaaggcattccgcgagaaagataagctggatcaacacctgcgctttcacggcagagaaggcaactgccccctcacatgcgatctgtgcaacaaggggtttattagtagcacctctctggagtctcacatgaagctgcacagcgatcaaaaaacttactcctgtatcttttgccctgagagtttcgaccgcctggacctcctgaaggaccatgtggcaatccatatcaacgacgggtactttacatgccccacttgcaagaagcggttccccgacttcatccaggtcaaaaagcacgtccggtcatttcattccgagaagatctatcagtgtaccgagtgcgataaggctttctgccgtccagacaaactgcgactacatatgctgagacactccgaccggaaagactttctgtgttccacctgtggcaagcagttcaagagaaaagataaactgagggagcacatgcagcggatgcacaaccccgaaagagaggctaagaaagctgatcgcatcagtcggtctaagacatttaaaccacggataactagcaccgattacgatagtttcacctttaagtgccgcctgtgtatgatgggctttagacggcgtgggatgcttgtgaaccacctgtcgaaacgccatccagacatgaagattgaagaagttcccgagttaacactgcctattatcaagccgaatagggattatttttgccagtactgtgacaaggtttataagtccgctagtaagcgaaaagcccacattctgaagaaccatcctggggcagagttgccccccagtattcgtaagctccgccccgcaggaccaggtgaaccagaccctatgctttctacccacacacagctgacaggcacgatcgcaactccccctgtgtgctgcccacattgctctaagcagtattcgagtaagaccaagatggtgcagcacatccggaaaaagcatcctgaatttgcgcaattgtccaacacgattcatactccactaacgacagcagttatcagcgccacacccgctgttctgaccaccgattcggccacgggcgagactgtggtaaccaccgacttactaacccaggccatgaccgagctgtcccaaaccctaaccaccgactacagaacaccgcagggggattaccagcggatccagtatattccagtttcccaaagtgcaagcggacttcagcagccccagcacatacaattacaggttgtgcaggtggcaagcgccacaagtccacatcagagtcaacagtcaaccgtggatgtgggtcagttgcacgacccacagccctatcctcagcacgccatccaggtgcagcacatccaggtctccgagcctaccgcttcagcaccgagttctgctcaggtgtccgggcagccattgtcacctagcgctcagcaggcccagcagggtctttccccatcgcacattcaaggatcatcatcaacccaaggccaggccctgcaacagcagcagcaacaacagcagaactcttcagtgcagcacacataccttccgtcagcctggaatagtttccgaggatatagctcagaaattcagatgatgacattaccccccggtcagttcgtgattacagattctggagtagctactcctgtgacgacaggtcaagtgaaggccgttaccagcggacattacgtgctttcagagagtcagagcgagctggaggagaaacaaacgtcagctctgagcggaggtgtgcaagttgagccaccagcacactccgacagcctcgacccccaaaccaattctcagcagcagacaacacaatacattatcacgaccactacgaatggcaacggcagcagcgaggttcacataaccaaaccctag

SEQ ID NO: 339856 - DNA, 3225 bp, Artificial Sequence
  derived and/or modified sequence
atgtctgcctacagcgtgcccagcacctttgcccaggccagcctgcctgtgcacaaccaggtgctgcccagcattgaatctgtggatggcagtgaccccctggccaccctgcagacccccctgggccgcctggaggccaaggaggaggaggatgaagatgaagatgaggacacagaggaggatgaggaggaggatggagaggacacagacctggatgactgggagccagaccccccccggccctttgacccccatgacctgtggtgtgaggagtgcaacaatgcccacgcctctgtgtgccccaagcacggccccctgcaccccatccccaacagacctgtgctgacccgggcccgggccagcctgcccctggtgctgtacatcgaccgcttcctgggcggcgtcttcagcaagaggcgcatccccaagaggacccagtttggacctgtggagggccccctggtgcggggcagcgagctgaaggactgctacatccacctgaaggtgtccctggacaagggggacaggaaggagcgggacctgcacgaggacctgtggtttgagctgagtgatgagaccctgtgcaactggatgatgtttgtgcggcctgcccagaaccacctggagcagaacctggtggcctaccagtatggccaccacgtgtactacaccaccatcaagaatgtggagcccaagcaggagctgaaggtgtggtacgccgccagctatgcagagtttgtgaaccagaagatccatgacatcagcgaggaggagaggaaggtgctgcgggagcaggagaagaactggccctgctatgagtgcaacagacgcttcatcagcagcgagcagctgcagcagcacctgaacagccatgatgagaagctggatgtgttcagcaggacccggggccggggccggggccggggcaagagaagatttggacctggaagaagacctggccggccccccaagttcatccggctggagatcaccagtgaaaatggagagaagagtgatgatggcacccaggacctgctgcacttccccaccaaggagcagtttgatgaagctgagcccgccaccctgaatggcctggaccagcctgagcagaccaccatccccatcccccagctgccccaggagacccagagcagcctggagcacgagcctgagacccacaccctgcacctgcagccccagcacgaggagagcgtggtgcccacccagagcaccctgacagcagatgacatgaggcgggccaagaggatccggctggagctgcagaatgctgccctgcagcacctgttcatcaggaagagcttccggcccttcaagtgcctgcagtgtgggaaggccttccgggagaaggacaagctggaccagcacctgcgcttccacggccgggagggcaactgccccctgacctgtgacctgtgcaacaagggcttcatcagcagcaccagcctggagagccacatgaagctgcacagcgaccagaagacctacagctgcatcttctgcccagagagctttgaccggctggacctgctgaaggaccacgtggccatccacatcaatgatggctacttcacctgccccacctgcaagaagcgcttcccagacttcatccaggtgaagaagcacgtgcgctccttccacagcgagaagatctaccagtgcacagaatgtgacaaggccttctgcaggccagacaagctgcggctgcacatgctgcggcacagcgacaggaaggacttcctgtgcagcacctgtgggaagcagttcaagaggaaggacaagctgcgggagcacatgcagaggatgcacaaccctgagcgggaggccaagaaggctgaccgcatcagccgcagcaagaccttcaagccccgcatcaccagcacagattatgacagcttcaccttcaagtgccgcctgtgcatgatgggcttcagaagaagaggcatgctggtgaaccacctgagcaagaggcacccagacatgaagattgaggaggtgcctgagctgaccctgcccatcatcaagcccaacagagactacttctgccagtactgtgacaaggtgtacaagagcgccagcaagaggaaggcccacatcctgaagaaccaccctggagctgagctgcccccatccatcaggaagctgcggcctgctggccctggagagccagaccccatgctgagcacccacacccagctgaccggcaccatcgccaccccacctgtgtgctgcccccactgcagcaagcagtacagcagcaagaccaagatggtgcagcacatcaggaagaagcaccctgagtttgcccagctgagcaacaccatccacacccccctgaccacagctgtgatcagcgccaccccagctgtgctgaccacagattctgccactggagagaccgtggtgaccacagacctgctgacccaggccatgacagagctgagccagaccctgaccacagactaccgcaccccccagggcgactaccagaggatccagtacatccctgtgtcccagagcgccagcggcctgcagcagccccagcacatccagctgcaggtggtgcaggtggccagcgccaccagcccccaccagagccagcagagcacagtggatgtgggccagctgcatgacccccagccctacccccagcacgccatccaggtgcagcacatccaggtgtctgagcccacagccagcgcccccagcagcgcccaggtgtctggccagcccctgagccccagcgcccagcaggcccagcagggcctgagccccagccacatccagggcagcagcagcacccagggccaggccctgcagcagcagcagcagcagcagcagaacagctctgtgcagcacacctacctgcccagcgcctggaacagcttccggggctacagcagcgagatccagatgatgaccctgcccccaggccagtttgtgatcacagattctggagtggccacccctgtgaccaccggccaggtgaaggctgtgaccagcggccactacgtgctgtctgagagccagagcgagctggaggagaagcagaccagcgccctgagcggcggcgtgcaggtggagcccccagcccacagcgacagcctggacccccagaccaacagccagcagcagaccacccagtacatcatcaccaccaccaccaatggaaatggcagcagcgaggtgcacatcaccaagccctag

SEQ ID NO: 339857 - DNA, 3225 bp, Artificial Sequence
  derived and/or modified sequence
atgagcgcctacagcgtgcccagcaccttcgcccaggccagcctgccagtgcacaatcaggtcctaccatcaattgagagtgttgacgggagtgatcccctcgccacgttgcagacgcctttgggcaggctggaggcaaaggaggaagaggatgaggacgaggacgaggatacggaggaagatgaggaggaggatggcgaagacacagatctggacgactgggaacccgaccccccaaggccattcgatccccatgacctgtggtgcgaggaatgcaataacgctcatgcgagcgtatgccccaagcacggtcccctacatccaatcccaaatagaccggtgttaacccgtgctcgggcgtcacttcccttggtgctctacattgaccgatttttgggcggagtgttctccaagcgtagaattcccaagaggacacagttcggccccgtcgaaggtccactggtgcgcggcagcgaactcaaggactgctatatccacctgaaggtgtccctggacaaaggagataggaaagagcgcgaccttcacgaagacttgtggttcgagctctctgacgaaactctgtgtaattggatgatgttcgtgagacccgctcaaaaccacttagaacagaacctcgtagcttatcagtacggacaccacgtttattacacgacaatcaagaacgttgagccgaagcaggaacttaaggtctggtatgctgcctcttacgcagagttcgtgaaccagaagatccacgacatcagtgaggaagaacgcaaagtgctacgcgaacaagagaaaaattggccctgctatgaatgcaatcgccggttcatctccagtgagcagctgcagcagcacctgaacagtcacgacgagaagctggacgttttcagtagaacaagaggtagaggcagagggcggggcaagagacgattcggccctggacgcaggccaggccggccccccaaattcattagactggagatcacatccgagaatggagaaaaaagcgacgatgggacccaggacctgctgcatttcccaaccaaagaacagttcgacgaggccgagcccgccactctcaacggactggaccaacccgagcaaacaacaatccccatccctcagcttccccaggaaacacagtcttcactcgagcacgagccagagacgcatacattacatttacagccacagcatgaagagtcggtcgttcccacccagtccactctgacagcagatgacatgcgccgcgccaaacggataagattagagctgcaaaatgcagccctacagcatctctttattaggaagtcattccggccattcaagtgcctgcagtgtgggaaagcattccgcgagaaggacaagttggaccagcacttaagattccacggtcgtgaggggaactgtccgctgacatgcgatctgtgtaacaagggcttcataagctccacatcccttgagtcgcacatgaagctgcatagtgaccagaaaacttatagctgcatcttctgccccgaatctttcgaccgcctggacctactcaaggatcatgtggctatccatattaatgatggttattttacttgcccaacttgcaagaaacgcttcccggacttcatacaggtgaagaagcatgtacggagctttcactctgaaaagatctaccaatgtaccgagtgtgacaaagccttctgtcggccagataagctgcgcctgcacatgttgagacactccgacaggaaggatttcctgtgttcaacctgcggaaaacagtttaagcggaaggacaagctgcgggagcacatgcagagaatgcacaaccctgagcgcgaggctaagaaagcagacagaatctcaagaagcaagaccttcaagccacgaattacttctaccgactacgactccttcactttcaagtgccgactttgcatgatgggcttccgtaggcgggggatgctagtcaaccacctttcgaagagacatcctgacatgaagattgaagaggttcctgaactaacgctgccaatcattaaaccgaaccgcgactatttctgccaatactgtgacaaagtctataaaagtgcctcgaagagaaaggcccacatattgaagaatcatccaggcgctgagctgcctccatctatacggaaattgaggcctgccggtcccggcgaacccgaccctatgctgagcactcacacccagctgacaggaacaattgcgacaccgcctgtctgctgtccccactgcagtaagcaatattccagcaaaacaaagatggtgcagcacatccgaaaaaaacaccccgagttcgcccaactgtctaacactatccacacccctttgactaccgccgtgatatcagccaccccggctgtgctgacaactgacagcgctacaggagaaacagtcgtcacaaccgacctgttgacacaggctatgacagagctgagtcagacgcttacgacagactataggactccccagggcgactaccagcggatacagtatatccccgtgtcccagtccgcatctggcctacaacagccccaacacatacaactacaggtcgtgcaggtggcctccgccactagcccacaccagtcacaacagtcaacggtcgatgtgggtcagttacacgacccccaaccgtacccacaacacgcgattcaagtgcagcacattcaggtaagtgagccaactgcctctgctccatctagcgcccaggtctcgggtcagccattatctccatcggcgcaacaggcccagcagggcctgtctccaagtcacatacagggcagtagctctacacagggccaagctctccagcagcagcaacagcaacagcagaactcctctgtgcagcatacttacttgcccagcgcgtggaattccttccgtggttatagctcggaaattcaaatgatgacactgcctccagggcaattcgtgatcaccgatagcggggtggctacccccgtcacaacgggacaggtgaaggctgtaacttctggccactacgtactatcagagagtcaatccgaactggaggagaaacaaacatcagccctttccggcggcgtgcaggttgaacccccagcacacagtgatagcctagacccccagactaattcacagcaacaaacaactcaatatatcataaccacgacaaccaatggcaacggatcaagtgaggtacacatcactaagccatag

SEQ ID NO: 339858 - DNA, 3225 bp, Artificial Sequence
  derived and/or modified sequence
atgtctgcctacagcgttcccagcactttcgcccaggctagcctgcccgttcacaatcaggtgctcccaagtatcgagtcagtagacgggtctgaccccttggccacgttgcagactcccctcggacgtcttgaagccaaagaagaagaggatgaggatgaggacgaagacaccgaagaagatgaagaggaggatggcgaagacacagatctcgatgattgggagcctgatccccctcgaccttttgaccctcacgatctctggtgtgaggagtgcaataacgcccatgcatccgtgtgtcccaagcacggcccattgcaccctattccaaacagaccggttctgacacgagcgagagcctctctgcctctagtgctgtatattgaccgatttcttggaggagtgttctctaaacggaggatccccaagaggacacagtttgggcctgtggaaggcccattagttcggggaagcgagctgaaggattgctatattcacctgaaggttagcctcgacaaaggcgatcgtaaggagagggacttgcatgaagacctgtggttcgagttgagtgatgagacactctgtaattggatgatgttcgtccgccctgcgcagaaccaccttgagcagaacctcgtggcctatcagtacggtcatcacgtttattacaccaccatcaaaaatgtggaacccaaacaggagctgaaggtttggtatgccgcatcttacgcagaattcgttaatcagaagatccacgacatctccgaggaagagaggaaggttctcagggagcaggaaaaaaactggccctgctacgagtgcaaccgcagatttatttccagtgagcagctccagcagcacctcaacagccacgacgagaagcttgacgtctttagtcggaccagaggaaggggaaggggcaggggaaagcggaggtttggtcccggtcgacgacctggtcgccctcccaagttcattaggctcgagatcacaagtgaaaatggagaaaaaagcgatgatgggacccaggatctgttgcacttccccaccaaggagcaatttgacgaggctgagcctgccacactgaacgggttggatcagcctgagcaaaccacaatacccatccctcagctcccacaggagacccagagctcactggaacatgaaccagagactcacacccttcatcttcagccccagcacgaagagtccgtggtccccactcaatctaccctgactgccgatgacatgcggcgagcaaagagaatccggttggaactgcagaacgctgcgctgcagcatctttttatccgtaagtcgttccggcctttcaagtgcttacagtgcggcaaagccttcagggaaaaggacaagttggaccagcatcttcgctttcacgggagggaaggcaactgccctctaacttgcgacctgtgcaacaagggattcataagcagtacctccctcgaatcacatatgaagttgcactcagatcaaaagacgtattcctgtattttctgccctgaatcatttgaccgcctcgacctgctgaaagaccacgtcgccatccatattaatgatggatattttacctgtcctacatgtaaaaagcgatttcctgattttattcaggttaagaaacacgtgagatcctttcacagcgagaaaatctaccaatgcaccgagtgcgacaaggccttctgccgccctgataagcttaggttacacatgctgaggcactctgaccgcaaggactttctgtgctctacctgtggaaagcagttcaagcggaaagacaagcttagagagcacatgcagagaatgcataatccggagcgcgaggccaagaaggcagataggatatctcgctcaaagacttttaaacccagaatcacttctacggactacgattcgtttacttttaaatgtagactatgtatgatgggcttccggaggcgcggaatgctggttaatcacctgagtaagcggcatccagatatgaaaatagaggaagtacctgagctgacgctaccaattatcaaacccaatcgtgactacttttgccagtattgtgataaagtgtacaagtcagccagtaagaggaaagcgcacattctgaaaaaccatcccggagctgagctaccaccgtctatcagaaagctacggcctgctggtccgggtgaacccgaccctatgttaagcacacacacacagctgactggcacaattgctaccccacctgtgtgttgcccccactgttccaagcagtacagtagtaaaactaaaatggtccagcacataagaaagaaacacccagagttcgcccagctttcaaataccatccacacacctttgaccactgcggtcatcagtgccaccccggctgtactcaccaccgattcagccaccggggagactgtcgtcactacagatttgctgactcaggcaatgaccgagctaagtcagaccctgactaccgattatcgtactccacagggcgattaccagcgcattcagtatatacccgtgtcccaatctgcctccggcctgcaacagccacagcacatccagctgcaggttgttcaagttgctagcgctacaagcccccaccagagccagcagtccaccgtagatgtgggccagctccacgacccccagccttatcctcagcatgcgatccaggtccagcacatccaggtgtcagaacctacggcgtccgccccatcctcggcacaagtgtctggccagcccctctctccctccgcccagcaggcgcagcagggactgagtccttcccacattcagggcagcagcagcactcaaggtcaggctctccagcagcagcagcaacagcagcagaattcgagtgtgcaacacacctacctcccttcagcctggaacagcttccggggatattcaagcgagatccagatgatgacacttcccccaggccaattcgttatcactgactcaggagtggccacccctgtcacgaccggacaggtcaaggctgtaaccagtgggcattacgtgttgagtgagtctcaatctgagctggaggaaaagcagacaagcgccctcagcggaggagtgcaggttgagcccccagcccattccgacagccttgaccctcagaccaattctcaacagcagaccactcagtatatcattaccacaactacaaatggtaacggctcttcggaggtacacatcaccaagccatag

SEQ ID NO: 339859 - DNA, 3308 bp, Artificial Sequence
  derived and/or modified sequence
agcccttgcgccctgtttgtgccagcaggcaccagcgaaccaaaagcaggtgtccatgtctgcttactctgtgccttcaacttttgcccaggcctcattgccagttcataaccaggtgctgccttccatcgagagtgtagatgggtccgaccctttggcaactctgcagacccctctaggcagactggaggccaaagaggaagaggatgaggatgaggacgaggacactgaggaagatgaggaagaagacggtgaggacacggatctggatgactgggagccagacccgccccggcccttcgacccacacgacttgtggtgtgaggagtgcaataacgcgcatgcttcagtgtgtccgaagcacggccccttgcacccgatccccaaccggccggtgctcacccgggccagggcgagcctccccctggtgctctacatagacaggtttctgggcggggtgttctccaagcggcgcatccccaagcgcacccagtttggccccgtggaggggcctctcgtcaggggctcggagctgaaagactgttacattcacctcaaggtttctcttgataaaggggacaggaaagaaagggatttacatgaagacctatggtttgagttgtctgatgagacgctttgtaactggatgatgtttgtacggccagcccagaatcacctggagcagaacctggtggcttaccagtatggccaccatgtgtattatacaaccataaaaaatgtggagcccaagcaggaactgaaggtgtggtatgccgcatcctatgctgagttcgtgaaccagaaaattcatgacatttctgaggaagaaaggaaagttcttcgagagcaagagaagaattggccctgctatgaatgtaaccgccgatttataagctcggagcagttgcaacagcatctcaattctcatgatgagaaactagatgtgtttagcagaacaagaggcagaggaaggggacgaggcaagaggcgattcggtccaggtcgacggccggggcgtcctccaaaatttatccgcctggaaatcaccagcgaaaatggggaaaagagtgacgatgggacacaggacttgctacattttcccacaaaggagcaatttgatgaggctgaaccagccactctgaatgggctggatcaaccagaacagaccactatcccaatccctcagctgccacaggaaacccagtcttccctggaacatgaaccagaaactcacaccctgcacctgcagccgcagcatgaagagagcgtggtgcccacccagagcacgctgacagccgacgacatgcgcagagccaagcgcatccgattggagctgcagaatgcagctcttcagcatctgtttattcggaagtccttccggccttttaaatgcttgcagtgtgggaaggccttccgggaaaaggacaaactggaccagcacttacgcttccatgggcgggaggggaactgcccactgacctgtgatctctgtaacaagggcttcatcagcagcacatccttggagagccacatgaagctccactcagaccagaagacttactcttgcattttttgcccagaatcctttgaccgccttgatttgttgaaagatcatgtggccattcatatcaatgatggctacttcacctgcccaacttgtaagaaacggttcccagattttatccaggtgaaaaaacacgtgcgcagcttccactcagaaaagatctaccagtgcacagagtgtgacaaggccttctgtcgccccgataaactgcgactccacatgctccggcattcggaccgcaaagacttcctgtgttccacctgtgggaagcaatttaagcgaaaagacaaactacgggaacacatgcagaggatgcataatcctgagagggaggccaagaaagccgaccgcatcagccgctccaagacgttcaagccccgcatcacgtccacagactacgacagcttcacgttcaagtgccgcctgtgcatgatgggcttccggcggcgcggcatgctggtaaatcacttatcgaagagacacccagacatgaagatagaagaggtgccagagttaactctacccatcataaaacccaatcgtgattacttttgtcagtattgcgataaggtttataaaagtgccagcaagcgcaaagcccacattctgaagaaccacccaggagcagagctcccaccgagcattcggaagctccgacccgctggtcctggagagccagaccccatgctgagcacacacacccagctgacgggcaccatcgccacccctcccgtctgctgtccccactgctccaagcagtacagcagcaagaccaagatggtccagcacattcgaaagaagcatccagagttcgcccagctctccaacaccatacacacaccactgacgacagctgtgatcagtgccaccccagcggttttgactacagacagcgccactggagagactgtggtgacgacggacctgctcacccaagcaatgacagaactgtcccagaccttaacgacagactaccgaacgccacaaggggattaccagagaattcagtacatccctgtgtcgcagtcggcgtctggcctccagcagcctcagcacatacagctgcaagtggttcaagtggcctcggccacttcccctcaccagtcacagcagtccactgtggatgttggccagctccatgatcctcagccctacccccagcacgccatccaggtgcagcacatccaggtcagcgagcctaccgcctcggccccgtcctccgcccaggtatctgggcagccgttgagtccctcagcccagcaggctcagcaggggctcagcccctcccacatccagggcagttcttccacacaggggcaggctctgcagcagcagcagcagcagcagcagaattcctctgtgcagcacacgtacctgcccagtgcttggaattccttccgtggctattcatctgagattcaaatgatgacgcttcctccgggtcagtttgtgattacagacagtggtgtggcaactccagttactactggccaggtgaaggcggttacttcgggtcattatgtgttatcagaaagtcaatcagaattggaagaaaagcaaacttctgccctctctggtggagtccaggtcgagccacctgcacacagtgactccctggacccccagaccaacagccaacagcagaccacacagtacatcatcaccaccaccaccaacgggaacggaagcagcgaagtgcatatcaccaaaccatgacttccaccctggagcttgaatccagcac

SEQ ID NO: 339860 - protein, 1820 aa, Artificial Sequence
  derived and/or modified sequence
MLPYWAGHTVELPCTASGYPIPAIRWLKDGRPLPADSRWTKRITGLTISDLRTEDSGTYICEVTNTFGSAEATGILMVIDPLHVTLTPKKLKTGIGSTVILSCALTGSPEFTIRWYRNTELVLPDEAISIRGLSNETLLITSAQKSHSGAYQCFATRKAQTAQDFAIIALEDGTPRIVSSFSEKVVNPGEQFSLMCAAKGAPPPTVTWALDDEPIVRDGSHRTNQYTMSDGTTISHMNVTGPQIRDGGVYRCTARNLVGSAEYQARINVRGPPSIRAMRNITAVAGRDTLINCRVIGYPYYSIKWYKDALLLPDNHRQVVFENGTLKLTDVQKGMDEGEYLCSVLIQPQLSISQSVHVAVKVPPLIQPFEFPPASIGQLLYIPCVVSSGDMPIRITWRKDGQVIISGSGVTIESKEFMSSLQISSVSLKHNGNYTCIASNAAATVSRERQLIVRVPPRFVVQPNNQDGIYGKAGVLNCSVDGYPPPKVMWKHAKGSGNPQQYHPVPLTGRIQILPNSSLLIRHVLEEDIGYYLCQASNGVGTDISKSMFLTVKIPAMITSHPNTTIAIKGHAKELNCTARGERPIIIRWEKGDTVIDPDRVMRYAIATKDNGDEVVSTLKLKPADRGDSVFFSCHAINSYGEDRGLIQLTVQEPPDPPELEIREVKARSMNLRWTQRFDGNSIITGFDIEYKNKSDSWDFKQSTRNISPTINQANIVDLHPASVYSIRMYSFNKIGRSEPSKELTISTEEAAPDGPPMDVTLQPVTSQSIQVTWKAPKKELQNGVIRGYQIGYRENSPGSNGQYSIVEMKATGDSEVYTLDNLKKFAQYGVVVQAFNRAGTGPSSSEINATTLEDVPSQPPENVRALSITSDVAVISWSEPPRSTLNGVLKGYRVIFWSLYVDGEWGEMQNITTTRERVELRGMEKFTNYSVQVLAYTQAGDGVRSSVLYIQTKEDVPGPPAGIKAVPSSASSVVVSWLPPTKPNGVIRKYTIFCSSPGSGQPAPSEYETSPEQLFYRIAHLNRGQQYLLWVAAVTSAGRGNSSEKVTIEPAGKAPAKIISFGGTVTTPWMKDVRLPCNSVGDPAPAVKWTKDSEDSAIPVSMDGHRLIHTNGTLLLRAVKAEDSGYYTCTATNTGGFDTIIVNLLVQVPPDQPRLTVSKTSASSITLTWIPGDNGGSSIRGFVLQYSVDNSEEWKDVFISSSERSFKLDSLKCGTWYKVKLAAKNSVGSGRISEIIEAKTHGREPSFSKDQHLFTHINSTHARLNLQGWNNGGCPITAIVLEYRPKGTWAWQGLRANSSGEVFLTELREATWYELRMRACNSAGCGNETAQFATLDYDGSTIPPIKSAQGEGDDVKKLFTIGCPVILATLGVALLFIVRKKRKEKRLKRLRDAKSLAEMLISKNNRSFDTPVKGPPQGPRLHIDIPRVQLLIEDKEGIKQLGDDKATIPVTDAEFSQAVNPQSFCTGVSLHHPTLIQSTGPLIDMSDIRPGTNPVSRKNVKSAHSTRNRYSSQWTLTKCQASTPARTLTSDWRTVGSQHGVTVTESDSYSASLSQDTDKGRNSMVSTESASSTYEELARAYEHAKLEEQLQHAKFEITECFISDSSSDQMTTGTNENADSMTSMSTPSEPGICRFTASPPKPQDADRGKNVAVPIPHRANKSDYCNLPLYAKSEAFFRKADGREPCPVVPPREASIRNLARTYHTQARHLTLDPASKSLGLPHPGAPAAASTATLPQRTLAMPAPPAGTAPPAPGPTPAEPPTAPSAAPPAPSTEPPRAGGPHTKMGGSRDSLLEMSTSGVGRSQKQGAGAYSKSYTLV

SEQ ID NO: 339861 - DNA, 5463 bp, Artificial Sequence
  derived and/or modified sequence
atgcttccttactgggccggccatacggtggaactgccatgtactgccagtggctacccgattccagccataagatggttgaaggacgggagacctcttccggcggacagcagatggaccaagcggatcactgggctgacaattagcgatctcagaactgaggactcaggaacctatatttgtgaagtcacgaatacttttggaagtgcagaggccacagggatactgatggtcatcgatccactgcacgttaccctgacgccaaagaagctcaagacagggattggctcaaccgtcatacttagttgtgccttgacgggctcccccgagttcaccatcaggtggtatcggaataccgagttggtgctccctgatgaggcaatatcaatcagggggctgagtaatgagacattgctgattaccagcgctcagaagtcgcattctggagcctatcagtgtttcgccacccggaaggctcaaaccgcgcaggattttgccattatcgcactggaggatgggactcctagaattgtctccagtttcagtgagaaggtcgttaatcctggtgagcagttttcactgatgtgtgcagccaaaggagcaccaccaccaaccgtgacatgggcccttgacgacgaacctatcgtcagggacggctctcatagaacgaaccagtatacgatgagcgatggcactacaatctcccatatgaatgtaaccggcccgcagatccgagacggcggggtctacaggtgtacggcccggaatctagtggggtctgcagaatatcaggccagaataaacgtcaggggaccaccgagcatccgggccatgcgcaacattactgccgtagcgggcagggacacgctcattaattgtcgggtcatagggtacccctactactcaattaagtggtataaagatgcgctgctgctgccggataaccatcgacaggttgtgtttgaaaatggaactctgaagctgaccgatgtgcagaaggggatggatgagggggagtacctgtgttcggttctgatccagccccagctctccattagccagagcgtacacgtggcagtgaaagtccctccactcattcagccctttgaatttcctcctgcatccataggacagctcctctatatcccatgcgtcgtaagcagcggagatatgcctatcagaattacctggagaaaggatgggcaagtcatcatttcagggtctggcgttacaattgagagtaaggaattcatgtcaagtctgcagatcagcagcgtttctctaaagcacaacggcaattatacttgcatcgccagcaatgccgcagccacagtctcaagagagcgccagctgattgtcagggttccacctcggtttgtagtgcagccaaacaaccaggacggcatctatggcaaagcgggcgtgctcaattgcagtgtggacggataccccccacctaaggttatgtggaaacacgccaagggcagcggcaacccccaacagtaccacccggttccactgacgggccggatacagattttgcccaattccagtcttttgattagacacgtactggaggaagacatcggctattacctctgccaggcttccaacggagtaggtactgacatcagtaaaagcatgttcctaactgtgaagatcccagccatgatcacaagtcaccccaacacaaccattgcgattaaggggcacgcgaaagaactcaattgcaccgccagaggtgaaaggccaattatcatccggtgggaaaagggagataccgttatcgaccctgatcgcgtgatgagatacgccattgcaactaaggacaatggggatgaagtggtgtccacgctcaagcttaagcccgccgacagaggggacagtgtgttctttagctgtcacgcgattaatagttatggcgaagataggggtctgattcaactcaccgtacaggagccccccgacccgcccgagcttgagattcgcgaggtaaaagcgcggagcatgaatttgcggtggacccagagatttgacggcaacagtattatcaccggttttgacatcgaatacaaaaataagtctgacagttgggacttcaaacagtccaccagaaacatcagcccaaccatcaaccaagctaacattgtagatttacatcctgcaagcgtgtactctataagaatgtactcattcaacaagattggccggtccgaaccttccaaagagctgaccatctctaccgaagaagcagcccctgatggtccaccgatggatgttaccctgcaaccagttaccagtcagtctattcaggtaacctggaaggccccaaagaaggagctgcagaacggcgtgattagagggtaccaaattggttaccgcgaaaacagccctggcagcaacgggcagtactccatagtcgagatgaaagccacaggagattctgaagtatataccctagataatcttaaaaagtttgctcaatacggcgtcgtggtgcaggccttcaaccgggctggaacaggaccttccagctctgagatcaacgccacaaccctcgaggatgtgccctcccagcccccagaaaacgttcgagctcttagcatcacttcggatgtagcagtcatatcctggtctgagccaccaaggagcaccctgaatggggttttaaaagggtatcgggtgatattctggtctctgtacgtggacggcgaatggggggagatgcagaacattactaccactcgagaacgtgtcgagctaagaggaatggagaagttcacgaattacagcgtgcaggtcctggcctatacgcaagccggagatggcgtaagatcatcagtcttgtatatccaaacaaaagaggatgtgcccggacctcccgccgggatcaaagcagtaccctctagcgcaagcagcgtcgttgtgtcatggttgcctcccacaaagcctaatggggttatccggaaatatactattttttgttcctccccgggatccggacagccggctccctcagaatacgaaactagcccggagcagctattttaccgcatcgctcacctaaacagaggccagcagtacctgctgtgggtggccgccgtcacctccgctggaagaggtaactcctcagaaaaagtaaccattgagcccgccggcaaggcccctgccaagatcatttcgttcggaggaacagtaacaaccccgtggatgaaagacgtccggctgccttgcaacagcgttggcgaccctgctcccgcggtgaagtggacgaaggattccgaggattcagcgataccagtgtcaatggacggtcaccggctgattcataccaatgggacgctcctcctgcgggctgtgaaagctgaggacagtgggtactacacatgtacggcaaccaacaccggcggcttcgacaccataattgtcaacctgctggtacaggtcccacctgaccagcctcgactgacggtttccaagactagtgcgtctagcatcacgctgacctggatccccggcgataatggggggtcttccattagggggttcgtgctccagtatagcgtggacaatagcgaagaatggaaggacgtcttcatatcatcatctgaaaggagctttaagctggactctctgaagtgtggcacctggtacaaagttaaattagctgcgaaaaattctgtcgggtcagggagaatcagtgaaattattgaagcaaagacccacggcagagagccttcattctcgaaagatcaacacttattcacgcacataaatagtacgcacgcccggctgaacctccaaggttggaacaatggggggtgccctatcaccgcgatcgtcctggaataccgccctaagggcacttgggcatggcaaggcttgcgcgctaatagcagtggggaagtgtttctgactgagctcagagaggctacatggtacgagctgagaatgagggcctgtaactcggccggttgtggtaacgaaacggcacagttcgcaaccctggattacgacggaagcaccatccccccaatcaaatcagcacagggagagggtgatgacgttaaaaagctttttacaatcgggtgtccggttattctggctacgcttggggtggccctgctatttatcgtcagaaagaagagaaaggaaaaaaggctgaagagactgcgtgacgcaaagtccttggcagagatgctcatctccaaaaacaacagatctttcgacactccggtgaagggacccccgcagggaccccgcttacatatagacataccacgcgtgcagctcctgattgaggataaagaggggatcaaacagctgggcgacgataaggctactatccctgttacagacgcagagttttcccaggctgtaaatccccagtcattctgtaccggagtgtcactgcaccacccgactttgatccagtccactgggcccctgatcgacatgtcagatattcgacctggtaccaatcctgtcagtagaaaaaatgttaaatccgctcacagcacaaggaaccgctatagttcccagtggaccctaaccaagtgccaggcatccacacctgcgaggacattaaccagcgattggcggaccgtcgggtcccagcacggcgttacggtgacagagagtgactcgtatagcgcaagcctgtcccaagacacggacaaggggaggaattctatggtcagcacagaaagcgcatcatccacttacgaagaattagctcgtgcctatgaacacgcgaaattggaagagcagcttcagcacgccaaattcgagattacagaatgcttcatttctgattcctcctcggatcagatgacaactggcactaatgagaatgctgactccatgacatccatgtccactccatctgagcccggaatctgccggtttactgcatctccccctaaaccccaggacgccgatcgaggtaaaaacgttgctgttccaatccctcacagggctaacaagtcggactactgcaatctcccattatacgcaaaatcagaggccttttttaggaaagctgacggacgggagccctgtcccgtagtgccccctagagaggcatctatcaggaatttggctcgcacctaccatactcaggctcgacacctcactctagatcccgcatccaaaagcctgggactcccccaccctggcgcaccagcagccgcaagcaccgcgaccttgccacagagaaccttggcgatgcccgctccccctgccggaacagccccccctgcccctggcccaacaccagcagaaccccccacggcccccagcgcagctccccccgcacctagcaccgagccacctcgggccggaggccctcacactaagatgggcggctccagagactccttattggaaatgagcacctcaggagtgggacggtcacagaaacagggcgctggagcctactccaagagttacacactagtatag

SEQ ID NO: 339862 - DNA, 5463 bp, Artificial Sequence
  derived and/or modified sequence
atgctgccctactgggccggccacacagtggagctgccctgcacagccagcggctaccccatcccagccatccgctggctgaaggatggccggcccctgcctgctgacagccgctggaccaagaggatcaccggcctgaccatcagtgacctgaggacagaggacagcggcacctacatctgtgaggtgaccaacacctttggatctgctgaggccaccggcatcctgatggtgattgaccccctgcacgtgaccctgacccccaagaagctgaagacaggaattggcagcaccgtcatcctgagctgtgccctgaccggcagccctgagttcaccatccgctggtacagaaacacagagctggtgctgcctgatgaggccatcagcatccggggcctgagcaatgagaccctgctgatcaccagcgcccagaagagccacagcggggcctaccagtgctttgccaccaggaaggcccagacagcccaggactttgccatcatcgccctggaggatggcaccccaagaattgtgagcagcttcagcgagaaggtggtgaaccctggagagcagttcagcctgatgtgtgccgccaagggggcccccccacccaccgtgacctgggccctggatgatgagcccatcgtgagagatggcagccacaggaccaaccagtacaccatgtctgatggcaccaccatcagccacatgaatgtgacaggcccccagatcagagatggcggcgtgtaccgctgcacagccaggaacctggtgggcagcgctgagtaccaggcccgcatcaacgtgcggggcccccccagcatccgggccatgaggaacatcacagctgtggccggccgggacaccctcatcaactgcagggtcatcggctacccctactacagcatcaagtggtacaaggatgccctgctgctgcctgacaaccaccggcaggtggtgtttgaaaatggcaccctgaagctgacagatgtgcagaagggcatggatgaaggagagtacctgtgcagcgtgctgatccagccccagctgagcatcagccagagcgtgcacgtggccgtgaaggtgcccccactcatccagccctttgagttccccccagccagcatcggccagctgctgtacatcccctgtgtggtgagcagcggggacatgcccatccgcatcacctggaggaaggatggccaggtgatcatcagcggcagcggcgtgaccatcgagagcaaggagttcatgagcagcctgcagatcagctctgtgtccctgaagcacaatggaaactacacctgcatcgccagcaatgctgctgccaccgtgtcccgggagcggcagctgattgtgcgggtgccccccaggtttgtggtgcagcccaacaaccaggacggcatctacggcaaggccggcgtgctgaactgcagcgtggatggctaccccccacccaaggtgatgtggaagcacgccaagggcagcggcaacccccagcagtaccaccctgtgcccctgaccggccgcatccagatcctgcccaacagcagcctgctgatcagacatgtgctggaggaggacatcggctactacctgtgccaggccagcaatggagtgggcacagacatcagcaagtccatgttcctgactgtgaagatcccagccatgatcaccagccaccccaacaccaccatcgccatcaagggccacgccaaggagctgaactgcacagcccggggggagcggcccatcatcatccgctgggagaagggggacaccgtcatcgaccctgacagagtgatgagatatgccatcgccaccaaggacaatggagatgaggtggtgtccaccctgaagctgaagccagctgacagaggagacagcgtcttcttcagctgccacgccatcaacagctatggagaggaccggggcctcatccagctgactgtgcaggagcccccagaccccccagagctggagatccgggaggtgaaggcccgctccatgaacctgcgctggacccagagatttgatggcaacagcatcatcactggatttgatattgagtacaagaacaagagtgacagctgggacttcaagcagagcaccaggaacatcagccccaccatcaaccaggccaacatcgtggacctgcacccagcctctgtgtacagcatccgcatgtacagcttcaacaagattggccgctctgagcccagcaaggagctgaccatcagcacagaggaggccgccccagatggcccccccatggatgtgaccctgcagcctgtgaccagccagagcatccaggtgacctggaaggcccccaagaaggagctgcagaatggagtcatccggggctaccagatcggctaccgggagaacagccctggcagcaatggccagtacagcatcgtggagatgaaggccaccggggacagcgaggtgtacaccctggacaacctgaagaagtttgcccagtatggagtggtggtgcaggccttcaacagagctggcaccggccccagcagcagcgagatcaatgccaccaccctggaggatgtgcccagccagcccccagaaaatgtgcgggccctgagcatcaccagtgatgtggccgtcatctcctggagcgagcccccaagaagcaccctgaatggagtgctgaagggctacagagtcatcttctggagcctgtatgtggatggagagtggggcgagatgcagaacatcaccaccacccgggagcgggtggagctgcggggcatggagaagttcaccaactacagcgtgcaggtgctggcctacacccaggccggagatggagtgcgcagctctgtgctgtacatccagaccaaggaggatgtgcccggccccccagctggcatcaaggctgtgcccagcagcgccagctctgtggtggtgtcctggctgccccccaccaagcccaatggagtcatcaggaagtacaccatcttctgcagcagccctggcagcggccagcctgcccccagtgaatatgagaccagccctgagcagctgttctacagaattgcccacctgaacagaggccagcagtacctgctgtgggtggccgctgtgaccagcgctggccggggcaacagcagcgagaaggtgaccatcgagcctgctgggaaggccccagccaagatcatcagctttggaggcaccgtgaccaccccctggatgaaggatgtgcggctgccctgcaacagcgtgggggaccctgccccagctgtgaagtggaccaaggacagtgaagattctgccatccctgtgtccatggatggccacaggctcatccacaccaacggcaccctgctgctgcgggctgtgaaggcagaagattctggctactacacctgcacagccaccaacacaggaggctttgacaccatcatcgtgaacctgctggtgcaggtgcccccagaccagccccggctgactgtgtccaagaccagcgccagcagcatcaccctgacctggatccctggggacaatggaggcagcagcatccggggctttgtgctgcagtacagcgtggacaacagcgaggagtggaaggatgtgttcatcagcagcagcgagaggagcttcaagctggacagcctgaagtgtggcacctggtacaaggtgaagctggccgccaagaacagcgtgggcagcggccgcatcagcgagatcatcgaggccaagacccacggccgggagcccagcttcagcaaggaccagcacctgttcacccacatcaacagcacccacgcccggctgaacctgcagggctggaacaacggcggctgccccatcacagccatcgtgctggagtaccggcccaagggcacctgggcctggcagggcctgcgggccaacagcagcggggaggtgttcctgacagagctgcgggaggccacctggtatgagctgaggatgagggcctgcaacagcgctggctgtggaaatgaaacagcccagtttgccaccctggactatgatggcagcaccatcccccccatcaagagcgcccagggcgagggagatgatgtgaagaagctgttcaccatcggctgccctgtgatcctggccaccctgggcgtggccctgctcttcatcgtgaggaagaagaggaaggagaagaggctgaagaggctgagagatgccaagagcctggccgagatgctgatcagcaagaacaacagaagctttgacacccctgtgaagggccccccccagggcccccggctgcacatcgacatcccccgggtgcagctgctgattgaggacaaggagggcatcaagcagctgggagatgacaaggccaccatccctgtgacagatgctgagttcagccaggccgtgaacccccagagcttctgcacaggagtgtccctgcaccaccccaccctcatccagagcacaggccccctgattgacatgtctgacatccggcccggcaccaaccctgtgtccaggaagaatgtgaagagcgcccacagcaccaggaaccgctacagcagccagtggaccctgaccaagtgccaggccagcaccccagcccggaccctgaccagtgactggaggacagtgggcagccagcacggcgtgacagtgacagaaagtgacagctacagcgccagcctgagccaggacacagacaagggcaggaacagcatggtgtccacagagagcgccagcagcacctatgaggagctggcccgggcctatgagcacgccaagctggaggagcagctgcagcacgccaagtttgagatcacagagtgcttcatcagtgacagcagcagtgaccagatgaccaccggcaccaatgaaaatgctgacagcatgacctccatgagcaccccatctgagcccggcatctgccgcttcaccgccagcccccccaagccccaggatgctgaccggggcaagaatgtggccgtgcccatcccccaccgggccaacaagagtgactactgcaacctgcccctgtatgccaagtctgaggccttcttcaggaaggcagatggccgggagccctgccctgtggtgcccccccgggaggccagcatccggaacctggcccggacctaccacacccaggcccggcacctgaccctggaccctgccagcaagagcctgggcctgccccaccctggggccccagctgctgccagcacagccaccctgccccagaggaccctggccatgcctgcccccccagctggaacagcccccccagcccctggccccaccccagctgagcccccaacagcccccagcgctgcccccccagcccccagcacagagcccccccgggccggcggcccccacaccaagatgggcggcagccgggacagcctgctggagatgagcaccagcggcgtgggccgcagccagaagcagggcgctggggcctacagcaagagctacaccctggtgtag

SEQ ID NO: 339863 - DNA, 5463 bp, Artificial Sequence
  derived and/or modified sequence
atgctgccctactgggccggccacaccgtggagctgccctgcaccgccagtgggtatcctattcctgccattaggtggctcaaggatggacgcccgctaccagcagattctcgatggacgaagcggatcacagggctcactatcagtgacctccgcactgaagacagcggaacatacatttgtgaagtgacaaacactttcggatcagctgaagcaacagggatactgatggtgattgacccattgcatgtgactctgaccccaaagaaattaaaaacaggtataggcagtaccgtcatcctcagctgtgcactgacgggatcacccgagtttaccattaggtggtatagaaatactgaactcgtgttgcccgacgaggcaatttccattagaggtctgagcaatgagacactgctcataacatccgctcagaaatctcatagcggagcataccagtgctttgccacccgtaaggcgcagaccgcccaagacttcgccatcatcgccttggaggatggtaccccacggatcgttagctcgttttcagagaaagtcgtgaaccctggggagcagttttccctgatgtgtgccgccaagggcgctcccccaccaactgtgacttgggccctcgacgatgagcccattgttcgtgacggaagccaccgcaccaaccaatacacaatgtctgacggcaccacaattagccatatgaatgtgacgggaccacagatacgcgacggaggcgtctaccgatgtacagcgcgtaacttagtgggtagtgcagaatatcaggcccggatcaatgttcgagggcccccctctatccgcgccatgcgtaacataacagcagtggccggccgggatacgcttatcaattgccgcgtgattggatacccctactacagtatcaaatggtacaaagacgcattacttcttcccgacaatcacagacaagtggtttttgaaaatggaactctgaaactgacagacgtccagaagggaatggatgagggggagtatctgtgctccgtgttgattcagcctcaacttagtataagccagagtgtccacgttgccgtaaaagtgcccccactgatccaaccattcgaattcccccccgcaagtattggacaactcctctacattccttgcgtggtgtctagcggtgacatgcccataagaatcacatggcggaaagacgggcaggtcattatctccggctctggagtaactattgagagcaaagagttcatgagctcactgcagatcagttccgtgagcttaaaacacaatggcaactacacatgtatcgcctccaacgccgcagctactgtgagtagggagaggcaactgattgtgagggttcctccgcgcttcgtggtgcagcccaataaccaggacggcatctatggaaaggccggtgtcctgaactgttcggttgatgggtatcccccgccgaaggttatgtggaagcacgctaaaggctccggaaatccacagcaataccatccggtgccgctcaccgggaggatccagatcttgccgaactcttcccttctgattaggcacgtgctggaggaagatatcggctactatctgtgccaggcctctaacggcgttggcactgacatcagtaaatccatgttcctaaccgtcaagattcccgctatgatcacctcacaccccaacaccacaatagccatcaagggacacgctaaggagctgaattgcaccgctcgcggagagcggcccattataatccgttgggaaaagggcgacacagtgatcgacccggatcgcgttatgagatacgcaatcgcgacaaaggataacggcgacgaggtcgtgtccacactgaagctgaagccagccgatagaggggatagtgttttcttttcatgccacgccataaactcttacggcgaggatcgagggctgatccagctcactgtgcaagaaccaccagatcctcccgagttggagattagagaggtgaaagcccggagcatgaacctgagatggacacaacgctttgacggcaactccattataacaggatttgatatcgagtataaaaacaaaagcgacagttgggactttaaacagtcgacccgcaacatctctccgactatcaatcaggccaacatcgtagaccttcaccccgcctcagtctactccattcggatgtactccttcaataagatcggaagaagcgagccctcgaaggagttaacaatctctactgaggaggcggccccagacgggcctcccatggacgttacccttcagccggttacatctcagtccatacaagtgacttggaaggcaccaaagaaagaactgcaaaacggagtcataagagggtaccaaataggctatcgggaaaattctccaggtagtaacggccagtattccattgttgaaatgaaggccacaggcgattccgaggtctacacactggacaatctgaagaaattcgctcagtacggcgtggtggtccaggcttttaacagagctggtacagggccttctagttccgaaatcaacgctaccacactggaagatgtaccaagccagcccccagaaaatgtgcgggccctatctattacttccgatgtggcagtgatatcctggtccgagcctccgaggtccacattgaacggtgtgctgaaaggctaccgggtgatcttctggagtctatatgtggacggcgaatggggagaaatgcagaatattacaaccaccagagaaagagtcgaactgcgtggaatggagaagtttacaaactactccgtccaggtgctggcctacacccaggctggtgacggagtgagaagcagcgtcctctatatccagaccaaggaagacgtgccgggacctccagctggaatcaaggcagtgccttcatctgcgagcagcgttgtggtgagctggctcccaccgactaaacccaacggggttataagaaagtatacaattttctgttccagccctgggtccggacaacctgcccctagcgagtatgagacctccccagagcagttgttctatagaattgctcacctgaaccgggggcagcaatatttattgtgggtcgcagcggtgacgagcgccgggagaggcaatagcagtgagaaggtcaccattgagcccgcaggcaaagccccagctaagataatatcgttcggaggaactgtgaccacgccttggatgaaggacgtgcggctgccttgtaactcggtcggcgacccagcgcctgccgtgaagtggacaaaagactctgaagattcggccatcccagtaagcatggacggccaccggttaatccacactaatggaacactcctattaagggccgtgaaagccgaagattcaggatactatacctgcacggccaccaatacaggtgggtttgacacaattatcgttaacttgcttgtgcaggtgcctccggatcagcccagactgacagtgagtaaaaccagtgcgtcaagcatcaccctcacttggattcccggggataacggcggttcctctatccgcggttttgtgctgcaatacagcgtggacaactccgaggagtggaaggacgtctttatctcatccagcgaacggtcctttaaactggattccttaaaatgcgggacctggtacaaggtaaagttggctgccaaaaatagtgttgggtcgggccgcatctcagaaatcattgaggctaaaactcacgggcgcgaacccagcttcagcaaagaccaacatctctttacccacatcaattccacacacgcccgcctcaacctccagggctggaacaacggcggatgccccattaccgctattgtcctggaataccgacccaagggcacatgggcttggcagggacttagagctaactcctccggcgaagtctttctgacagagctgagagaggctacctggtacgaactccgaatgagggcctgcaacagcgcggggtgcgggaacgagacggcccagttcgctacactggactacgatgggtcaactatcccccctatcaaaagcgctcagggcgaaggggacgacgtgaagaagctctttactatcggctgcccagtgatcctggcaaccctcggagtcgcactgctgtttatagtaaggaagaaacggaaggaaaagagactaaaacggcttcgggatgccaagtcactggccgagatgctgatttctaagaacaaccgcagcttcgacactccagtgaaagggcctccgcagggacctcgactccacatcgacatacccagggtccaactgttgattgaggataaagaggggatcaagcagttaggggacgacaaggcgacaattcctgtcacagatgccgaatttagccaagcagtgaacccgcaaagcttttgcacaggggtgagcctacaccatccaactctgattcagagtaccggccctcttattgacatgagcgacatccgacctgggaccaatccggtatctagaaagaatgtgaaaagcgcacattcaacgagaaatcggtactctagccaatggaccctgaccaaatgtcaggcttccactcctgcccgtactctaacttctgattggcgcactgtaggaagccagcatggtgttactgtcaccgagtcggactcctactcagcttcgttaagccaagatacagacaaggggcgtaactcgatggtctctaccgagtcagcgtcgagcacctatgaagagcttgcacgggcctatgagcatgccaaactggaggagcagctccaacacgccaagtttgaaataacagagtgcttcataagtgacagttctagtgatcagatgacaacaggcacaaacgaaaacgcggatagcatgaccagtatgtcgacacccagcgaacccggaatttgtagatttaccgcttccccgccaaaaccccaggatgccgataggggcaagaacgtcgcggtgcctataccacaccgcgctaacaaatccgactactgcaacctgcccctgtatgcgaagtccgaagccttcttccgaaaagcagatggccgcgagccgtgtcctgttgtacccccccgggaggcctcaatccgtaacttggccaggacataccacacccaagctcgccatcttaccctagatcccgcctccaagagcctcgggcttccacatccaggggcccccgccgctgcttcgaccgcaaccctgcctcagcgcactctcgccatgcctgctcctcctgccggcaccgccccacccgcacccggtcccacacctgctgaaccaccgacagccccctctgctgcgccgccagcaccgtcaactgaacctcctagagccggggggcctcacaccaagatgggcgggagtcgggattccctcctggagatgtccacctcaggggtggggcggtcccaaaagcagggagccggcgcatactctaagtcctatacactggtctag

SEQ ID NO: 339864 - DNA, 5462 bp, Artificial Sequence
  derived and/or modified sequence
atgttaccatactgggccggtcacacagtggagttgccatgcactgcatctggctaccccatccccgctatacgttggttgaaggatggcaggcctttgcctgccgattctaggtggacgaagcggatcacaggcttgacgatcagcgacttgagaaccgaggattcagggacatatatttgtgaggtgacaaacacctttggctccgccgaggcaacagggatcctaatggttatagatccactgcatgttaccctcacccccaaaaagctgaagaccggcattggttctacagtgatactgagttgcgccctgaccggctcccccgagttcactattaggtggtatagaaacaccgaactggtcttacctgacgaggcaatttccatccgcggtctgagcaatgagaccttactgatcacatccgcccagaagtcgcattccggcgcttatcagtgctttgcaaccagaaaggcccagacagcccaggatttcgctatcatcgcactggaggacggtaccccccgtattgttagttccttcagcgagaaggtcgtgaatcctggcgagcagttttcactgatgtgcgccgctaaaggtgctcctccccctactgttacctgggcgctagatgacgagccaatcgtccgtgatggatcccaccgaactaatcagtacactatgagcgacggaactaccattagtcatatgaatgtaactgggccacaaattcgggacggaggtgtctaccggtgtaccgcaaggaatctagtcggcagcgcggaatatcaggcacggatcaatgtccgaggcccaccatccattcgcgctatgagaaatataacagctgtggctgggcgagacaccctgattaactgccgggtaattggttatccctattattccatcaaatggtacaaagacgctttactgctgcccgataatcatagacaagtggtttttgagaacggaaccctcaaactgactgatgtgcagaaaggcatggacgaaggcgaatacctgtgctcagtgctaatccagccgcagttatccatctcccagtctgtgcacgtcgcggtaaaggtgccaccattgatccaacctttcgagttccccccagcttccattggtcagctgttgtatatcccctgtgttgtgagtagcggcgatatgcccattcgcataacctggaggaaggatggtcaagttatcatcagcgggtctggggtaactatagagtccaaagagtttatgtcatcgctccaaatatcctctgtgtctctcaaacataacggcaactatacatgtattgcttccaatgctgccgctaccgtcagtcgagagagacagctgatcgttcgggtcccaccacgctttgtcgtgcaacccaataaccaggacggtatctacgggaaagcaggagtgctgaactgtagcgtggatggttatcctccccctaaagtcatgtggaaacatgccaaagggagtgggaacccccagcagtaccatccagtcccattgaccggtcgcattcagatactcccaaattcttccctgctgattagacacgtgctggaggaggacatcggctattacctatgccaggcttccaacggtgtcggtacagatatctcaaagtctatgttcttgaccgtgaagatcccggcaatgatcacaagccaccctaacacgaccattgcaatcaaaggtcacgctaaagagttgaactgtacagcacgtggggagaggccaatcattatacgctgggaaaagggggatactgtcattgaccctgatcgggtcatgaggtacgccatcgctacaaaagataacggcgacgaagtcgtttctaccctaaaattgaaaccggctgacaggggcgattccgtatttttcagttgccacgctatcaacagctacggagaagatcgcggtctgatccagctcacagttcaggagccgcctgatccaccggagctagaaattagggaggttaaggctcgctccatgaatctgcgctggacccaaagattcgatggcaactctattattacaggcttcgacattgaatacaagaacaagagcgacagttgggattttaaacagagcactcggaacattagcccgaccataaatcaagccaacattgtggatctgcatcctgcatctgtgtactccatacgtatgtacagcttcaataaaataggaagatccgagccttctaaggaactgactataagcaccgaagaggcagcccctgatggaccccctatggacgtcaccctgcagcccgtaacctctcagagtatacaggtgacctggaaggcacccaaaaaagaattgcaaaacggcgtgatacgcggataccagattggatatcgagagaactctccaggctcaaacggacagtatagcatcgtagagatgaaagctaccggcgacagcgaagtctacaccctggataatttaaaaaagtttgctcagtacggagtggtcgtgcaggcctttaatcgggcaggcacaggccctagctctagcgagatcaatgcaactactcttgaagacgttccgagccaaccaccagagaatgttagggctctgtccatcacgtctgatgttgcagtgatcagttggtcagagccccctcgatccaccttgaacggagtccttaagggatatagagtgatattctggagcctgtatgttgacggcgagtggggcgaaatgcaaaacattactaccactcgggagcgggtcgaactgcggggaatggagaagttcacaaattattccgtccaggtgcttgcctacactcaggcaggggacggagtgagatcttccgtgctctacatccagacaaaagaagatgtgcctgggccaccagccggaatcaaagccgtgccatctagcgcctcttctgtcgttgttagctggctgccccctacaaaaccgaacggtgttatccgaaagtacacaatcttctgttctagccctggaagtggacagcccgctccgagcgaatatgaaacgagtcccgaacaactgttctatcgcattgctcaccttaaccggggacagcagtatcttctgtgggtggccgctgttacgtcggccggtaggggaaattcatcggagaaagttaccattgagcccgctgggaaggcaccggcaaagattataagttttggcggtaccgtgaccaccccctggatgaaggacgtgaggttgccatgcaattcagtaggcgacccagcacccgctgtgaagtggactaaagacagcgaggacagtgccattccggtcagcatggacgggcaccgtctcattcacacaaacgggactttgctgctgagggcggtgaaagccgaggatagcggatactatacttgtaccgccacaaacaccggcggttttgataccatcatcgtgaatctcctcgtccaggtaccccctgatcaaccaaggttgactgtctcaaagacctcggcttcctcaatcactctcacctggatacctggagacaacggcggaagtagcatacgtggcttcgtgttgcagtactccgtagacaactcggaggagtggaaagatgtattcatttcctcttccgagcggtccttcaagttggattcccttaagtgcgggacgtggtataaagtcaaacttgcggctaagaactccgttggaagcggccgtatcagcgaaattatcgaggccaaaacgcacgggagagaaccttcttttagtaaggatcagcatttgtttacccacatcaacagcacacacgctagactgaaccttcagggatggaacaatggcggatgccctattacagctatcgtcttagaatatagaccaaaggggacttgggcctggcaaggactgagggcaaacagctctggagaagtcttcctgaccgagttgagggaagccacatggtatgaactgcggatgagagcatgcaatagtgccggatgtggcaacgagactgctcagtttgccacccttgactatgatggctccactatccctcctataaaatcagcacaaggggagggagatgacgttaagaagctgtttacaatcggctgcccggtaatcttggcaactctgggcgtggcgctcctttttatcgtgcgaaagaagaggaaagagaaaagactcaagcgactgagagacgcaaagtcactggctgagatgttgatcagcaagaacaataggtcctttgatacacccgtaaaaggcccacctcaaggcccaaggctgcacattgacatccctcgcgtgcagttgctcatcgaagataaggaaggcattaagcagttgggcgacgataaggctacaattccggtgaccgacgcggaattttctcaagccgttaacccgcagtcattctgcacaggagtgagcctccaccatcctactctgatccagagtactggccctctgatcgacatgagcgacattaggcccggtacaaaccccgtttctagaaaaaacgtgaagtcggcccactcaacgaggaatcgatattcaagccaatggaccttgaccaaatgccaagcttcaacgcctgccagaactctgacctctgattggagaacagtcgggagccagcatggggtgacagttaccgaatctgacagctatagcgccagtctgtcccaggatacagataagggcagaaattcaatggtgtcaacggaatctgcctcaagtacgtacgaggagctagccagagcctacgaacatgcaaaacttgaagaacagcttcagcatgccaagttcgagattaccgaatgctttattagtgactcttccagcgaccaaatgaccacaggaacaaatgaaaacgcagatagcatgacttccatgtcaactccctccgagcccggtatctgtaggtttaccgcctccccccctaaaccacaggacgcggatagaggaaaaaatgtcgccgtcccgatcccccatagggccaacaagagtgattactgcaacctgcctctatacgcaaagtcagaggcattctttagaaaggccgacgggagagaaccttgtcctgtcgtcccgccaagggaggcctcgattaggaacctggcgcgaacctatcatacacaggcgagacatctaaccctggaccctgcctccaaatcactgggcctccctcatcccggagcaccggctgccgctagtaccgcaactctgccacagaggactctagctatgcctgcaccccctgccggaacagctccgccagcaccaggacctacccctgccgaaccccctaccgccccttctgcagcacccccagcgcctagtacagagccaccccgtgctggaggaccccataccaagatgggcggatcccgagattcactgctggagatgtcaactagtggggttggcagaagccaaaagcagggtgcaggcgcatattccaagtcctacacacttgtcta

SEQ ID NO: 339865 - DNA, 5463 bp, Artificial Sequence
  derived and/or modified sequence
atgctgccctactgggccggccacaccgtggagctgccctgcaccgccagcggctaccccatccccgccatcagatggctgaaggacggcagacccctgcccgccgacagcagatggaccaagagaatcaccggcctgaccatcagcgacctgagaaccgaggacagcggcacctacatctgcgaggtgaccaacaccttcggcagcgccgaggccaccggcatcctgatggtgatcgaccccctgcacgtgaccctgacccccaagaagctgaagaccggcatcggcagcaccgtgatcctgagctgcgccctgaccggcagccccgagttcaccatcagatggtacagaaacaccgagctggtgctgcccgacgaggccatcagcatcagaggcctgagcaacgagaccctgctgatcaccagcgcccagaagagccacagcggcgcctaccagtgcttcgccaccagaaaggcccagaccgcccaggacttcgccatcatcgccctggaggacggcacccccagaatcgtgagcagcttcagcgagaaggtggtgaaccccggcgagcagttcagcctgatgtgcgccgccaagggcgcccccccccccaccgtgacctgggccctggacgacgagcccatcgtgagagacggcagccacagaaccaaccagtacaccatgagcgacggcaccaccatcagccacatgaacgtgaccggcccccagatcagagacggcggcgtgtacagatgcaccgccagaaacctggtgggcagcgccgagtaccaggccagaatcaacgtgagaggcccccccagcatcagagccatgagaaacatcaccgccgtggccggcagagacaccctgatcaactgcagagtgatcggctacccctactacagcatcaagtggtacaaggacgccctgctgctgcccgacaaccacagacaggtggtgttcgagaacggcaccctgaagctgaccgacgtgcagaagggcatggacgagggcgagtacctgtgcagcgtgctgatccagccccagctgagcatcagccagagcgtgcacgtggccgtgaaggtgccccccctgatccagcccttcgagttcccccccgccagcatcggccagctgctgtacatcccctgcgtggtgagcagcggcgacatgcccatcagaatcacctggagaaaggacggccaggtgatcatcagcggcagcggcgtgaccatcgagagcaaggagttcatgagcagcctgcagatcagcagcgtgagcctgaagcacaacggcaactacacctgcatcgccagcaacgccgccgccaccgtgagcagagagagacagctgatcgtgagagtgccccccagattcgtggtgcagcccaacaaccaggacggcatctacggcaaggccggcgtgctgaactgcagcgtggacggctaccccccccccaaggtgatgtggaagcacgccaagggcagcggcaacccccagcagtaccaccccgtgcccctgaccggcagaatccagatcctgcccaacagcagcctgctgatcagacacgtgctggaggaggacatcggctactacctgtgccaggccagcaacggcgtgggcaccgacatcagcaagagcatgttcctgaccgtgaagatccccgccatgatcaccagccaccccaacaccaccatcgccatcaagggccacgccaaggagctgaactgcaccgccagaggcgagagacccatcatcatcagatgggagaagggcgacaccgtgatcgaccccgacagagtgatgagatacgccatcgccaccaaggacaacggcgacgaggtggtgagcaccctgaagctgaagcccgccgacagaggcgacagcgtgttcttcagctgccacgccatcaacagctacggcgaggacagaggcctgatccagctgaccgtgcaggagccccccgacccccccgagctggagatcagagaggtgaaggccagaagcatgaacctgagatggacccagagattcgacggcaacagcatcatcaccggcttcgacatcgagtacaagaacaagagcgacagctgggacttcaagcagagcaccagaaacatcagccccaccatcaaccaggccaacatcgtggacctgcaccccgccagcgtgtacagcatcagaatgtacagcttcaacaagatcggcagaagcgagcccagcaaggagctgaccatcagcaccgaggaggccgcccccgacggcccccccatggacgtgaccctgcagcccgtgaccagccagagcatccaggtgacctggaaggcccccaagaaggagctgcagaacggcgtgatcagaggctaccagatcggctacagagagaacagccccggcagcaacggccagtacagcatcgtggagatgaaggccaccggcgacagcgaggtgtacaccctggacaacctgaagaagttcgcccagtacggcgtggtggtgcaggccttcaacagagccggcaccggccccagcagcagcgagatcaacgccaccaccctggaggacgtgcccagccagccccccgagaacgtgagagccctgagcatcaccagcgacgtggccgtgatcagctggagcgagccccccagaagcaccctgaacggcgtgctgaagggctacagagtgatcttctggagcctgtacgtggacggcgagtggggcgagatgcagaacatcaccaccaccagagagagagtggagctgagaggcatggagaagttcaccaactacagcgtgcaggtgctggcctacacccaggccggcgacggcgtgagaagcagcgtgctgtacatccagaccaaggaggacgtgcccggcccccccgccggcatcaaggccgtgcccagcagcgccagcagcgtggtggtgagctggctgccccccaccaagcccaacggcgtgatcagaaagtacaccatcttctgcagcagccccggcagcggccagcccgcccccagcgagtacgagaccagccccgagcagctgttctacagaatcgcccacctgaacagaggccagcagtacctgctgtgggtggccgccgtgaccagcgccggcagaggcaacagcagcgagaaggtgaccatcgagcccgccggcaaggcccccgccaagatcatcagcttcggcggcaccgtgaccaccccctggatgaaggacgtgagactgccctgcaacagcgtgggcgaccccgcccccgccgtgaagtggaccaaggacagcgaggacagcgccatccccgtgagcatggacggccacagactgatccacaccaacggcaccctgctgctgagagccgtgaaggccgaggacagcggctactacacctgcaccgccaccaacaccggcggcttcgacaccatcatcgtgaacctgctggtgcaggtgccccccgaccagcccagactgaccgtgagcaagaccagcgccagcagcatcaccctgacctggatccccggcgacaacggcggcagcagcatcagaggcttcgtgctgcagtacagcgtggacaacagcgaggagtggaaggacgtgttcatcagcagcagcgagagaagcttcaagctggacagcctgaagtgcggcacctggtacaaggtgaagctggccgccaagaacagcgtgggcagcggcagaatcagcgagatcatcgaggccaagacccacggcagagagcccagcttcagcaaggaccagcacctgttcacccacatcaacagcacccacgccagactgaacctgcagggctggaacaacggcggctgccccatcaccgccatcgtgctggagtacagacccaagggcacctgggcctggcagggcctgagagccaacagcagcggcgaggtgttcctgaccgagctgagagaggccacctggtacgagctgagaatgagagcctgcaacagcgccggctgcggcaacgagaccgcccagttcgccaccctggactacgacggcagcaccatcccccccatcaagagcgcccagggcgagggcgacgacgtgaagaagctgttcaccatcggctgccccgtgatcctggccaccctgggcgtggccctgctgttcatcgtgagaaagaagagaaaggagaagagactgaagagactgagagacgccaagagcctggccgagatgctgatcagcaagaacaacagaagcttcgacacccccgtgaagggccccccccagggccccagactgcacatcgacatccccagagtgcagctgctgatcgaggacaaggagggcatcaagcagctgggcgacgacaaggccaccatccccgtgaccgacgccgagttcagccaggccgtgaacccccagagcttctgcaccggcgtgagcctgcaccaccccaccctgatccagagcaccggccccctgatcgacatgagcgacatcagacccggcaccaaccccgtgagcagaaagaacgtgaagagcgcccacagcaccagaaacagatacagcagccagtggaccctgaccaagtgccaggccagcacccccgccagaaccctgaccagcgactggagaaccgtgggcagccagcacggcgtgaccgtgaccgagagcgacagctacagcgccagcctgagccaggacaccgacaagggcagaaacagcatggtgagcaccgagagcgccagcagcacctacgaggagctggccagagcctacgagcacgccaagctggaggagcagctgcagcacgccaagttcgagatcaccgagtgcttcatcagcgacagcagcagcgaccagatgaccaccggcaccaacgagaacgccgacagcatgaccagcatgagcacccccagcgagcccggcatctgcagattcaccgccagcccccccaagccccaggacgccgacagaggcaagaacgtggccgtgcccatcccccacagagccaacaagagcgactactgcaacctgcccctgtacgccaagagcgaggccttcttcagaaaggccgacggcagagagccctgccccgtggtgccccccagagaggccagcatcagaaacctggccagaacctaccacacccaggccagacacctgaccctggaccccgccagcaagagcctgggcctgccccaccccggcgcccccgccgccgccagcaccgccaccctgccccagagaaccctggccatgcccgccccccccgccggcaccgccccccccgcccccggccccacccccgccgagccccccaccgcccccagcgccgccccccccgcccccagcaccgagccccccagagccggcggcccccacaccaagatgggcggcagcagagacagcctgctggagatgagcaccagcggcgtgggcagaagccagaagcagggcgccggcgcctacagcaagagctacaccctggtgtag

SEQ ID NO: 339866 - DNA, 6086 bp, Artificial Sequence
  derived and/or modified sequence
cctctttatggcatgtggctggtaactttcctcctgctcctggactctttacacaaagtgccctgaagatgttgccttattgggccggccacaccgtggagctgccctgcaccgcctcgggctaccctatccccgccatccgctggctcaaggatggccggcccctcccggctgacagccgctggaccaagcgcatcacagggctgaccatcagcgacttgcggaccgaggacagcggcacctacatttgtgaggtcaccaacaccttcggttcggcagaggccacaggcatcctcatggtcattgatccccttcatgtgaccctgacaccaaagaagctgaagaccggcattggcagcacggtcatcctctcctgtgccctgacgggctccccagagttcaccatccgctggtatcgcaacacggagctggtgctgcctgacgaggccatctccatccgcgggctcagcaacgagacgctgctcatcacctcggcccagaagagccattccggggcctaccagtgcttcgctacccgcaaggcccagaccgcccaggactttgccatcattgcacttgaggatggcacgccccgcatcgtctcgtccttcagcgagaaggtggtcaaccccggggagcagttctcactgatgtgtgcggccaagggcgccccgccccccacggtcacctgggccctcgacgatgagcccatcgtgcgggatggcagccaccgcaccaaccagtacaccatgtcggacggcaccaccatcagccacatgaacgtcacaggcccccagatccgcgacgggggcgtgtaccggtgcacagcgcggaacttggtgggcagtgctgaatatcaggcgcgaataaacgtaagaggcccacccagcatccgggctatgcggaacatcacagcagtcgccgggcgggacacccttatcaactgcagggtcatcggctatccctactactccatcaagtggtacaaggatgccctgctgctgccagacaaccaccgccaggtggtgtttgagaatgggaccctcaagctgactgacgtgcagaagggcatggatgagggggagtacctgtgcagtgtcctcatccagccccagctctccatcagccagagcgttcacgtagccgtcaaagtgccccctctgatccagcccttcgaattcccacccgcctccatcggccagctgctctacattccctgtgtggtgtcctcgggggacatgcccatccgtatcacctggaggaaggacggacaggtgatcatctcaggctcgggcgtgaccatcgagagcaaggaattcatgagctccctgcagatctctagcgtctccctcaagcacaacggcaactatacatgcatcgccagcaacgcagccgccaccgtgagccgggagcgccagctcatcgtgcgtgtgccccctcgatttgtggtgcaacccaacaaccaggatggcatctacggcaaagctggtgtgctcaactgctcggtggacggctaccccccacccaaggtcatgtggaagcatgccaaggggagcgggaacccccagcagtaccaccctgtgcccctcactggccgcatccagatcctgcccaacagctcgctgctgatccgccacgtcctagaagaggacatcggctactacctctgccaggccagcaacggcgtaggcaccgacatcagcaagtccatgttcctcacagtcaagatcccggccatgatcacttcccaccccaacaccaccatcgccatcaagggccatgcgaaggagctaaactgcacggcacggggtgagcggcccatcatcatccgctgggagaagggggacacagtcatcgaccctgaccgcgtcatgcggtatgccatcgccaccaaggacaacggcgacgaggtcgtctccacactgaagctcaagcccgctgaccgtggggactctgtgttcttcagctgccatgccatcaactcgtatggggaggaccggggcttgatccaactcactgtgcaagagccccccgaccccccagagctggagatccgggaggtgaaggcccggagcatgaacctgcgctggacccagcgattcgacgggaacagcatcatcacgggcttcgacattgaatacaagaacaaatcagattcctgggacttcaagcagtccacacgcaacatctcccccaccatcaaccaggccaacattgtggacttgcacccggcatctgtgtacagcatccgcatgtactctttcaacaagattggccgcagtgaaccaagcaaggagctcaccatcagcactgaggaggccgctcccgatgggccccccatggatgttaccttgcagccagtgacctcacagagcatccaggtgacctggaaggcacccaagaaggagctgcagaacggtgtcatccggggctaccagattggctacagagagaacagccccggcagcaacgggcagtacagcatcgtggagatgaaggccacgggggacagcgaggtctacaccctggacaacctcaagaagttcgcccagtatggggtggtggtccaagccttcaatcgggctggcacggggccctcttccagcgagatcaatgccaccactctggaggatgtgcccagccagccccctgagaacgtccgggccctgtccatcacttctgacgtggccgtcatctcctggtcagagcccccgcgcagcaccctcaatggcgtcctcaaaggctatcgggtcatcttctggtccctctatgttgatggggagtggggcgagatgcagaacatcaccaccacgcgggagcgggtggagctgcggggcatggagaagttcaccaactacagcgtccaggtgctggcctacacccaggctggggacggcgtacgcagcagtgtgctctacatccagaccaaggaggacgttccaggtccccctgctggcatcaaagctgtcccttcatcagctagcagtgtggttgtgtcttggctcccccctaccaagcccaacggggtgatccgcaagtacaccatcttctgttccagccccgggtctggccagccggctcccagcgagtacgagacgagtccagagcagctcttctaccggatcgcccacctaaaccgcggtcagcagtatctgctgtgggtggccgccgtcacctctgccggccggggcaacagcagcgagaaggtgaccatcgagcctgctggcaaggccccagcaaagatcatctcctttgggggcaccgtgacaacaccttggatgaaagatgttcggctgccttgcaattcagtgggagatccagcccctgctgtgaagtggaccaaggacagtgaagactcggccattccagtgtccatggatgggcaccggctcatccacaccaatggcacactgctgctgcgtgcagtgaaggctgaggactctggctactacacgtgcacggccaccaacactggtggctttgacaccatcatcgtcaaccttctggtgcaagttcccccggaccagccccgcctcactgtctccaaaacctcagcttcgtccatcaccctgacctggattccaggtgacaatgggggcagctccatccgaggcttcgtgctacagtactcggtggacaacagcgaggagtggaaggatgtgttcatcagctccagcgagcgctccttcaagctggacagcctcaagtgtggcacgtggtacaaggtgaagctggcagccaagaacagcgtgggctctgggcgcatcagcgagatcatcgaggccaagacccacgggcgggagccctccttcagcaaagaccaacacctcttcacccacatcaactccacgcatgctcggcttaacctgcagggctggaacaatgggggctgccctatcacagccatcgttctggagtaccggcccaaggggacctgggcctggcagggcctccgggccaacagctccggggaggtgtttctgacggaactgcgagaggccacgtggtacgagctgcgcatgagggcttgcaacagtgcgggctgcggcaatgaaacagcccagttcgccaccctggactacgatggcagcaccattccacccatcaagtctgctcaaggtgaaggggatgatgtgaagaagctgttcaccatcggctgccctgtcatcctggccacactgggggtggcactgctcttcatcgtacgcaagaagaggaaggagaaacggctgaagcgactccgagatgcaaagagtttggcagaaatgttgataagcaagaacaatagaagctttgacacccctgtgaaagggccaccccagggcccacggctacacattgacatccccagggtccagctgctcatcgaggacaaagaaggcatcaagcaactgggagatgacaaggccaccatccctgtgacagatgctgagttcagccaagctgtcaacccacagagcttctgtactggcgtctccttgcaccacccaaccctcatccagagcacaggacccctcatcgacatgtctgacatccggccaggaaccaatccagtgtccaggaagaatgtgaagtcagcccacagcacccggaaccggtactcaagccagtggaccctgaccaagtgccaggcctccacacctgcccgcaccctcacctccgactggcgcaccgtgggctcccagcatggtgtcacggtcactgagagtgacagctacagtgccagcctgtcccaggacacagacaaaggaaggaacagcatggtgtccactgagagtgcctcttccacctacgaggagctggcccgggcctatgagcatgccaagctggaggagcagctgcagcacgccaagtttgagatcaccgagtgcttcatctctgacagttcctctgaccagatgaccacaggcaccaacgagaacgccgacagcatgacatccatgagcacaccctcagagcctggcatctgccgctttaccgcctcaccacccaagccccaggatgcggaccggggcaaaaacgtggctgtgcccatccctcaccgggccaacaagagtgactactgcaacctgcccctgtatgccaagtcagaggccttctttcgaaaggcagatggacgtgagccctgccccgtggtcccaccccgtgaggcctccatccggaacctggctcgaacctaccacacccaggctcgccacctgaccctggaccctgccagcaagtccttgggccttccccacccaggggcccccgctgccgcctccacagccaccttacctcagaggactctggccatgccagcccccccagccggcacagcccccccagcccccggccccacccctgctgagccacccaccgcccccagcgctgcccctccggcccccagcaccgagcctccacgagccgggggcccacacaccaaaatggggggctccagggactcgcttctcgagatgagcacatcgggggtagggaggtctcagaagcagggggccggggcctactccaaatcctacaccctggtgtagggcccgcaggaagagcagccacgcctggaccgcgccgcgccgcagccccacacgccagctcggctgtttttctgcattatttatattcaactgacagacaaaaaccaaccaacgacaaaacaaaaacccccaatcatgaacgcctgtacatagaactcttttgtacaaatgaaactattttcttcttctccatgaagccagggcacaaagaatttgacagtacaagtcaaatcccccaccccacaaaatatgtgtggagatatatatacatatatagacagacaggaacgcgtccacgagctatatatctatatatttctctcaccctattttgagacagaggcacaaagactcagcaatttttttccctcctcctcaccttccccccagtctaggtggttttgacaaagaccaaaatcccaactcagagacactgcatgcgattttactgttccaagaaaaccaggagttgcttcaatttgcagatgcttatgtgttaatacctttttctatgaaaaaagacccagcgccgtgtgcaataaaggttatgtttct

SEQ ID NO: 339867 - protein, 472 aa, Artificial Sequence
  derived and/or modified sequence
MMQHASPAPALTMMATQNVPPPPYQDSPQMTATAQPPSKAQAVHISAPSAAASTPVPSAPIDPQAQLEADKRAVYRHPLFPLLTLLFEKCEQATQGSECITSASFDVDIENFVHQQEQEHKPFFSDDPELDNLMVKAIQVLRIHLLELEKVNELCKDFCNRYITCLKTKMHSDNLLRNDLGGPYSPNQPSINLHSQDLLQNSPNSMSGVSNNPQGIVVPASALQQGNIAMTTVNSQVVSGGALYQPVTMVTSQGQVVTQAIPQGAIQIQNTQVNLDLTSLLDNEDKKSKNKRGVLPKHATNIMRSWLFQHLMHPYPTEDEKRQIAAQTNLTLLQVNNWFINARRRILQPMLDASNPDPAPKAKKIKSQHRPTQRFWPNSIAAGVLQQQGGAPGTNPDGSINLDNLQSLSSDSATMAMQQAMMAAHDDSLDGTEEEDEDEMEEEEEEELEEEVDELQTTNVSDLGLEHSDSLE

SEQ ID NO: 339868 - protein, 39 aa, Artificial Sequence
  derived and/or modified sequence
MMQHASPAPALTMMATQNVPPPPYQDSPQMTATAQPPSK

SEQ ID NO: 339869 - protein, 40 aa, Artificial Sequence
  derived and/or modified sequence
MMQHASPAPALTMMATQNVPPPPYQDSPQMTATAQPPSKA

SEQ ID NO: 339870 - protein, 306 aa, Artificial Sequence
  derived and/or modified sequence
MMATQNVPPPPYQDSPQMTATAQPPSKAQAVHISAPSAAASTPVPSAPIDPQAQLEADKRAVYRHPLFPLLTLLFEKCEQATQGSECITSASFDVDIENFVHQQEQEHKPFFSDDPELDNLMVKAIQVLRIHLLELEKVNELCKDFCNRYITCLKTKMHSDNLLRNDLGGPYSPNQPSINLHSQDLLQNSPNSMSGVSNNPQGIVVPASALQQGNIAMTTVNSQVVSGGALYQPVTMVTSQGQVVTQAIPQGAIQIQNTQVNLDLTSLLDNEDKKSKNKRGVLPKHATNIMRSWLFQHHAPLPHGG

SEQ ID NO: 339871 - protein, 408 aa, Artificial Sequence
  derived and/or modified sequence
MSRPHPTRTAHRHPLFPLLTLLFEKCEQATQGSECITSASFDVDIENFVHQQEQEHKPFFSDDPELDNLMVKAIQVLRIHLLELEKVNELCKDFCNRYITCLKTKMHSDNLLRNDLGGPYSPNQPSINLHSQDLLQNSPNSMSGVSNNPQGIVVPASALQQGNIAMTTVNSQVVSGGALYQPVTMVTSQGQVVTQAIPQGAIQIQNTQVNLDLTSLLDNEDKKSKNKRGVLPKHATNIMRSWLFQHLMHPYPTEDEKRQIAAQTNLTLLQVNNWFINARRRILQPMLDASNPDPAPKAKKIKSQHRPTQRFWPNSIAAGVLQQQGGAPGTNPDGSINLDNLQSLSSDSATMAMQQAMMAAHDDSLDGTEEEDEDEMEEEEEEELEEEVDELQTTNVSDLGLEHSDSLE

SEQ ID NO: 339872 - protein, 98 aa, Artificial Sequence
  derived and/or modified sequence
MMQHASPAPALTMMATQNVPPPPYQDSPQMTATAQPPSKAQAVHISAPSAAASTPVPSAPIDPQAQLEADKRAVYRHPLFPLLTLLFEKCEQATQGSE

SEQ ID NO: 339873 - protein, 77 aa, Artificial Sequence
  derived and/or modified sequence
MMQHASPAPALTMMATQNVPPPPYQDSPQMTATAQPPSKAQAVHISAPSAAASTPVPSAPIDPQAQLEADKRAVYRW

SEQ ID NO: 339874 - DNA, 3730 bp, Artificial Sequence
  derived and/or modified sequence
gtgtgaagggggggtccggggggcgggtccctgtgccgctgacgtcccgagcagtgctgggaagtataggctgtgttgtcacgccggtgtcagtctgatgaagattggcatcaggtgaagtctggagcaggacttctgaggctttctatcctccatgctgctcactagaaaaggggctgtgaactgtgctttggctctagcagacaggaagaaattctggcccagctggaagtagaaagaggggagtgagtctcctgaggaccatctcagaggccccgggatcacccgaacagtcctccatgtgaatcaatcccatgatgcaacatgcctccccagcccccgctctgacgatgatggccacgcagaatgtcccgcccccaccctaccaggacagcccacagatgacggcaaccgcccagccaccctccaaggcccaggctgtccacatctctgccccctcagctgctgccagcacacctgtgcccagtgcccccatcgacccccaggcccagctggaggctgacaagcgagctgtatacaggcaccctcttttcccgctcctgacgctgctgtttgagaaatgtgaacaggccacccagggctctgagtgcatcacctccgccagctttgatgtggacatcgagaactttgtccaccagcaggaacaggagcacaaacccttcttcagcgatgacccagaactggacaatctgatggtgaaggcaatccaggtcctgagaatccacctgctggagctggagaaagtcaatgaactctgcaaggacttttgtaaccgttacatcacctgcctcaaaaccaagatgcacagcgacaacctgctcaggaatgatctaggggggccctactcccccaaccagccctccatcaaccttcactcacaggacctcctgcagaattcccccaattccatgtccggagtctccaataacccccaggggattgtggtcccagcctcagcgctccagcagggcaacatcgccatgacaaccgtcaactcacaagttgtgtcaggtggagccttataccaaccggttaccatggtaacctcccagggtcaggtggtcacccaagcaatcccccagggagccatccagatccagaacacacaggttaaccttgacctcacctccctcctggacaatgaggataagaagtccaagaacaaacgaggagtcttgcccaagcatgccaccaatataatgcgttcttggctcttccagcatctcatgcacccctaccccacggaggatgagaagaggcagatcgcagcccagaccaacctcaccctcctgcaagtaaacaactggttcatcaatgcccggaggcgcatcctgcagcccatgcttgatgccagcaacccagatcctgcccccaaagccaagaagatcaagtctcagcaccggcccacccaaagattctggcccaactccatcgctgcgggggtgctgcagcagcagggcggtgccccagggacaaaccccgatggttccatcaacttggacaacctgcagtccctgtcctcagacagtgccaccatggccatgcagcaggctatgatggctgcacacgatgactcattggatgggacagaagaagaggatgaggatgagatggaagaggaggaggaggaggagctggaggaggaggtcgacgagctgcagacgacaaatgtcagcgacctgggcttggaacacagtgactccctggagtagtcgggcagcccagatggcactgatcactgagcaggagaggagtgtcgccgggaggccttcagggtgggggggaaggggacatgggcaggaagcaccgagggagttgggccctagcttccccaaatcagtagcttgaagaaaggcaaaggagacacctgttccttcccaaccaccgagcttcaatgaggaccccagccccacttccctggaactgccgaggactctgtttggcggggccagtcgagcagcctgtgtggaaagacaggagtgagatctggactcaccaaatccctgaggatagatggcacccatggcccccacccacggaaggacttgagttgtttacaagccctgcactgaggcagattggtgctgttcgcagagtaggcctttgcccgggggcagacttagaaggaaggggagagacaaagggggactgagtttcatccccagaagtttctcagctcctttgacagacattcaagggcaggagggagccccaaagcataaccagtggccagaggagtgggagggcctgaggcatcacatcttgcagatcagaatgggatggaatccaccaggctccagctcatccctccaaggccctgtctctgcgcacagcaaccatggacatgggagaaagggatgggagccacagtgcccttcactctctcctggaaaccaactgtaagctggtgggctcaacctgtgggaggttaagaggagtcccttctgggttgactccaagagccaaggagatggcagaccctgggctaggaaccatatggaggtgactttgaggccacagctgtccctaggtgatcacagaacttagctcctttaacaacaggacaatggttttttaccctagatgttcccaccttcagtgctccacgccctccatagaccttcagagaaggtgaaaccaggttatctgggaatctttccagcccgcaggtcgccacggccatccctttgctcccagcctggctccatcagcctccagcttcctttcttcattctgtccttcagggaaggcagaagaaacattggaaagcatctagtccagtgggaagccaggggttggagaaggtgctacatccctcttcccatcaatatcctaaatgtgggggagggcccagagaatggcacccaagagcctgcggggatgcccatcccacacaccccacccagctgttctaaccctgctatccacagccctggaggaactggggctcctggaaggaggaggaggctctccactgtccaccctaacacataccctcccacccaccttccagacccccttggttggcaccctctcctccggttccctctcaccccatggctgtgaatgacaggacaggtcacacgtgtgttttccattgggtttaatttaatggacgtgcagtttcatttgtaaattgtgcattggccacctccttcagtggcaggatgtgagtggctacctggctcaactggaggggaccccttgggccctctggggcttcccctcccccacctggttggggtagagcaaaaggatggtcactcttccgaggtctccctgaaatgaatgtatttctcccccaaaagagctgatatttaatgttttaataaggatttttgagaaacaaataaccttatttataatctgggtgatccaatcattttttactcccttttgatgccatacatagaggaaagtctagcttttttggcgtgagacttttgcaatgtgcagtgggataaaatgcatttccttttctggttcgtttttcttgttaacacgcgcacacagacacacacacacaccgttccactcaccacctggacaggcgtcccccagcacggacacactggcacacaggtgcccacatctcttcctctcagcccctccacctgcctaatgttatgcaacctccttctgatgtatccaccaaaccagtactgaatgtggccgagacgttttcagtaaatcttattacctaccgtaa

SEQ ID NO: 339875 - DNA, 1419 bp, Artificial Sequence
  derived and/or modified sequence
atgatgcagcatgccagcccggccccggcattgacaatgatggccacccaaaacgtcccccctcccccctaccaagactcccctcagatgactgccactgctcagcccccgtcaaaggctcaagcggtgcatatcagtgcgccaagtgccgctgcatctacgcccgtgcccagcgcgccaattgacccgcaggctcagctggaggctgacaaacgggccgtttacaggcatcctctctttcccttactgactctgttgtttgagaagtgcgaacaggccacacaaggatctgaatgcataacttccgcaagcttcgacgtggacattgagaattttgttcatcagcaggaacaggagcacaagcctttctttagtgatgaccctgagctggacaatctcatggtgaaagctatacaagtgctgaggattcacctgttggagctggagaaggttaatgaactttgcaaagacttttgtaacagatatattacgtgtctgaaaaccaagatgcactcagacaacctactgaggaacgatctggggggtccctacagcccaaaccaacctagtattaaccttcactcgcaagacctgctccaaaactcccccaatagtatgtcaggagtttccaataatccccaaggcattgtggtacccgcttcagcactgcagcagggcaatatcgccatgaccacagtcaactctcaggtggtctccggaggtgccctgtatcaaccagtgaccatggtgacctcacaggggcaagtggttacccaggctattccccaaggcgccatccagatccaaaatacccaagtgaatcttgacctcaccagcctgctggataacgaggataagaagagtaagaacaaacggggcgtgctgcccaaacatgccacaaatattatgcggagctggctatttcagcacttaatgcacccgtaccctaccgaagacgagaagcgacaaattgctgctcagacaaacctgactctgcttcaggttaacaattggtttatcaacgctagaagaagaattctccagccaatgcttgacgccagcaatcctgaccccgccccaaaggctaaaaaaatcaagtctcagcatagacctacccagcgcttttggcccaattccatcgccgcaggagtgctccagcagcaagggggggcccccgggacaaaccccgacggctcaatcaatctggacaacctccagtctctgtcaagcgactccgctacaatggcaatgcaacaggcaatgatggccgcccacgacgactctctggatggcaccgaggaggaagacgaggatgagatggaggaagaagaggaagaggagctggaggaggaagtcgacgaactgcaaacgactaacgtaagcgacctgggcctggagcactccgatagcctcgaatag

SEQ ID NO: 339876 - DNA, 921 bp, Artificial Sequence
  derived and/or modified sequence
atgatggccactcagaacgttccgccaccaccatatcaagattcacctcaaatgacggccacagcacagcctccgtctaaggcccaggcagtgcacatctcagctccatcagcggcggctagcaccccagtccccagtgcgcccattgacccacaggctcagctggaggctgataaacgcgcagtgtatcgtcaccccctgtttcctcttctgactcttctcttcgaaaaatgtgagcaggcgacccaagggtcagaatgcatcacgagcgcatcttttgacgtggacatcgagaattttgtgcaccagcaggagcaggagcacaaaccgttcttttcggacgaccctgagctcgataatctcatggtcaaagcaattcaagtgctacgcattcacctgttagagctggaaaaggtgaacgaactgtgcaaagatttctgcaacaggtacatcacgtgtcttaaaacaaaaatgcacagcgacaacctgctgcggaacgatctggggggcccgtacagccctaatcagccctctatcaatctacactctcaggacctcctccaaaatagccccaattcgatgtcaggagttagcaataaccctcaaggaatagtcgtccctgcatccgctctacagcagggaaacattgccatgactacagtgaatagtcaggtcgtatcgggcggggccctctaccagcccgtcaccatggtgactagccagggacaggtggtcactcaagccattcctcagggtgcaatccagatacagaacacccaggttaatctggaccttaccagccttctggacaacgaggacaaaaaatctaaaaacaagcgcggagtgcttcccaaacatgctaccaacatcatgaggtcctggctgtttcaacatcacgcaccgttacctcacggagggtag

SEQ ID NO: 339877 - DNA, 1419 bp, Artificial Sequence
  derived and/or modified sequence
atgatgcagcacgccagccctgccccagccctgaccatgatggccacccagaatgtgcccccaccaccctaccaggacagcccccagatgacagccacagcccagccccccagcaaggcccaggccgtgcacatcagcgcccccagcgctgctgccagcacccctgtgcccagcgcccccatcgacccccaggcccagctggaggccgacaagagagctgtgtaccgccaccccctcttccccctgctgaccctgctgtttgagaagtgtgagcaggccacccagggcagcgagtgcatcaccagcgccagctttgatgtggacatcgagaactttgtgcaccagcaggagcaggagcacaagcccttcttcagtgatgatcctgagctggacaacctgatggtgaaggccatccaggtgctgcgcatccacctgctggagctggagaaggtgaatgagctgtgcaaggacttctgcaaccgctacatcacctgcctgaagaccaagatgcacagcgacaacctgctgagaaatgacctgggcggcccctacagccccaaccagcccagcatcaacctgcacagccaggacctgctgcagaacagccccaacagcatgtctggagtgagcaacaacccccagggcatcgtggtgcctgccagcgccctgcagcagggcaacatcgccatgaccaccgtgaacagccaggtggtgtctggaggagccctgtaccagcctgtgaccatggtgaccagccagggccaggtggtgacccaggccatcccccagggcgccatccagatccagaacacccaggtgaacctggacctgaccagcctgctggacaatgaagacaagaagagcaagaacaagaggggcgtgctgcccaagcacgccaccaacatcatgaggtcctggctgttccagcacctgatgcacccctaccccacagaagatgagaagaggcagattgctgcccagaccaacctgaccctgctgcaggtgaacaactggttcatcaatgcccggcggcgcatcctgcagcccatgctggatgccagcaacccagaccctgcccccaaggccaagaagatcaagagccagcaccggcccacccagcgcttctggcccaacagcattgctgctggggtgctgcagcagcagggcggggcccctggcaccaacccagatggcagcatcaacctggacaacctgcagagcctgagcagtgacagcgccaccatggccatgcagcaggccatgatggccgcccatgatgacagcctggatggaacagaggaggaggatgaagatgagatggaggaggaggaggaggaggagctggaggaggaggtggatgagctgcagaccaccaacgtgtctgacctgggcctggagcacagcgacagcctggagtag

SEQ ID NO: 339878 - DNA, 921 bp, Artificial Sequence
  derived and/or modified sequence
atgatggccacccagaatgtgcccccaccaccctaccaggacagcccccagatgacagccacagcccagccccccagcaaggcccaggccgtgcacatcagcgcccccagcgctgctgccagcacccctgtgcccagcgcccccatcgacccccaggcccagctggaggccgacaagagagctgtgtaccgccaccccctcttccccctgctgaccctgctgtttgagaagtgtgagcaggccacccagggcagcgagtgcatcaccagcgccagctttgatgtggacatcgagaactttgtgcaccagcaggagcaggagcacaagcccttcttcagtgatgatcctgagctggacaacctgatggtgaaggccatccaggtgctgcgcatccacctgctggagctggagaaggtgaatgagctgtgcaaggacttctgcaaccgctacatcacctgcctgaagaccaagatgcacagcgacaacctgctgagaaatgacctgggcggcccctacagccccaaccagcccagcatcaacctgcacagccaggacctgctgcagaacagccccaacagcatgtctggagtgagcaacaacccccagggcatcgtggtgcctgccagcgccctgcagcagggcaacatcgccatgaccaccgtgaacagccaggtggtgtctggaggagccctgtaccagcctgtgaccatggtgaccagccagggccaggtggtgacccaggccatcccccagggcgccatccagatccagaacacccaggtgaacctggacctgaccagcctgctggacaatgaagacaagaagagcaagaacaagaggggcgtgctgcccaagcacgccaccaacatcatgaggtcctggctgttccagcaccacgcccccctgccccacggcggctag

SEQ ID NO: 339879 - DNA, 1419 bp, Artificial Sequence
  derived and/or modified sequence
atgatgcagcacgccagccccgcccccgccctgaccatgatggccacccagaatgttccccctccgccttatcaagactctccacaaatgacggcaacagctcaaccgccttcaaaggctcaggcagtgcatatttcagccccatcggccgcggcaagtaccccggtgcctagtgcaccaatcgacccccaggcgcaactcgaggctgacaagagggctgtgtacagacacccactgttcccgcttttgactctactcttcgagaagtgtgagcaggctacgcaaggtagcgagtgcatcacgtcggcatcattcgacgtggacatcgaaaatttcgtacatcagcaggagcaggagcacaaacctttcttttccgatgacccggagctcgataatctgatggtaaaggctatacaagttttgcgcattcacctgctggaacttgagaaggtgaatgaactgtgcaaggatttttgcaataggtatatcacctgtctgaagacgaagatgcattccgataacttactgagaaatgacttgggtggtccctactctcccaatcagccatcaatcaatctgcatagtcaggatctcctgcagaactcccccaactctatgagcggcgtcagcaataaccctcagggtatcgttgtacccgccagcgcacttcagcaaggaaatattgctatgactacagtaaattctcaggtggtcagcggcggcgccctgtatcagcctgtgacgatggtcacaagtcaggggcaggtcgtgactcaggccataccacagggtgccatccagattcagaacactcaggtaaacctggacctgacttctctgctggacaacgaagataagaagagcaagaataaaagaggggtgctgcctaagcatgcaacgaatattatgcggagttggctttttcagcacttaatgcatccttaccctaccgaagatgagaagcgacaaatcgccgctcagactaacctgacactgctgcaggtcaacaattggtttattaacgctcgaaggcggatcctccagcctatgctcgatgccagtaatcccgacccagcaccgaaagccaagaaaattaagtctcagcatagaccaacacaacgcttttggcccaacagcatcgccgctggtgtgctacaacagcagggcggcgcaccgggcaccaacccagatgggagcatcaacctggataatttgcagagcctttccagtgatagcgccacaatggccatgcagcaggccatgatggcggcccacgacgattccctagacgggactgaagaggaagatgaagacgaaatggaggaggaagaggaagaagagttggaggaggaggtagatgaactgcaaaccaccaacgtttcagatctggggttagagcatagcgatagcttagaatag

SEQ ID NO: 339880 - DNA, 921 bp, Artificial Sequence
  derived and/or modified sequence
atgatggccacccagaacgtgcccccccccccctaccaggacagcccccagatgaccgccaccgcccagccgccctcaaaggcacaagccgtccacatctcagctccctcagcagctgcatccactcccgtcccatcagcccctattgaccctcaggcccagctcgaagctgataaacgtgctgtctacagacaccctttgtttcctctcctgactctgctgtttgagaagtgcgagcaggcgacccagggcagtgagtgcattactagtgcctcgttcgacgtggatattgaaaattttgtgcaccagcaggagcaggagcacaagccctttttttcagacgatccagagctggacaacctaatggtgaaagccatacaagtcttgcgaattcatctgctcgaactcgaaaaagtgaacgaactgtgtaaagatttttgcaataggtacatcacatgcctaaagactaaaatgcatagcgataacttattgagaaacgacctaggcgggccctatagtcccaaccagccttctatcaatctgcattcacaagacctgcttcagaacagtccaaattcgatgtcaggggttagtaacaacccgcagggaattgtagtgcctgcttcagccctgcagcaaggcaacatagctatgacgaccgtcaacagtcaagtcgtatctgggggcgcactttaccagcccgttactatggtgacatcccaaggccaggtggtgacacaggcaataccacaaggcgccattcaaattcagaatacacaggtgaacctggatctgacctccctgctcgacaatgaggataagaaatctaagaacaaacgcggcgtcctaccaaagcatgcaacaaacattatgcgctcctggctgtttcagcaccacgcccccctgccacatggcggctag

SEQ ID NO: 339881 - DNA, 3653 bp, Artificial Sequence
  derived and/or modified sequence
gtcccgagcagtgctgggaagtataggctgtgttgtcacgccggtgtcagtctgatgaagattggcatcaggtgaagtctggagcaggacttctgaggctttctatcctccatgctgctcactagaaaaggggctgtgaactgtgctttggctctagcagacaggaagaaattctggcccagctggaagtagaaagaggggagtgagtctcctgaggaccatctcagaggccccgggatcacccgaacagtcctccatgtgaatcaatcccatgatgcaacatgcctccccagcccccgctctgacgatgatggccacgcagaatgtcccgcccccaccctaccaggacagcccacagatgacggcaaccgcccagccaccctccaaggcccaggctgtccacatctctgccccctcagctgctgccagcacacctgtgcccagtgcccccatcgacccccaggcccagctggaggctgacaagcgagctgtatacaggcaccctcttttcccgctcctgacgctgctgtttgagaaatgtgaacaggccacccagggctctgagtgcatcacctccgccagctttgatgtggacatcgagaactttgtccaccagcaggaacaggagcacaaacccttcttcagcgatgacccagaactggacaatctgatggtgaaggcaatccaggtcctgagaatccacctgctggagctggagaaagtcaatgaactctgcaaggacttttgtaaccgttacatcacctgcctcaaaaccaagatgcacagcgacaacctgctcaggaatgatctaggggggccctactcccccaaccagccctccatcaaccttcactcacaggacctcctgcagaattcccccaattccatgtccggagtctccaataacccccaggggattgtggtcccagcctcagcgctccagcagggcaacatcgccatgacaaccgtcaactcacaagttgtgtcaggtggagccttataccaaccggttaccatggtaacctcccagggtcaggtggtcacccaagcaatcccccagggagccatccagatccagaacacacaggttaaccttgacctcacctccctcctggacaatgaggataagaagtccaagaacaaacgaggagtcttgcccaagcatgccaccaatataatgcgttcttggctcttccagcatctcatgcacccctaccccacggaggatgagaagaggcagatcgcagcccagaccaacctcaccctcctgcaagtaaacaactggttcatcaatgcccggaggcgcatcctgcagcccatgcttgatgccagcaacccagatcctgcccccaaagccaagaagatcaagtctcagcaccggcccacccaaagattctggcccaactccatcgctgcgggggtgctgcagcagcagggcggtgccccagggacaaaccccgatggttccatcaacttggacaacctgcagtccctgtcctcagacagtgccaccatggccatgcagcaggctatgatggctgcacacgatgactcattggatgggacagaagaagaggatgaggatgagatggaagaggaggaggaggaggagctggaggaggaggtcgacgagctgcagacgacaaatgtcagcgacctgggcttggaacacagtgactccctggagtagtcgggcagcccagatggcactgatcactgagcaggagaggagtgtcgccgggaggccttcagggtgggggggaaggggacatgggcaggaagcaccgagggagttgggccctagcttccccaaatcagtagcttgaagaaaggcaaaggagacacctgttccttcccaaccaccgagcttcaatgaggaccccagccccacttccctggaactgccgaggactctgtttggcggggccagtcgagcagcctgtgtggaaagacaggagtgagatctggactcaccaaatccctgaggatagatggcacccatggcccccacccacggaaggacttgagttgtttacaagccctgcactgaggcagattggtgctgttcgcagagtaggcctttgcccgggggcagacttagaaggaaggggagagacaaagggggactgagtttcatccccagaagtttctcagctcctttgacagacattcaagggcaggagggagccccaaagcataaccagtggccagaggagtgggagggcctgaggcatcacatcttgcagatcagaatgggatggaatccaccaggctccagctcatccctccaaggccctgtctctgcgcacagcaaccatggacatgggagaaagggatgggagccacagtgcccttcactctctcctggaaaccaactgtaagctggtgggctcaacctgtgggaggttaagaggagtcccttctgggttgactccaagagccaaggagatggcagaccctgggctaggaaccatatggaggtgactttgaggccacagctgtccctaggtgatcacagaacttagctcctttaacaacaggacaatggttttttaccctagatgttcccaccttcagtgctccacgccctccatagaccttcagagaaggtgaaaccaggttatctgggaatctttccagcccgcaggtcgccacggccatccctttgctcccagcctggctccatcagcctccagcttcctttcttcattctgtccttcagggaaggcagaagaaacattggaaagcatctagtccagtgggaagccaggggttggagaaggtgctacatccctcttcccatcaatatcctaaatgtgggggagggcccagagaatggcacccaagagcctgcggggatgcccatcccacacaccccacccagctgttctaaccctgctatccacagccctggaggaactggggctcctggaaggaggaggaggctctccactgtccaccctaacacataccctcccacccaccttccagacccccttggttggcaccctctcctccggttccctctcaccccatggctgtgaatgacaggacaggtcacacgtgtgttttccattgggtttaatttaatggacgtgcagtttcatttgtaaattgtgcattggccacctccttcagtggcaggatgtgagtggctacctggctcaactggaggggaccccttgggccctctggggcttcccctcccccacctggttggggtagagcaaaaggatggtcactcttccgaggtctccctgaaatgaatgtatttctcccccaaaagagctgatatttaatgttttaataaggatttttgagaaacaaataaccttatttataatctgggtgatccaatcattttttactcccttttgatgccatacatagaggaaagtctagcttttttggcgtgagacttttgcaatgtgcagtgggataaaatgcatttccttttctggttcgtttttcttgttaacacgcgcacacagacacacacacacaccgttccactcaccacctggacaggcgtcccccagcacggacacactggcacacaggtgcccacatctcttcctctcagcccctccacctgcctaatgttatgcaacctccttctgatgtatccaccaaaccagtactgaatgtggccg

SEQ ID NO: 339882 - DNA, 3175 bp, Artificial Sequence
  derived and/or modified sequence
acatgcctccccagcccccgctctgacgatgatggccacgcagaatgtcccgcccccaccctaccaggacagcccacagatgacggcaaccgcccagccaccctccaaggcccaggctgtccacatctctgccccctcagctgctgccagcacacctgtgcccagtgcccccatcgacccccaggcccagctggaggctgacaagcgagctgtatacaggcaccctcttttcccgctcctgacgctgctgtttgagaaatgtgaacaggccacccagggctctgagtgcatcacctccgccagctttgatgtggacatcgagaactttgtccaccagcaggaacaggagcacaaacccttcttcagcgatgacccagaactggacaatctgatggtgaaggcaatccaggtcctgagaatccacctgctggagctggagaaagtcaatgaactctgcaaggacttttgtaaccgttacatcacctgcctcaaaaccaagatgcacagcgacaacctgctcaggaatgatctaggggggccctactcccccaaccagccctccatcaaccttcactcacaggacctcctgcagaattcccccaattccatgtccggagtctccaataacccccaggggattgtggtcccagcctcagcgctccagcagggcaacatcgccatgacaaccgtcaactcacaagttgtgtcaggtggagccttataccaaccggttaccatggtaacctcccagggtcaggtggtcacccaagcaatcccccagggagccatccagatccagaacacacaggttaaccttgacctcacctccctcctggacaatgaggataagaagtccaagaacaaacgaggagtcttgcccaagcatgccaccaatataatgcgttcttggctcttccagcatcatgcacccctaccccacggaggatgagaagaggcagatcgcagcccagaccaacctcaccctcctgcaagtaaacaactggttcatcaatgcccggaggcgcatcctgcagcccatgcttgatgccagcaacccagatcctgcccccaaagccaagaagatcaagtctcagcaccggcccacccaaagattctggcccaactccatcgctgcgggggtgctgcagcagcagggcggtgccccagggacaaaccccgatggttccatcaacttggacaacctgcagtccctgtcctcagacagtgccaccatggccatgcagcaggctatgatggctgcacacgatgactcattggatgggacagaagaagaggatgaggatgagatggaagaggaggaggaggaggagctggaggaggaggtcgacgagctgcagacgacaaatgtcagcgacctgggcttggaacacagtgactccctggagtagtcgggcagcccagatggcactgatcactgagcaggagaggagtgtcgccgggaggccttcagggtgggggggaaggggacatgggcaggaagcaccgagggagttgggccctagcttccccaaatcagtagcttgaagaaaggcaaaggagacacctgttccttcccaaccaccgagcttcaatgaggaccccagccccacttccctggaactgccgaggactctgtttggcggggccagtcgagcagcctgtgtggaaagacaggagtgagatctggactcaccaaatccctgaggatagatggcacccatggcccccacccacggaaggacttgagttgtttacaagccctgcactgaggcagattggtgctgttcgcagagtaggcctttgcccgggggcagacttagaaggaaggggagagacaaagggggactgagtttcatccccagaagtttctcagctcctttgacagacattcaagggcaggagggagccccaaagcataaccagtggccagaggagtgggagggcctgaggcatcacatcttgcagatcagaatgggatggaatccaccaggctccagctcatccctccaaggccctgtctctgcgcacagcaaccatggacatgggagaaagggatgggagccacagtgcccttcactctctcctggaaaccaactgtaagctggtgggctcaacctgtgggaggttaagaggagtcccttctgggttgactccaagagccaaggagatggcagaccctgggctaggaaccatatggaggtgactttgaggccacagctgtccctaggtgatcacagaacttagctcctttaacaacaggacaatggttttttaccctagatgttcccaccttcagtgctccacgccctccatagaccttcagagaaggtgaaaccaggttatctgggaatctttccagcccgcaggtcgccacggccatccctttgctcccagcctggctccatcagcctccagcttcctttcttcattctgtccttcagggaaggcagaagaaacattggaaagcatctagtccagtgggaagccaggggttggagaaggtgctacatccctcttcccatcaatatcctaaatgtgggggagggcccagagaatggcacccaagagcctgcggggatgcccatcccacacaccccacccagctgttctaaccctgctatccacagccctggaggaactggggctcctggaaggaggaggaggctctccactgtccaccctaacacataccctcccacccaccttccagacccccttggttggcaccctctcctccggttccctctcaccccatggctgtgaatgacaggacaggtcacacgtgtgttttccattgggtttaatttaatggacgtgcagtttcatttgtaaattgtgcattggccacctccttcagtggcaggatgtgagtggctacctggctcaactggaggggaccccttgggccctctggggcttcccctcccccacctggttggggtagagcaaaaggatggtcactcttccgaggtctccctgaaatgaatgtatttctcccccaaaagagctgatatttaatgttttaataaggatttttgagaaacaaataaccttatttataatctgggtgatccaatcattttttactcccttttgatgccatacatagaggaaagtctagcttttttggcgtgagacttttgcaatgtgcagtgggataaaatgcatttccttt

SEQ ID NO: 339883 - DNA, 1419 bp, Artificial Sequence
  derived and/or modified sequence
atgatgcagcatgccagtcctgctcctgcgttgaccatgatggcgacgcagaatgttcccccacccccataccaggattctcctcagatgacagccaccgcccagccgccatcgaaggcccaggcagtacatatttccgcaccaagcgctgccgcttctacccctgtccccagcgccccaatcgacccgcaggcacagcttgaagccgacaaaagggccgtgtaccgccaccccctttttcccctcttgaccctgttgtttgagaagtgcgagcaggcaacccaaggaagtgaatgtatcacaagtgcctcctttgacgtagacatcgagaattttgttcaccagcaggagcaggagcataaaccctttttttccgacgaccctgaactagacaacctcatggttaaggcaatccaggtgcttagaatacacctgttggaactggagaaggttaacgaattgtgtaaggacttctgtaacaggtatattacatgcctcaagaccaagatgcacagtgataatttgctgaggaatgatctggggggaccgtactcccccaatcaaccatctatcaatctccattcacaggacctcctgcagaattcccctaactctatgtctggcgtgagcaataacccccagggtatcgttgttccggcttccgcccttcagcaaggcaatatcgccatgacaacggttaacagccaagtggtatccggaggtgccctttatcaaccggtgacaatggtgacatcccaaggtcaggtcgtgactcaggctatcccccagggcgctatccaaatccagaatacccaggtgaatctggacctgacctccctcctggataatgaggacaagaaaagcaaaaataagaggggcgtgttgcctaagcacgcaacaaacatcatgcgtagctggcttttccagcatctgatgcacccatacccaacggaagacgaaaaacgccaaattgccgctcagaccaatctgacacttctacaagtgaataattggtttatcaatgctcgaagacgcatccttcagcccatgctggacgcctccaatccggacccggcaccaaaggctaaaaaaattaaatcccagcatagacccacgcagcgattctggcccaattccatcgctgccggagtgctacagcagcaagggggagccccaggcacaaaccccgatggctccattaatttagacaacctgcagagcctgtcctcagattccgctaccatggctatgcagcaagccatgatggcagctcatgacgacagtctcgacggcaccgaggaagaggacgaggatgagatggaggaggaagaagaagaagaactggaggaggaagtggacgagcttcaaactaccaatgtatccgaccttgggctggagcactcagattcgcttgaatag

SEQ ID NO: 339884 - DNA, 921 bp, Artificial Sequence
  derived and/or modified sequence
atgatggctacgcagaatgttcctcctccaccgtaccaggatagtccccaaatgacggcgacagcccagcccccatccaaagctcaggcggtccacatatcagcaccgagtgcagctgcgtccactccagtgccttcagctccaatagaccctcaggctcagctggaagctgacaaacgcgcagtgtaccgccatcccttgttcccgctgctgactctgttgtttgaaaagtgtgagcaggctactcaggggagcgaatgtatcacaagcgcatcattcgacgtggacatagagaattttgttcaccagcaggagcaggagcataagccatttttcagcgatgacccagaactggataatttgatggtcaaagcgatccaggtgctacggatccacctgctggagttggaaaaggtgaacgaactgtgcaaagacttctgtaaccgatacattacatgtctgaaaacgaaaatgcactcagataacctactgagaaatgacctgggcggaccctatagtcctaaccagccgtccatcaatctgcatagccaagatttgctccaaaattctccaaattccatgagcggggtgagcaacaacccacaaggaatagtagtacccgcttccgccctgcaacagggaaacattgctatgacaaccgtgaattctcaggttgtgtctggtggggctctgtaccagcccgtgacaatggtaacatcccagggacaggtggtgacccaggcaatccctcagggagctatccagattcagaacactcaagtaaacctggaccttacctccctgctggataatgaggacaagaagtctaaaaacaagagaggtgtccttccaaagcacgcgactaacatcatgaggtcatggttgttccagcatcatgccccactgcctcatgggggttag

SEQ ID NO: 339885 - DNA, 1419 bp, Artificial Sequence
  derived and/or modified sequence
atgatgcagcacgccagccccgcccccgccctgaccatgatggccacccagaacgtgcccccccccccctaccaggacagcccccagatgaccgccaccgcccagccccccagcaaggcccaggccgtgcacatcagcgcccccagcgccgccgccagcacccccgtgcccagcgcccccatcgacccccaggcccagctggaggccgacaagagagccgtgtacagacaccccctgttccccctgctgaccctgctgttcgagaagtgcgagcaggccacccagggcagcgagtgcatcaccagcgccagcttcgacgtggacatcgagaacttcgtgcaccagcaggagcaggagcacaagcccttcttcagcgacgaccccgagctggacaacctgatggtgaaggccatccaggtgctgagaatccacctgctggagctggagaaggtgaacgagctgtgcaaggacttctgcaacagatacatcacctgcctgaagaccaagatgcacagcgacaacctgctgagaaacgacctgggcggcccctacagccccaaccagcccagcatcaacctgcacagccaggacctgctgcagaacagccccaacagcatgagcggcgtgagcaacaacccccagggcatcgtggtgcccgccagcgccctgcagcagggcaacatcgccatgaccaccgtgaacagccaggtggtgagcggcggcgccctgtaccagcccgtgaccatggtgaccagccagggccaggtggtgacccaggccatcccccagggcgccatccagatccagaacacccaggtgaacctggacctgaccagcctgctggacaacgaggacaagaagagcaagaacaagagaggcgtgctgcccaagcacgccaccaacatcatgagaagctggctgttccagcacctgatgcacccctaccccaccgaggacgagaagagacagatcgccgcccagaccaacctgaccctgctgcaggtgaacaactggttcatcaacgccagaagaagaatcctgcagcccatgctggacgccagcaaccccgaccccgcccccaaggccaagaagatcaagagccagcacagacccacccagagattctggcccaacagcatcgccgccggcgtgctgcagcagcagggcggcgcccccggcaccaaccccgacggcagcatcaacctggacaacctgcagagcctgagcagcgacagcgccaccatggccatgcagcaggccatgatggccgcccacgacgacagcctggacggcaccgaggaggaggacgaggacgagatggaggaggaggaggaggaggagctggaggaggaggtggacgagctgcagaccaccaacgtgagcgacctgggcctggagcacagcgacagcctggagtag

SEQ ID NO: 339886 - DNA, 921 bp, Artificial Sequence
  derived and/or modified sequence
atgatggccacccagaacgtgcccccccccccctaccaggacagcccccagatgaccgccaccgcccagccccccagcaaggcccaggccgtgcacatcagcgcccccagcgccgccgccagcacccccgtgcccagcgcccccatcgacccccaggcccagctggaggccgacaagagagccgtgtacagacaccccctgttccccctgctgaccctgctgttcgagaagtgcgagcaggccacccagggcagcgagtgcatcaccagcgccagcttcgacgtggacatcgagaacttcgtgcaccagcaggagcaggagcacaagcccttcttcagcgacgaccccgagctggacaacctgatggtgaaggccatccaggtgctgagaatccacctgctggagctggagaaggtgaacgagctgtgcaaggacttctgcaacagatacatcacctgcctgaagaccaagatgcacagcgacaacctgctgagaaacgacctgggcggcccctacagccccaaccagcccagcatcaacctgcacagccaggacctgctgcagaacagccccaacagcatgagcggcgtgagcaacaacccccagggcatcgtggtgcccgccagcgccctgcagcagggcaacatcgccatgaccaccgtgaacagccaggtggtgagcggcggcgccctgtaccagcccgtgaccatggtgaccagccagggccaggtggtgacccaggccatcccccagggcgccatccagatccagaacacccaggtgaacctggacctgaccagcctgctggacaacgaggacaagaagagcaagaacaagagaggcgtgctgcccaagcacgccaccaacatcatgagaagctggctgttccagcaccacgcccccctgccccacggcggctag

SEQ ID NO: 339887 - DNA, 120 bp, Artificial Sequence
  derived and/or modified sequence
atgatgcagcacgcaagcccggccccggccttgacgatgatggccacacagaatgtcccccccccaccttatcaggatagtccacagatgactgctaccgcccagcctccttccaaatag

SEQ ID NO: 339888 - DNA, 123 bp, Artificial Sequence
  derived and/or modified sequence
atgatgcaacacgcatccccagcaccagcgttgactatgatggcgacccagaacgttccgccgcccccataccaagatagcccccagatgacggctactgcgcagccaccttcaaaggcctag

SEQ ID NO: 339889 - DNA, 297 bp, Artificial Sequence
  derived and/or modified sequence
atgatgcagcacgcgtcaccggctccagccctgacaatgatggccactcagaacgtccccccccctccttatcaggacagccctcagatgaccgccaccgcccagccccctagcaaggcacaggcagttcatatctcagcccctagtgccgcagcaagtacccctgtccctagcgctccaattgacccacaggcacaactggaagccgataaacgcgccgtttaccgccaccctctttttccactattgacattattattcgagaagtgtgagcaggctactcagggctcggagtag

SEQ ID NO: 339890 - DNA, 234 bp, Artificial Sequence
  derived and/or modified sequence
atgatgcaacatgccagtcctgcccccgccctgaccatgatggcgacacagaacgtgccgccaccaccttatcaggactcccctcaaatgaccgcaacggcccagccacctagtaaagcccaggcagtacatatctccgcaccgtcagccgctgcatccacgccagtcccgagcgcccccattgacccacaagctcaattagaggcagataaaagggccgtgtatagatggtag

SEQ ID NO: 339891 - DNA, 120 bp, Artificial Sequence
  derived and/or modified sequence
atgatgcagcacgccagccctgccccagccctgaccatgatggccacccagaatgtgcccccaccaccctaccaggacagcccccagatgacagccacagcccagccccccagcaagtag

SEQ ID NO: 339892 - DNA, 123 bp, Artificial Sequence
  derived and/or modified sequence
atgatgcagcacgccagccctgccccagccctgaccatgatggccacccagaatgtgcccccaccaccctaccaggacagcccccagatgacagccacagcccagccccccagcaaggcctag

SEQ ID NO: 339893 - DNA, 297 bp, Artificial Sequence
  derived and/or modified sequence
atgatgcagcacgccagccctgccccagccctgaccatgatggccacccagaatgtgcccccaccaccctaccaggacagcccccagatgacagccacagcccagccccccagcaaggcccaggccgtgcacatcagcgcccccagcgctgctgccagcacccctgtgcccagcgcccccatcgacccccaggcccagctggaggccgacaagagagctgtgtaccgccaccccctcttccccctgctgaccctgctgtttgagaagtgtgagcaggccacccagggcagcgagtag

SEQ ID NO: 339894 - DNA, 234 bp, Artificial Sequence
  derived and/or modified sequence
atgatgcagcacgccagccctgccccagccctgaccatgatggccacccagaatgtgcccccaccaccctaccaggacagcccccagatgacagccacagcccagccccccagcaaggcccaggccgtgcacatcagcgcccccagcgctgctgccagcacccctgtgcccagcgcccccatcgacccccaggcccagctggaggccgacaagagagctgtgtaccgctggtag

SEQ ID NO: 339895 - DNA, 120 bp, Artificial Sequence
  derived and/or modified sequence
atgatgcagcacgccagccccgcccccgccctgaccatgatggccacacagaatgtgccaccacctccttatcaggactctccccagatgaccgctaccgcacagccaccctctaagtag

SEQ ID NO: 339896 - DNA, 123 bp, Artificial Sequence
  derived and/or modified sequence
atgatgcagcacgccagccccgcccccgccctgaccatgatggccacacagaacgtgcctccgccgccctatcaggatagtcctcagatgacggccaccgctcagccgccttccaaggcctag

SEQ ID NO: 339897 - DNA, 297 bp, Artificial Sequence
  derived and/or modified sequence
atgatgcagcacgccagccccgcccccgccctgaccatgatggccacccagaatgtgcctccgccaccctatcaggactcaccacagatgaccgccaccgctcagcccccttctaaggcacaggcagtccatatttccgcgccaagcgcggcggccagcacgccagtcccctccgcaccaatagatcctcaggcgcagctcgaagccgataaaagggccgtgtacaggcaccctctgttcccactgctgacacttctgttcgagaagtgcgaacaggccacccaggggtcagagtag

SEQ ID NO: 339898 - DNA, 234 bp, Artificial Sequence
  derived and/or modified sequence
atgatgcagcacgccagccccgcccccgccctgaccatgatggccacgcagaatgtcccaccaccgccctatcaggattcacctcagatgactgctactgctcagccccccagtaaagcccaggccgtgcatataagtgctccatctgcagccgcttccacccctgttccctctgctccgatcgatccccaggcccagctggaagcagataagcgggccgtctatagatggtag

SEQ ID NO: 339899 - DNA, 545 bp, Artificial Sequence
  derived and/or modified sequence
gtgttgtcacgccggtgtcagtctgatgaagattggcatcaggtgaagtctggagcaggacttctgaggctttctatcctccatgctgctcactagaaaaggggctgtgaactattgcatctacagacagtcagagtgcccgcaagaaatcaggcaatgagcgtaaaaacaacagactcgatccaccccgctcgaccagatcttgatgggaacctatgctcgaagggtgctttggctctagcagacaggaagaaattctggcccagctggaagtagaaagaggggagtgagtctcctgaggaccatctcagaggccccgggatcacccgaacatatgccatgataagggctggatctgttatggtgagattgggccccaactccaaaggaccttgcccaggattttgtcctccatgtgaatcaatcccatgatgcaacatgcctccccagcccccgctctgacgatgatggccacgcagaatgtcccgcccccaccctaccaggacagcccacagatgacggcaaccgcccagccaccctccaag

SEQ ID NO: 339900 - DNA, 521 bp, Artificial Sequence
  derived and/or modified sequence
attgccaaatgagcgacactaacaagagtgatgctctcagaggaaggacagactgagtggactgcaaggataggggagacttctggaagaggtggatggtgtggcagacccttgacactcattccccttcagcaggcttggaatgtggggatgactatccccattttcacatatggcaaaggcccaagccacacagctggtgaagtctggagcaggacttctgaggctttctatcctccatgctgctcactagaaaaggggctgtgaactgtgctttggctctagcagacaggaagaaattctggcccagctggaagtagaaagaggggagtgagtctcctgaggaccatctcagaggccccgggatcacccgaacagtcctccatgtgaatcaatcccatgatgcaacatgcctccccagcccccgctctgacgatgatggccacgcagaatgtcccgcccccaccctaccaggacagcccacagatgacggcaaccgcccagccaccctccaaggccca

SEQ ID NO: 339901 - DNA, 554 bp, Artificial Sequence
  derived and/or modified sequence
tatctcccaggtttgctgctggggtggccgcagaaccgggagtcggtcacagagttcacagacgaggtcacatggaggagaagcctggtgccaggaacaagctaggagtaactggaccacgatgacgcctgtgctttggctctagcagacaggaagaaattctggcccagctggaagtagaaagaggggagtgagtctcctgaggaccatctcagaggccccgggatcacccgaacagtcctccatgtgaatcaatcccatgatgcaacatgcctccccagcccccgctctgacgatgatggccacgcagaatgtcccgcccccaccctaccaggacagcccacagatgacggcaaccgcccagccaccctccaaggcccaggctgtccacatctctgccccctcagctgctgccagcacacctgtgcccagtgcccccatcgacccccaggcccagctggaggctgacaagcgagctgtatacaggcaccctcttttcccgctcctgacgctgctgtttgagaaatgtgaacaggccacccagggctctgagt

SEQ ID NO: 339902 - DNA, 604 bp, Artificial Sequence
  derived and/or modified sequence
aaggcactttagcaggaatctggcggcagagaggccgattgatgagatgccgaggtctgcagccccaactggaggcgccccggaagagtgagatggagtggggagggggtggaccgggcaggggaggaggcaaagagtctgtttccctggcccaaggaggccgagtggagccggcccagagatgaacgcatctgggagctgccaaggtgctttggctctagcagacaggaagaaattctggcccagctggaagtagaaagaggggagtgagtctcctgaggaccatctcagaggccccgggatcacccgaacagtcctccatgtgaatcaatcccatgatgcaacatgcctccccagcccccgctctgacgatgatggccacgcagaatgtcccgcccccaccctaccaggacagcccacagatgacggcaaccgcccagccaccctccaaggcccaggctgtccacatctctgccccctcagctgctgccagcacacctgtgcccagtgcccccatcgacccccaggcccagctggaggctgacaagcgagctgtatacagatggtgaaggcaatccaggtcctgagaatccacctgctggag

SEQ ID NO: 339903 - DNA, 120 bp, Artificial Sequence
  derived and/or modified sequence
atgatgcagcatgctagtcctgcccctgcactgactatgatggccacacagaatgtgccaccaccaccttatcaggacagccctcagatgacagcgactgctcagccaccttcaaaatag

SEQ ID NO: 339904 - DNA, 123 bp, Artificial Sequence
  derived and/or modified sequence
atgatgcaacacgcgtcccctgcccctgccctcacaatgatggcgactcagaacgtgccaccgcctccgtaccaagacagtccccagatgaccgctaccgcgcagccaccctccaaggcttag

SEQ ID NO: 339905 - DNA, 297 bp, Artificial Sequence
  derived and/or modified sequence
atgatgcagcacgcgtcacctgcgccagctttgactatgatggcaacccagaacgtgccccctcctccgtatcaggactcccctcagatgaccgccacggcacagcctccttcaaaggcacaggctgtgcacatctctgcaccgagcgctgccgcttcaacccctgtgccttcggcgcctattgaccctcaggcgcagttggaggccgacaagagagcagtgtatcgacacccgctttttccattgctcactcttctctttgagaagtgcgaacaggcgacacagggatctgaatag

SEQ ID NO: 339906 - DNA, 234 bp, Artificial Sequence
  derived and/or modified sequence
atgatgcaacacgcttccccggctccggcactgactatgatggccacacagaatgtacccccaccaccatatcaggactctcctcagatgacggcaaccgcccagcccccttcaaaggcccaagcagtacatatctcggccccaagtgctgccgctagcaccccagtgccaagcgctcctatcgacccccaagcccagctggaggccgacaagcgcgcagtttaccgctggtag

SEQ ID NO: 339907 - DNA, 120 bp, Artificial Sequence
  derived and/or modified sequence
atgatgcagcacgccagccccgcccccgccctgaccatgatggccacccagaacgtgcccccccccccctaccaggacagcccccagatgaccgccaccgcccagccccccagcaagtag

SEQ ID NO: 339908 - DNA, 123 bp, Artificial Sequence
  derived and/or modified sequence
atgatgcagcacgccagccccgcccccgccctgaccatgatggccacccagaacgtgcccccccccccctaccaggacagcccccagatgaccgccaccgcccagccccccagcaaggcctag

SEQ ID NO: 339909 - DNA, 297 bp, Artificial Sequence
  derived and/or modified sequence
atgatgcagcacgccagccccgcccccgccctgaccatgatggccacccagaacgtgcccccccccccctaccaggacagcccccagatgaccgccaccgcccagccccccagcaaggcccaggccgtgcacatcagcgcccccagcgccgccgccagcacccccgtgcccagcgcccccatcgacccccaggcccagctggaggccgacaagagagccgtgtacagacaccccctgttccccctgctgaccctgctgttcgagaagtgcgagcaggccacccagggcagcgagtag

SEQ ID NO: 339910 - DNA, 234 bp, Artificial Sequence
  derived and/or modified sequence
atgatgcagcacgccagccccgcccccgccctgaccatgatggccacccagaacgtgcccccccccccctaccaggacagcccccagatgaccgccaccgcccagccccccagcaaggcccaggccgtgcacatcagcgcccccagcgccgccgccagcacccccgtgcccagcgcccccatcgacccccaggcccagctggaggccgacaagagagccgtgtacagatggtag

SEQ ID NO: 339911 - protein, 1364 aa, Artificial Sequence
  derived and/or modified sequence
MERPEDSLSLWSLNLSPQFPCLNALRHPLSPGSRVGPEDAMPRIVEQPPDLLVSRGEPATLPCRAEGRPRPNIEWYKNGARVATVREDPRAHRLLLPSGALFFPRIVHGRRARPDEGVYTCVARNYLGAAASRNASLEVAVLRDDFRQSPGNVVVAVGEPAVLECVPPRGHPEPSVSWRKDGARLKEEEGRITIRGGKLMMSHTLKSDAGMYVCVASNMAGERESAAAEVMVLERPSFLRRPVNQVVLADAPVTFLCEVKGDPPPRLRWRKEDGELPTGRYEIRSDHSLWIGHVSAEDEGTYTCVAENSVGRAEASGSLSVHVPPQLVTQPQDQMAAPGESVAFQCETKGNPPPAIFWQKEGSQVLLFPSQSLQPTGRFSVSPRGQLNITAVQRGDAGYYVCQAVSVAGSILAKALLEIKGASLDGLPPVILQGPANQTLVLGSSVWLPCRVTGNPQPSVRWKKDGQWLQGDDLQFKTMANGTLYIANVQEMDMGFYSCVAKSSTGEATWSGWLKMREDWGVSPDPPTEPSSPPGAPSQPVVTEITKNSITLTWKPNPQTGAAVTSYVIEAFSPAAGNTWRTVADGVQLETHTVSGLQPNTIYLFLVRAVGAWGLSEPSPVSEPVRTQDSSPSRPVEDPWRGQQGLAEVAVRLQEPIVLGPRTLQVSWTVDGPVQLVQGFRVSWRVAGPEGGSWTMLDLQSPSQQSTVLRGLPPGTQIQIKVQAQGQEGLGAESLSVTRSIPEEAPSGPPQGVAVALGGDGNSSITVSWEPPLPSQQNGVITEYQIWCLGNESRFHLNRSAAGWARSAMLRGLVPGLLYRTLVAAATSAGVGVPSAPVLVQLPSPPDLEPGLEVGAGLAVRLARVLREPAFLAGSGAACGALLLGLCAALYWRRKQRKELSHYTASFAYTPAVSFPHSEGLSGASSRPPMGLGPAPYSWLADSWPHPSRSPSAQEPRGSCCPSNPDPDDRYYNEAGISLYLAQTARGTAAPGEGPVYSTIDPAGEELQTFHGGFPQHPSGDLGPWSQYAPPEWSQGDSGAKGGKVKLLGKPVQMPSLNWPEALPPPPPSCELSCLEGPEEELEGSSEPEEWCPPMPERSHLTEPSSSGGCLVTPSRRETPSPTPSYGQQSTATLTPSPPDPPQPPTDMPHLHQMPRRVPLGPSSPLSVSQPMLGIREARPAGLGAGPAASPHLSPSPAPSTASSAPGRTWQGNGEMTPPLQGPRARFRKKPKALPYRRENSPGDLPPPPLPPPEEEASWALELRAAGSMSSLERERSGERKAVQAVPLAAQRVLHPDEEAWLPYSRPSFLSRGQGTSTCSTAGSNSSRGSSSSRGSRGPGRSRSRSQSRSQSQRPGQKRREEPR

SEQ ID NO: 339912 - DNA, 450 bp, Artificial Sequence
  derived and/or modified sequence
atgactccaccattgcaaggtcctagagcgcgcttccgaaaaaaacccaaagcactgccataccgcagagaaaacagcccaggcgatcttcccccaccacccttgccacccccggaggaggaagctagttgggcgttagaacttcgggccgcaggcagcatgagttctttagagagggaacggagcggggagaggaaggctgtccaagctgtgcctcttgcagcacagagggtgcttcaccccgatgaggaggcctggctcccctactcaaggccatcatttttgtcgcgcggccaagggaccagtacctgtagtacggcagggtctaactccagccgcgggagtagctcgtcccgcggctcccggggtcctggacggagccgcagcagatcgcagtcacgcagccagtcacagcgcccgggacagaagcgccgcgaggaaccccggtag

SEQ ID NO: 339913 - DNA, 450 bp, Artificial Sequence
  derived and/or modified sequence
atgaccccacccctgcagggcccccgggcccgcttcaggaagaagcccaaggccctgccctaccgccgggagaacagccctggggacctgcccccaccacccctgcccccacctgaggaggaggcctcctgggccctggagctgcgggctgctggctccatgagcagcctggagcgggagaggtctggagagaggaaggctgtgcaggccgtgcccctggccgcccagagggtgctgcacccagatgaggaggcctggctgccctacagccggcccagcttcctgagccggggccagggcaccagcacctgcagcacagctggcagcaacagcagccggggcagcagcagcagccggggcagccggggccctggccgcagccgcagccgcagccagagccgcagccagagccagaggcctggccagaagaggcgggaggagcccaggtag

SEQ ID NO: 339914 - DNA, 450 bp, Artificial Sequence
  derived and/or modified sequence
atgaccccccccctgcagggcccccgggcccggttccggaagaagcccaaagccttgccatacaggagggaaaacagcccgggtgacctgcctcccccacctctccctccgcctgaagaggaggcgagctgggcactggaacttcgcgccgcgggctctatgagtagtctcgagcgagagcgaagtggagagagaaaagctgttcaggccgttcccctggcagcccagagagttttgcatcccgatgaggaggcgtggttaccttattcgcggcccagcttcctgagtcggggccagggcacctctacctgctccacggctgggagtaactcaagcagagggtcctcgtccagcagagggtcacgtggtccgggtaggtcacgtagcagatctcagagtcgatctcagtcacagcgccctggccagaagcgtagggaagagccacgctag

SEQ ID NO: 339915 - DNA, 450 bp, Artificial Sequence
  derived and/or modified sequence
atgacaccccctctccaagggcctcgggcaaggttccggaaaaagcccaaggccttaccataccgacgggagaatagcccgggtgacctgcccccacccccactcccccctccagaggaggaagcctcatgggctcttgagcttcgggctgctggttctatgtcatctcttgagagagaaagaagcggcgagcgaaaagccgttcaagcggtgccactcgctgcacagcgcgtcctccatcccgatgaagaggcatggctcccatatagtaggccttcgtttctgagtagaggacagggtacatctacgtgcagtaccgccggttctaattcctctagagggagttccagctcccgaggttcacggggtcctggcagatcacggtcgagatcccagtcccgaagtcagtcccagaggccagggcaaaagcgacgcgaagaaccccgatag

SEQ ID NO: 339916 - DNA, 450 bp, Artificial Sequence
  derived and/or modified sequence
atgaccccccccctgcagggccccagagccagattcagaaagaagcccaaggccctgccctacagaagagagaacagccccggcgacctgccccccccccccctgcccccccccgaggaggaggccagctgggccctggagctgagagccgccggcagcatgagcagcctggagagagagagaagcggcgagagaaaggccgtgcaggccgtgcccctggccgcccagagagtgctgcaccccgacgaggaggcctggctgccctacagcagacccagcttcctgagcagaggccagggcaccagcacctgcagcaccgccggcagcaacagcagcagaggcagcagcagcagcagaggcagcagaggccccggcagaagcagaagcagaagccagagcagaagccagagccagagacccggccagaagagaagagaggagcccagatag

SEQ ID NO: 339917 - DNA, 1402 bp, Artificial Sequence
  derived and/or modified sequence
tttcagtcacacaagaagggaggagagaaaagccatggccgacaagggtgctgaacaaggaagagatggagaaagtaaaacgtgaaaatgctacagttatggataagacccgagctttgattgactccgttattccgaaaggggcacaggcatgccaaatttgcatcacatacatttgtgaagaagacagttacctggcagggacgctgggactctcagcagatcaaacatctggaaattaccttaatatgcaagactctcaaggagtactttcttcctttccagctcctcaggcagtgcaggacaacccagctatgcccacatcctcaggctcagaagggaatgtcaagctttgctccctagaagaagctcaaaggatatggaaacaaaagtcggcagagatttatccaataatggacaagtcaagccgcacacgtcttgctctcattatctgcaatgaagaatttgacagtattcctagaagaactggagctgaggttgacatcacaggcatgacaatgctgctacaaaatctggggtacagcgtagatgtgaaaaaaaatctcactgcttcggacatgactacagagctggaggcatttgcacaccgcccagagcacaagacctctgacagcacgttcctggtgttcatgtctcatggtattcgggaaggcatttgtgggaagaaacactctgagcaagtcccagatatactacaactcaatgcaatctttaacatgttgaataccaagaactgcccaagtttgaaggacaaaccgaaggtgatcatcatccaggcctgccgtggtgacagccctggtgtggtgtggtttaaagattcagtaggagtttctggaaacctatctttaccaactacagaagagtttgaggatgatgctattaagaaagcccacatagagaaggattttatcgctttctgctcttccacaccaggcaagagccagtcttgagatttgaaatgtgctttatccatagataatgtttcttggagacatcccacaatgggctctgtttttattggaagactcattgaacatatgcaagaatatgcctgttcctgtgatgtggaggaaattttccgcaaggtaagatgctagtggatgctattttcactctacttccctgaatgcttggctattgcaattggaagcatagaaagcagatccagacaagtttatcttccaataatgctcttctttccaaaagagttttggagttctttggagagtggacaaacccaggagcctaatccaatctattaagacccacagccttgagaaaacaatcatttagtttcaccccgctcctgccctgcagagacaaatgaatggactctaatttacctgtgtctctcatggctattagatccagcagcagattt

SEQ ID NO: 339918 - DNA, 402 bp, Artificial Sequence
  derived and/or modified sequence
atgctgaagaataacgtcgcagggcagacttcaattcagacactagtcccaaacacagatcaaaagagcactagcgtcaagaaggacaatcacaaaaagaagactgtgaagatgctggaatacctcgggaaggatgtgttgcacggggtctttaactatctagcgaagcacgacgtgctgaccttaaaggaagaggagaagaagaagtactatgatacgaagattgaagacaaagccctgattctggtcgactccctgcgtaagaatagggtggctcatcagatgtttacccagacattgctgaacatggaccagaagatcacctccgttaagcaccttagtaacaagaaagaacgtggcccccagacccctgggtctcatcatatgcagtataaagtgtag

SEQ ID NO: 339919 - DNA, 402 bp, Artificial Sequence
  derived and/or modified sequence
atgctgaagaacaacgtggccggccagaccagcatccagaccctggtgcccaacacagaccagaagagcacctctgtgaagaaggacaaccacaagaagaagacagtgaagatgctggagtacctgggcaaggatgtgctgcacggcgtcttcaactacctggccaagcatgatgtgctgaccctgaaggaggaggagaagaagaagtactatgacaccaagattgaggacaaggccctgatcctggtggacagcctgaggaagaacagagtggcccaccagatgttcacccagaccctgctgaacatggaccagaagatcacctctgtgaagcacctgagcaacaagaaggagcggggcccccagaccccaggcagccaccacatgcagtacaaggtgtag

SEQ ID NO: 339920 - DNA, 402 bp, Artificial Sequence
  derived and/or modified sequence
atgctgaagaacaacgtggccggccagaccagcatccagaccctggtgcccaataccgatcagaagtctacctccgtgaagaaggacaaccacaagaagaaaaccgtgaaaatgctcgagtacctgggtaaagacgtgctgcacggtgtgttcaactacctggcaaaacacgatgttctgactttgaaagaagaggagaaaaagaagtattacgacaccaagattgaggacaaggcacttattctggtggatagtttacgaaaaaatcgagttgcgcaccagatgttcacacagaccttattgaatatggaccaaaagataacctccgtgaagcaccttagtaataaaaaagagagaggcccacaaacgcctggctcacatcatatgcaatacaaggtctag

SEQ ID NO: 339921 - DNA, 402 bp, Artificial Sequence
  derived and/or modified sequence
atgctaaagaacaacgtagcgggacagacatccatccagaccctagtacccaatactgaccaaaaatccacctcagtcaagaaggacaaccataagaaaaagactgtgaaaatgcttgaatatttgggcaaggatgtgctgcatggtgtgttcaactacctggccaagcatgacgttcttacactgaaggaggaggagaagaaaaagtactatgacacaaaaatcgaggataaggctctgatccttgttgattctttgcgtaaaaatcgggtggcgcatcaaatgtttactcagacactgctgaatatggatcagaaaatcacatctgttaaacatttatcaaataaaaaggagcggggaccccagacccccggtagccaccatatgcagtacaaagtctag

SEQ ID NO: 339922 - DNA, 402 bp, Artificial Sequence
  derived and/or modified sequence
atgctgaagaacaacgtggccggccagaccagcatccagaccctggtgcccaacaccgaccagaagagcaccagcgtgaagaaggacaaccacaagaagaagaccgtgaagatgctggagtacctgggcaaggacgtgctgcacggcgtgttcaactacctggccaagcacgacgtgctgaccctgaaggaggaggagaagaagaagtactacgacaccaagatcgaggacaaggccctgatcctggtggacagcctgagaaagaacagagtggcccaccagatgttcacccagaccctgctgaacatggaccagaagatcaccagcgtgaagcacctgagcaacaagaaggagagaggcccccagacccccggcagccaccacatgcagtacaaggtgtag

SEQ ID NO: 339923 - DNA, 563 bp, Artificial Sequence
  derived and/or modified sequence
ggtagcgaggccagcgtcgccccgggactcgctgctcaagtctgtctattgcctgccgccacatccatcctagcagggccccgtcgcccaccaggcggacaaaagcggtccgctgaacaccatgcggccgctcggcgtgccgcccaggctctgctggtgagcgccgccaccccgcgcccaggtcccgcgagcccgcctgccgcgcacctcgccctgctcccagctctactccaggccccgtccgcccgggggcgccgcccaccgcgcctcgctcggcttgaactccgcgttgctccaaccacgaggggaaaggccccgcgttcagggaccccgtgtgtggcgaacgctcctttaccggaaaacaaggaaggaaattcgttgttttggaaaaagcctcctctcccgaggtcgggaacatctggtggtgagctccaggtctacgcaggcaccccgtgctaggattcgtttatgagcaggcaggattcgagaaccagggccgttgccgtctgcacccagaccctgagccgccgccgccggccatggaggtggcgcccgagcagccg

SEQ ID NO: 339924 - DNA, 7106 bp, Artificial Sequence
  derived and/or modified sequence
ctccctctcctatcggagcacaatgaaagcctgtgtatcgccgtgactccgggcgcgagccagtgtcagcaaagcggctaacaacagacgagaaagagaaaggaaaatacaagctactttttttttccatctataaagcggagcaaatacaggagatagaaccagattgcttattgcgagtccagaccctcagatccactggccggggatggaatgtacaaaagtggacagaaaagtggctggacatgactcggtgcaatttgctggaagtttgtaagtttgaccatcgtttgtaaattactctcggaagagtttgtctctcttgatactgtattagaatagagccgggggtgaggaatagaaacgtaagcgggaaagaaaaaaatgtgttgaaggatctctctcagtggctagcgacttaagattgcttttcatttaaggctaggaaaccttagagggagtgaggattttaccggtgattggattagctgaagaaaaaagcatggtccaaaagtccaattactgacattgttaacagttgaaaagctgtctccctcttttgggagaagacaacatcctacagtaccccaaagaggagaaaacaccggagcgaaaggaaagggaggaaaaattaaaagccaaaagacagtctcccttgatttttgcacattttgaacagtgacttaaacatcttctgaaacagcactgttttgttttgttttggttttttatttaacctgaggaaaagtcaaggctgctggttacatagacatggtagaaatgtgtttctctgcagaaacatccccataaagaattgtcggaaacaactaggtgagggggagtcctctctattaatacctctctcaataccttttgctgtgtgtttctgtctcttgctggacaatccctgaattcttgatctaacccccagatcgtgtgtttacaaagtacctagtggctcttgtcagcttggtggaggaaaaaaaatccaccaactctgtccaacttctccagagctgtcaaatgcaattagagtaagttaatcagggtttgtttccaacttatcctccccccagttggtttctattctttctccccaccctctttttactaactcccctcccccacaacttctccacggctcccccacaacctctgaagacctctattcatgtggccctgaacactgagctcacattgtcaaaaacagacttgcctgcaatagccagcagtagcctctttccacctcaccatcccagaggcagcaatcattgtgtccggtaagatgggggacacagcgcccccgcaggcccccgcaggagggctagggggggcctctggggcggggctccttggagggggctcagtcaccccgagagtgcacagtgctatcgtggagcgcctccgggctcggatcgctgtctgccgccaacaccacctgagctgtgaaggacgatatgaacgaggtagggccgagagctcagaccgggaaagagaaagcaccttgcagctcctgagccttgtacagcatggccagggggcaaggaaagctggcaaacacaccaaggccaccgccactgctgccaccactacagcccctccaccgccccctgctgcccctcctgcggcctcccaagcagcagcaacagcagccccaccgcccccaccagactatcaccatcaccaccagcagcacctgctgaacagtagcaataatggtggcagtggtgggataaacggagagcagcagccgcccgcttcaaccccaggggaccagaggaactcagccctgattgcgctccagggttccttgaaaagaaaacaggtagttaacctatctcctgccaacagcaagcgacccaatggctttgtggacaactcatttcttgatatcaaaagaattcgtgttggggagaatctctctgcaggacaaggtggcctccaaataaacaatggacaaagtcagattatgtcagggaccttgcctatgagccaagcacccctgcgaaagactaacactctgccatcccatacacattctcctggcaatggcctgtttaacatgggcttaaaggaggtaaagaaggagccaggagagactctgtcttgcagtaagcacatggatggccaaatgacccaagagaatatttttcctaataggtacggagacgaccctggagaacaactgatggatcctgagctgcaggaactgttcaatgaactgaccaacatatctgtgcctcccatgagtgaccttgaactggagaacatgatcaatgccaccataaagcaggatgacccatttaacattgacttgggtcagcaaagccagaggagcacacctaggccctccttacccatggagaaaatagtgatcaaaagtgaatactcaccgggcttgactcagggcccctcaggctctcctcagctgaggcccccatcagctggccccgcattctccatggccaactctgccctctccacttcgtctccaatcccttcagtccctcagagccaggctcagcctcagacaggctccggagcaagccgggccttgccaagctggcaggaagtatcccatgcccagcagctcaaacagatagctgctaatcgtcagcagcatgcccggatgcagcagcaccagcagcagcaccagcctaccaactggtcagccttgccctcttctgctggaccatcaccaggtccatttgggcaggagaaaatccccagcccttcttttggtcagcagacattcagcccacagagctcccccatgcctggggtagctggcggcagcggccagtcgaaagtaatggctaactacatgtacaaggccggcccctcagcccagggtgggcacctagatgtcctcatgcagcaaaagcctcaggatctcagtcgaagttttattaacaacccgcacccagccatggagccccgtcagggcaacaccaagcctttgtttcattttaactcagatcaagcgaaccagcagatgccttctgttttgccttcccagaacaagccttctctcctacactacacccaacagcaacagcagcaacagcagcagcagcagcagcagcagcagcagcagcagcagcaacagcagcagcagcagcaacagcaacagcaacagcaacagcagagttcaatttcagctcaacaacagcaacagcagcagagctcaatttcagcccaacagcagcagcagcagcaacaacagcagcagcagcagcaacaacaacagcaacaacagcagcagcagcagcagcaacaaccatcttctcagcctgcccaatctctaccaagccagcctttgctaaggtcacctttgccacttcagcaaaagctcctacttcagcaaatgcagaatcagcccattgcaggaatgggataccaagtctcccaacaacagagacaggatcaacactctgtggtaggccagaacacaggccccagtccaagtcctaacccctgctcaaatccaaacactggaagtggttacatgaactcccagcaatcactgttgaatcagcaattgatgggaaagaagcagactctacagaggcagatcatggagcagaaacagcaacttcttctccagcagcagatgctggctgacgcggagaaaattgctccacaagatcagataaaccgacatttgtcaaggccacctccagattataaagaccaaagaagaaatgtgggcaatatgcaaccaactgctcagtattctggtggctcatccacaataagcttaaactctaaccaggctttggcaaacccagtttcaacacacaccattttaactcccaattccagcctcctgtctacttctcacgggacaagaatgccatcattatctacagcagttcagaatatggggatgtatggaaatctgccttgtaatcaacctaacacatacagtgtcacttcaggaatgaatcaattgacccaacagagaaacccaaagcaattgttagcaaatcaaaacaaccctatgatgccacggccacctaccttagggccaagtaataataacaatgtagccacttttggagctggatctgttggtaattcacaacaattgagaccaaatttaacccatagtatggcaagcatgccaccacagagaacatcaaacgtaatgatcacatccaacacaactgcaccaaactgggcctctcaagaaggaacaagcaaacagcaagaagccctgacgtctgcaggagtccgcttccccacaggtacacctgcagcctataccccaaatcagtcactgcaacaggcagtaggtagccagcaattttcccagagggcagtggctcctcctaaccagttaacaccagcagtgcaaatgagacccatgaaccaaatgagccaaacactaaatgggcaaaccatgggtcccctcaggggtctgaatctcagacccaatcagctaagcacacagattttgcctaatttgaatcagtcaggaacagggttgaatcagtcgaggacgggcatcaaccagccaccatccctgacgcccagcaattttccttcacccaaccaaagttccagggcttttcaaggaactgaccacagcagtgacttagcttttgacttcctcagccaacaaaatgataacatgggccctgccctaaacagtgatgctgatttcattgattctttattgaagacagagcctggtaatgatgactggatgaaagacatcaatcttgatgaaatcttggggaacaattcctaaagaagaaagggaagacaatttacaaactccaagcactaaaaggcagtatattacagaaactctgtagaggctgaactgttgatgttcaggtggactacatgaagataacatgcttaaaaatggaaagcagaaagtaactgcagtgatgaacattttggtccaaattcttgttttaaatcttacacctgaaagtaaaatattgggatcacttttccctgtctaaactccaggatacagtatccaatttatccaaacagaactgtggtgtcaatgtgtaattaattgtgtaaaatagccttcccaagtttctttttccctggaaaataaaaaaggtaatagaacttgtagtttatttaaaccccatgtcatgaggaggtactagttccaagcaacaaactccttaatttgctctaatagataggtatggtttaatctttccattgtgtcttttcatttaattttcctgaagcttgcaggatagattgaaatgttataggtttgtttggagtaaccaaacagtatgcaaattaagaaaaagccagagaacctagaaaacatccagtggattacagaatttcttccccatattcactcctcacttttacaattttcccacaatcctctacttcagtgggatgctgtgtctagtgattaaacaaaaatatagagctgtgcaatttgattttggcttccacaacgaatatctgaatccattccaaatgaaattttagatataacaaagacttgtcctaatcatactgaaatattggtgcacacctctctgcattagatttcacttttttaaaaaacccagtggacattgctataaataagatttatttggctacaaataacctgggatgttgcttattatgattgatgcctgctggtttgttcccaagctgagtgaaattgaacctcgtcctccctactcattttgatgactgaggctggtttataagaaaaggaagtttggagaagaaaaccgagattagaaaatatcatgttttggttggagataagaaccagggatggcaagtaccagtgtgtacaaatgtatttcacggagtttgaaggaacgcataatcaagagggaaaacaatttgtccttcattggacgtattatttggatttgggtgagcaacaaaatggaatgtggtctgttaggagcattctgtttgttcttttgtccctgatgtgatgaatcattgccacatgctagatggactcttcatatccaggttttgtccctcagggctgagcactgtattaaagagtttttgttgagtcatttaaccttagtgtccacatccagatcagctgtaaaatggggaagacgtgtgctgatttggaatgaatgcaaaatatcactatcattttcctaattacagaggagcaaaggttatcttcagccctttcagttctatgctcacatattcaaatatcaaatgtaatttagctgaagttatttaataatcaagtctttcaatatctgttcaaagaaaaagaacacactttgaaaattctgcaaagctgtctcccagtctttaaaatgtctggaagcactctccttctttacaataccaacatcactggcccagaatcttccctgtgctagtttgtaaatataaataaattacttgttttgtaaacttttgtaaagaatattttggtagaaatacttcaaacatattctttgggttatatttatacatatgtgaaataaatatactatcaaaaggttatattttatacaaaaagtaaattgctaccttttgtatgctaatatgcaaagttttgtataatatgatggtttatttttagctctacacttaaaccataggtggttgagtgggaacttttgaaaactatcaagaggcttgttagacaaatttatattctgaaacctcaataagaaagcattccaggtttcaatccttgttttttgtcctgctcccaaattcttttttaaacccatagttcttgtgtcttatttgattcttctgctgtgcacattgtattggtccttgttgcatgtagtctactgtgtgttttccgattttataaggcagcatttctccatacaaaaagaaaaaaaatgatgtacatataaacgcttttgttgtatggctcctccatgttactgtatatatctgccagcacttcccagttacactcctgtgagtcagcttatttttaccctaacataaatagtatgttttgtagtagttatcaaatttaagagataaagcaatcagaatgtttggattttcttctatcttaatgtgaatttcataattaatgtctatttattcagctattcattaaaatacaggattctttgggaaaa

SEQ ID NO: 339925 - protein, 766 aa, Artificial Sequence
  derived and/or modified sequence
MKPFQLDLLFVCFFLFSQELGLQKRGCCLVLGYMAKDKFRRMNEGQVYSFSQQPQDQVVVSGQPVTLLCAIPEYDGFVLWIKDGLALGVGRDLSSYPQYLVVGNHLSGEHHLKILRAELQDDAVYECQAIQAAIRSRPARLTVLVPPDDPVILGGPVISLRAGDPLNLTCHADNAKPAASIIWLRKGEVINGATYSKTLLRDGKRESIVSTLFISPGDVENGQSIVCRATNKAIPGGKETSVTIDIQHPPLVNLSVEPQPVLEDNVVTFHCSAKANPAVTQYRWAKRGQIIKEASGEVYRTTVDYTYFSEPVSCEVTNALGSTNLSRTVDVYFGPRMTTEPQSLLVDLGSDAIFSCAWTGNPSLTIVWMKRGSGVVLSNEKTLTLKSVRQEDAGKYVCRAVVPRVGAGEREVTLTVNGPPIISSTQTQHALHGEKGQIKCFIRSTPPPDRIAWSWKENVLESGTSGRYTVETISTEEGVISTLTISNIVRADFQTIYNCTAWNSFGSDTEIIRLKEQESVPMAVIIGVAVGAGVAFLVLMATIVAFCCARSQRNLKGVVSAKNDIRVEIVHKEPASGREGEEHSTIKQLMMDRGEFQQDSVLKQLEVLKEEEKEFQNLKDPTNGYYSVNTFKEHHSTPTISLSSCQPDLRPAGKQRVPTGMSFTNIYSTLSGQGRLYDYGQRFVLGMGSSSIELCEREFQRGSLSDSSSFLDTQCDSSVSSSGKQDGYVQFDKASKASASSSHHSQSSSQNSDPSRPLQRRMQTHV

SEQ ID NO: 339926 - DNA, 2301 bp, Artificial Sequence
  derived and/or modified sequence
atgaaaccgtttcagctggacctcttatttgtgtgtttctttctcttcagccaggaactgggactccaaaaacggggctgttgtcttgtgctagggtacatggcaaaggataaatttcgacgaatgaacgaaggacaggtctacagcttttctcagcaaccacaggatcaagtagtcgttagcggccagccagttaccctcctctgtgctatccctgagtatgacggcttcgtgctgtggattaaagacggcctggctctgggcgtgggacgtgacctgtcttcttatccgcaatacttagtcgtggggaatcatctatctggcgagcaccatctcaagatcctgcgtgccgagctgcaggacgacgcagtgtacgaatgccaagccattcaggcagccattagatcgcgccccgctcgactgactgtgctggttcctcccgacgaccccgtgatactgggcgggcctgttatctccttacgggcaggagatccgctcaatctcacctgtcatgccgataacgccaaaccggctgccagtatcatctggctgcggaagggtgaggtgatcaacggcgccacttactcgaagaccctgcttagagacgggaaacgcgagagtatcgtatccaccttatttatcagtccaggggatgtggaaaatggtcagagcatagtctgccgtgcgacaaacaaagctatccctggcggcaaggagacaagcgtgaccatcgatatccaacatcccccccttgtgaatctttcggtcgaaccccagcccgttctcgaggataatgttgtgactttccactgttcagcaaaagccaatcctgccgtgacgcaatacaggtgggcaaagagggggcagattattaaagaggcctctggcgaagtatataggactaccgtggactacacctactttagcgagcctgtgagctgcgaggtgacgaacgctttgggatcaactaatctctcaaggacagtggacgtctatttcggtccacggatgaccactgaaccccagagcctgctagttgatctgggttctgacgccatcttctcgtgtgcctggacaggaaatccaagtttgactatcgtgtggatgaaaagaggttctggcgtggtgctgagtaatgagaaaaccttgaccctaaaatctgtaagacaggaggatgcaggcaaatatgtgtgcagggcggtggtgccccgagtgggagcaggagaaagggaggttactcttactgtgaacggaccccctatcatttcaagcactcagacacagcatgcacttcatggagaaaaaggacagatcaagtgttttatccgctccacacccccgcctgacaggattgcctggtcatggaaggaaaacgtattggaatcaggcacatccggacggtacaccgtggagaccatctccactgaggagggcgtcatctcaacgttgacgattagcaatattgtgagagcagattttcaaactatctacaactgtacggcatggaacagctttggatcagacacagaaatcattcgcctcaaggaacaggaaagcgttccaatggcggttattattggagttgctgtaggggctggcgtcgctttcttggtgttgatggcaacgatagtcgccttctgttgcgctaggtctcaaaggaacttaaaaggagtggtctccgccaagaacgatatacgcgtcgaaatcgtccacaaagagcccgcctccggacgtgaaggagaagagcatagtaccatcaagcagctgatgatggacaggggggaattccagcaggacagcgtgctgaagcaacttgaagtcttgaaggaggaggaaaaagaattccagaatcttaaagacccgaccaacggatactactccgtgaacacgttcaaagagcaccactcaaccccaacaatcagtctgtccagctgtcagccagaccttcgtccagctggaaagcagagggtgcccacagggatgtccttcactaacatttattctacactctccggccaggggaggctctatgattatggtcagcggtttgtgctcgggatgggctcaagctctattgagctgtgcgagagagaattccagcggggcagcctgtctgactcatccagcttcttagatactcaatgtgattccagtgtgtcctcctcgggcaaacaggacggttatgtgcagttcgacaaagcttccaaggccagcgccagctccagtcaccactcccaatcaagcagccaaaactcagacccctcacgccccttgcagaggagaatgcagacgcatgtgtag

SEQ ID NO: 339927 - DNA, 1333 bp, Artificial Sequence
  derived and/or modified sequence
tctcaacaggaccccccatcatctccagcacccagacccagcacgccctccacggcgagaagggccagatcaagtgcttcatccggagcacgccgccgccggaccgcatcgcctggtcctggaaggagaacgttctggagtcgggcacatcggggcgctatacggtggagaccatcagcaccgaggagggcgtcatctccaccctgaccatcagcaacatcgtgcgggccgacttccagaccatctacaactgcacggcctggaacagcttcggctccgacactgagatcatccggctcaaggagcaagagtctgtgccgatggccgtcatcattggggtggccgtaggagctggtgtggccttcctcgtccttatggcaaccatcgtggcgttctgctgtgcccgttcccagagaaatctcaaaggtgttgtgtcagccaaaaatgatatccgagtggaaattgtccacaaggaaccagcctctggtcgggagggtgaggagcactccaccatcaagcagctgatgatggaccggggtgaattccagcaagactcagtcctgaaacagctggaggtcctcaaagaagaggagaaagagtttcagaacctgaaggaccccaccaatggctactacagcgtcaacaccttcaaagagcaccactcaaccccgaccatctccctctccagctgccagcccgacctgcgtcctgcgggcaagcagcgtgtgcccacaggcatgtccttcaccaacatctacagcaccctgagcggccagggccgcctctacgactacgggcagcggtttgtgctgggcatgggcagctcgtccatcgagctttgtgagcgggagttccagagaggctccctcagcgacagcagctccttcctggacacgcagtgtgacagcagcgtcagcagcagcggcaagcaggatggctatgtgcagttcgacaaggccagcaaggcttctgcttcctcctcccaccactcccagtcctcgtcccagaactctgaccccagtcgacccctgcagcggcggatgcagactcacgtctaaggatcacacaccgcgggtggggacgggccagggaagaggtcagggcacgttctggttgtccagggacgaggggtactttgcagaggacaccagaattggccacttccaggacagcctcccagcgcctctgccactgccttccttcgaagctctgatcaagcacaaatctgggtccccaggtgctgtgtgccagaggtgggcgggtggggagacagacagaggctgcggctgagtgcgctgtgcttagtgctggacacccgtgtccccggcccttt

SEQ ID NO: 339928 - DNA, 3397 bp, Artificial Sequence
  derived and/or modified sequence
tgcgctaaggaatgaaacccttccagctcgatctgctcttcgtctgcttcttcctcttcagtcaagagctgggcctccagaagagaggatgctgtctggtgctgggctacatggccaaggacaagtttcggagaatgaatgaaggccaagtctattccttcagccagcagccccaggaccaggtggtggtgtcgggacagccagtgacgctactttgcgccatccccgaatacgatggcttcgttctgtggatcaaggacggcttggctctgggtgtgggcagggacctctcaagttacccacagtacctggtggtagggaaccacctgtcaggggagcaccacctgaagatcctgagggcagagctgcaagacgatgcggtgtacgagtgccaggccatccaggccgccatccgctcccgccccgcacgcctcacagtcctggtgccgcctgatgaccccgtcatcctggggggccctgtgatcagcctgcgtgcgggggaccctctcaacctcacctgccacgcagacaatgccaagcctgcagcctccatcatctggttgcgaaagggagaggtcatcaatggggccacctactccaagaccctgcttcgggacggcaagcgggagagcatcgtcagcaccctcttcatctcccctggtgacgtggagaatggccagagcatcgtgtgtcgtgccaccaacaaagccatccccggaggaaaggagacgtcggtcaccattgacatccagcaccctccactggtcaacctctcggtggagccacagccagtgctggaggacaacgtcgtcactttccactgctctgcaaaggccaacccagctgtcacccagtacaggtgggccaagcggggccagatcatcaaggaggcatctggagaggtgtacaggaccacagtggactacacgtacttctcagagcccgtctcctgtgaggtgaccaacgccctgggcagcaccaacctcagccgcacggttgacgtctactttgggccccggatgaccacagaaccccaatccttgctcgtggatctgggctctgatgccatcttcagctgcgcctggaccggcaacccatccctgaccatcgtctggatgaagcggggctccggagtggtcctgagcaatgagaagaccctgaccctcaaatccgtgcgccaggaggacgcgggcaagtacgtgtgccgggctgtggtgccccgtgtgggagccggggagagagaggtgaccctgaccgtcaatggaccccccatcatctccagcacccagacccagcacgccctccacggcgagaagggccagatcaagtgcttcatccggagcacgccgccgccggaccgcatcgcctggtcctggaaggagaacgttctggagtcgggcacatcggggcgctatacggtggagaccatcagcaccgaggagggcgtcatctccaccctgaccatcagcaacatcgtgcgggccgacttccagaccatctacaactgcacggcctggaacagcttcggctccgacactgagatcatccggctcaaggagcaagagtctgtgccgatggccgtcatcattggggtggccgtaggagctggtgtggccttcctcgtccttatggcaaccatcgtggcgttctgctgtgcccgttcccagagaaatctcaaaggtgttgtgtcagccaaaaatgatatccgagtggaaattgtccacaaggaaccagcctctggtcgggagggtgaggagcactccaccatcaagcagctgatgatggaccggggtgaattccagcaagactcagtcctgaaacagctggaggtcctcaaagaagaggagaaagagtttcagaacctgaaggaccccaccaatggctactacagcgtcaacaccttcaaagagcaccactcaaccccgaccatctccctctccagctgccagcccgacctgcgtcctgcgggcaagcagcgtgtgcccacaggcatgtccttcaccaacatctacagcaccctgagcggccagggccgcctctacgactacgggcagcggtttgtgctgggcatgggcagctcgtccatcgagctttgtgagcgggagttccagagaggctccctcagcgacagcagctccttcctggacacgcagtgtgacagcagcgtcagcagcagcggcaagcaggatggctatgtgcagttcgacaaggccagcaaggcttctgcttcctcctcccaccactcccagtcctcgtcccagaactctgaccccagtcgacccctgcagcggcggatgcagactcacgtctaaggatcacacaccgcgggtggggacgggccagggaagaggtcagggcacgttctggttgtccagggacgaggggtactttgcagaggacaccagaattggccacttccaggacagcctcccagcgcctctgccactgccttccttcgaagctctgatcaagcacaaatctgggtccccaggtgctgtgtgccagaggtgggcgggtggggagacagacagaggctgcggctgagtgcgctgtgcttagtgctggacacccgtgtccccggccctttcctggaggcccctctaccacctgctctgcccacaggcacaagtggcagctataactctgctttcatgaaactgcggtccactctctggtctctctgtgggctctacccctcgctgaccagaagctctacctacccctgtgcctgtgctcccatacagccctggggagaaggggatgacgtcttcccagcactgagctgccccagaaaccccggctccccactgctgctcatagcccataccctggaggctgacaagccagaaatggccttggctaaaggagcctctctctcaccaggctggccgggagcccacccccaatttgtttggtgttttgtgtccatactcttgcagttctgtccttggacttgatgccgctgaactctgcggtgggaccggtccggtcagagcctggtgtactggggggagggagggaggagggagcctgtgctgacggagcacctcgccgggtgtgcccctcctgggctgtgtgaccccagcctccccacccacctcctgctttgtgtactcctcccctccccctcagcacaatcggagttcatataagaagtgcgggagcttctctggtcagggttctctgaacacttatggagagagtgcttcctgggaagtgtggcgtttgaaggggctggagggcaggtctttaagatggcgagactgcccttctcagctgataaacacaagaacggcgatcctgtcttcagtaaggctccacgagaagagaggaagtatatctacacctcaaccctcctagtcaccacctgaaataaatgttagggacactactccaa

SEQ ID NO: 339929 - DNA, 2301 bp, Artificial Sequence
  derived and/or modified sequence
atgaagcccttccagctggacctgctgtttgtgtgcttcttcctgttcagccaggagctgggcctgcagaagaggggctgctgcctggtgctgggctacatggccaaggacaagttccggaggatgaatgaaggccaggtgtacagcttcagccagcagccccaggaccaggtggtggtgtctggccagcctgtgaccctgctgtgtgccatcccagaatatgatggctttgtgctgtggatcaaggatggcctggccctgggcgtgggccgggacctgagcagctacccccagtacctggtggtgggcaaccacctgtctggagagcaccacctgaagatcctgcgggcagagctgcaggatgatgctgtgtatgagtgccaggccatccaggccgccatccgcagcaggcctgcccggctgactgtgctggtgcccccagatgaccccgtcatcctgggcggccctgtgatcagcctgcgggccggggaccccctgaacctgacctgccacgccgacaatgccaagccagctgccagcatcatctggctgaggaagggggaggtgatcaatggagccacctacagcaagaccctgctgagagatggcaagcgggagagcatcgtgtccaccctcttcatcagccctggagatgtggagaatggccagagcatcgtgtgccgggccaccaacaaggccatccctgggggcaaggagacctctgtgaccatcgacatccagcacccccccctggtgaacctgtctgtggagccccagcctgtgctggaggacaacgtggtgaccttccactgcagcgccaaggccaacccagctgtgacccagtaccgctgggccaagaggggccagatcatcaaggaggccagcggggaggtgtaccgcaccaccgtggactacacctacttcagcgagcctgtgtcctgtgaggtgaccaatgccctgggcagcaccaacctgagcaggacagtggatgtgtacttcggccccaggatgaccacagagccccagagcctgctggtggacctgggcagtgatgccatcttcagctgtgcctggacaggcaaccccagcctgaccatcgtgtggatgaagaggggcagcggcgtggtgctgagcaatgagaagaccctgaccctgaagtctgtgcggcaggaggatgctgggaagtatgtgtgcagagctgtggtgccccgggtgggcgctggggagcgggaggtgaccctgactgtgaatggaccacccatcatcagcagcacccagacccagcacgccctgcacggggagaagggccagatcaagtgcttcatccgcagcaccccacctccagacagaattgcctggagctggaaggaaaatgtgctggagagcggcaccagcggccgctacacagtggagaccatcagcacagaggagggcgtcatcagcaccctgaccatcagcaacatcgtgcgggctgacttccagaccatctacaactgcacagcctggaacagctttggaagtgacacagagatcatccggctgaaggagcaggagagcgtgcccatggctgtgatcatcggcgtggccgtgggcgctggggtggccttcctggtgctgatggccaccatcgtggccttctgctgtgcccggagccagaggaacctgaagggcgtggtgtctgccaagaatgacatccgggtggagatcgtgcacaaggagcccgccagcggccgggagggggaggagcacagcaccatcaagcagctgatgatggacagaggagagttccagcaggacagcgtgctgaagcagctggaggtgctgaaggaggaggagaaggagttccagaacctgaaggaccccaccaacggctactacagcgtgaacaccttcaaggagcaccacagcacccccaccatcagcctgagcagctgccagcctgacctgcggcctgctgggaagcagagggtgcccaccggcatgtccttcaccaacatctacagcaccctgagcggccagggccgcctgtatgactatggccagagatttgtgctgggcatgggcagcagcagcattgagctgtgtgagcgggagttccagaggggcagcctgagtgacagcagcagcttcctggacacccagtgtgacagctctgtgagcagcagcggcaagcaggacggctacgtgcagtttgacaaggccagcaaggccagcgccagcagcagccaccacagccagagcagcagccagaacagcgaccccagccggcccctgcagaggaggatgcagacccacgtgtag

SEQ ID NO: 339930 - DNA, 2301 bp, Artificial Sequence
  derived and/or modified sequence
atgaagcccttccagctggacctgctgttcgtgtgcttcttcctgtttagccaggaactgggactgcagaagcgaggatgttgcctagtcttaggatacatggctaaggacaaattccgacgtatgaatgagggccaagtctactccttttcccaacagccccaggaccaggtggtggtgtctggacaacctgtgaccctgctttgcgccatccctgagtatgatggcttcgtcctgtggatcaaagatggcctggctctgggagttgggagggatttgagctcctacccccagtacctcgtggtgggtaatcacctgtctggggaacatcatctgaagattttgcgtgctgagctgcaagatgatgcagtctatgaatgccaggccatccaagccgcgattcgatcacggcccgctaggctgaccgtcctagtgccccctgatgaccccgtgatcctcggggggcctgtgattagcctgcgtgccggcgacccactcaatttgacatgtcacgcagacaacgcaaagcctgcagcctccataatctggctccgcaagggtgaagtcataaatggcgccacctattctaaaactctactaagggacggcaagagagaaagtattgttagcaccctcttcatcagcccgggggatgtcgagaacgggcagtctattgtgtgcagggccaccaacaaggctatccccggcggcaaagagacgtccgtgacaattgatatacagcatccacccttggttaacctcagcgtggagcctcaacctgtgttggaagataacgtggtgaccttccactgctcagcaaaggcaaaccctgcggtgacccagtaccgatgggctaagcgtggtcagattattaaggaggccagcggtgaagtctatagaaccacggtagattatacgtacttttctgaaccagtcagctgtgaagtgactaacgctttgggctccactaatctttcccggaccgttgatgtttattttggacccagaatgactaccgaaccccaatccctgcttgtggatctgggatcggacgctattttcagttgcgcttggactggcaacccaagtctcaccattgtgtggatgaaacgcgggtccggagttgtgctcagcaacgaaaagaccttaactctaaaatctgtgagacaggaggatgcaggcaaatatgtttgtcgggcagtggtgccccgtgtgggcgcaggggagagggaggttactctgacagtgaatggcccgcccattatctctagcactcagacccaacatgccctccacggagaaaagggacaaatcaagtgttttatccggagcacccccccaccggatcgcattgcctggtcttggaaggagaacgtgcttgagtctgggacttcaggacggtacactgtggaaactatctcaactgaggagggggtcataagcaccctgactatcagcaacatagtgagagcggacttccagacgatatacaattgtaccgcctggaattccttcggctccgacactgagataattcgacttaaggaacaggagtctgtccccatggccgtcatcattggagtagcagtgggagctggggtcgcctttttggtgctgatggcgactatcgtggcattttgttgtgccaggtcacagagaaatttgaagggagtggtatccgccaagaatgatatccgggtcgagattgtgcataaggaacccgcctctggtagggagggagaggagcacagcacaatcaaacagctgatgatggataggggggaattccaacaggacagtgtactgaagcagctggaggtcctcaaggaggaggagaaggaatttcagaacctcaaggaccccacaaatgggtattatagcgtgaacaccttcaaggaacatcacagtactccgacaatttccctgtcctcttgtcagcctgacctgagacctgctgggaaacagcgagttcccactggtatgtcatttactaatatttactcgactttgtccggacaagggagactgtacgattatgggcagaggttcgttcttggcatgggttccagctcaattgaactgtgcgagcgagagtttcaacgcgggtcactgtccgactcctcctctttcctcgacacacagtgcgactcgtctgtgtccagcagcggcaagcaggacggttatgtccagtttgacaaagcctctaaagccagcgcatcctctagccatcactctcagagcagttctcagaactctgacccatcaagacccttgcagaggcgcatgcaaacacatgtgtag

SEQ ID NO: 339931 - DNA, 2301 bp, Artificial Sequence
  derived and/or modified sequence
atgaagccctttcagttagatctccttttcgtgtgttttttcctcttttcgcaggagctgggtcttcaaaagagaggatgctgtctggtgctgggttacatggcgaaggacaagttccgtagaatgaatgaaggccaggtgtattcctttagtcaacagccccaggaccaggtggtcgtgagcgggcaacctgtgactttactctgcgcaatccctgaatacgatggcttcgtgctttggatcaaagacggtcttgctctgggggtaggtagagacctatcctcttatccgcagtacctcgtggttggtaaccacctatctggagaacaccacctgaaaattttaagagccgaactgcaggacgacgcagtgtatgagtgtcaggctattcaggctgctattaggtcccgcccagcgaggctgacagtgctcgtgccaccagatgatcctgtgatactcggaggcccagttattagcctgcgggcaggagatccgttaaacctcacatgtcatgctgacaatgctaagcccgctgctagcattatctggctgaggaaaggtgaggtcatcaacggtgcaacctatagcaagacactcctcagagacggcaagagagaatccatagtctctactctgttcataagtccaggtgacgtggagaatgggcagtcaatagtctgtagggctacaaataaggctatacccggaggaaaagagactagcgtcacaatcgatattcaacatcccccactggttaatctgagcgtggagccccagcccgtactcgaggataacgtggtgacattccattgtagtgcaaaagctaaccccgctgtgacacagtatcgatgggccaagcgaggacagatcatcaaagaggcttcaggggaggtctatcggaccacagttgactacacatatttctctgaaccagtgagctgtgaagttaccaacgcactgggctcaaccaacctgagccgaacagtggatgtctactttgggcctcggatgacaactgagccccagtctttgcttgtcgatctgggctctgacgccattttctcctgcgcctggactggaaacccatctttgacaatcgtgtggatgaagaggggcagcggggtcgtgctatccaatgagaagactctgactctgaagtcagtgcggcaggaggacgctggcaagtatgtctgcagggcagtagttccccgtgtcggcgcaggagaaagagaggttaccctaacagtaaacggtccacccattatatcctctactcaaacacagcacgcattgcatggcgagaagggccagattaaatgttttattcgctccacccctcctccagacagaatcgcatggagctggaaggagaatgtactggagagcgggaccagcggaagatacacagtcgaaaccattagcaccgaagagggcgtgatctcaacgctgaccataagcaatattgtgcgggcagattttcagacaatctacaattgcaccgcatggaatagctttggatccgatacagagatcattcgtctcaaagaacaggagtctgtcccaatggcagtgataatcggggtggccgtaggggcaggcgtggccttcctcgtgctcatggcgaccatcgtcgcattctgctgtgccaggtcccaaagaaatcttaagggggtggtgagcgcaaaaaacgatattcgggtcgagatagtccacaaggagccagcgtccggtagagaaggcgaagagcacagcaccattaagcaacttatgatggaccgaggagaatttcagcaggacagcgtgcttaagcagctggaggttctgaaggaagaggagaaggaattccagaaccttaaagatccaaccaatggatattactctgtgaatacatttaaagagcatcacagtactccaaccattagtttgtcatcctgccagcctgatctgcgccctgccggaaagcagcgggtccccacaggcatgtcatttaccaacatctactccacgctctccggacaggggaggctctatgactacggacagcgctttgtgctcggcatggggtcctcctcaatcgaattatgcgagagggaatttcagagaggctccctgtcggactcttcctcttttctggatacacaatgtgacagtagcgtgagctcctccggaaaacaagatggatatgtgcagtttgacaaagccagcaaggcatccgcatcctcaagccatcattcccaatcaagtagccaaaattcagaccccagccggcctctccagcgtcggatgcagactcatgtttag

SEQ ID NO: 339932 - DNA, 2301 bp, Artificial Sequence
  derived and/or modified sequence
atgaagcccttccagctagatcttctgttcgtatgcttcttcctcttctctcaggaactggggctgcagaaacgggggtgttgcctcgtcttaggatacatggctaaagacaagtttcgacggatgaatgaaggtcaggtatacagtttttcccaacaaccacaggaccaggtggtcgtgtcaggacagcccgttaccctgctctgcgccatcccagagtacgacggttttgtactgtggattaaggacggtttagcactaggggtggggagggacctctcatcctaccctcaatatctggtcgtaggaaaccacctatctggagagcatcacctaaagatcctccgggcagagcttcaggatgatgccgtatatgaatgccaggccatccaggccgctatccggtctcgacccgctaggttgactgtgctcgtgccacccgacgatcccgttattctcggcggccctgttataagtctccgcgccggggacccactgaacctaacctgccatgcggataatgccaagccggccgctagtattatctggttacgaaagggagaagtgattaacggagctacgtactctaaaaccttgctcagggatggaaagagggagtctatcgtcagtacactttttatctcccctggtgacgtcgagaatggtcagagcattgtttgccgcgccaccaataaagcaattccgggaggcaaggaaacttcggttactatcgacatccaacatccaccactcgtgaatctgtctgtagaaccacagcccgtgcttgaagacaacgttgtgactttccattgttctgccaaagcaaaccccgctgtaacccagtacagatgggcaaagaggggacagattataaaagaagcttctggtgaggtctacaggacaacagtggattacacatatttttctgaacccgtgtcgtgcgaagtgactaatgcgctcggtagcactaatttatctaggaccgtggacgtttattttggtcctagaatgacaaccgagccgcagtccctccttgtggatctgggaagtgatgctatattcagttgcgcctggactggtaatcctagcctcaccattgtttggatgaagcgaggaagcggcgtagttctctctaacgaaaaaactctgactctgaagtctgtgaggcaggaagacgcaggcaaatatgtttgtcgcgcagtggtccctcgtgtgggtgcaggagagagagaagttaccctgaccgtgaatgggccgcccattatcagcagtacccaaacccaacatgcgctgcatggtgagaaaggtcagattaagtgcttcattaggtcaaccccgccccccgacaggattgcttggagctggaaagagaacgtgctggaatccggaacgagtgggaggtacaccgttgagaccattagtacggaagagggtgtcatcagtaccctcaccatttccaacatagtcagggctgatttccagaccatctacaactgcacggcttggaattctttcggctcagacacagaaatcataagactcaaggagcaggaaagtgtccccatggccgttatcattggcgtggctgtaggcgctggggtggccttcttagtgttgatggcgaccatagtggccttctgttgcgcgcggtcacaacggaatctgaagggagtggtgtcagcgaaaaacgatatcagagtggaaatcgtgcacaaggagccagcttctgggagagagggtgaggaacattctacaatcaagcaactgatgatggatcgcggtgagttccagcaagacagcgtgcttaagcaactggaagtgttaaaagaagaggagaaagagttccagaatttgaaagacccgactaacggctattattctgtaaacaccttcaaggaacaccattcgacacctacgatctctctgagtagctgtcagccagatctgaggccggctggaaagcagcgagtgccaacgggaatgtccttcaccaatatctacagtacactgtccgggcaaggtagactctatgactatgggcaaagattcgtgcttggcatgggcagttcatctattgagttatgcgaacgcgagttccagcgaggcagtttgagcgatagcagttctttcctggacacgcagtgtgattcctccgtttccagttctggtaaacaagatgggtatgttcagttcgataaagccagcaaggcctcagcctcctcttctcatcacagccagtcaagcagtcagaattctgaccccagccgacctcttcaacggcggatgcagacacatgtgtag

SEQ ID NO: 339933 - DNA, 2301 bp, Artificial Sequence
  derived and/or modified sequence
atgaaaccttttcagctggacctactcttcgtttgtttcttcctcttctcgcaggaactaggactccagaagcggggttgttgtctcgtgctggggtacatggccaaggataagttccggagaatgaatgaaggtcaggtttactctttttcccaacaacctcaggatcaggttgtggtttccggacagcccgtgaccctgctttgcgccatacccgaatatgacggcttcgtattatggataaaagatggactggctctcggcgtggggagagacttaagttcatatccacagtacctcgtggttggaaaccatttgagcggagagcaccatttgaagattttacgcgccgagctgcaagacgacgctgtgtacgaatgtcaggcgatacaggccgctattcggtctagacccgcccgactgacagttctggtcccccctgacgatcccgtgatactgggcggccctgtcatttccttgcgagcaggagatccgctaaatctcacgtgccacgccgacaacgcaaagcctgccgcctcaattatttggttaaggaaaggcgaagtgattaatggagcaacatattcaaagaccttgctgcgcgatggtaagcgcgagagcatagtatcaaccctattcatctcacccggagacgtcgagaatggacagagcatcgtgtgtagggcaacaaataaagccatcccgggcggaaaagagacatctgttacaatcgacattcagcaccccccgcttgtgaacctctctgtcgagccccagcccgtgctagaagacaatgtcgtgactttccactgttctgctaaagcgaaccccgcagtgactcagtatcgatgggccaaacgcggtcaaatcattaaggaagcaagcggcgaagtgtaccgcacaaccgtcgactacacatatttctcggaacccgtgagttgcgaagttaccaacgctttaggatcaacaaacctctctcggacagtggatgtgtactttgggccaaggatgacaactgagccacagtccctgcttgtagacctgggatcagatgctatattcagttgtgcgtggacgggaaatccttctttgactatcgtgtggatgaagagagggtctggcgtcgtgctgtcaaacgagaaaacactaacgcttaagtctgttagacaagaggacgccggcaaatacgtgtgcagagcagtagttcctagagtcggtgcaggcgagcgcgaggtcacactaaccgttaacggaccccctatcatctcatccacccagacacagcatgcgctgcacggggaaaaaggtcaaattaaatgctttattagatcgacaccaccacccgacagaatcgcttggagctggaaagagaatgtcttggagagcgggactagcgggagatacactgtggagacaatctcaaccgaggaaggcgtgatatcaacactgactatttcaaatattgtgagggccgacttccaaactatatataactgcaccgcttggaacagtttcggttcggacactgaaataattcggttgaaagaacaagaaagtgtaccaatggcagtgattatcggtgttgcagtgggagctggcgtggccttcttagtgctgatggcaaccattgtcgctttttgctgtgcgcgctcgcaacgaaacttgaagggtgttgtctcagcgaaaaacgatatacgagtcgaaatagtgcacaaggagccagccagtgggagggaaggagaagagcatagtacgattaaacagctgatgatggatcgcggggagtttcagcaggattccgtgcttaagcaactggaagtgttaaaagaagaggagaaagagttccagaatttgaaagacccgactaacggctattattctgtaaacaccttcaaggaacaccattcgacacctacgatctctctgagtagctgtcagccagatctgaggccggctggaaagcagcgagtgccaacgggaatgtccttcaccaatatctacagtacactgtccgggcaaggtagactctatgactatgggcaaagattcgtgcttggcatgggcagttcatctattgagttatgcgaacgcgagttccagaggggctccctgagcgattcctcaagctttttagatacacagtgcgattcatccgtctctagttctggaaagcaggacggatatgttcaatttgataaagccagtaaggcatcagcaagtagtagtcaccattcccaaagcagctctcagaattcagatccatcccgacccttacaacgacgcatgcagactcacgtctag

SEQ ID NO: 339934 - DNA, 2301 bp, Artificial Sequence
  derived and/or modified sequence
atgaagcccttccagctggacctgctgttcgtgtgcttcttcctgttcagccaggagctgggcctgcagaagagaggctgctgcctggtgctgggctacatggccaaggacaagttcagaagaatgaacgagggccaggtgtacagcttcagccagcagccccaggaccaggtggtggtgagcggccagcccgtgaccctgctgtgcgccatccccgagtacgacggcttcgtgctgtggatcaaggacggcctggccctgggcgtgggcagagacctgagcagctacccccagtacctggtggtgggcaaccacctgagcggcgagcaccacctgaagatcctgagagccgagctgcaggacgacgccgtgtacgagtgccaggccatccaggccgccatcagaagcagacccgccagactgaccgtgctggtgccccccgacgaccccgtgatcctgggcggccccgtgatcagcctgagagccggcgaccccctgaacctgacctgccacgccgacaacgccaagcccgccgccagcatcatctggctgagaaagggcgaggtgatcaacggcgccacctacagcaagaccctgctgagagacggcaagagagagagcatcgtgagcaccctgttcatcagccccggcgacgtggagaacggccagagcatcgtgtgcagagccaccaacaaggccatccccggcggcaaggagaccagcgtgaccatcgacatccagcacccccccctggtgaacctgagcgtggagccccagcccgtgctggaggacaacgtggtgaccttccactgcagcgccaaggccaaccccgccgtgacccagtacagatgggccaagagaggccagatcatcaaggaggccagcggcgaggtgtacagaaccaccgtggactacacctacttcagcgagcccgtgagctgcgaggtgaccaacgccctgggcagcaccaacctgagcagaaccgtggacgtgtacttcggccccagaatgaccaccgagccccagagcctgctggtggacctgggcagcgacgccatcttcagctgcgcctggaccggcaaccccagcctgaccatcgtgtggatgaagagaggcagcggcgtggtgctgagcaacgagaagaccctgaccctgaagagcgtgagacaggaggacgccggcaagtacgtgtgcagagccgtggtgcccagagtgggcgccggcgagagagaggtgaccctgaccgtgaacggcccccccatcatcagcagcacccagacccagcacgccctgcacggcgagaagggccagatcaagtgcttcatcagaagcacccccccccccgacagaatcgcctggagctggaaggagaacgtgctggagagcggcaccagcggcagatacaccgtggagaccatcagcaccgaggagggcgtgatcagcaccctgaccatcagcaacatcgtgagagccgacttccagaccatctacaactgcaccgcctggaacagcttcggcagcgacaccgagatcatcagactgaaggagcaggagagcgtgcccatggccgtgatcatcggcgtggccgtgggcgccggcgtggccttcctggtgctgatggccaccatcgtggccttctgctgcgccagaagccagagaaacctgaagggcgtggtgagcgccaagaacgacatcagagtggagatcgtgcacaaggagcccgccagcggcagagagggcgaggagcacagcaccatcaagcagctgatgatggacagaggcgagttccagcaggacagcgtgctgaagcagctggaggtgctgaaggaggaggagaaggagttccagaacctgaaggaccccaccaacggctactacagcgtgaacaccttcaaggagcaccacagcacccccaccatcagcctgagcagctgccagcccgacctgagacccgccggcaagcagagagtgcccaccggcatgagcttcaccaacatctacagcaccctgagcggccagggcagactgtacgactacggccagagattcgtgctgggcatgggcagcagcagcatcgagctgtgcgagagagagttccagagaggcagcctgagcgacagcagcagcttcctggacacccagtgcgacagcagcgtgagcagcagcggcaagcaggacggctacgtgcagttcgacaaggccagcaaggccagcgccagcagcagccaccacagccagagcagcagccagaacagcgaccccagcagacccctgcagagaagaatgcagacccacgtgtag

SEQ ID NO: 339935 - protein, 245 aa, Artificial Sequence
  derived and/or modified sequence
MAVIIGVAVGAGVAFLVLMATIVAFCCARSQRNLKGVVSAKNDIRVEIVHKEPASGREGEEHSTIKQLMMDRGEFQQDSVLKQLEVLKEEEKEFQNLKDPTNGYYSVNTFKEHHSTPTISLSSCQPDLRPAGKQRVPTGMSFTNIYSTLSGQGRLYDYGQRFVLGMGSSSIELCEREFQRGSLSDSSSFLDTQCDSSVSSSGKQDGYVQFDKASKASASSSHHSQSSSQNSDPSRPLQRRMQTHV

SEQ ID NO: 339936 - DNA, 738 bp, Artificial Sequence
  derived and/or modified sequence
atggctgtcataataggtgttgccgtcggcgcaggggtagccttcctcgtgctgatggctactattgtggccttttgctgtgccagatcccaacggaatcttaagggcgtggttagtgcaaaaaatgatatcagggtggaaatcgtccacaaggagcccgcatctggtagagagggggaggagcattcgaccatcaagcagctcatgatggaccgcggagagtttcaacaggactcggtgctgaagcagctggaagtgctcaaggaagaagagaaagaattccagaatctgaaggatccaacaaatgggtactattcggtgaatacctttaaggagcaccacagcacgcccaccatcagtctgtccagttgtcaacctgacctacgccctgcaggcaagcaacgcgtacccaccggtatgagctttacaaatatctacagtaccctgtcaggccagggccgcctgtatgattacgggcaaagattcgtgttggggatgggtagcagttctatagagctgtgcgaacgagagttccaaaggggtagcctcagcgactcaagctcattccttgatacgcaatgcgatagctcagtgagcagcagtggtaagcaggacgggtacgtgcagttcgataaggcgagcaaagcaagcgcttctagcagtcatcatagtcagtcctcatcgcagaacagcgacccctcacgcccgttgcagcgaaggatgcagacccatgtgtag

SEQ ID NO: 339937 - DNA, 738 bp, Artificial Sequence
  derived and/or modified sequence
atggccgtcatcattggagtggccgtgggcgccggcgtggccttcctggtgctgatggccaccatcgtggccttctgctgtgcccggagccagaggaacctgaagggcgtggtgtctgccaagaatgacatccgggtggagatcgtgcacaaggagcccgccagcggccgggagggggaggagcacagcaccatcaagcagctgatgatggacagaggagagttccagcaggacagcgtgctgaagcagctggaggtgctgaaggaggaggagaaggagttccagaacctgaaggaccccaccaacggctactacagcgtgaacaccttcaaggagcaccacagcacccccaccatcagcctgagcagctgccagcctgacctgcggcctgctgggaagcagagggtgcccaccggcatgtccttcaccaacatctacagcaccctgagcggccagggccgcctgtatgactatggccagagatttgtgctgggcatgggcagcagcagcattgagctgtgtgagcgggagttccagaggggcagcctgagtgacagcagcagcttcctggacacccagtgtgacagctctgtgagcagcagcggcaagcaggacggctacgtgcagtttgacaaggccagcaaggccagcgccagcagcagccaccacagccagagcagcagccagaacagcgaccccagccggcccctgcagaggaggatgcagacccacgtgtag

SEQ ID NO: 339938 - DNA, 738 bp, Artificial Sequence
  derived and/or modified sequence
atggccgtgatcatcggcgtggccgtgggcgccggcgtggccttcctcgtactgatggcgaccatagtagcgttctgctgtgcacgaagtcaacgcaacttgaagggggtggtgtctgctaagaatgacatcagagtggagatagtccataaggagccagccagcggaagggagggagaggagcactctaccataaagcagctcatgatggatcggggagaatttcaacaagattcagtgctaaagcagcttgaggtattgaaagaggaggaaaaggagtttcaaaatctaaaagatcccaccaatgggtactactctgtgaacacattcaaggaacatcactccacgcctaccatttcactgtcttcttgtcagcccgacctcaggcctgcaggtaagcagagggtacccacgggaatgagctttacaaacatttattcgactctaagtggccagggacgcctctatgactacgggcaacggttcgtgcttggcatgggatcctcatctattgagttgtgcgaaagggagtttcagaggggttctttgtccgactcctctagcttcctagacacacaatgcgattcttccgttagcagcagtggcaagcaggacgggtatgtgcagttcgacaaagccagcaaggccagcgcatcatcctcacaccacagccaatcatcttcccagaactccgacccatccagaccacttcagcgacggatgcagacacacgtatag

SEQ ID NO: 339939 - DNA, 738 bp, Artificial Sequence
  derived and/or modified sequence
atggcggtgatcataggcgtggctgtgggggctggtgtagcctttctcgtgctcatggccacgatcgtcgctttctgctgtgctaggtctcagcgaaatcttaaaggggttgtcagtgcgaaaaatgatatcagggttgagattgtgcataaggaaccagcctcaggacgggagggtgaagagcactcaacaataaaacagctgatgatggaccgtggagaattccaacaagattcggttctgaagcaactcgaggttcttaaggaggaggaaaaagaattccagaatttgaaggatccaactaatggctattactctgtgaatacattcaaagagcaccattcaacacctaccattagcttgtcctcctgccagcccgaccttcggccagcagggaagcaacgcgtccccaccggtatgagcttcactaacatttactctactttgagtggtcagggcagactttacgactacggccagcggttcgtcctcggaatgggctctagctccatcgaactttgtgaaagagagtttcagcgcggaagcttatccgattcaagctcctttctcgatactcagtgtgattcatccgtcagtagttcgggaaagcaggatggttatgtacagtttgataaggcctccaaagcctccgctagcagtagccaccactctcagtcatccagccagaattcagacccatccaggccactgcagagaagaatgcaaacccatgtgtag

SEQ ID NO: 339940 - DNA, 738 bp, Artificial Sequence
  derived and/or modified sequence
atggcagtgatcatcggcgtcgccgtgggtgccggcgtggcttttttagttctcatggccacaatcgtcgctttttgttgcgctcggtcacagcgaaaccttaagggggtcgtttctgccaagaacgacatcagggtcgagatagtacacaaggaacccgccagtgggcgcgaaggagaagaacactccactatcaagcagctcatgatggaccgtggagagttccaacaggactctgtactcaaacaactagaggtgcttaaagaggaggagaaggagttccagaaccttaaagatcccactaatggctattactccgtgaacaccttcaaggagcaccactccacccctaccatctccctctcctcttgccaacccgacctgaggccggctgggaaacaacgcgtcccaactggcatgtcttttacaaacatctacagtacacttagcggtcaagggcggctttatgactacggccaaagatttgtgctcggcatgggctcttccagcatcgaactgtgcgagagagaattccagcggggttcgttaagcgactcgagtagctttcttgatacacagtgtgattcttcggtctcctcctcaggaaaacaagacggatacgtgcaatttgataaagcaagcaaggccagtgcgtcgagcagtcaccactcacaatccagcagccagaatagcgacccctccaggcccctccagagacgaatgcagacccatgtttag

SEQ ID NO: 339941 - DNA, 738 bp, Artificial Sequence
  derived and/or modified sequence
atggcagttattatcggcgtcgcagtaggtgccggagtcgcatttctcgtgctgatggctactatcgtcgcgttctgttgtgcaaggtctcagcggaacctcaagggcgtggtgtctgctaagaacgacataagagttgaaatcgtgcataaggaacctgcatctggtcgtgaaggcgaggaacacagcaccatcaagcaactcatgatggataggggagagtttcagcaggattcagtactgaagcagctggaggtgttgaaagaggaggaaaaggaatttcagaacttgaaggatccaaccaatggctactattctgtaaatacattcaaagaacatcatagtacacctactatttccttatcatcttgtcaacccgacttgagacctgcaggtaagcagcgggtgccaactggcatgtcttttaccaacatctacagtacactgtccggacaaggtagactttatgattacggccagagatttgttctggggatgggatcctcttccatcgaactatgcgaacgcgaatttcaacgagggtctctgagcgatagcagtagctttctagacacacagtgcgattcctcggtgagttcctcaggaaaacaagacggatacgtgcaatttgataaagcaagcaaggccagtgcgtcgagcagtcaccactcacaatccagcagccagaatagcgacccctccaggcccctccagagacgaatgcagacccatgtttag

SEQ ID NO: 339942 - DNA, 738 bp, Artificial Sequence
  derived and/or modified sequence
atggccgtgatcatcggcgtggccgtgggcgccggcgtggccttcctggtgctgatggccaccatcgtggccttctgctgcgccagaagccagagaaacctgaagggcgtggtgagcgccaagaacgacatcagagtggagatcgtgcacaaggagcccgccagcggcagagagggcgaggagcacagcaccatcaagcagctgatgatggacagaggcgagttccagcaggacagcgtgctgaagcagctggaggtgctgaaggaggaggagaaggagttccagaacctgaaggaccccaccaacggctactacagcgtgaacaccttcaaggagcaccacagcacccccaccatcagcctgagcagctgccagcccgacctgagacccgccggcaagcagagagtgcccaccggcatgagcttcaccaacatctacagcaccctgagcggccagggcagactgtacgactacggccagagattcgtgctgggcatgggcagcagcagcatcgagctgtgcgagagagagttccagagaggcagcctgagcgacagcagcagcttcctggacacccagtgcgacagcagcgtgagcagcagcggcaagcaggacggctacgtgcagttcgacaaggccagcaaggccagcgccagcagcagccaccacagccagagcagcagccagaacagcgaccccagcagacccctgcagagaagaatgcagacccacgtgtag

SEQ ID NO: 339943 - protein, 381 aa, Artificial Sequence
  derived and/or modified sequence
MALPPGPAALRHTLLLLPALLSSGWGELEPQIDGQTWAERALRENERHAFTCRVAGGPGTPRLAWYLDGQLQEASTSRLLSVGGEAFSGGTSTFTVTAHRAQHELNCSLQDPRSGRSANASVILNVQFKPEIAQVGAKYQEAQGPGLLVVLFALVRANPPANVTWIDQDGPVTVNTSDFLVLDAQNYPWLTNHTVQLQLRSLAHNLSVVATNDVGVTSASLPAPGLLATRVEVPLLGIVVAAGLALGTLVGFSTLVACLVCRKEKKTKGPSRHPSLISSDSNNLKLNNVRLPRENMSLPSNLQLNDLTPDSRVKPADRQMAQNNSRPELLDPEPGGLLTSQACLLHHGTPALTNPWLPHQQEGALPGGWSPQAHNSTVWKL

SEQ ID NO: 339944 - DNA, 1146 bp, Artificial Sequence
  derived and/or modified sequence
atggccctgccccccggccccgccgccctgagacacaccctgctgctgctgcccgccctgctgagcagcggctggggcgagctggagccccagatcgacggccagacctgggccgagagagccctgagagagaacgagagacacgccttcacctgcagagtggccggcggccccggcacccccagactggcctggtacctggacggccagctgcaggaggccagcaccagcagactgctgagcgtgggcggcgaggccttcagcggcggcaccagcaccttcaccgtgaccgcccacagagcccagcacgagctgaactgcagcctgcaggaccccagaagcggcagaagcgccaacgccagcgtgatcctgaacgtgcagttcaagcccgagatcgcccaggtgggcgccaagtaccaggaggcccagggccccggcctgctggtggtgctgttcgccctggtgagagccaacccccccgccaacgtgacctggatcgaccaggacggccccgtgaccgtgaacaccagcgacttcctggtgctggacgcccagaactacccctggctgaccaaccacaccgtgcagctgcagctgagaagcctggcccacaacctgagcgtggtggccaccaacgacgtgggcgtgaccagcgccagcctgcccgcccccggcctgctggccaccagagtggaggtgcccctgctgggcatcgtggtggccgccggcctggccctgggcaccctggtgggcttcagcaccctggtggcctgcctggtgtgcagaaaggagaagaagaccaagggccccagcagacaccccagcctgatcagcagcgacagcaacaacctgaagctgaacaacgtgagactgcccagagagaacatgagcctgcccagcaacctgcagctgaacgacctgacccccgacagcagagtgaagcccgccgacagacagatggcccagaacaacagcagacccgagctgctggaccccgagcccggcggcctgctgaccagccaggcctgcctgctgcaccacggcacccccgccctgaccaacccctggctgccccaccagcaggagggcgccctgcccggcggctggagcccccaggcccacaacagcaccgtgtggaagctgtag

SEQ ID NO: 339945 - DNA, 1146 bp, Artificial Sequence
  derived and/or modified sequence
atggctttacctccgggccccgcagctctcaggcatactctattactcttgccagctctgctgtcttctggctggggcgagttggagcctcagatagatgggcagacatgggcagagagagctctgcgggagaatgagaggcatgccttcacctgtcgagtggctggtggacctgggacgccgcgcctggcgtggtatttggacggacaacttcaggaagcttctacttctcggctgctgtcagtgggtggcgaagcattttcagggggcactagcacattcactgtaactgctcacagagcacagcacgagctaaactgctccctgcaggacccccggagtggcagatcagctaatgccagcgtcatcctcaacgtccagtttaagcctgagatcgcccaggtgggcgccaagtatcaggaggcacagggccccgggctactcgttgtgctattcgctctggtgagggctaacccccctgcaaacgtgacttggattgatcaggacggccctgtgactgtaaataccagtgactttctggtgttagatgcacagaactatccctggctgaccaatcacaccgttcagctgcagctgcggtcattagcacataatctgtctgttgtagccactaatgatgtaggggtcacctctgcaagcctgcctgcacccggccttctcgcgacaagagttgaggtgccactgctgggcattgtcgtggccgctgggctggctctgggcaccctagtcgggtttagcactcttgtagcatgcctcgtctgtcgcaaggagaagaaaaccaaagggcccagccgccacccaagccttatcagcagcgactccaacaacctcaaacttaataacgtacgactgccaagggaaaatatgagcttaccatccaatctacagcttaatgatctaacccctgattctcgggttaagcctgccgaccgtcagatggcccagaacaattctaggcccgagctgctggatccagaaccggggggtctgcttaccagccaggcttgcctgctgcatcacgggacccctgcgctgacgaacccctggctaccgcaccagcaggagggcgccctgccgggagggtggtccccccaggcccataactctactgtatggaaactctag

SEQ ID NO: 339946 - DNA, 1146 bp, Artificial Sequence
  derived and/or modified sequence
atggccctgcccccaggccctgctgccctgcggcacaccctgctgctgctgcctgccctgctgagcagcggctggggcgagctggagccccagattgatggccagacctgggccgagcgggccctgcgggagaatgaaagacatgccttcacctgccgggtggccggcggccctggcaccccccggctggcctggtacctggatggccagctgcaggaggccagcaccagccggctgctgtctgtgggcggggaggccttcagcggcggcaccagcaccttcaccgtgacagcccaccgggcccagcacgagctgaactgcagcctgcaggaccccaggagcggccgcagcgccaatgccagcgtcatcctgaatgtgcagttcaagccagagatcgcccaggtgggcgccaagtaccaggaggcccagggccctggcctgctggtggtgctgtttgccctggtgcgggccaaccccccagccaacgtgacctggattgaccaggacggccctgtgacagtgaacaccagtgacttcctggtgctggatgcccagaactacccctggctgaccaaccacacagtgcagctgcagctgcggagcctggcccacaacctgtctgtggtggccaccaatgatgtgggcgtgaccagcgccagcctgcctgcccctggcctgctggccaccagggtggaggtgcccctgctgggcatcgtggtggccgccggcctggccctgggcaccctggtgggcttcagcaccctggtggcctgcctggtgtgcaggaaggagaagaagaccaagggccccagccgccaccccagcctcatcagcagtgacagcaacaacctgaagctgaacaacgtgcggctgccccgggagaacatgagcctgcccagcaacctgcagctgaatgacctgaccccagacagccgggtgaagccagctgaccggcagatggcccagaacaacagcaggcctgagctgctggaccctgagcccggcggcctgctgaccagccaggcctgcctgctgcaccacggcaccccagccctgaccaacccctggctgccccaccagcaggagggcgccctgcccggcggctggagcccccaggcccacaacagcacagtgtggaagctgtag

SEQ ID NO: 339947 - DNA, 1146 bp, Artificial Sequence
  derived and/or modified sequence
atggccctgccccccggccccgccgccctgcggcacaccctgctgctgctgccagccctgctctccagcggctggggggagttggagccacagatcgacggccaaacatgggccgaacgcgccctgagggagaacgaaagacacgcttttacatgcagagtcgcaggtgggccaggtaccccacgacttgcgtggtacctcgacggtcagctgcaagaggcttcaacctcacgcctgctgagcgtcggcggtgaggcattctccggaggcacctcgactttcactgtcacagctcacagagcccagcacgaactgaattgtagccttcaagatccgcggtcaggccggagcgctaacgccagcgtgattctgaacgtacagtttaaacctgagatagctcaggtcggcgctaagtaccaggaggcacaggggcccggcttgttggtcgtcctgtttgcactggtgcgggctaacccgcctgcaaacgttacctggattgatcaggacgggccggtaaccgttaacacctcggacttcctcgtactggacgcccagaactatccctggttgacgaaccacaccgtccagttacagctgcgatctcttgcacacaacctgtccgtagtcgctacgaacgatgttggagtgaccagcgcttccctgccggctccaggcctgttagccactagggtcgaggtgccccttcttggcatcgtcgtcgctgccggactcgccctaggcaccctggtgggcttcagcactctggtggcctgcctggtttgtcgcaaagaaaaaaagactaaggggccatctagacacccttctttaatttccagcgattctaacaatcttaagttaaacaatgtcaggctacctcgtgagaacatgtctctgccatcgaacctacaactgaatgacctaaccccagatagccgcgttaaacccgcagatcgccagatggcccaaaataactcccgtcccgaactgctcgaccccgagcccgggggccttttgacctctcaggcatgtctgctgcaccacggaactcccgctctgaccaacccttggctcccacatcagcaagaaggcgcactccctggtggctggtctccgcaggcccacaattccaccgtgtggaagctgtag

SEQ ID NO: 339948 - DNA, 1146 bp, Artificial Sequence
  derived and/or modified sequence
atggcgttacccccaggcccagccgcattacggcacaccctgctattactgcctgcactcctgagcagcggctggggggaactagaaccacagattgacggccagacgtgggccgaacgcgcactccgggaaaatgaacgacatgcatttacatgtagagtcgccggaggccctggaacaccgaggctggcgtggtatctcgatggccaactccaggaggcgtcaacctcccgcctattgtctgtcgggggagaagcattcagcggcggaacgtcgacgttcacagtgactgctcatcgtgcccagcacgagttgaactgctctcttcaggacccgaggtccgggaggagtgcaaacgcttccgtaatcctgaacgtccagttcaagccagagatcgctcaggtaggcgcaaagtatcaggaggcacaaggccctggcctgcttgtggttttattcgcccttgtcagggccaatccaccagccaatgtgacctggatcgatcaggatggccctgtgaccgtgaatacttcagattttctcgttctagatgctcagaactacccctggctcaccaatcacactgtccagctccagctgagatctctggcacacaacctcagtgtggtggctaccaatgacgtgggcgtgacgagtgccagtttgcctgcacctgggttactggcaacacgtgtggaagtgcctttgctggggatagtggtggccgctggacttgccctgggtaccctagtagggttctcaactctcgtggcgtgcctggtgtgtagaaaagaaaagaagacaaagggtccatctaggcatccgagtctgattagtagtgactcgaacaacctcaaactgaacaatgtgagactccccagagaaaatatgtctctgccttccaacttgcagctcaatgacctgacaccagatagccgagtcaaacccgcagatcggcagatggcccagaataactctagacctgagctattggatcctgagcctgggggactcctgacatcgcaagcatgcttgctgcaccatggtacaccagctctcacaaatccctggctgccccatcagcaggaaggggcactgccaggcggatggtcaccgcaggcccataacagtactgtatggaagctttag

SEQ ID NO: 339949 - DNA, 1410 bp, Artificial Sequence
  derived and/or modified sequence
agttgctccggcggcgctcggggagggagccagcagcctagggcctaggcccgggccaccatggcgctgcctccaggcccagccgccctccggcacacactgctgctcctgccagcccttctgagctcaggttggggggagttggagccacaaatagatggtcagacctgggctgagcgggcacttcgggagaatgaacgccacgccttcacctgccgggtggcaggggggcctggcacccccagattggcctggtatctggatggacagctgcaggaggccagcacctcaagactgctgagcgtgggaggggaggccttctctggaggcaccagcaccttcactgtcactgcccatcgggcccagcatgagctcaactgctctctgcaggaccccagaagtggccgatcagccaacgcctctgtcatccttaatgtgcaattcaagccagagattgcccaagtcggcgccaagtaccaggaagctcagggcccaggcctcctggttgtcctgtttgccctggtgcgtgccaacccgccggccaatgtcacctggatcgaccaggatgggccagtgactgtcaacacctctgacttcctggtgctggatgcgcagaactacccctggctcaccaaccacacggtgcagctgcagctccgcagcctggcacacaacctctcggtggtggccaccaatgacgtgggtgtcaccagtgcgtcgcttccagccccagggcttctggctacccgggtggaagtgccactgctgggcattgttgtggctgctgggcttgcactgggcaccctcgtggggttcagcaccttggtggcctgcctggtctgcagaaaagagaagaaaaccaaaggcccctcccggcacccatctctgatatcaagtgactccaacaacctaaaactcaacaacgtgcgcctgccacgggagaacatgtccctcccgtccaaccttcagctcaatgacctcactccagattccagagtgaaaccagcagaccggcagatggctcagaacaacagccggccagagcttctggacccggagcccggcggcctcctcaccagccaagcatgtctcctccaccacgggaccccagccctgaccaacccatggttgcctcatcagcaggaaggtgcccttcctggaggatggtcgccacaggcacataattcaacagtgtggaagctttaggggaacatggagaaagaaggagaccacataccccaaagtgacctaagaacactttaaaaagcaacatgtaaatgattggaaattaatatagtacagaatatatttttcccttgttgagatcttcttttgtaatgtttttcatgttactgcctagggcggtgctgagcacacagcaagtttaataaacttgactgaattcattta

SEQ ID NO: 339950 - protein, 393 aa, Artificial Sequence
  derived and/or modified sequence
MYICPFMGAVSGTLTVTDFKLYFKNVERDPHFILDVPLGVISRVEKIGAQSHGDNSCGIEIVCKDMRNLRLAYKQEEQSKLGIFENLNKHAFPLSNGQALFAFSYKEKFPINGWKVYDPVSEYKRQGLPNESWKISKINSNYEFCDTYPAIIVVPTSVKDDDLSKVAAFRAKGRVPVLSWIHPESQATITRCSQPLVGPNDKRCKEDEKYLQTIMDANAQSHKLIIFDARQNSVADTNKMLLAGAVRIADKIESGKTSVVVHCSDGWDRTAQLTSLAMLMLDSYYRTIKGFETLVEKEWISFGHRFALRVGHGNDNHADADRSPIFLQFVDCVWQMTRQFPSAFEFNELFLITILDHLYSCLFGTFLCNCEQQRFKEAWGAGTQRARGSLRSR

SEQ ID NO: 339951 - DNA, 342 bp, Artificial Sequence
  derived and/or modified sequence
atgcccaagggcagacagaaggtgccccacctggacgcccccctgggcctgcccacctgcctgtggctggagctggccggcctgttcctgctggtgccctgggtgatgggcctggccggcaccggcggccccgacggccagggcaccggcggccccagctgggccgtgcacctggagagcctggagggcgacggcgaggaggagaccctggagcagcaggccgacgccctggcccaggccgccggcctggtgaacgccggcagaatcggcgagctgcagggccactacctgttcgtgcagcccgccggccacagacccgccctggaggtggaggccatctag

SEQ ID NO: 339952 - DNA, 279 bp, Artificial Sequence
  derived and/or modified sequence
atgcccaagggcagacagaaggtgccccacctggacgcccccctgggcctgcccacctgcctgtggctggagctggccggcctgttcctgctggtgccctgggtgatgggcctggccggcaccggcggccccgacggccagggcaccggcggccccagctgggccgtgcacctggagagcctggagggcgacggcgaggaggagaccctggagcagcaggccgacgccctggcccaggccgccggcctggtgaacgccggcagaatcggcgagctgtag

SEQ ID NO: 339953 - DNA, 342 bp, Artificial Sequence
  derived and/or modified sequence
atgcctaaaggaagacagaaagtaccgcacctggacgcaccactcgggctgcctacctgtctgtggcttgaactggccggtctgttcctcctggtgccttgggtgatggggctagctggaacaggcggccccgatggccaggggaccgggggaccatcatgggccgtccaccttgagagtctggaaggggacggggaggaggagaccctggagcagcaagccgacgcactggcccaggcggctggcctcgtaaacgcaggtaggattggagagctgcaggggcattatttattcgtgcagccagccggccatcgcccggcactcgaggtggaagcaatctag

SEQ ID NO: 339954 - DNA, 279 bp, Artificial Sequence
  derived and/or modified sequence
atgcccaaaggacgtcaaaaagtgccacatctggatgcccctttaggcctcccaacttgcctttggctcgaacttgccggcctgtttttattagtgccatgggtgatgggcctggctggtactggcggacctgatggccaggggaccggcgggccatcctgggcagtccacctggagtctctggagggcgatggggaagaggaaacgctggagcagcaggcggatgccctcgcccaggccgccggcctggttaacgccggcaggatcggggaactatag

SEQ ID NO: 339955 - DNA, 279 bp, Artificial Sequence
  derived and/or modified sequence
atgcctaagggaagacaaaaagtcccccacctggacgctccacttgggctgcccacttgtctgtggctcgagctggccggactctttttgctggttccatgggttatgggcctggctggcaccggcgggcccgatgggcagggcactggcggcccctcgtgggccgtccatctggaaagcctcgagggcgatggtgaggaggaaactttagaacagcaggccgacgcgctggcccaggccgccggcttagtgaatgccgggcgtataggcgaattatag

SEQ ID NO: 339956 - DNA, 342 bp, Artificial Sequence
  derived and/or modified sequence
atgcccaagggccggcagaaggtgccccacctggatgcccccctgggcctgcccacctgcctgtggctggagctggccggcctcttcctgctggtgccctgggtgatgggcctggccggcactggaggcccagatggccagggcactggaggccccagctgggccgtgcacctggagagcctggagggagatggagaggaggagaccctggagcagcaggctgatgccctggcccaggccgccggcctggtgaatgccggcagaattggagagctgcagggccactacctgtttgtgcagcctgctggccacaggcctgccctggaggtggaggccatctag

SEQ ID NO: 339957 - DNA, 279 bp, Artificial Sequence
  derived and/or modified sequence
atgcccaagggccggcagaaggtgccccacctggatgcccccctgggcctgcccacctgcctgtggctggagctggccggcctcttcctgctggtgccctgggtgatgggcctggccggcactggaggcccagatggccagggcactggaggccccagctgggccgtgcacctggagagcctggagggagatggagaggaggagaccctggagcagcaggctgatgccctggcccaggccgccggcctggtgaatgccggcagaattggagagctgtag

SEQ ID NO: 339958 - DNA, 342 bp, Artificial Sequence
  derived and/or modified sequence
atgcccaagggccggcagaaggtgccccacctggacgcccccctgggactgccgacctgcctgtggctggagcttgccggcctttttttgctggtcccctgggtgatgggcttggccggaactgggggccctgatgggcagggtactggagggccctcctgggctgtgcatttggaaagcctcgagggggatggcgaggaagagaccctagagcagcaggccgatgctctcgcacaagcggcgggcctggtgaatgctggcagaatcggggaactccagggtcactacctctttgtgcagccggcaggacatagacctgccttggaggttgaggccatctag

SEQ ID NO: 339959 - DNA, 279 bp, Artificial Sequence
  derived and/or modified sequence
atgcccaagggccggcagaaggtgccccacctggacgcccccctggggttgcccacctgcttgtggctagaactggctggcctatttctactcgtaccctgggtgatgggactggcaggcaccgggggccccgatggacagggcacaggaggcccctcctgggcggtgcacttggagagcctcgagggcgacggagaagaagaaacgctcgagcagcaagccgacgcacttgcacaggccgcaggcctcgtgaacgccgggcgaatcggggaactctag

SEQ ID NO: 339960 - DNA, 279 bp, Artificial Sequence
  derived and/or modified sequence
atgcccaagggccggcagaaggtgccccacctggacgcccccctgggactgccaacgtgtctctggctggagttagccggcctgtttctgttagtgccatgggtgatgggactcgccggcaccggtggccctgacggccaagggacaggcggcccatcgtgggccgtgcacttagaaagtctcgaaggagacggagaggaagagacactggagcagcaggcagacgccctggctcaagccgccgggctggtaaatgctggcaggattggcgaactgtag

SEQ ID NO: 339961 - DNA, 553 bp, Artificial Sequence
  derived and/or modified sequence
ataatgtgggtgctaatgaggagaggggcacattgcacggagcgatcgaggccgacggagggagaatcgggaaactgacccggtctgtagcctttgctgagtcaacactactcacagtgaaagtgatgccttttctccatttgcacaacatgagtgtgacgtggttagccagaccaggagctcaacctcatgtagaatccagtccactgctctgatgccgaaggggaggcagaaagtgccacacttggatgcccccctgggcctgcccacctgcctctggctggaattagccgggctcttcttactggttccctgggtcatgggcctggcagggacaggtgggcctgatggccagggcacaggggggccgagctgggctgtgcacctggaaagcctggaaggtgacggggaggaagagactctggagcagcaggcggatgccttggcccaggcagcagggctggtgaatgctggacgcatcggagagcttcaggggcactacctctttgtccagcctgctgggcacaggccggccctggaggtggaggccatc

SEQ ID NO: 339962 - DNA, 583 bp, Artificial Sequence
  derived and/or modified sequence
gatgctgcgggagacccctgagatacaagtggactctcccggggcgcggggaagaagggagagccgactgcgagaaggaaggcgacctgggtgggcaggatcccctctgggaagattacagggacagtcggggccatggcggtcagaaggagaagagcaacgagtggcttttaaaggtctgtagcctttgctgagtcaacactactcacagtgaaagtgatgccttttctccatttgcacaacatgagtgtgacgtggttagccagaccaggagctcaacctcatgtagaatccagtccactgctctgatgccgaaggggaggcagaaagtgccacacttggatgcccccctgggcctgcccacctgcctctggctggaattagccgggctcttcttactggttccctgggtcatgggcctggcagggacaggtgggcctgatggccagggcacaggggggccgagctgggctgtgcacctggaaagcctggaaggtgacggggaggaagagactctggagcagcaggcggatgccttggcccaggcagcagggctggtgaatgctggacgcatcggagagct

SEQ ID NO: 339963 - DNA, 549 bp, Artificial Sequence
  derived and/or modified sequence
gaagccgcgagtttccgcagggaggcggcggcagctgcggcggggccgagccgcttgggtgtgtatctgagtactaagccctgccccagggtggacccagtggagagcaaaggcttttaaaggagcccagccaccataggtctgtagcctttgctgagtcaacactactcacagtgaaagtgatgccttttctccatttgcacaacatgagtgtgacgtggttagccagaccaggagctcaacctcatgtagaatccagtccactgctctgatgccgaaggggaggcagaaagtgccacacttggatgcccccctgggcctgcccacctgcctctggctggaattagccgggctcttcttactggttccctgggtcatgggcctggcagggacaggtgggcctgatggccagggcacaggggggccgagctgggctgtgcacctggaaagcctggaaggtgacggggaggaagagactctggagcagcaggcggatgccttggcccaggcagcagggctggtgaatgctggacgcatcggagagcttca

SEQ ID NO: 339964 - DNA, 342 bp, Artificial Sequence
  derived and/or modified sequence
atgcctaaagggcgacagaaagttccgcatctggacgcacctctgggattaccaacatgcctctggttggagctggcgggactgttcctgctggtaccatgggttatgggcctggccggaacaggaggccctgatgggcagggcaccgggggaccaagctgggcagtgcatcttgagagcctggaaggcgatggggaagaggaaacactggagcagcaagccgatgcattggcacaggctgccggactcgtgaatgctggaaggattggcgagctgcaagggcattacctgttcgtgcagcctgccggacaccgacctgccctggaggttgaggcaatttag

SEQ ID NO: 339965 - DNA, 279 bp, Artificial Sequence
  derived and/or modified sequence
atgcctaagggccgacagaaagtacctcatcttgacgcgccactgggactgccaacctgcctctggctcgagcttgccggtctcttcctgctcgtcccatgggtcatggggcttgctggtacgggcggacccgatggccagggcacgggtggtcctagctgggccgtccatctcgagagcctggagggcgacggagaagaggaaactctagaacagcaggcggacgctctcgctcaagcggctggcttggtcaacgccggaagaatcggagagctgtag

SEQ ID NO: 339966 - DNA, 279 bp, Artificial Sequence
  derived and/or modified sequence
atgccgaagggcagacagaaggttccccacctagacgcaccgcttggactccccacatgtctttggctggagctggccggactgtttctgctggtgccttgggttatgggcctagccggaactggcggacctgatggacagggcacaggcggacccagctgggcagtgcacctcgagagcctcgagggtgatggggaagaagaaacactcgagcagcaggccgacgctctggcacaggccgcaggcctggtgaatgcgggaagaattggagaactgtag

SEQ ID NO: 339967 - protein, 430 aa, Artificial Sequence
  derived and/or modified sequence
MIVYFPGILATDTHHPQDSALYHLSKQLLQKYHKEVRPVYNWTKATTVYLDLFVHAILDVDAENQILKTSVWYQEVWNDEFLSWNSSMFDEIREISLPLSAIWAPDIIINEFVDIERYPDLPYVYVNSSGTIENYKPIQVVSACSLETYAFPFDVQNCSLTFKSILHTVEDVDLAFLRSPEDIQHDKKAFLNDSEWELLSVSSTYSILQSSAGGFAQIQFNVVMRRHPLVYVVSLLIPSIFLMLVDLGSFYLPPNCRARIVFKTSVLVGYTVFRVNMSNQVPRSVGSTPLIGHFFTICMAFLVLSLAKSIVLVKFLHDEQRGGQEQPFLCLRGDTDADRPRVEPRAQRAVVTESSLYGEHLAQPGTLKEVWSQLQSISNYLQTQDQTDQQEAEWLVLLSRFDRLLFQSYLFMLGIYTITLCSLWALWGGV

SEQ ID NO: 339968 - DNA, 1293 bp, Artificial Sequence
  derived and/or modified sequence
atgatcgtatacttccccgggattctcgcaacagatactcatcacccccaagatagtgccctgtatcatcttagtaagcagttgctgcagaaatatcacaaagaagtgaggcctgtatacaattggactaaagccactactgtgtatctggaccttttcgttcacgcaatactggacgtagacgccgagaaccagatcttaaaaacttccgtttggtatcaggaggtatggaacgacgagtttctgtcctggaatagttccatgtttgacgagatcagagaaatatctctgccgctgtcagctatatgggcacctgacatcattatcaatgagtttgttgacatagaaagatacccagatctgccctacgtatacgtaaatagctctgggaccattgagaactacaagcctatccaggtggtctccgcttgctccctggagacttacgccttcccctttgatgtgcagaactgctccctgacattcaagtctattttacacacggtcgaagacgttgatttggcatttcttcggagtcccgaggatattcagcacgacaaaaaggctttcctgaatgactcagagtgggaactgctatctgtatcatccacatactcaatcctgcaatcatctgctggaggattcgcccagatccaatttaacgtggtaatgcgaaggcatcccctggtgtacgtcgtttctctgttgatcccaagcatctttcttatgctggttgaccttggcagcttttatcttcctcctaattgccgggccagaattgtgttcaagacgtccgtcctggtcggctacacagtttttcgcgtaaacatgtcaaaccaggtcccacggtctgttgggtctacccctctcattggacatttcttcacaatctgcatggccttcctggttttgtcacttgcaaagagcatcgttttagttaaattcctgcacgacgaacagagggggggccaggaacaacccttcctatgccttcggggcgataccgacgctgaccggccgagagttgaaccaagggcccagcgggccgtcgtgaccgagagcagtctctatggggaacacctggcccagcccggaaccctgaaggaggtctggagccagctgcagtccattagtaattatctgcaaacccaggatcagacggaccaacaggaggccgagtggctggtacttctgtcccggttcgaccggctcctgtttcagtcatacctgttcatgctcggcatttacaccattacactctgttctttgtgggccttatggggcggcgtatag

SEQ ID NO: 339969 - DNA, 1293 bp, Artificial Sequence
  derived and/or modified sequence
atgattgtgtacttccctggcatcctggccacagacacccaccacccccaggacagcgccctgtaccacctgagcaagcagctgctgcagaagtaccacaaggaggtgcggcctgtgtacaactggaccaaggccaccaccgtgtacctggacctgtttgtgcacgccatcctggatgtggatgctgagaaccagatcctgaagacctctgtgtggtaccaggaggtgtggaatgatgagttcctgtcctggaacagctccatgtttgatgagatccgggagatcagcctgcccctgagcgccatctgggccccagacatcatcatcaatgaatttgtggacatcgagcgctacccagacctgccctacgtgtatgtgaacagcagcggcaccatcgagaactacaagcccatccaggtggtgtctgcctgcagcctggagacctacgccttcccctttgatgtgcagaactgcagcctgaccttcaagagcatcctgcacacagtggaggatgtggacctggccttcctgcggagccctgaggacatccagcacgacaagaaggccttcctgaatgacagcgagtgggagctgctgtctgtgagcagcacctacagcatcctgcagagcagcgctgggggctttgcccagatccagttcaacgtggtgatgagaagacaccccctggtgtatgtggtgtccctgctgatccccagcatcttcctgatgctggtggacctgggcagcttctacctgccccccaactgccgggcccgcatcgtgttcaagacctctgtgctggtgggctacacagtgttccgggtgaacatgagcaaccaggtgcccaggtctgtgggcagcacccccctgattggccacttcttcaccatctgcatggccttcctggtgctgagcctggccaagagcatcgtgctggtgaagttcctgcatgatgagcagaggggcggccaggagcagcccttcctgtgcctgcggggggacacagatgctgaccggccccgggtggagccccgggcccagagagctgtggtgacagagagcagcctgtatggagagcacctggcccagcccggcaccctgaaggaggtgtggagccagctgcagagcatcagcaactacctgcagacccaggaccagacagaccagcaggaggccgagtggctggtgctgctgagcagatttgaccggctgctcttccagagctacctgttcatgctgggcatctacaccatcaccctgtgcagcctgtgggccctgtggggcggcgtgtag

SEQ ID NO: 339970 - DNA, 1293 bp, Artificial Sequence
  derived and/or modified sequence
atgatcgtgtacttccccggcatcctggccaccgacacccaccaccctcaggacagcgccctctaccatctatctaaacagcttctccagaaatatcacaaagaagtgcgccctgtttacaactggacaaaagctacaacagtttaccttgacttgtttgtacatgccattctagacgtggacgcagagaaccaaattctcaagacgagtgtctggtaccaggaagtttggaacgatgagttccttagttggaatagtagcatgtttgatgagatccgtgagatatctctgcctctctctgcaatttgggcccccgacattatcatcaacgagttcgtcgacatcgaaaggtatcctgacctgccctacgtgtatgttaactcatccgggacaattgaaaactataagcccatacaggttgttagtgcatgttcactggagacttatgcattcccctttgatgtacaaaactgcagtctcacattcaagagcattctccacacagtcgaagatgttgacttggcatttctgcgcagccccgaggatatccagcacgacaagaaggcctttctcaacgatagtgagtgggagctccttagcgtcagtagcacctactcaatcctgcagtcaagcgcaggggggttcgcccaaatccagttcaatgtggtgatgagacgacatccactcgtgtatgtggtgagcctgctgatcccatcaatctttctgatgctcgtggacctcgggtctttctatctgccgcccaattgtcgcgctcggatagtgtttaaaacttcagtactagttgggtacacagtttttcgggttaatatgtctaatcaagttccccgctcagtagggtccacgcctcttattgggcacttcttcaccatttgtatggcgtttctcgttttgagcctggccaagtccatcgtactggtaaagttccttcatgacgagcaaaggggcggacaggaacagccctttctctgcttaagaggggacactgacgccgatagaccaagggttgaaccaagagctcagagagccgtggtcactgagtcgtccctgtacggggaacacctggcccaacctggtactctgaaggaggtgtggagtcagcttcagtcaatctcaaattatttacaaacacaggaccagaccgaccagcaagaggccgaatggctggttctattgtctcgatttgaccgccttttattccaaagttacctgtttatgttgggaatttataccattactctgtgctccctctgggcactttggggcggagtgtag

SEQ ID NO: 339971 - DNA, 1293 bp, Artificial Sequence
  derived and/or modified sequence
atgatcgtgtactttcctggcatactcgcaaccgacactcaccaccctcaggactccgcactgtaccacctttccaagcagctgctgcaaaagtatcataaagaagttcgcccagtctataattggacgaaggccaccaccgtctacctggacctgttcgtgcacgcaatcctggatgtcgacgccgagaaccaaatcctgaagacgtccgtttggtaccaagaagtatggaatgatgaatttctcagttggaattcctcgatgttcgacgagattcgggaaatcagcctaccactgtcagctatctgggccccagatatcattattaacgagttcgtggatatcgagcggtatccagacctgccttatgtgtacgtgaatagctccgggacaatcgaaaactacaaacctatccaggtggtttccgcttgctccctcgagacatacgccttcccatttgatgtgcagaactgcagcctgacgttcaagtccattttgcataccgtcgaggatgtggatttggccttcctacggtctccagaggacatccagcacgataagaaagcctttctcaatgattctgaatgggaactgctttctgttagctcaacatatagcatcctccagagcagcgcgggtggcttcgcacaaattcagtttaatgtcgtcatgagacgccatcctcttgtctatgtcgttagtctgctcataccgtctatattcctgatgctcgtggaccttggctctttctatctcccgcctaattgccgggctcgcattgtgttcaagacctccgtgctggtaggctacaccgtatttagagtgaatatgagtaatcaggtgcctcgaagcgttggctctacgccattgattggacactttttcacaatctgcatggcattccttgtcctgtccttggcgaaaagcatcgtgcttgtcaagttcctgcatgatgaacagcggggtggtcaagagcagccgttcctgtgtctaaggggggataccgacgctgatcgccctagggtggagcctagggctcagagggctgttgtcacggaatcctccttatatggcgagcacctggcacaacctgggacactcaaggaggtgtggtcccagttacagtcgatctcaaactacctgcagacccaggatcagaccgatcagcaggaggccgagtggctcgtcttattatcacggttcgatagactcctcttccagagctatctctttatgctcggcatttatactattaccttgtgcagcctttgggctctgtggggcggagtttag

SEQ ID NO: 339972 - DNA, 1692 bp, Artificial Sequence
  derived and/or modified sequence
aattattctgtctccaaaatgcaagattgttgtaaaatggaattgtaggtacagttttccaaccttggagatggcgttgatttacttgtttttacaatgaggtttctccattgggcacttaggccatcagcttactttaagcatttgccaaaggccccaccagctggctgtgaattgatgcagattttggtgagctgaaagctatattctagtaaaagccaccgagtcctgaacagtctgaaacctcctaaagaaaccaagctcctcttacttttatcttcacaatgatagtttattttccaggaattctagccacagatacacatcatccccaggattctgctctgtatcatctcagcaagcagctattacagaaatatcataaagaagtgagacctgtttacaactggaccaaggccaccacagtctacctggacctgttcgtccatgctatattggatgtggatgcagagaatcaaatattaaagacaagtgtatggtaccaagaggtctggaatgatgaatttttatcctggaactccagcatgtttgatgagattagagagatctccctacctctaagtgccatctgggcccccgatatcatcatcaatgagtttgtggacattgaaagataccctgaccttccctatgtttatgtgaactcatctgggaccattgagaactataagcccatccaggtggtctctgcgtgcagtttagagacatatgcttttccatttgatgtccagaattgcagcctgaccttcaagagcattctgcatacagtggaagacgtagacctggcctttctgaggagcccagaagacattcagcatgacaaaaaggcgtttttgaatgacagtgagtgggaacttctatctgtgtcctccacatacagcatcctgcagagcagcgctggaggatttgcacagattcagtttaatgtggtgatgcgcaggcaccccctggtctatgtcgtgagtctgctgattcctagcatctttctcatgctggtggacctggggagcttctacctgccacccaactgccgagccaggattgtgttcaagaccagtgtgctggtgggctacaccgtcttcagggtcaacatgtccaaccaggtgccacggagtgtagggagcacccctctgattgggcacttcttcaccatctgcatggccttcttggttctcagcttagctaagtccatcgtgttggtcaaattcctccatgatgagcagcgtggtggacaggagcagcccttcttgtgccttcgaggggacaccgatgctgacaggcctagagtggaacccagggcccaacgtgctgtggtaacagagtcctcgctgtatggagagcacctggcccagccaggaaccctgaaggaagtctggtcgcagcttcaatctatcagcaactacctccaaactcaggaccagacagaccaacaggaggcagagtggctggtcctcctgtcccgctttgaccgactgctcttccaaagctaccttttcatgctggggatctacaccatcactctgtgctccctctgggcactgtggggcggcgtgtgaagactgaagtgttcttcagtaattgtgctggcacttaggagagagaggagggggaataatagtgggttaaaaagctttctgggtcgggtgtggtggttcttgcctatagtcccag

SEQ ID NO: 339973 - DNA, 1293 bp, Artificial Sequence
  derived and/or modified sequence
atgatcgtgtacttccccggcatcctggccaccgacacccaccacccccaggacagcgccctgtaccacctgagcaagcagctgctgcagaagtaccacaaggaggtgagacccgtgtacaactggaccaaggccaccaccgtgtacctggacctgttcgtgcacgccatcctggacgtggacgccgagaaccagatcctgaagaccagcgtgtggtaccaggaggtgtggaacgacgagttcctgagctggaacagcagcatgttcgacgagatcagagagatcagcctgcccctgagcgccatctgggcccccgacatcatcatcaacgagttcgtggacatcgagagataccccgacctgccctacgtgtacgtgaacagcagcggcaccatcgagaactacaagcccatccaggtggtgagcgcctgcagcctggagacctacgccttccccttcgacgtgcagaactgcagcctgaccttcaagagcatcctgcacaccgtggaggacgtggacctggccttcctgagaagccccgaggacatccagcacgacaagaaggccttcctgaacgacagcgagtgggagctgctgagcgtgagcagcacctacagcatcctgcagagcagcgccggcggcttcgcccagatccagttcaacgtggtgatgagaagacaccccctggtgtacgtggtgagcctgctgatccccagcatcttcctgatgctggtggacctgggcagcttctacctgccccccaactgcagagccagaatcgtgttcaagaccagcgtgctggtgggctacaccgtgttcagagtgaacatgagcaaccaggtgcccagaagcgtgggcagcacccccctgatcggccacttcttcaccatctgcatggccttcctggtgctgagcctggccaagagcatcgtgctggtgaagttcctgcacgacgagcagagaggcggccaggagcagcccttcctgtgcctgagaggcgacaccgacgccgacagacccagagtggagcccagagcccagagagccgtggtgaccgagagcagcctgtacggcgagcacctggcccagcccggcaccctgaaggaggtgtggagccagctgcagagcatcagcaactacctgcagacccaggaccagaccgaccagcaggaggccgagtggctggtgctgctgagcagattcgacagactgctgttccagagctacctgttcatgctgggcatctacaccatcaccctgtgcagcctgtgggccctgtggggcggcgtgtag

SEQ ID NO: 339974 - protein, 175 aa, Artificial Sequence
  derived and/or modified sequence
  misc_feature (1)..(1): Xaa can be any naturally occurring amino acid
XAENQILKTSVWYQEVWNDEFLSWNSSMFDEIREISLPLSAIWAPDIIINEFVDIERYPDLPYVYVNSSGTIENYKPIQVVSACSLETYAFPFDVQNCSLTFKSILHTVEDVDLAFLRSPEDIQHDKKAFLNDSEWELLSVSSTYSILQSSAGGFAQIQFNGTSSPSAWPSWFSA

SEQ ID NO: 339975 - DNA, 528 bp, Artificial Sequence
  derived and/or modified sequence
tgagctgagaatcagattctgaagacttcagtctggtaccaggaagtctggaatgacgagttcctgtcttggaattcctccatgttcgacgaaatccgggagatctccctgccactgtcagcgatctgggcccccgacatcataatcaacgaattcgtggacatcgaacggtaccccgatctgccttatgtctacgtgaacagtagcggtaccatagagaattacaaaccaatccaggtggtgtcagcatgttcgctagagacgtacgcgtttccatttgatgtgcagaattgttccctcacctttaaatctatcctccataccgtggaagacgtcgacctggcattcctgcgttcaccggaagatatccagcatgacaagaaagccttcctgaatgactcagaatgggagcttctgagcgtgtcgtcgacctatagcatccttcagtctagtgcgggagggtttgcacagattcagttcaatggaacaagtagcccatctgcttggccctcttggtttagcgcatag

SEQ ID NO: 339976 - DNA, 528 bp, Artificial Sequence
  derived and/or modified sequence
tgagctgagaaccagatcctgaagacctctgtgtggtaccaggaggtgtggaatgatgagttcctgtcctggaacagctccatgtttgatgagatccgggagatcagcctgcccctgagcgccatctgggccccagacatcatcatcaatgaatttgtggacatcgagcgctacccagacctgccctacgtgtatgtgaacagcagcggcaccatcgagaactacaagcccatccaggtggtgtctgcctgcagcctggagacctacgccttcccctttgatgtgcagaactgcagcctgaccttcaagagcatcctgcacacagtggaggatgtggacctggccttcctgcggagccctgaggacatccagcacgacaagaaggccttcctgaatgacagcgagtgggagctgctgtctgtgagcagcacctacagcatcctgcagagcagcgctgggggctttgcccagatccagttcaacggcaccagcagccccagcgcctggcccagctggttcagcgcctag

SEQ ID NO: 339977 - DNA, 528 bp, Artificial Sequence
  derived and/or modified sequence
tgagccgagaaccagatcctgaagaccagcgtgtggtaccaggaggtgtggaatgatgaattcctctcctggaatagttctatgttcgacgagatccgcgaaatctcattgcccctgtcagctatctgggctccagatattattataaatgaattcgtggatatcgaaagatatcccgaccttccctatgtgtacgttaattcttctggaacaatcgagaattataagcctatccaggtggtgtcagcttgttctctcgaaacctatgcatttccctttgatgttcagaattgcagcctgacgttcaagtccattttgcatactgtagaagacgtcgacttggccttccttcggtctccagaagatatccaacacgacaaaaaagcatttcttaatgatagcgagtgggagctgctctccgtgagcagtacatattccatactgcagagtagcgcgggaggctttgcccagatccagttcaatggcacatcaagcccatccgcctggccaagctggttttccgcctag

SEQ ID NO: 339978 - DNA, 528 bp, Artificial Sequence
  derived and/or modified sequence
tgagccgagaaccagatcttgaagactagcgtctggtatcaggaagtatggaacgacgaattcctgagttggaattcttctatgttcgacgaaataagggaaatctcactcccgctgagtgccatctgggccccagacattatcatcaacgagttcgtcgatattgagcggtaccccgatttaccctatgtgtatgtgaatagttcagggacaattgagaattacaagccaatccaggtcgtctccgcctgtagcctggagacctacgcattcccatttgacgtgcagaattgtagtctgacattcaagagcattctccacaccgtcgaagatgttgacctggcctttcttaggagccctgaggacatacagcacgacaaaaaagcttttctgaacgattctgagtgggagctgctcagcgtaagttcaacatatagtatcttacagtccagtgcagggggatttgctcagattcagttcaatggcactagtagtccttccgcctggccgtcttggttcagtgcttag

SEQ ID NO: 339979 - DNA, 612 bp, Artificial Sequence
  derived and/or modified sequence
atgcagagaatcaaatattaaagacaagtgtatggtaccaagaggtctggaatgatgaatttttatcctggaactccagcatgtttgatgagattagagagatctccctacctctaagtgccatctgggcccccgatatcatcatcaatgagtttgtggacattgaaagataccctgaccttccctatgtttatgtgaactcatctgggaccattgagaactataagcccatccaggtggtctctgcgtgcagtttagagacatatgcttttccatttgatgtccagaattgcagcctgaccttcaagagcattctgcatacagtggaagacgtagacctggcctttctgaggagcccagaagacattcagcatgacaaaaaggcgtttttgaatgacagtgagtgggaacttctatctgtgtcctccacatacagcatcctgcagagcagcgctggaggatttgcacagattcagtttaatggcacttcttcaccatctgcatggccttcttggttctcagcttagctaagtccatcgtgttggtcaaattcctccatgatgagcagcgtggtggacaggagcagcccttcttgtgccttcgaggggacac

SEQ ID NO: 339980 - DNA, 528 bp, Artificial Sequence
  derived and/or modified sequence
tgagccgagaaccagatcctgaagaccagcgtgtggtaccaggaggtgtggaacgacgagttcctgagctggaacagcagcatgttcgacgagatcagagagatcagcctgcccctgagcgccatctgggcccccgacatcatcatcaacgagttcgtggacatcgagagataccccgacctgccctacgtgtacgtgaacagcagcggcaccatcgagaactacaagcccatccaggtggtgagcgcctgcagcctggagacctacgccttccccttcgacgtgcagaactgcagcctgaccttcaagagcatcctgcacaccgtggaggacgtggacctggccttcctgagaagccccgaggacatccagcacgacaagaaggccttcctgaacgacagcgagtgggagctgctgagcgtgagcagcacctacagcatcctgcagagcagcgccggcggcttcgcccagatccagttcaacggcaccagcagccccagcgcctggcccagctggttcagcgcctag

SEQ ID NO: 339981 - protein, 224 aa, Artificial Sequence
  derived and/or modified sequence
MDSNHQSNYKLSKTEKKFLRKQIKAKHTLLRHEGIETVSYATQSLVVANGGLGNGVSRNQLLPVLEKCGLVDALLMPPNKPYSFARYRTTEESKRAYVTLNGKEVVDDLGQKITLYLNFVEKVQWKELRPQALPPGLMVVEEIISSEEEKMLLESVDWTEDTDNQNSQKSLKHRRVKHFGYEFHYENNNVDKDKPLSGGLPDICESFLEKWLRKAEKNLEVGIH

SEQ ID NO: 339982 - protein, 145 aa, Artificial Sequence
  derived and/or modified sequence
MSGVRAVRISIESACEKQVHEVGLDGTETYLPPLSMSQNLARLAQRIDFSQGSGSEEEEAAGTEGDAQEWPGAGSSADQDDEEGVVKFQPSLWPWDSVRNNLRSALTEMCVLYDVLSIVRDKKFMTLDPVSQDALPPKQVFVDFN

SEQ ID NO: 339983 - protein, 339 aa, Artificial Sequence
  derived and/or modified sequence
MADSVKTFLQDLARGIKDSIWGICTISKLDARIQQKREEQRRRRASSVLAQRRAQSIERKQESEPRIVSRIFQCCAWNGGVFWFSLLLFYRVFIPVLQSVTARIIGDPSLHGDVWSWLEFFLTSIFSALWVLPLFVLSKVVNAIWFQDIADLAFEVSGRKPHPFPSVSKIIADMLFNLLLQALFLIQGMFVSLFPIHLVGQLVSLLHMSLLYSLYCFEYRWFNKGIEMHQRLSNIERNWPYYFGFGLPLAFLTAMQSSYIISGCLFSILFPLFIISANEAKPGKAYLFQLRLFSLVVFLSNRLFHKTVYLQSALSSSTSAEKFPSPHPSPAKLKATAGH

SEQ ID NO: 339984 - DNA, 1020 bp, Artificial Sequence
  derived and/or modified sequence
atggcagattcagtgaaaacctttctgcaggatctggcccgtggcataaaagattccatttggggtatctgcacaatatccaaactagacgcccggatccagcagaaacgagaagaacagagaagaaggagggcgtcctccgtcctggcacagcgtcgggctcagagtattgaaagaaagcaagagtctgaacccagaatagtgtctagaattttccaatgctgtgcctggaatggaggcgtgttctggttcagcctccttctcttctatagggtgtttatacctgtgttgcaatccgttaccgctagaatcatcggtgaccccagccttcacggggacgtgtggagctggctggagttcttcctgacctccatcttctctgcgctatgggttctgccgctgttcgtgctctcgaaagtggtcaatgccatatggtttcaggacattgctgaccttgccttcgaggtctccggacgaaagccacaccccttccctagtgtttccaaaatcattgcggatatgctcttcaacctattgcttcaggcactctttctcattcaaggcatgttcgtgagcctgtttcccatccatctggtaggacagctggtgtcccttctgcatatgagtctgctgtactctctttattgttttgaatatcggtggttcaataaagggattgaaatgcatcagcgtctctctaacattgaacgcaactggccttactacttcggattcgggctgcccctggcgtttctgacagccatgcagtccagctatataatctcaggatgcctcttcagtatactatttcccctcttcatcatatcagcgaatgaggcaaagccgggtaaagcttacctgtttcagttgaggctattctctctcgtggtttttctgtctaacaggctctttcataagaccgtgtacctgcagtcagccctttccagctcgacatcagcagaaaagttcccatcccctcacccatctccagccaaactaaaagccaccgccggacactag

SEQ ID NO: 339985 - DNA, 1020 bp, Artificial Sequence
  derived and/or modified sequence
atggctgacagcgtgaagaccttcctgcaggacctggcccggggcatcaaggacagcatctggggcatctgcaccatcagcaagctggatgcccgcatccagcagaagcgggaggagcagaggagaagaagagccagctctgtgctggcccagaggcgggcccagagcattgaaaggaagcaggagagcgagcccagaattgtgagccgcatcttccagtgctgtgcctggaatggaggagtcttctggttcagcctgctgctcttctacagagtcttcatccctgtgctgcagagcgtgacagcccgcatcattggagaccccagcctgcatggagatgtgtggagctggctggagttcttcctgaccagcatcttcagcgccctgtgggtgctgcccctgtttgtgctgagcaaggtggtgaatgccatctggttccaggacattgctgacctggcctttgaggtgtctggcaggaagccccaccccttccccagcgtgtccaagatcatcgctgacatgctgttcaacctgctgctgcaggccctcttcctgatccagggcatgtttgtgtccctcttccccatccacctggtgggccagctggtgtccctgctgcacatgagcctgctgtacagcctgtactgctttgagtaccgctggttcaacaagggcatcgagatgcaccagaggctgagcaacattgaaagaaactggccctactactttggatttggcctgcccctggccttcctgacagccatgcagagcagctacatcatcagcggctgcctcttcagcatcctcttccccctcttcatcatcagcgccaatgaggccaagccaggcaaggcctacctgttccagctgcggctcttcagcctggtggtgttcctgagcaacagactcttccacaagacagtgtacctgcagagcgccctgagcagcagcaccagcgctgagaagttccccagcccccaccccagccctgccaagctgaaggccacagctggccactag

SEQ ID NO: 339986 - DNA, 1020 bp, Artificial Sequence
  derived and/or modified sequence
atggccgacagcgtgaagaccttcctgcaggacctggcccggggcataaaggatagtatatgggggatttgcaccatatcaaagctggacgcaagaatccagcagaaacgcgaggaacaacggagaagacgcgcctcttcagtcctggcacagcggcgggcccaatcaatcgaacggaaacaggaatccgaaccacggatcgtttctcggattttccaatgctgtgcctggaatggtggcgtcttttggttttcacttctcctgttctatcgcgtgtttattccagtgttgcaaagtgtcactgcccgaatcatcggcgatccgtcgctccacggggacgtgtggagttggctggagtttttcctgactagcattttctccgccctatgggtgttacctctgttcgtgttatcaaaggtggtgaacgccatctggtttcaggacattgctgaccttgccttcgaagtcagcggcaggaagccgcacccctttccgagcgtgtccaaaatcatcgctgatatgctgttcaatctgctgctgcaggccttgttcctgatccagggaatgttcgtgtccctgttccctatccatctggtcggccagttggtctccctgctccacatgtcgctgctttactccttgtattgcttcgaataccgctggttcaacaagggtatcgagatgcaccagcggctgagtaatattgagaggaattggccttattactttggctttgggttgccactggcttttctcaccgccatgcagtcttcatatattattagcggctgtctgttttccattctgttccctctgttcataatttctgccaatgaggcaaagccgggcaaggcttacctgttccaactccgcctattttcattagttgtgttcctgtctaaccggctgtttcacaagacagtttacctccagagtgcactatcaagctccacctcagcagagaaattccccagcccgcatccctccccggcaaaactgaaagctaccgctgggcactag

SEQ ID NO: 339987 - DNA, 1020 bp, Artificial Sequence
  derived and/or modified sequence
atggccgacagtgtgaaaaccttcctgcaggatttagccagaggcatcaaagacagtatatggggtatctgcacaatttcaaaactggatgcgcgaatccagcaaaagcgggaagaacagagacggaggcgcgcttctagcgtgctggctcagaggagagcccagagcattgaacggaagcaggagagtgagccacgaatcgtctcacgcatcttccaatgctgcgcttggaatgggggagtgttctggtttagtcttctcctgttctatcgcgtcttcatccccgtactgcaaagtgttacagctcgcatcattggagacccctccctgcatggggatgtatggtcttggttagagttcttcctcactagcatattctcagctttgtgggtgctgcccctgttcgtgctctcaaaagttgtgaatgcaatctggttccaggatatcgcagacctggcctttgaggtgtctgggcgaaagccccatcccttcccctctgtgagtaaaatcatagccgacatgctttttaacctgctgttgcaagccctcttcttaatccaagggatgtttgtgagtctgttccctattcacctagtcggtcagcttgtctcgctactgcacatgtcactactgtactcattgtattgctttgagtatcggtggtttaataaaggcatcgaaatgcaccagcgcctctcaaacatcgagaggaattggccgtattactttggctttgggctacctctcgcattcttgacagccatgcagagcagctacatcatatccggttgtctgttttcaattctgttccctttgttcatcatctccgctaatgaagctaagcccggaaaggcttacctatttcagctgcggcttttcagcctagtcgtctttctgtctaataggctgtttcataaaaccgtgtatcttcagtcagcgttatcatcttctacctccgccgaaaaattcccatcaccacacccaagtccagctaaattgaaagccaccgcaggccattag

SEQ ID NO: 339988 - DNA, 1020 bp, Artificial Sequence
  derived and/or modified sequence
atggccgacagcgtgaagaccttcctgcaggacctggccagaggcatcaaggacagcatctggggcatctgcaccatcagcaagctggacgccagaatccagcagaagagagaggagcagagaagaagaagagccagcagcgtgctggcccagagaagagcccagagcatcgagagaaagcaggagagcgagcccagaatcgtgagcagaatcttccagtgctgcgcctggaacggcggcgtgttctggttcagcctgctgctgttctacagagtgttcatccccgtgctgcagagcgtgaccgccagaatcatcggcgaccccagcctgcacggcgacgtgtggagctggctggagttcttcctgaccagcatcttcagcgccctgtgggtgctgcccctgttcgtgctgagcaaggtggtgaacgccatctggttccaggacatcgccgacctggccttcgaggtgagcggcagaaagccccaccccttccccagcgtgagcaagatcatcgccgacatgctgttcaacctgctgctgcaggccctgttcctgatccagggcatgttcgtgagcctgttccccatccacctggtgggccagctggtgagcctgctgcacatgagcctgctgtacagcctgtactgcttcgagtacagatggttcaacaagggcatcgagatgcaccagagactgagcaacatcgagagaaactggccctactacttcggcttcggcctgcccctggccttcctgaccgccatgcagagcagctacatcatcagcggctgcctgttcagcatcctgttccccctgttcatcatcagcgccaacgaggccaagcccggcaaggcctacctgttccagctgagactgttcagcctggtggtgttcctgagcaacagactgttccacaagaccgtgtacctgcagagcgccctgagcagcagcaccagcgccgagaagttccccagcccccaccccagccccgccaagctgaaggccaccgccggccactag

SEQ ID NO: 339989 - DNA, 2258 bp, Artificial Sequence
  derived and/or modified sequence
ccccgcctcgtggtgccggctggttcttcgcgctcgcccgacttcccagcggccccgtgcggcccgggcatgcccagtgcgggcgcagcggccccggccctggaagcgccccggcggagctggcctgcggtgggctaggggcagggccggagccgcggcggcggagctgtggatccttcatgatgagagatttggggacacttctctctcctgtgtgtagttgatagtttggtggtgaagagatggctgacagtgtcaaaacctttctccaggaccttgccagaggaatcaaagactccatctggggtatttgtaccatctcaaagctagatgctcgaatccagcaaaagagagaggagcagcgtcgaagaagggcaagtagtgtcttggcacagagaagagcccagagtatagagcggaagcaagagagtgagccacgtattgttagtagaattttccagtgttgtgcttggaatggtggagtgttctggttcagtctcctcttgttttatcgagtatttattcctgtgcttcagtcggtaacagcccgaattatcggtgacccatcactacatggagatgtttggtcgtggctggaattcttcctcacgtcaattttcagtgctctttgggtgctccccttgtttgtgcttagcaaagtggtgaatgccatttggtttcaggatatagctgacctggcatttgaggtatcagggaggaagcctcacccattccctagtgtcagcaaaataattgctgacatgctcttcaaccttttgctgcaggctcttttcctcattcagggaatgtttgtgagtctctttcccatccatcttgtcggtcagctggttagtctcctgcatatgtcccttctctactcactgtactgctttgaatatcgttggttcaataaaggaattgaaatgcaccagcggttgtctaacatagaaaggaattggccttactactttgggtttggtttgcccttggcttttctcacagcaatgcagtcctcatatattatcagtggctgccttttctctatcctctttcctttattcattatcagcgccaatgaagcaaagcctggcaaagcatatctcttccagttgcgcctcttctccttggtggtcttcttaagcaacagactcttccacaagacagtctacctgcagtcggccctgagcagctctacttctgcagagaagttcccttcaccgcatccgtcgcctgccaaactgaaggctactgcaggtcactgagttgcctgccatccaaaggggatgggcgggattggaagaagctgtggcagctcttttccctgttcacctcccgcctgccagggaaggcaggacccgctctgccaagggccctctgcgtattcccttctctctgaggaattgaaatttttgtctctggtgcacgtaaggcagaatgttccctgacaccagtgtgtggatttttaacatcaccgtgagtctgaaaggaccacaggtttttctgcagctattttctagcatttgccagtccctgtgcctggactgattggaacactttgtttttctccctgtgccatttacccttccacctttccatcctgccttctaccacccttggatgaatggattttgtaattctagctgttgtattttgtgaatttgttaattttgttgtttttctgtgaaacacatacattggatatgggaggtaaaggagtgtcccagttgctcctggtcactccctttatagccattactgtcttgtttcttgtaactcaggttaggttttggtctctcttgctccactgcaaaaaaaaaaaaaaaaaaaaaaaaaaaaaaaaagcctgaagagatgagataggaggaaagacctcacagccagatctgctgggttttgaggagtgattttctttcttccccttgaaggggaaaaagctattttcattggtacatttaaagtcccccaactatggggaggtaccaattctggacaagtgccactacaacaacactaaacctgaacttttcaactccgttggtggtgggaggcagcgggcagaaatttactgttggccactgccaggtctatttcatatttcaaaggaatattgggtgctgcatataggaactgaaggggtcaatgtattaaacctgtgattggttgttttcctgtcattttgagagactaaatgtggggggcagatgtcaaaatacctgtacaattttaaaatgtcacaattaaacatgagctggtttccc

SEQ ID NO: 339990 - DNA, 2146 bp, Artificial Sequence
  derived and/or modified sequence
ccccgcctcgtggtgccggctggttcttcgcgctcgcccgacttcccagcggccccgtgcggcccgggcatgcccagtgcgggcgcagcggccccggccctggaagcgccccggcggagctggcctgcggtgggctaggggcagggccggagccgcggcggcggagctgtggatccttcatgatgagagatttggggacacttctctctcctgtgtgtagttgatagtttggtggtgaagagatggctgacagtgtcaaaacctttctccaggaccttgccagaggaatcaaagactccatctggggtatttgtaccatctcaaagctagatgctcgaatccagcaaaagagagaggagcagcgtcgaagaagggcaagtagtgtcttggcacagagaagagcccagagtatagagcggaagcaagagagtgagccacgtattgttagtagaattttccagtgttgtgcttggaatggtggagtgttctggttcagtctcctcttgttttatcgagtatttattcctgtgcttcagtcggtaacagcccgaattatcggtgacccatcactacatggagatgtttggtcgtggctggaattcttcctcacgtcaattttcagtgctctttgggtgctccccttgtttgtgcttagcaaagtggtgaatgccatttggtttcaggatatagctgacctggcatttgaggtatcagggaggaagcctcacccattccctagtgtcagcaaaataattgctgacatgctcttcaaccttttgctgcaggctcttttcctcattcagggaatgtttgtgagtctctttcccatccatcttgtcggtcagctggttagtctcctgcatatgtcccttctctactcactgtactgctttgaatatcgttggttcaataaagtggctgccttttctctatcctctttcctttattcattatcagcgccaatgaagcaaagacccgcaaagcatatctcttccagttgcgcctcttctccttggtggtcttcttaagcaacagactcttccacaagacagtctacctgcagtcggccctgagcagctctacttctgcagagaagttcccttcaccgcatccgtcgcctgccaaactgaaggctactgcaggtcactgagttgcctgccatccaaaggggatgggcgggattggaagaagctgtggcagctcttttccctgttcacctcccgcctgccagggaaggcaggacccgctctgccaagggccctctgcgtattcccttctctctgaggaattgaaatttttgtctctggtgcacgtaaggcagaatgttccctgacaccagtgtgtggatttttaacatcaccgtgagtctgaaaggaccacaggtttttctgcagctattttctagcatttgccagtccctgtgcctggactgattggaacactttgtttttctccctgtgccatttacccttccacctttccatcctgccttctaccacccttggatgaatggattttgtaattctagctgttgtattttgtgaatttgttaattttgttgtttttctgtgaaacacatacattggatatgggaggtaaaggagtgtcccagttgctcctggtcactccctttatagccattactgtcttgtttcttgtaactcaggttaggttttggtctctcttgctccactgcaaaaaaaaaaaaaaaaaaaaaaaaaaaaaaaaagcctgaagagatgagataggaggaaagacctcacagccagatctgctgggttttgaggagtgattttctttcttccccttgaaggggaaaaagctattttcattggtacatttaaagtcccccaactatggggaggtaccaattctggacaagtgccactacaacaacactaaacctgaacttttcaactccgttggtggtgggaggcagcgggcagaaatttactgttggccactgccaggtctatttcatatttcaaaggaatattgggtgctgcatataggaactgaaggggtcaatgtattaaacctgtgattggttgttttcctgtcattttgagagactaaatgtggggggcagatgtcaaaatacctgtacaattttaaaatgtcacaattaaacatgagctggtttccc

SEQ ID NO: 339991 - protein, 261 aa, Artificial Sequence
  derived and/or modified sequence
MADSVKTFLQDLARGIKDSIWGICTISKLDARIQQKREEQRRRRASSVLAQRRAQSIERKQESEPRIVSRIFQCCAWNGGVFWFSLLLFYRVFIPVLQSVTARIIGDPSLHGDVWSWLEFFLTSIFSALWVLPLFVLSKVVNAIWFQDIADLAFEVSGRKPHPFPSVSKIIADMLFNLLLQALFLIQGMFVSLFPIHLVGQLVSLLHMSLLYSLYCFEYRWFNKVAAFSLSSFLYSLSAPMKQRPAKHISSSCASSPWWSS

SEQ ID NO: 339992 - DNA, 786 bp, Artificial Sequence
  derived and/or modified sequence
atggctgattccgtgaaaacgtttttacaggacctggccagaggtatcaaagacagtatttgggggatttgcaccatctccaagctggacgccaggattcaacagaaacgcgaggagcaacgccggaggcgggctagttccgttctcgctcagcgtagagctcagtcaatcgaacgtaagcaggagagtgagcctcggattgtgtctcggatcttccagtgttgtgcttggaacggcggagtgttctggttcagcctgcttctgttctacagggtgttcataccagtgctccagtctgtgacagcccgcattatcggtgatccttccttgcacggtgatgtctggtcctggttggagtttttcctgaccagcatatttagcgctctgtgggtccttcccctgtttgtactctcaaaggtagtgaacgcaatttggttccaagatatcgcagatctcgcgttcgaggtgtcaggacggaaacctcacccttttccttcggtcagtaagattattgccgatatgttgtttaacctgctgctgcaggcactgttccttatccaagggatgtttgtctcactctttccaatccacctcgttggccaattagtgtctcttctgcacatgtcccttttgtattctttgtactgtttcgagtatcgttggtttaacaaggtggccgcctttagtctcagcagttttttgtacagtttatctgccccaatgaagcagagacctgctaagcatatcagctcaagctgtgctagtagcccatggtggtcaagttag

SEQ ID NO: 339993 - DNA, 786 bp, Artificial Sequence
  derived and/or modified sequence
atggctgacagcgtgaagaccttcctgcaggacctggcccggggcatcaaggacagcatctggggcatctgcaccatcagcaagctggatgcccgcatccagcagaagcgggaggagcagaggagaagaagagccagctctgtgctggcccagaggcgggcccagagcattgaaaggaagcaggagagcgagcccagaattgtgagccgcatcttccagtgctgtgcctggaatggaggagtcttctggttcagcctgctgctcttctacagagtcttcatccctgtgctgcagagcgtgacagcccgcatcattggagaccccagcctgcatggagatgtgtggagctggctggagttcttcctgaccagcatcttcagcgccctgtgggtgctgcccctgtttgtgctgagcaaggtggtgaatgccatctggttccaggacattgctgacctggcctttgaggtgtctggcaggaagccccaccccttccccagcgtgtccaagatcatcgctgacatgctgttcaacctgctgctgcaggccctcttcctgatccagggcatgtttgtgtccctcttccccatccacctggtgggccagctggtgtccctgctgcacatgagcctgctgtacagcctgtactgctttgagtaccgctggttcaacaaggtggccgccttcagcctgagcagcttcctgtacagcctgagcgcccccatgaagcagaggcctgccaagcacatcagcagcagctgtgccagcagcccctggtggagcagctag

SEQ ID NO: 339994 - DNA, 786 bp, Artificial Sequence
  derived and/or modified sequence
atggccgacagcgtgaagaccttcctgcaggacctggcccggggcatcaaagattctatctgggggatctgtaccatttcaaaacttgatgcacgcattcagcaaaaaagagaggaacagcggcggagaagggcatcatctgttctggctcagcgcagagcccagagtatagaaaggaaacaggaaagcgagcctagaattgtgtcacggattttccagtgctgcgcttggaatggcggagtcttttggtttagcctattgcttttctacagagtgtttatacctgtgttacagtcagtgacggcccgaataatcggtgacccttctcttcatggggacgtgtggagctggctagagttttttttaacatcaattttcagcgccctctgggtgctccctctcttcgttctgtcaaaagtagtgaatgccatttggtttcaggacatagctgacctggcgttcgaggtgagcggacgaaagccacatccattcccatccgtgtccaagatcatcgccgatatgctgtttaacttactgctacaggccctatttctgatccaggggatgtttgtgagcctgtttcccattcatttagtgggccaactcgtgagcctcctccacatgtcactcctctacagcctgtactgtttcgagtatagatggttcaacaaggtggcggcattctcattgtctagctttctgtattcactcagcgcgccgatgaaacagaggcccgccaagcatatcagttcaagttgcgccagctcaccttggtggagttcttag

SEQ ID NO: 339995 - DNA, 786 bp, Artificial Sequence
  derived and/or modified sequence
atggcagatagtgtaaagaccttcctccaggacctggccagggggataaaggactccatatggggcatctgcaccatctcaaagctcgacgccaggatccagcagaaacgtgaggaacaacgtagaagaagagcttcaagtgtgctggcgcagcgccgagcgcagtcgatcgagaggaagcaagaaagcgagcccaggatcgtgtccaggatttttcagtgctgtgcctggaacgggggtgtcttttggtttagcttactcttattttacagggtatttatccccgttttgcagagcgtcaccgcacggatcataggggacccaagtttgcacggagatgtttggagttggctcgagtttttcctcaccagtatcttcagcgcactgtgggtgctgcctctcttcgttttgagtaaggtggtcaatgctatctggtttcaagacattgcagacctcgccttcgaggtgagcggtcgcaagccacacccattcccaagcgtctcaaagatcattgcagacatgttgtttaatttgttactgcaagcactatttctaattcaaggcatgttcgtttccctattcccaattcacctggttggtcagctggtgtccttactccatatgtcgctgctctacagcttatattgttttgagtatagatggtttaacaaggttgccgcattctctttgtcttcattcctgtattcgcttagtgccccaatgaagcagagacccgcaaagcatatcagcagcagctgtgcttcgagcccctggtggagttcctag

SEQ ID NO: 339996 - DNA, 786 bp, Artificial Sequence
  derived and/or modified sequence
atggccgacagcgtgaagaccttcctgcaggacctggccagaggcatcaaggacagcatctggggcatctgcaccatcagcaagctggacgccagaatccagcagaagagagaggagcagagaagaagaagagccagcagcgtgctggcccagagaagagcccagagcatcgagagaaagcaggagagcgagcccagaatcgtgagcagaatcttccagtgctgcgcctggaacggcggcgtgttctggttcagcctgctgctgttctacagagtgttcatccccgtgctgcagagcgtgaccgccagaatcatcggcgaccccagcctgcacggcgacgtgtggagctggctggagttcttcctgaccagcatcttcagcgccctgtgggtgctgcccctgttcgtgctgagcaaggtggtgaacgccatctggttccaggacatcgccgacctggccttcgaggtgagcggcagaaagccccaccccttccccagcgtgagcaagatcatcgccgacatgctgttcaacctgctgctgcaggccctgttcctgatccagggcatgttcgtgagcctgttccccatccacctggtgggccagctggtgagcctgctgcacatgagcctgctgtacagcctgtactgcttcgagtacagatggttcaacaaggtggccgccttcagcctgagcagcttcctgtacagcctgagcgcccccatgaagcagagacccgccaagcacatcagcagcagctgcgccagcagcccctggtggagcagctag

SEQ ID NO: 339997 - protein, 322 aa, Artificial Sequence
  derived and/or modified sequence
MPPKVLSTWWRGKHGFQVGLFPGHCVELINQKVPQSVTNSVPKPVSKKHGKLITFLRTFMKSRPTKQKLKQRGILKERVFGCDLGEHLLNSGFEVPQVLQSCTAFIERYGIVDGIYRLSGVASNIQRLRHEFDSEHVPDLTKEPYVQDIHSVGSLCKLYFRELPNPLLTYQLYEKFSDAVSAATDEERLIKIHDVIQQLPPPHYRTLEFLMRHLSLLADYCSITNMHAKNLAIVWAPNLLRSKQIESACFSGTAAFMEVRIQSVVVEFILNHVDVLLPHFSARTELIVPFPLRLPRKQFTPPLLGPMSPLNPLVQITVCISI

SEQ ID NO: 339998 - DNA, 969 bp, Artificial Sequence
  derived and/or modified sequence
atgccccccaaggtgctgagcacctggtggagaggcaagcacggcttccaggtgggcctgttccccggccactgcgtggagctgatcaaccagaaggtgccccagagcgtgaccaacagcgtgcccaagcccgtgagcaagaagcacggcaagctgatcaccttcctgagaaccttcatgaagagcagacccaccaagcagaagctgaagcagagaggcatcctgaaggagagagtgttcggctgcgacctgggcgagcacctgctgaacagcggcttcgaggtgccccaggtgctgcagagctgcaccgccttcatcgagagatacggcatcgtggacggcatctacagactgagcggcgtggccagcaacatccagagactgagacacgagttcgacagcgagcacgtgcccgacctgaccaaggagccctacgtgcaggacatccacagcgtgggcagcctgtgcaagctgtacttcagagagctgcccaaccccctgctgacctaccagctgtacgagaagttcagcgacgccgtgagcgccgccaccgacgaggagagactgatcaagatccacgacgtgatccagcagctgccccccccccactacagaaccctggagttcctgatgagacacctgagcctgctggccgactactgcagcatcaccaacatgcacgccaagaacctggccatcgtgtgggcccccaacctgctgagaagcaagcagatcgagagcgcctgcttcagcggcaccgccgccttcatggaggtgagaatccagagcgtggtggtggagttcatcctgaaccacgtggacgtgctgctgccccacttcagcgccagaaccgagctgatcgtgcccttccccctgagactgcccagaaagcagttcaccccccccctgctgggccccatgagccccctgaaccccctggtgcagatcaccgtgtgcatcagcatctag

SEQ ID NO: 339999 - DNA, 969 bp, Artificial Sequence
  derived and/or modified sequence
atgccacccaaggttctgtctacctggtggagagggaaacatggatttcaggtagggctgtttccggggcactgtgtcgaactgatcaaccagaaagtgcctcaatctgttactaactccgtgcctaaacctgtgagtaaaaaacatggcaagctgataacttttctgaggacctttatgaagagtcgccccaccaagcagaagctcaaacaaagggggatcctcaaagaacgcgttttcggatgcgatttaggcgagcatctactaaattccgggtttgaagttccacaggtgcttcagagctgtaccgccttcatcgagaggtacggaattgttgacgggatttaccgacttagcggggtggcctctaatatccagaggctccgtcacgaatttgatagtgaacatgtaccagatctcactaaggagccttacgtccaggacatccacagcgtggggtcgttgtgcaagctgtactttcgcgagctgcccaatccgctcctgacgtaccagctgtatgaaaaatttagcgacgctgtctctgcggcgacagatgaggagcgcctgatcaagatccatgatgtcatccaacagctgccacctccacattaccggacccttgagttcttgatgagacacctgagccttttagctgactattgctcaatcactaacatgcacgcaaagaaccttgctatcgtctgggcacccaatctgctcaggagcaagcagatcgagtccgcctgtttttcaggaacagccgccttcatggaagtgaggattcagtccgtggtggtggagttcattctaaatcacgtagatgttctgttgcctcacttctctgccaggaccgagcttatcgtgcccttccccctgcgattgccgcgaaagcagtttacgccacctctcctcggccccatgagtccactgaaccctctggtccagattactgtctgcatctctatctag

SEQ ID NO: 340000 - DNA, 969 bp, Artificial Sequence
  derived and/or modified sequence
atgccacccaaggtgctgagcacctggtggaggggcaagcacggcttccaggtgggcctcttccctggccactgtgtggagctgatcaaccagaaggtgccccagagcgtgaccaacagcgtgcccaagcctgtgtccaagaagcacggcaagctgatcaccttcctgcggaccttcatgaagagccggcccaccaagcagaagctgaagcagaggggcatcctgaaggagcgggtgtttggctgtgacctgggggagcacctgctgaacagcggctttgaggtgccccaggtgctgcagagctgcacagccttcatcgagagatatggaattgtggatggcatctaccgcctgtctggagtggccagcaacatccagaggctgcggcatgaatttgacagcgagcacgtgcctgacctgaccaaggagccctacgtgcaggacatccacagcgtgggcagcctgtgcaagctgtacttccgggagctgcccaaccccctgctgacctaccagctgtatgagaagttcagtgatgctgtgtctgctgccacagatgaggagcggctcatcaagatccatgatgtgatccagcagctgcccccaccccactaccgcaccctggagttcctgatgaggcacctgagcctgctggccgactactgcagcatcaccaacatgcacgccaagaacctggccatcgtgtgggcccccaacctgctgcggagcaagcagattgaaagtgcctgcttctctggaacagctgccttcatggaggtgcgcatccagagcgtggtggtggagttcatcctgaaccacgtggatgtgctgctgccccacttcagcgccaggacagagctgattgtgcccttccccctgcggctgcccaggaagcagttcaccccacccctgctgggccccatgagccccctgaaccccctggtgcagatcaccgtgtgcatcagcatctag

SEQ ID NO: 340001 - DNA, 969 bp, Artificial Sequence
  derived and/or modified sequence
atgccccccaaggtgctgagcacctggtggcggggcaagcacggctttcaagtgggtctgtttccgggtcactgtgtggaattgataaatcaaaaagtcccacaatctgtcaccaacagtgtgcccaagcccgtcagtaagaagcatggcaagctgatcactttcctgaggaccttcatgaagtctaggccaaccaaacaaaaacttaaacagcgcggcattctgaaggagcgggtgttcgggtgcgacctcggagaacatctcctgaattctggattcgaggttcctcaggttctccagtcctgcacagcttttattgaaaggtatggaattgtcgacggcatctacaggctgtctggggtggcctccaacattcagcgccttagacacgagtttgattccgaacacgtaccggatctgacaaaggagccttacgtccaggatatccattctgtcggctccctttgtaagctgtattttcgagaattgccaaatccactcttgacctaccagctgtacgaaaaattctccgacgcggtgagcgcagcaaccgacgaggaacgcctcatcaaaatccacgatgtgattcagcagctgcctccccctcattaccgaaccctggaattcctgatgagacatctatccctcctagccgactattgtagcattaccaatatgcatgccaaaaacctggcaatcgtttgggcaccaaacctcctgaggtccaagcaaattgagagtgcatgcttctccgggaccgcggcatttatggaagtacggatccaatcagtagtggtcgagttcattctcaatcacgtggacgtgttgctgcctcacttcagcgcacggacggagttgatcgtccccttcccactgagacttcctagaaaacaattcacaccaccactgcttgggcctatgagcccacttaatcccctggtgcaaatcacagtgtgcatctctatatag

SEQ ID NO: 340002 - DNA, 969 bp, Artificial Sequence
  derived and/or modified sequence
atgcctccaaaagttctttccacctggtggcgaggaaagcacggcttccaagtcggcctgtttccaggacactgtgtggagctcatcaatcagaaagtgccacagtcggtgaccaatagcgtgccgaaaccagtcagcaaaaagcacggcaagttgattactttcttgcgcacattcatgaaatcccgcccaaccaagcaaaagctcaagcagcggggaattctgaaggaacgggtttttggatgcgacttaggagagcacctgttaaatagcggcttcgaggtgccacaagtgctccagagctgtaccgcattcattgagcgctacggaattgtggacgggatttaccggctgtccggagtggcttccaacatccagagactgaggcacgaattcgacagcgaacacgtgcctgatctgaccaaagaaccttatgtacaggacattcacagtgtgggtagtctatgtaagctgtatttccgggagctgccaaatccccttctgacataccaactatatgaaaagttcagcgacgctgtgtccgccgcaacagatgaagagcgactgattaagatccatgatgtgattcagcagttaccaccaccccattacaggacactcgagttcctcatgaggcacttgtctctcttggctgattactgcagtattacaaatatgcacgcaaagaatcttgcaattgtttgggcaccaaatttgctacggagcaaacagatcgaatcggcctgtttcagcgggactgccgctttcatggaggttaggatccaatcagtggtggtcgaattcattcttaaccatgttgatgtcctcttgcctcacttcagcgccagaacagaacttatcgtgccctttcccttgcgattaccgagaaaacagttcacaccacccctgttaggacccatgtcccccctgaaccccttagtccagataaccgtgtgtatttctatctag

SEQ ID NO: 340003 - DNA, 5217 bp, Artificial Sequence
  derived and/or modified sequence
atgaagagcagacccaccaagcagaagctgaagcagagaggcatcctgaaggagagagtgttcggctgcgacctgggcgagcacctgctgaacagcggcttcgaggtgccccaggtgctgcagagctgcaccgccttcatcgagagatacggcatcgtggacggcatctacagactgagcggcgtggccagcaacatccagagactgagacacgagttcgacagcgagcacgtgcccgacctgaccaaggagccctacgtgcaggacatccacagcgtgggcagcctgtgcaagctgtacttcagagagctgcccaaccccctgctgacctaccagctgtacgagaagttcagcgacgccgtgagcgccgccaccgacgaggagagactgatcaagatccacgacgtgatccagcagctgccccccccccactacagaaccctggagttcctgatgagacacctgagcctgctggccgactactgcagcatcaccaacatgcacgccaagaacctggccatcgtgtgggcccccaacctgctgagaagcaagcagatcgagagcgcctgcttcagcggcaccgccgccttcatggaggtgagaatccagagcgtggtggtggagttcatcctgaaccacgtggacgtgctgttcagcggcagaatcagcatggccatgcaggagggcgccgccagcctgagcagacccaagagcctgctggtgagcagccccagcaccaagctgctgaccctggaggaggcccaggccagaacccaggcccaggtgaacagccccatcgtgaccgagaacaagtacatcgaggtgggcgagggccccgccgccctgcagggcaagttccacaccatcatcgagttccccctggagagaaagagaccccagaacaagatgaagaagagccccgtgggcagctggagaagcttcttcaacctgggcaagagcagcagcgtgagcaagagaaagctgcagagaaacgagagcgagcccagcgagatgaaggccatggccctgaagggcggcagagccgagggcaccctgagaagcgccaagagcgaggagagcctgaccagcctgcacgccgtggacggcgacagcaagctgttcagacccagaagacccagaagcagcagcgacgccctgagcgccagcttcaacggcgagatgctgggcaacagatgcaacagctacgacaacctgccccacgacaacgagagcgaggaggagggcggcctgctgcacatccccgccctgatgagcccccacagcgccgaggacgtggacctgagcccccccgacatcggcgtggccagcctggacttcgaccccatgagcttccagtgcagcccccccaaggccgagagcgagtgcctggagagcggcgccagcttcctggacagccccggctacagcaaggacaagcccagcgccaacaagaaggacgccgagaccggcagcagccagtgccagacccccggcagcaccgccagcagcgagcccgtgagccccctgcaggagaagctgagccccttcttcaccctggacctgagccccaccgaggacaagagcagcaagcccagcagcttcaccgagaaggtggtgtacgccttcagccccaagatcggcagaaagctgagcaagagccccagcatgagcatcagcgagcccatcagcgtgaccctgccccccagagtgagcgaggtgatcggcaccgtgagcaacaccaccgcccagaacgccagcagcagcacctgggacaagtgcgtggaggagagagacgccaccaacagaagccccacccagatcgtgaagatgaagaccaacgagaccgtggcccaggaggcctacgagagcgaggtgcagcccctggaccaggtggccgccgaggaggtggagctgcccggcaaggaggaccagagcgtgagcagcagccagagcaaggccgtggccagcggccagacccagaccggcgccgtgacccacgaccccccccaggacagcgtgcccgtgagcagcgtgagcctgatcccccccccccccccccccaagaacgtggccagaatgctggccctggccctggccgagagcgcccagcaggccagcacccagagcctgaagagacccggcaccagccaggccggctacaccaactacggcgacatcgccgtggccaccaccgaggacaacctgagcagcagctacagcgccgtggccctggacaaggcctacttccagaccgacagacccgccgagcagttccacctgcagaacaacgcccccggcaactgcgaccaccccctgcccgagaccaccgccaccggcgaccccacccacagcaacaccaccgagagcggcgagcagcaccaccaggtggacctgaccggcaaccagccccaccaggcctacctgagcggcgaccccgagaaggccagaatcaccagcgtgcccctggacagcgagaagagcgacgaccacgtgagcttccccgaggaccagagcggcaagaacagcatgcccaccgtgagcttcctggaccaggaccagagcccccccagattctacagcggcgaccagccccccagctacctgggcgccagcgtggacaagctgcaccaccccctggagttcgccgacaagagccccaccccccccaacctgcccagcgacaagatctacccccccagcggcagccccgaggagaacaccagcaccgccaccatgacctacatgaccaccacccccgccaccgcccagatgagcaccaaggaggccagctgggacgtggccgagcagcccaccaccgccgacttcgccgccgccaccctgcagagaacccacagaaccaacagacccctgccccccccccccagccagagaagcgccgagcagccccccgtggtgggccaggtgcaggccgccaccaacatcggcctgaacaacagccacaaggtgcagggcgtggtgcccgtgcccgagagaccccccgagcccagagccatggacgaccccgccagcgccttcatcagcgacagcggcgccgccgccgcccagtgccccatggccaccgccgtgcagcccggcctgcccgagaaggtgagagacggcgccagagtgcccctgctgcacctgagagccgagagcgtgcccgcccacccctgcggcttccccgcccccctgccccccaccagaatgatggagagcaagatgatcgccgccatccacagcagcagcgccgacgccaccagcagcagcaactaccacagcttcgtgaccgccagcagcaccagcgtggacgacgccctgcccctgcccctgcccgtgccccagcccaagcacgccagccagaagaccgtgtacagcagcttcgccagacccgacgtgaccaccgagcccttcggccccgacaactgcctgcacttcaacatgacccccaactgccagtacagaccccagagcgtgcccccccaccacaacaagctggagcagcaccaggtgtacggcgccagaagcgagccccccgccagcatgggcctgagatacaacacctacgtggcccccggcagaaacgccagcggccaccacagcaagccctgcagcagagtggagtacgtgagcagcctgagcagcagcgtgagaaacacctgctaccccgaggacatccccccctaccccaccatcagaagagtgcagagcctgcacgccccccccagcagcatgatcagaagcgtgcccatcagcagaaccgaggtgccccccgacgacgagcccgcctactgccccagacccctgtaccagtacaagccctaccagagcagccaggccagaagcgactaccacgtgacccagctgcagccctacttcgagaacggcagagtgcactacagatacagcccctacagcagcagcagcagcagctactacagccccgacggcgccctgtgcgacgtggacgcctacggcaccgtgcagctgagacccctgcacagactgcccaacagagacttcgccttctacaaccccagactgcagggcaagagcctgtacagctacgccggcctggcccccagacccagagccaacgtgaccggctacttcagccccaacgaccacaacgtggtgagcatgccccccgccgccgacgtgaagcacacctacaccagctgggacctggaggacatggagaagtacagaatgcagagcatcagaagagagagcagagccagacagaaggtgaagggccccgtgatgagccagtacgacaacatgacccccgccgtgcaggacgacctgggcggcatctacgtgatccacctgagaagcaagagcgaccccggcaagaccggcctgctgagcgtggccgagggcaaggagagcagacacgccgccaaggccatcagccccgagggcgaggacagattctacagaagacaccccgaggccgagatggacagagcccaccaccacggcggccacggcagcacccagcccgagaagcccagcctgccccagaagcagagcagcctgagaagcagaaagctgcccgacatgggctgcagcctgcccgagcacagagcccaccaggaggccagccacagacagttctgcgagagcaagaacggccccccctacccccagggcgccggccagctggactacggcagcaagggcatccccgacaccagcgagcccgtgagctaccacaacagcggcgtgaagtacgccgccagcggccaggagagcctgagactgaaccacaaggaggtgagactgagcaaggagatggagagaccctgggtgagacagcccagcgcccccgagaagcacagcagagactgctacaaggaggaggagcacctgacccagagcatcgtgcccccccccaagcccgagagaagccacagcctgaagctgcaccacacccagaacgtggagagagaccccagcgtgctgtaccagtaccagccccacggcaagagacagagcagcgtgaccgtggtgagccagtacgacaacctggaggactaccacagcctgccccagcaccagagaggcgtgttcggcggcggcggcatgggcacctacgtgccccccggcttcccccacccccagagcagaacctacgccaccgccctgggccagggcgccttcctgcccgccgagctgagcctgcagcaccccgagacccagatccacgccgagtag

SEQ ID NO: 340004 - DNA, 5217 bp, Artificial Sequence
  derived and/or modified sequence
atgaaatcaagacctaccaagcagaagctgaagcagaggggcatcctgaaggagagagtgtttgggtgtgatcttggcgagcatctcctgaatagcggatttgaagttccacaggtgttacagagttgtaccgcatttatcgagcgctacggaattgtggacgggatctatcgcttaagcggcgtcgccagcaatatccagaggttgcgacacgaattcgattctgaacacgtccctgacctgacaaaggaaccatatgtgcaggacattcattctgtggggtctctgtgtaaactatactttcgggagctgcccaaccccctacttacctaccaactgtatgagaagttcagtgacgccgtaagcgccgccactgatgaagagagacttatcaagattcacgatgtcatccagcaattgccacccccccactataggacattagagtttctgatgcggcatctttctcttctggcagattactgttctattacgaatatgcacgccaagaacctcgcgatagtgtgggcacccaacctgttacgctcaaagcaaattgagtctgcctgttttagtggcaccgctgcctttatggaggttaggatccagagcgtggttgtagagttcattctgaatcatgtagatgtgttgttctccgggcgcatcagcatggcaatgcaggagggcgccgcctctctgtctcggcccaaatcactcctggtctccagccccagcacaaaactgctgacattggaagaagctcaggccaggacccaggcccaggtaaattcccccatcgttaccgagaataaatacattgaggtcggtgaggggcccgctgccttgcagggaaaattccacacaattatcgaattcccactcgaaaggaaaaggccccagaataagatgaaaaaatcgcctgtgggttcatggcgttcgtttttcaatctgggcaagtctagctctgtctcgaagagaaaactgcagcgcaacgagtctgaaccctctgagatgaaggccatggccctaaagggagggcgagccgagggcacacttcgtagcgcaaaatcggaggaaagtctgacgtccctccacgcggtggatggggactccaagctttttaggcccaggcggcctcgttcttcttctgatgctctgtctgcgtcctttaatggggaaatgctgggcaaccggtgtaattcctacgacaatctgcctcacgacaacgagtccgaagaggaaggtggtctgctgcacattcccgcactcatgagtcctcatagcgccgaggacgtagatctgtctccccccgatattggcgtcgctagtttggatttcgacccaatgtctttccaatgcagtccacctaaagccgagagcgaatgcttggagtcaggggcctcgtttctggacagccccggctactccaaagacaaaccatctgccaataaaaaagatgccgagactggcagctcccagtgccagacccccgggagcaccgcttctagtgagccagtgagtccgttacaggagaagctttcccctttcttcacgcttgatctcagccccactgaggataaatcgagtaagccgtcatcatttaccgaaaaagtggtgtacgcgttcagccccaagatcggacgaaaactcagtaaatcgccatccatgagcatatcagagcctatttcagtgacactgccgccccgcgttagcgaggtgatcggcactgtgtcaaacacaaccgcacaaaatgctagtagcagtacatgggacaagtgcgttgaagagcgagacgcgacaaataggtctccaacacagatcgtaaagatgaagacaaatgagactgttgctcaggaagcctacgaatctgaagtgcagcctctggaccaggttgctgctgaagaggtagagctccctgggaaggaagatcaatccgtgagtagctcgcagagcaaagctgtggcctccggccagacccaaacaggtgcggttactcacgatcccccgcaggatagtgtccctgtgtcatcagtgtctctaatcccgcctcccccccctccaaagaacgtggcccgcatgctggcccttgccctggcggagtctgcacagcaggcctccacccagagtctcaagagacctggaacgagccaagctggctataccaattacggggatatcgctgtggctactacagaagacaatcttagctcctcttacagtgcggttgccctggataaagcctacttccagacagaccgccccgctgaacagtttcatcttcaaaataatgctcccggcaattgcgatcaccccctcccagaaaccactgcgactggggacccgacccacagtaacaccactgagtctggcgagcagcaccaccaggtagatctgacaggcaaccagccccaccaagcttacctctcgggagatcccgaaaaagccagaataaccagcgtccccctagacagcgagaagagcgacgaccacgtgtcgtttccagaggatcaaagcggcaagaactctatgccaactgtctccttcctagaccaggatcagagcccaccgcgattttattccggcgatcaacctccatcatatctgggcgcaagcgtcgataaactacatcaccccctggaatttgcagacaagagtcctacccctcctaatctgccaagcgataagatctacccaccgtcaggttctcctgaagagaacacaagcacggctaccatgacctatatgaccactacaccggctacagcccagatgagcacaaaggaagcaagctgggacgtggccgaacagcctacgacagccgatttcgcagctgccaccctgcagcggacgcaccgcaccaatcgaccattaccgccgcctccgtcccagagatccgccgaacaaccaccggtagtcggtcaagtgcaggcggccacgaatataggactcaataattcacacaaggtgcagggcgtggtcccagtgcctgaacggccacctgaaccccgggcaatggacgatccagcttccgctttcatttccgacagcggagctgcagcagcccaatgccccatggctactgcagtgcagcctgggttgcctgaaaaagtgcgggacggcgcccgcgtacccctactgcacctcagagccgagagtgtgccagcccacccttgcggatttccagcacctcttccgccgacgcgtatgatggaaagcaagatgattgccgcgattcattcgagttctgccgacgctacttcctcaagcaactaccactcattcgtcaccgcttctagtaccagcgttgacgacgctctgccactccctttgccagtcccccagcctaagcacgcatcacagaaaacagtatacagtagctttgcccgcccagatgtcactacagaaccattcggccccgacaactgcctgcattttaacatgactccgaactgtcagtataggcctcagtctgttcctccacatcacaataaacttgagcaacatcaggtgtacggtgcccgctccgaacctccggcatccatgggattgcgttacaacacttatgtagcgcctgggaggaatgcgtccggtcaccacagcaagccatgctctagagttgaatacgtgtcctctctcagctctagtgtacgaaatacttgctacccagaagatatccctccttatccaactatccggagagtgcagagtctgcatgcgcccccttcaagtatgatcaggtccgtgcccattagccggacagaggtacctcccgatgatgagccagcatactgtccaaggccgctgtatcagtacaagccatatcaatccagccaggcacggagtgactatcacgttacgcagctccaaccctacttcgaaaacggtcgggtgcactatcgatatagcccttactctagctcctctagctcctattacagtcctgacggcgcactgtgtgatgtagacgcctacggtaccgtgcagctacggcctctgcataggctgcccaatagagattttgcgttctacaatccaaggctgcaggggaagtccctctacagctacgctggattggctcctcggccccgcgctaatgtgacaggatatttctcacctaatgaccataacgtcgtctccatgccacccgctgcagatgtgaagcatacttacacttcctgggatttagaggatatggagaagtacagaatgcagtcgatacgtcgggaatccagggctagacagaaggtgaagggtcccgtcatgagccagtacgataacatgactccagccgtgcaggacgaccttgggggaatctatgtgatacatttaaggtctaagagtgatcctggaaaaactggattactgagcgtggcagaagggaaggagtcacgccacgctgccaaggctatcagtcccgagggagaggatcgattctaccgcaggcacccagaagctgagatggatagggctcatcaccacggcgggcatggcagcacacagcccgagaagccgagcctgcctcagaaacagtcgtccctcaggagtcggaagctgcccgacatgggatgtagtctgccagagcacagggcccaccaggaagcgagccaccggcagttctgtgagtctaaaaatggtcccccatatccacaaggtgctggccagctcgattatgggagcaaaggtataccagatacatctgaaccagtgagctaccacaatagcggggttaagtacgccgcttccggacaggaatcacttagactgaatcacaaggaggtcagattaagtaaggaaatggagcggccttgggtgagacagccaagcgcaccggagaagcatagcagggattgctataaagaggaagagcatctcacccaaagcattgttcccccacctaaacccgaaaggagccactccttgaagctccatcacactcagaacgtcgagagggacccttccgttctataccagtatcagcctcatgggaagaggcagagttccgtaacagtcgtgagccagtatgacaacctagaggactatcattctctcccccagcatcagcgcggcgtcttcggggggggaggaatgggtacatacgtcccccccggattcccgcacccccagtctcggacctatgcgacggcgcttgggcagggtgcctttttgcctgcagaactaagcctgcagcatcccgaaacccagattcacgctgagtag

SEQ ID NO: 340005 - DNA, 5217 bp, Artificial Sequence
  derived and/or modified sequence
atgaagagccggcccaccaagcagaagctgaagcagaggggcatcctgaaggagcgggtgtttggctgtgacctgggggagcacctgctgaacagcggctttgaggtgccccaggtgctgcagagctgcacagccttcatcgagagatatggcatcgtggatggcatctaccgcctgagcggcgtggccagcaacatccagaggctgcggcatgaatttgattctgaacatgtgcctgacctgaccaaggagccctacgtgcaggacatccacagcgtgggcagcctgtgcaagctgtacttccgggagctgcccaaccccctgctgacctaccagctgtatgagaagttcagtgatgctgtgtctgctgccacagatgaggagcggctcatcaagatccatgatgtgatccagcagctgcccccaccccactaccgcaccctggagttcctgatgaggcacctgagcctgctggccgactactgcagcatcaccaacatgcacgccaagaacctggccatcgtgtgggcccccaacctgctgcggagcaagcagatcgagagcgcctgcttcagcggcacagctgccttcatggaggtgcgcatccagagcgtggtggtggagttcatcctgaaccacgtggatgtgctcttcagcggccgcatctccatggccatgcaggagggcgccgccagcctgagccggcccaagagcctgctggtgagcagccccagcaccaagctgctgaccctggaggaggcccaggcccggacccaggcccaggtgaacagccccatcgtgacagagaacaagtacatcgaggtgggggagggccctgctgccctgcagggcaagttccacaccatcatcgagttccccctggagaggaagaggccccagaacaagatgaagaagagccctgtgggctcctggaggagcttcttcaacctgggcaagagcagctctgtgtccaagaggaagctgcagagaaatgaaagtgagcccagcgagatgaaggccatggccctgaagggcggccgggcagagggcaccctgcggagcgccaagtctgaggagagcctgaccagcctgcatgctgtggatggagacagcaagctgttccggccccggcggcccaggagcagcagtgatgccctgagcgccagcttcaatggagagatgctgggcaaccgctgcaacagctatgacaacctgccccatgacaatgaaagtgaggaggagggcggcctgctgcacatcccagccctgatgagcccccacagcgcagaagatgtggacctgagccccccagacattggagtggccagcctggactttgaccccatgtccttccagtgcagcccccccaaggccgagagtgaatgtctggagagcggggccagcttcctggacagccctggctacagcaaggacaagcccagcgccaacaagaaggatgctgagaccggcagcagccagtgccagaccccaggcagcacagccagcagcgagcctgtgagccccctgcaggagaagctgagccccttcttcaccctggacctgagccccacagaggacaagagcagcaagcccagcagcttcacagagaaggtggtgtatgccttcagccccaagattggaaggaagctgagcaagagccccagcatgagcatcagcgagcccatctctgtgaccctgcccccccgggtgtctgaggtgattggcaccgtgagcaacaccacagcccagaatgccagcagcagcacctgggacaagtgtgtggaggagagagatgccaccaacagaagccccacccagatcgtgaagatgaagaccaatgaaacagtggcccaggaggcctatgaaagtgaggtgcagcccctggaccaggtggccgctgaggaggtggagctgcccgggaaggaggaccagagcgtgagcagcagccagagcaaggctgtggccagcggccagacccagacaggagctgtgacccatgaccccccccaggacagcgtgcctgtgtcctctgtgtccctcatccccccacctcctccacccaagaatgtggccaggatgctggccctggccctggccgagagcgcccagcaggccagcacccagagcctgaagaggcctggcaccagccaggccggctacaccaactatggagacattgctgtggccaccacagaggacaacctgagcagcagctacagcgctgtggccctggacaaggcctacttccagacagacaggcctgctgagcagttccacctgcagaacaatgcccctggcaactgtgaccaccccctgcctgagaccacagccaccggggaccccacccacagcaacaccacagaaagtggagagcagcaccaccaggtggacctgactggaaaccagccccaccaggcctacctgagcggggaccctgagaaggcccgcatcacctctgtgcccctggacagcgagaagagtgatgaccacgtgtccttccctgaggaccagagcggcaagaacagcatgcccaccgtgtccttcctggaccaggaccagagccccccacgcttctacagcggggaccagccccccagctacctgggcgcctctgtggacaagctgcaccaccccctggagtttgctgacaagagccccaccccacccaacctgcccagcgacaagatctacccacccagcggcagccctgaggagaacaccagcacagccaccatgacctacatgaccaccaccccagccacagcccagatgagcaccaaggaggcctcctgggatgtggccgagcagcccaccacagctgactttgctgctgccaccctgcagaggacccacaggaccaaccggcccctgcccccaccacccagccagaggtctgctgagcagccccctgtggtgggccaggtgcaggccgccaccaacatcggcctgaacaacagccacaaggtgcagggcgtggtgcctgtgcctgagaggcctcctgagccccgggccatggatgatcctgccagcgccttcatcagtgacagcggggctgctgctgcccagtgccccatggccacagctgtgcagcccggcctgcctgagaaggtgagagatggagcccgggtgcccctgctgcacctgcgggcagagagcgtgcctgcccacccctgtggcttccctgcccccctgccccccaccaggatgatggagagcaagatgattgctgccatccacagcagcagcgcagatgccaccagcagcagcaactaccacagctttgtgacagccagcagcacctctgtggatgatgccctgcccctgcccctgcctgtgccccagcccaagcacgccagccagaagacagtgtacagcagctttgcccggccagatgtgaccacagagccctttggaccagacaactgcctgcacttcaacatgacccccaactgccagtaccggccccagagcgtgcccccccaccacaacaagctggagcagcaccaggtgtatggagcccggtctgagcccccagcctccatgggcctgcgctacaacacctacgtggcccctggaagaaatgccagcggccaccacagcaagccctgcagccgggtggagtatgtgagcagcctgagcagctctgtgaggaacacctgctacccagaggacatccccccctaccccaccatccggcgggtgcagagcctgcacgccccacccagctccatgatccgctctgtgcccatcagcaggacagaggtgcccccagatgatgagcccgcctactgcccccggcccctgtaccagtacaagccctaccagagcagccaggcccggagtgactaccacgtgacccagctgcagccctactttgaaaatggccgggtgcactaccgctacagcccctacagcagcagcagcagcagctactacagcccagatggagccctgtgtgatgtggatgcctacggcaccgtgcagctgcggcccctgcaccggctgcccaacagagactttgccttctacaacccccggctgcagggcaagagcctgtacagctatgccggcctggccccccggccccgggccaacgtgacaggctacttcagccccaatgaccacaacgtggtgtccatgcctcctgctgctgatgtgaagcacacctacacctcctgggacctggaggacatggagaagtacaggatgcagagcatcagaagagagagccgggcccggcagaaggtgaagggccctgtgatgagccagtatgacaacatgaccccagctgtgcaggatgacctgggcggcatctacgtgatccacctgcggagcaagagtgaccccgggaagacaggcctgctgtctgtggccgagggcaaggagagcagacatgctgccaaggccatcagcccagaaggagaagatcgcttctaccgccgccaccctgaggccgagatggaccgggcccaccaccacggcggccacggcagcacccagcctgagaagcccagcctgccccagaagcagagcagcctgcggagcaggaagctgcctgacatgggctgcagcctgcctgagcaccgggcccaccaggaggccagccaccggcagttctgtgagagcaagaatggccccccctacccccagggcgccggccagctggactatggcagcaagggcatcccagacaccagcgagcctgtgtcctaccacaacagcggcgtgaagtatgctgccagcggccaggagagcctgcggctgaaccacaaggaggtgcggctgagcaaggagatggagcggccctgggtgcggcagcccagcgcccctgagaagcacagccgggactgctacaaggaggaggagcacctgacccagagcatcgtgcccccacccaagccagagaggagccacagcctgaagctgcaccacacccagaatgtggagcgggaccccagcgtgctgtaccagtaccagccccacggcaagaggcagagctctgtgacagtggtgtcccagtatgacaacctggaggactaccacagcctgccccagcaccagaggggcgtgtttggaggcggcggcatgggcacctacgtgcccccaggcttcccccacccccagagcaggacctacgccacagccctgggccagggcgccttcctgcctgctgagctgagcctgcagcaccctgagacccagatccatgctgagtag

SEQ ID NO: 340006 - DNA, 5217 bp, Artificial Sequence
  derived and/or modified sequence
atgaagagccggcccaccaagcagaagctgaagcagcggggcatcctcaaagagagagtcttcggctgtgaccttggcgagcaccttctgaattcaggattcgaggtcccccaggtcctgcaaagttgcacagcgttcatcgaacgctacggtatcgtggacggcatttatcgccttagcggtgtcgcctccaacatccaacgcctgcgtcacgagttcgactcagagcacgtgccggacctgactaaggagccttatgttcaggatatccactccgttggtagtctttgtaagctgtacttcagagagctcccaaatcccctgctgacttaccagctgtacgagaagttctccgacgccgttagcgccgctaccgatgaagagcgactcattaaaatccacgacgttatacagcagctgccccctccacattatcgaacgttagagttcctgatgcggcatttaagcctcctcgccgattattgtagtattacaaatatgcatgctaagaatcttgctatagtgtgggccccgaatctgttgagatcaaagcagatcgagtccgcttgcttttccggtacagcagcttttatggaggtgaggatccagtcggtggtggtggagtttatcctcaatcacgtggatgttctgttcagcgggcgtatctccatggcaatgcaggagggtgctgcctcactttctcggccgaagtctcttctggtttcttcaccgagtacaaaattgctcacattggaagaggcccaggcaaggacccaggcccaggtgaattcccctattgttacagagaacaaatatatcgaagtgggcgagggcccagccgccctgcagggcaaattccacacaatcatcgaatttcccctggaacgcaagcggcctcagaacaaaatgaagaaatcccctgtaggcagttggcgcagcttttttaacctcgggaagagcagttctgtgtcaaagagaaaattgcagcgcaacgagagcgaaccttcggagatgaaggccatggctctgaaaggcgggagagccgagggcacccttcgatccgcaaaaagtgaagaatccctgacctccctgcacgccgtggacggtgactcgaagctctttagaccccggagaccccgctcttcctcagatgccctttctgcctcctttaacggtgaaatgctgggaaaccgttgtaattcctacgacaacctccctcatgacaatgagtctgaagaggagggcggcctcctacacatcccagctctgatgtcaccgcatagtgccgaagatgtcgatctcagcccacccgatattggagtggcatcactcgattttgacccaatgagtttccagtgcagtccaccaaaagctgagagcgaatgtctggaatctggggcctcatttctggactcccctggttatagcaaggacaagccttccgcaaacaaaaaggacgcagaaaccggatctagccaatgtcagacaccgggttccacagcctcctctgaacccgtttctcccctccaggaaaaactgagtccatttttcaccctggacctgagcccaacagaggacaagagctctaagccctcctctttcacggagaaagtggtttatgctttctccccaaaaataggtagaaaattaagcaaatctccttccatgagcatctcggagcccatctccgtgaccttacctccacgtgtcagcgaagtaattggaaccgtttcaaacactactgcgcagaacgcgagctcgtccacttgggacaagtgtgtcgaggagcgggacgcaaccaataggtctccgacccaaatcgttaaaatgaaaactaatgagactgtggcccaggaagcctacgagagcgaagtacagcctctggaccaagttgccgctgaggaggtggagctccccggcaaagaagaccagagtgtgtctagtagtcagtcaaaggccgtcgcctcaggccagactcaaacaggagccgtgacccacgacccacctcaggattctgtcccggtcagcagtgtgtctctcatcccaccccctccaccacctaagaatgtcgcccgaatgctagccctcgcactggcggagagcgcgcagcaagcatcaacccagtccctgaagagaccgggtacgtcacaggcaggctacactaactacggggatattgcagttgccactaccgaagacaatttgtcgagtagctatagcgccgtggctttagacaaggcatactttcagacagatcgccctgctgagcagtttcatctccaaaataacgcccctggcaattgcgaccacccccttcccgagactactgccactggagatcccacacattcaaataccacagaatccggcgaacaacatcaccaagtggacttgactggtaatcagccccaccaggcatatttatccggagatccagagaaggcgcgcatcacttccgtcccgctcgattcagagaagagtgacgatcatgtttcctttccagaagaccagagcggtaagaatagtatgcctacagtcagcttcctggaccaggatcagtcccccccaaggttctacagtggcgatcagccaccctcctatctcggcgcctccgttgataagctacaccacccattggaatttgccgataagagccctacaccccccaacctgcccagtgataaaatctaccctccatccggtagccctgaggagaacaccagcacagccactatgacatacatgacaactacaccagccaccgcacagatgagtactaaagaagcgtcatgggatgtggccgaacagccaacaacggcagacttcgccgcggcgacactgcaacggacccaccgcaccaaccggcccctgccgcctccaccctctcagagatccgccgagcagcccccagttgtcggacaggtgcaggcagccaccaacatcggactgaataacagccataaagtccagggagtagtcccagttcccgaacgcccccccgaaccgcgagcgatggatgaccctgcctcagcttttatcagcgatagtggggcagcagctgcccagtgcccaatggccaccgccgtacagccaggcctgcccgaaaaagtgcgcgacggcgctcgcgtcccccttctacacctgagggcggagagcgttccggcacacccttgtggattcccagcaccgcttcccccaactcgtatgatggagtccaaaatgatagctgcaatccactcttctagtgcagatgcaacaagtagttccaactatcacagtttcgtcactgccagttctacaagcgttgatgatgccctgccgctgcctctgcccgtcccccagccaaagcacgcctcacagaaaaccgtgtacagctccttcgcgaggccagacgtaaccaccgagcctttcggtccagataattgtctgcatttcaatatgacccccaattgccaataccgccctcagtccgttcccccgcaccataataaacttgagcagcaccaggtctacggagctcggagtgagccacccgctagcatgggactgcggtacaacacctacgtggcaccagggaggaacgcgtccggtcatcatagcaagccatgctctagagtcgagtacgtttcctctctcagtagttccgtgaggaatacttgctaccctgaggatatccccccctaccctaccatcagaagagttcagagcttgcacgctcctccttctagtatgatcaggagtgtgccgatttctagaacggaggtgcctccagacgacgagcccgcttactgtccgcgtcctctctaccagtacaaaccttatcagagctcccaggcccgctccgactaccacgtgactcagctacagccatacttcgagaatggacgagtccactacagatactctccatatagttccagttctagttcgtactactcccccgatggtgcgctgtgtgatgtcgatgcatatggaaccgttcagttaaggcccctgcaccggctgcctaatcgggattttgcgttctataatccacggttgcagggaaagtccttgtactcatacgcggggttagctccgcgacctagagcgaatgtgaccgggtatttcagccccaatgatcataatgtggtaagtatgcctccggccgcagatgtcaagcatacatatacatcctgggacctcgaggacatggaaaagtacagaatgcagagcattcgaagggagagtcgggctcgccagaaggtgaaggggcccgtcatgtcccagtacgataatatgaccccagccgtgcaggatgatcttgggggaatttatgttatccacctgcgcagtaaaagcgaccccggaaagaccggtctcctttctgtggccgaaggaaaggaatcacggcacgccgctaaagccatctcgcccgagggtgaagatagattttatagaagacatcctgaggcagagatggaccgcgcacaccaccatggcggacacggtagcacccagcctgaaaagcccagtttgccacagaagcagtcctccctcagaagccgcaaacttcctgacatggggtgttccctgcccgagcacagggcccatcaggaagcctcccatcgccagttttgtgagtccaaaaacgggccaccatatcctcagggagccggacagctggattatggcagtaaaggaattccagacacttctgagcccgtctcctaccacaattccggggtgaagtacgccgcttccggccaggaaagtctgagactgaatcataaggaagttcgattgtcgaaagagatggagaggccatgggtgcgacaacccagcgcgcccgaaaaacattcgcgcgactgttataaggaggaggagcatttgacccagagcatcgttcctccacccaagccagaaagatctcactctctcaaactgcatcatacccagaatgttgaacgagacccgtctgtgctctaccaatatcagcctcacggcaaacgtcagagcagtgttactgtggtctcccagtacgataacctggaagactaccacagtctgcctcagcaccagaggggagtgtttggaggaggagggatgggcacttacgtaccacctggatttccccacccgcagtcacgcacatacgctacagctctgggacagggagctttcctgcctgcagagctctctctgcagcacccggagacacagattcacgcagaatag

SEQ ID NO: 340007 - DNA, 5216 bp, Artificial Sequence
  derived and/or modified sequence
atgaagtccagacctacaaagcagaaattgaaacagcgcggtattttgaaggaaagagtattcgggtgcgatctcggtgagcatctgctgaactctggtttcgaggttccacaagtgctgcagtcatgtacagcctttatcgaacggtacgggatcgtcgacggcatttatcgactctccggcgtggcaagcaacattcagcgtctgcgccacgaattcgatagcgagcatgtgcccgatcttacaaaggagccatacgttcaagatatccacagtgtcgggtccctgtgtaaactctacttcagggaactcccaaatccgttgttgacctatcaactatatgagaagttcagcgatgcagtatcagctgcgaccgatgaagagaggcttatcaaaatccatgatgtgatccagcagctaccacctccccactacaggacgctggagttcctcatgcgtcacctgtcattactggctgactactgcagcattaccaatatgcacgccaaaaacctggccatcgtctgggcgcctaacctgctacggtctaaacagatcgagtccgcctgtttttctggcaccgccgcttttatggaggtgaggatacagtctgtcgtcgtggagttcatacttaatcacgttgatgtgttattctcaggccgaatatctatggccatgcaggagggtgccgcttcattgtcgcgtccaaaatccctgcttgtgagcagcccaagcacaaaacttttgaccctggaggaagcccaagctaggacacaggcgcaagtgaacagccccatcgtgacggagaataagtacattgaagttggggaaggccctgccgcactgcaggggaaattccatacaataattgaattcccactggagcgtaaacgcccacagaacaaaatgaaaaagtcacccgtgggttcttggagatccttttttaatctgggcaagtccagcagcgttagtaagcgaaaactccagcgcaacgagtccgaacctagtgaaatgaaggctatggccttgaaggggggacgggcagaggggaccctgaggagtgcaaaatccgaagagagcctcaccagcctgcatgcagtggatggagattcaaaactgtttcgcccacgcagaccccgtagctcttctgacgccctctcggcttctttcaatggagaaatgctggggaatcggtgcaattcctacgataacctaccacacgacaacgaaagcgaagaggagggcggactgttgcacatcccagcgctcatgtcaccccacagcgcagaagatgtcgacctctcccctccggatattggagtcgcaagcctcgatttcgacccgatgagtttccaatgctcacctccgaaagcggaaagtgaatgtcttgagtcaggggcttcctttcttgacagcccaggctactctaaggataaaccaagcgcaaataagaaggatgccgaaaccgggtcttcccagtgccaaaccccagggtcaacagcaagttccgagcccgtgagtccattacaggagaaactcagtccattcttcacactggatttgtcacctactgaagataaatcatcaaaaccttcttctttcactgagaaggtcgtatacgcattcagccctaagattggtcgtaagttgtccaaatctccatctatgagcattagcgaacctatctctgtgactctgccccctcgagtctctgaagtcatcggaactgtttcgaatactacagcccagaacgcaagctcctctacttgggataaatgcgtggaggaacgggacgcaaccaaccgatctccaactcagattgtgaagatgaagactaacgagaccgtagcacaggaggcctacgagagtgaggtccagccgttggatcaagttgccgctgaagaagtggagctaccaggcaaggaagatcagtcggtgtcttcttctcagtcgaaggcagtcgccagtgggcagacacagactggggcagttactcatgacccaccccaggactcagtgcctgttagctcggtgtcccttatccctccccctcctcctcccaaaaatgttgcacggatgctcgctctcgccctggcagagtcagcacagcaggcttcgacacagagcttgaaacgaccgggaacaagccaggcaggatacaccaattatggtgacatcgcagtcgctacaactgaagataacctgtcatcctcctactctgcagtcgctctggacaaagcctatttccagaccgatagacccgcagaacagtttcacctgcagaacaatgcacctggcaactgtgatcaccctctgcccgagaccaccgccacaggggacccgacccacagcaatacaaccgagagcggcgaacaacaccatcaggtagatctgaccggaaatcaaccgcaccaagcctacttatcgggcgaccccgaaaaggctagaatcacaagcgtgccgctcgatagtgagaagtccgacgaccacgtatcatttcccgaggatcagtccggcaagaacagcatgccgaccgtgtcattcctggaccaggatcagagtccccctaggttctattcgggggaccagcccccttcttatctcggcgcttccgtggacaaacttcatcacccactggaatttgccgacaagagccctacaccccctaacctgccatctgacaaaatctaccccccatcgggatccccggaggaaaatacatctacagcgacaatgacttatatgacaacgaccccagcaacggcgcagatgtcaaccaaggaggcttcttgggacgtagccgagcagccgacaactgccgatttcgccgctgctactctgcagaggacacatcggaccaacaggccactgccgcctcctccctctcagcgcagtgccgagcagcctcctgtggtaggacaggtacaggctgccaccaacataggactcaacaactcccataaagtgcagggagtggtgcccgtacccgagaggcctcctgagcccagggcaatggatgaccccgcatccgcgtttatttccgatagcggagcagctgctgcccagtgtcctatggcgacagctgtgcagcccggactcccagagaaagtgcgagacggagccagagttcccctgcttcatctgagagcagaaagcgtgccagctcacccctgcggattccctgcccctctccctcctacccgcatgatggaatccaagatgatcgccgctattcactcgtcttccgccgacgctacatcatcctccaactaccactcgtttgtgactgctagctcaacaagtgttgatgacgctctgcctttgccactacctgtcccccagcccaagcacgcatctcagaagactgtatatagtagcttcgcaagacctgatgtgaccaccgaaccctttggaccggataactgcttgcattttaatatgactcccaattgccaatatcgccctcaatccgtgccccctcaccataacaagcttgagcagcaccaagtatatggcgctaggtcagagccgcctgccagtatgggcctccggtacaatacctatgtggcacccggtaggaacgcatctgggcaccatagcaaaccttgttcacgtgtcgagtacgtgtctagcctgagtagctcggtgcgcaacacttgctatccagaggacatccccccttacccgaccattcgcagagtccaaagcctgcacgccccaccttcttctatgattagatcggtgcccatctccaggactgaggtgccccctgacgatgaacccgcatactgtcccagaccattataccagtataagccttatcagagtagccaggccagatccgactatcacgtgacccagctgcagccatactttgagaatggtcgggtgcactatagatactctccttattccagttcaagctcatcctactacagtcctgacggtgcgctttgcgacgtggacgcctatggaacagtgcaactccgtccattacatcgactgcccaaccgcgacttcgccttctacaacccaaggctgcaggggaaatctctgtacagctatgctggactagccccacgtccacgggctaatgttactggttacttttcacccaacgaccataatgtggtgtccatgcccccagccgcagacgtgaagcacacgtacacttcctgggatctggaggacatggagaaataccgaatgcagagcatccggagggagagccgcgctagacagaaggtgaagggcccagttatgtcccagtatgacaatatgacacccgcagtgcaagatgatctggggggtatatacgtcattcatctgcgttccaagtctgatcctgggaagactggcttgctcagcgtcgcagagggcaaagagagccgccacgccgctaaggcaatttcccccgagggagaggatcgcttttacagaaggcacccagaggccgagatggatagagcgcaccaccatggcggacatggcagtacccaacccgaaaagccgagcttgccgcaaaaacaatctagcctccgcagccggaaactgccagacatgggatgttctctgccagaacatagggcacaccaagaggccagccaccggcaattctgtgagagcaaaaatgggcctccttaccctcagggggcaggacagctggactatggatcaaaggggatccccgacacttctgagcccgtatcctatcataatagcggggtaaaatacgcagcctctggccaagagagcctcaggctgaatcacaaggaagtaaggctgtctaaagaaatggagagaccttgggtgaggcagccttccgctccggaaaaacattctcgcgactgttataaggaggaagaacacctgacgcagtccatcgtgccccctcccaaacccgagagatcacatagtctgaaacttcaccatactcaaaacgtggagcgggatcccagcgtcctctaccagtatcagccccatgggaagcggcagagctcagtcacagtggtatctcaatatgataatctggaagactaccattctctgccacaacaccaacggggtgtgttcgggggtgggggtatggggacctatgtcccacctggcttcccccatccccagagtcgaacttacgctactgcccttggtcagggcgctttccttccggcagaactgtcgcttcaacatcccgagacccagatccacgccgaata

SEQ ID NO: 340008 - DNA, 5289 bp, Artificial Sequence
  derived and/or modified sequence
gcacggcaagctcattacgttcttacgaacattcatgaagtctcgtccaacaaaacagaagctgaagcagcggggaatcttgaaagagagggtgtttggttgtgacctgggggaacaccttctaaattctggttttgaagtgccgcaggttcttcaaagctgcacagcattcattgagagatatggcatcgtggatggaatctatcgcctttctggtgttgcctccaatatccagagactacgccatgaatttgactctgagcacgtccccgacctgacgaaagaaccgtatgttcaggacatccattctgtgggttccctatgtaagctgtacttccgggaactcccaaaccctctgcttacctaccagctgtatgagaaattttctgatgcagtttcagcagcaacagatgaagaaaggctgataaaaatccacgatgtcatccagcagctccccccaccacactacagaacactggagttcctgatgagacacttgtctcttctagctgactattgttccatcacaaatatgcatgcaaaaaatctagcaattgtttgggctccaaacctgttaagatcaaaacagatagaatctgcctgcttcagtggaacagcagctttcatggaagtgaggattcagtctgtggttgttgagttcatcctgaatcacgttgatgtgctgttcagcggcagaatcagcatggccatgcaagagggggcagcttctctatcaaggcccaagtccctcctggtatcctctccatccaccaaactgctgacattggaagaggcccaggcacgaacacaagctcaggtcaattctccaattgtgacggaaaataaatatatcgaagtaggagaaggacctgctgcacttcaggggaaatttcataccataattgagttcccacttgaaagaaagaggcctcaaaataagatgaaaaagtctcctgtgggtagctggcgttcctttttcaacttggggaaatcatcatctgtttctaaacgaaagctgcagcggaatgagagtgagccttcagagatgaaagccatggctctgaaaggtggcagggcagaaggaaccctccgttcagctaaaagtgaggagtctcttacatctctccatgcagttgatggtgattctaagctcttccgacccagaagacccagatcttccagtgatgcactgtctgcctcttttaatggagaaatgctggggaaccgctgtaactcctatgataatctgcctcatgacaatgagagtgaggaggaaggagggctgcttcatatcccagcccttatgtctcctcattcagctgaggatgttgacttgagcccaccagacattggagtagccagcctggattttgatccaatgtcatttcaatgtagtcctcctaaggccgaatcagaatgtctggagagtggtgcttcctttttagattcaccaggatactccaaggataaaccaagtgccaataaaaaggatgcagaaacaggtagtagccaatgtcagactccaggaagcacagcaagctctgaacctgtctctcctcttcaggagaaactgagtccattctttaccctggacttgagcccaactgaagataaatcatctaagccatcctcctttactgaaaaggtcgtctatgctttctctccgaagataggacggaaattaagcaaatcaccttctatgagcatatctgagccaatttcagtgaccctaccaccacgggtgtcagaagtcattggtacagtctcaaataccacagctcagaatgcatcatcttcaacctgggacaaatgcgttgaagaaagggatgccacaaatagatcccccacccagatagtaaagatgaaaacaaatgagacagttgcccaagaagcatatgaatctgaagtccagcccctggaccaggtggctgctgaagaagtagaattgccagggaaagaggatcagtctgtctcaagcagtcagagtaaggctgtagcttctggacagactcagacaggagcagttacccatgacccccctcaggattccgttcctgtcagttcagtctctcttatcccaccaccaccgcctccgaaaaatgttgcccgaatgttggcgctagcattagctgagtccgcacagcaagcctcaactcagtcattgaagagaccagggacctctcaggctgggtatacaaattatggagacatagcggtggctacaactgaagataatctgtccagttcttactctgcagttgctctagataaggcctatttccaaaccgatcgaccagcagagcagttccacctccagaataatgcaccaggaaactgtgaccatcctctaccagagacaacagctactggggatcctacccattccaacacaactgaatctggggagcaacatcaccaagtagacttaacagggaatcagccacatcaagcatatttatctggggacccagaaaaggccagaattacttcagttcccttagactcagagaagtctgatgatcatgtaagtttccctgaagaccagtctgggaagaacagtatgccaactgtctccttcttggatcaggaccagtctccaccccgtttctacagtggagatcagcctccttcttatcttggtgcaagtgtggataaactccatcaccctttagaatttgcagacaaatctcccacacctcctaatttacctagcgataaaatctaccctccttctgggtcccccgaagagaataccagcacagccaccatgacttacatgacaactactccagcaacagcccaaatgagcaccaaggaagccagctgggatgtggctgaacaacccaccactgctgattttgctgctgccacacttcagcgcacgcacagaactaatcgtccccttccccctccgccttcccagagatctgcagagcagccaccagttgtggggcaggtacaagcagcaaccaatataggattaaataattcccacaaggttcaaggagtagttccagttccagagaggccacctgaacctcgagccatggatgaccctgcgtctgccttcatcagtgacagtggtgctgctgctgctcagtgtcccatggctacagctgtccagccaggcctgcctgagaaagtgcgggacggtgcccgggtcccgctgctgcacctgcgcgccgagtctgtccctgcgcatccctgtggctttcctgcaccactgccccccaccaggatgatggagagtaagatgattgctgccatacactccagcagtgcagatgccaccagcagttcaaattatcattcctttgtcactgcttcatccacctctgtggacgatgcattgcctttaccacttcctgtcccacaacctaagcatgcttctcagaaaacagtttactcctcctttgctaggcccgatgtcaccactgaaccctttggtccagataactgtttgcatttcaatatgactccaaactgccagtaccgtccccagagtgtacctccccatcacaataaattggagcagcaccaagtgtatggtgccaggtcagagccaccagcctccatgggtcttcgttataacacatatgtggccccaggaagaaacgcatctggacaccactccaagccatgcagccgggtcgagtatgtgtcttctttgagctcctctgtcaggaatacctgttaccccgaagacattccaccgtaccctaccatccggagagtgcagtctctccatgctccgccgtcttccatgattcgctctgttcccatttcacggacagaagttcccccagatgatgagccagcctactgcccaagacctctgtaccaatataagccatatcagtcctcccaggcccgctcagattatcatgtcactcagcttcagccttactttgagaatggccgggtccactacaggtatagcccatattccagttcttctagttcctattacagtccagatggggccctgtgtgatgtggatgcctatggcacagtccagttgagaccccttcaccgccttcccaatcgagactttgctttctacaatcctaggctgcaaggaaagagcttgtacagttatgctggtttggctccacgtccccgggccaacgtgactggctatttctctcccaacgaccataatgtagtcagcatgcctccggctgctgatgtgaagcacacctacacctcatgggatcttgaggacatggaaaaataccgcatgcagtccatccggagagagagccgtgctcggcagaaggtgaaagggcctgtcatgtcccaatatgataacatgaccccggcggtgcaggacgacttgggtgggatctatgtcatccatctgcgtagtaaatcagatcctgggaaaactggacttctctcagtggcagaaggaaaggagagccgccatgcagccaaggccatcagtcccgagggagaggaccgcttctataggaggcatcccgaggcagagatggacagagcccaccatcacggaggccatggtagcacgcagccggagaagccatccctgcctcagaagcagagcagcctgaggagcaggaagcttcctgacatgggctgcagtcttcctgagcacagggcacaccaagaagcaagccataggcagttctgtgagtcaaagaatgggcccccttatccccagggagctggccagttagattatgggtccaaagggattccagacacttctgagccagtcagctaccacaactctggagtaaaatatgctgcatccgggcaagaatctttaagactgaaccacaaagaggtaaggctctccaaagagatggagcgaccctgggttaggcagccttctgccccagagaaacactccagagactgctacaaggaggaagaacacctcactcagtcaatcgtcccaccccctaaaccagagaggagtcatagcctcaaactccatcatacccagaacgtggagagggaccccagtgtgctgtaccagtaccaaccacacggcaagcgccagagcagtgtgactgttgtgtcccagtatgataacctggaagattaccactccctgcctcagcaccagcgaggagtctttggagggggcggcatggggacgtatgtgccccctggctttccccatccacagagcaggacctatgctacagcgttgggtcaaggggccttcctgcccgcagagttgtccttgcagcatcctgaaacacagatccatgcagaatgagccctgcgagcaatagagttgaagcagcctctgctgga

SEQ ID NO: 340009 - DNA, 1393 bp, Artificial Sequence
  derived and/or modified sequence
ggaggcgcgagccgcgccaaagtctgcaacggcctcaagtctcgacgccagcctaggcaaaaggcaatgtatctaaacgaaaagaaaataggctttctccgctctaccgcctcgggcagccacacctccacacttccggcggtgtaccggccaaatgccgcctgccagcaacttccgtcctcctagctaaaagcggaaaacagaggctcggaaccgctgcgtggttcttgctcttcactcggccgttttaaagggtgactctttcctgtcccggcctgcgtggtgtgggcttgtgggtctttgagacccgaaaattgagagcgttttcgcactccagcggctgctcctggcggctctgcggccgtcaccatgccacagaatgaatatattgaattacaccgtaaacgctatggataccgtttggattaccatgagaaaaagagaaagaaggaaagtcgagaggctcatgaacgttcaaagaaggcaaagaaaatgattggtctgaaggctaagctttaccataaacagcgtcatgctgagaaaatacaaatgaaaaagactatcaagatgcatgaaaagagaaacaccaaacaaaagaatgatgaaaagacaccacagggagcagtacctgcctatctgctggacagagagggacaatctcgagctaaagtactttccaatatgattaaacagaaaagaaaagagaaggcgggaaaatgggaagtccctctgcctaaagtacgtgcccagggagaaacagaagtattaaaagttattcgaacaggaaagagaaagaagaaggcatggaagagaatggttactaaagtgtgctttgttggagatggctttacaagaaaaccacctaaatatgaaagattcatcaggccaatgggcttgcgtttcaagaaagcccatgtaacacatcctgaactgaaagccaccttttgcctaccaatacttggtgtaaagaagaatccctcatccccactgtatacaactttgggtgttattaccaaaggtactgtcattgaagtaaatgtgagcgaattgggccttgtgacacaaggaggcaaagttatttggggaaaatatgcccaggttaccaacaatcctgaaaatgatggatgtataaatgcagtcttactggtttgacagcaatttcatatataattattgaggactacacaccaattgaagaaactgccattactgtgatgtttctgaatactaccaaacagccatacatgtctgcaatgaagagatttattaaattgtaaacattaaagtggtccagttttataaatggtctttattttgaaatacgctttgaccccatgttcataaaactgaatgattgaaaaaaagcaaatatacaaatatcctacttcatcaa

SEQ ID NO: 340010 - DNA, 3234 bp, Artificial Sequence
  derived and/or modified sequence
atggtgaacgcccagatccaggaagaaaacgacagagttgtggcagtcggatacattaatgaagctatcgatgaggggaaccctctgaggacacttgagaccctgctgctgcccactgctaatatttctgacgttgatccggctcacgcgcagcattaccaggacgtactttaccacgccaagtcccagaaactgggcgactccgagtcggtgtccaaagtgctgtggctagacgaaatccagcaggcagtggatgacgctaacgtggacaaggacagggccaagcagtgggtgacattggtggttgacgttaaccaatgcctggaggggaaaaagtcaagtgatattctgtccgtgctaaagagctctacttctaatgcaaacgatattatccctgagtgtgccgacaaatactatgacgctctggtcaaagccaaagagctcaaaagtgagagagtgtccagcgacggctcatggctcaagctgaacttgcacaagaagtatgactattactacaacacagactctaaggaatctagctgggtaacacctgaatcatgtttatacaaggagtcgtggcttacaggcaaagagattgaagcattttggaagggttacaaacagcgtaaggagtacatgcacagaaggcagacctttatcgataatacagattctattgtcaagattcagtcttggtttaggatggcaacagcacggaagtcatatctctccaggttacagtatttccgggaccacaacaacgagatcgtgaagatccagtcattactgagggctaacaaggcaagggatgactataaaacactggtcggaagtgagaatccccctctcacggtgatccggaagttcgtttatttactggaccagagcgacctggatttccaggaggagctcgaggtggcccggctccgggaagaagtggtgactaagattcgggccaaccagcagctggagaaagacctgaacctcatggacatcaagatcggtttattagtgaagaaccggattacactcgaagacgttattagccactccaagaaactcaacaagaagaagggaggcgaaatggagatactcaataacacagataaccaaggtattaagtctctttctaaggagcggcgcaaaactctggagacataccaacagctgttttatctgctgcagacgaaccccctttatctggcaaagctaattttccaaatgccacagaacaagagtacgaagttcatggacaccgttatcttcaccctctacaattatgctagcaaccagagagaagaatatctcctcctgaagttatttaaaaccgcactggaagaagagatcaagagcaaggtcgaccaagttcaggatatagtgacaggcaacccaactgtgattaaaatggtggtgtcattcaacagaggggcaagaggacagaacacgcttagacaattgctagcacccgttgtcaaggaaattattgacgataagtcgctcatcattaacacaaatcccgtggaggtgtataaggcgtgggttaatcagcttgaaacacagacgggtgaggcaagcaagctcccttacgatgtgacaaccgagcaagcactcacgtatccagaggttaaaaacaaacttgaggcttccatagaaaatctgagacgcgtgaccgacaaagtactgaatagcattatttctagcctggaccttctcccctacggcctgagatacattgccaaggtgctcaagaactcaatccatgagaagttccctgatgcaaccgaagacgaattgcttaagattgtcggcaatcttctgtactatagatatatgaacccagctatcgttgcgcccgacggatttgacattatagatatgacagccggaggtcagatcaactccgaccaaagacggaatctcggctctgttgcaaaggttctacaacacgcagcaagtaacaagctctttgagggcgagaatgaacacctctcatctatgaataattacctgtccgaaacttaccaagagttccgcaagtattttaaagaggcatgcaacgttccagaacccgaggaaaagttcaacatggacaaatacacagatctggtgacggtcagtaagcctgtcatttatatcagtattgaggaaattatttcaacacatagcttgcttctagagcatcaggatgctatagccccagaaaaaaacgatttactgtcagagctactgggatcactgggggaggtcccgacagtagagtcttttttaggagaaggggcagtagaccctaatgatccaaacaaagcaaacaccctgtcacagttgtctaaaaccgaaatctctcttgtcttaacaagtaaatatgacattgaagatggagaggcgatcgatagtcgcagtctgatgattaagactaaaaaactgatcatcgatgttatccgcaaccagcccggcaatactttaacagagatcttggaaactcccgcgaccgcccagcaagaagtggaccacgcgacagatatggtgtccagagccatgatcgattcccggacccccgaagaaatgaagcattcccagagcatgattgaagatgcacagcttccgctggaacagaagaagagaaagattcagaggaacctccggacactcgaacaaactggccacgtcagttctgagaataagtatcaggatatcctaaatgaaatcgccaaagacattagaaaccagcgcatttaccgaaagctcaggaaggctgaactggccaaactgcagcagactcttaacgcattaaacaagaaggctgccttctacgaggagcaaattaattactacgacacttatataaagacctgcctcgacaacctcaaacgcaagaacacccgacgctccattaaactagacggcaaaggtgagccaaagggtgccaaaagagctaaaccggtgaagtatactgccgccaagctgcatgaaaagggcgtcctgttggacatcgacgatcttcagacgaaccagtttaagaatgtgacatttgatattattgccactgaggacgtgggaatctttgatgtgcgaagtaagtttctcggcgtcgaaatggagaaggtccagctgaatattcaagacctcctgcagatgcaatacgagggggtggccgtgatgaagatgttcgataaggtgaaggtcaatgttaatctccttatctacctattgaataaaaagttttatggcaagtag

SEQ ID NO: 340011 - DNA, 5598 bp, Artificial Sequence
  derived and/or modified sequence
gagggaggagagttcacttttacttcagtgtcagcgcgcggcggccgtggctggctctggcgagagagcaccgagggagtgggtcgcagatcttcgggcggctaggggaaatcggcgagaggcgggatccgagcgcgccggcggggcgcagagcccgcgagcctggccagcgagggtagccgcggggggcgcgccccgggcgggcccccggagacgcgcaggatgccacacgaagagctgccgtcgctgcagagaccccgctatggctctattgtggacgatgaaaggctctctgcagaggagatggatgagaggaggcggcagaacattgcttatgaatatctgtgccacttagaggaagccaaaaggtggatggaagtttgcttagttgaagaattgccaccaaccactgaattggaagaagggctccggaatggagtttaccttgcaaagttagccaagttctttgccccgaaaatggtatcagagaaaaagatctatgatgtggaacaaacacgttataagaagtctggccttcattttcgacacacagataataccgtccagtggttaagagcgatggagtctattggtctacccaagatattttatccagaaacaacagatgtctatgatcggaaaaacataccaagaatgatatattgcattcacgcactgagtttgtatctgttcaaactaggaatagcaccccagatccaggatttgttgggcaaagtagacttcacagaggaggaaatcagtaatatgagaaaagaacttgagaaatatggaatacagatgccatctttcagcaaaataggtggtattctggccaatgaactgtccgtggatgaagctgcattacatgctgcagttatagccattaatgaagcagttgaaaaaggaatagcagagcaaaccgttgtaacactaagaaacccaaatgcggttttaactttagtggatgacaaccttgcaccagaatatcagaaagaactctgggatgccaaaaagaaaaaagaggaaaatgcaagactgaagaatagctgtatttcagaagaagaaagagatgcttatgaagaactgctgacacaagcagaaatccaaggcaatattaataaagtcaacaggcaggctgcagtggaccatatcaatgctgtcattccggaaggtgaccccgagaatacgctgcttgcactgaagaaaccagaggcccagctgcctgctgtttatccctttgctgctgccatgtatcagaacgaacttttcaacctccagaaacagaacaccatgaactacttggcccacgaggagcttttgattgctgtggaaatgttgtctgctgttgctttactaaaccaggccttggaaagcaacgatcttgtgtctgtgcagaatcaactcagaagccccgcaataggcttaaacaatctggacaaggcatatgtggaacgttatgcaaacacactactctctgttaaactagaagttttatcccaagggcaagataacttaagctggaatgaaattcagaattgtattgatatggttaatgctcaaattcaagaagaaaatgaccgagttgtagctgtagggtacatcaatgaagctattgatgaagggaatcctttgaggactttagaaactttgctcctacctactgcgaatattagtgatgtggacccagcccatgcccagcactaccaggatgttttataccatgctaaatcacagaaactcggagactctgagagtgtttccaaagtgctttggctggatgagatacagcaagccgtcgatgatgccaacgtggacaaggacagagcaaaacaatgggttactctggtggttgatgttaatcagtgtttggaaggaaaaaaatcaagtgatattttgtctgtattgaagtcttccacttctaatgcaaatgacataatcccggagtgtgctgacaaatactatgatgcccttgtgaaggcaaaagagctcaaatctgaaagagtgtctagtgacggttcatggctcaaactcaacctgcacaaaaaatatgactactattacaacactgattcaaaagagagttcctgggtcacacctgaatcatgcttgtataaagaatcatggctcacaggaaaagaaatcgaggctttttggaaaggatataaacaacggaaggagtatatgcacaggcggcaaacgttcattgataatactgattctattgtgaagattcagtcctggttccgaatggcaactgcaagaaagagctatctttcaagactacagtatttcagagatcataataatgaaattgtgaaaatacagtcactgttgagagcgaacaaagctagagatgactacaaaacattggttggctctgaaaacccaccattaacagtaattcgcaaatttgtatacctgctggaccaaagtgatttggatttccaggaggaactagaggttgcacgattaagggaagaagtagtgaccaagatcagggccaatcaacagctggaaaaagacctgaacctgatggacatcaagattggactgctggtgaagaacaggatcacactagaggatgtaatttcacatagtaaaaagctgaacaagaaaaaaggaggagaaatggaaatactgaataacaccgacaaccaaggaataaaaagtttgagtaaggagaggagaaaaacactagaaacatatcagcagctgttttaccttttacagaccaaccctttatacttggctaagctgattttccagatgccacagaacaagtccactaaatttatggatactgttattttcacactatataattatgcctctaatcagcgagaagaatatctacttctcaagctttttaaaactgctctggaggaagaaataaaatcaaaagtggaccaggtacaggacatagttactggtaaccctacagtcatcaagatggtcgtcagcttcaatagaggtgcccggggacagaacaccctgcgccaactcctggctccagtggtaaaagagatcatcgacgacaagtcgctgattatcaacacaaaccctgtagaggtgtacaaggcttgggtgaaccaactagaaacacagactggagaggccagcaagttgccttatgatgtgaccacagaacaagctctaacatacccagaagtgaaaaataaactggaggcttccattgagaacctgagaagggtcaccgacaaagtcctgaattctatcatttcttcccttgatctactgccttatggattgaggtatatagccaaagtactgaagaattcgatccatgagaaattccccgatgcaacagaagatgagctattaaagattgttggaaacctcctgtactatcggtacatgaatccagccattgtagctccagatggctttgatatcatcgacatgacagctggaggtcagataaattctgaccaaaggagaaacttaggatcagtggccaaggttcttcagcacgcagcctccaacaagctgtttgaaggagaaaatgagcatctctcatctatgaacaattatttatcagagacgtatcaggaattcaggaaatatttcaaagaagcatgtaatgtccctgagccagaagagaagtttaatatggacaaatacacagacctggtgacagtcagcaaaccagtcatttatatttcaattgaagaaatcatcagcacacactcactcctgttggaacaccaggatgcaattgcccctgagaaaaatgacttactgagtgaattgctggggtcgctgggagaggtgccaaccgtggaatcttttcttggggaaggagcagttgaccccaatgaccctaacaaggcaaatacactaagtcagctttcaaagaccgagatttctcttgtcttgacaagcaaatatgacatagaggacggtgaagctatagatagccgaagcctcatgataaagaccaagaagctgataattgatgtgatccggaaccagccagggaacacattgacagaaatcttagagacaccagcaactgcgcaacaggaggtagaccatgccacggacatggtgagccgtgcaatgatagattccaggactccagaagaaatgaagcatagccaatctatgattgaagatgcacagctgcctcttgagcagaagaagaggaaaatccagaggaatcttcggacgttggaacagactggacacgtgtcatccgaaaataaataccaagacattctcaatgagattgccaaggatattcgaaatcaaagaatctatcgtaagcttcgaaaagctgaattggcaaaacttcagcagaccctgaatgcacttaacaagaaggcagcattttatgaagagcaaatcaattattatgacacctacataaagacttgtttagacaacttaaaaagaaaaaatactcggagatcaattaaactagatggaaaaggagaacccaaaggggcgaagagagcgaagccagtgaagtacactgcagcaaagctgcatgagaaaggtgtcctgctagatatagatgatcttcaaacaaaccagtttaagaatgttacatttgatatcatagctactgaagatgtaggcattttcgatgtaagatcaaaattccttggtgttgagatggaaaaggtgcaactcaatattcaggatttacttcagatgcaatatgaaggagtagctgtaatgaaaatgtttgataaggttaaagtgaatgtaaaccttctcatatacctgctgaacaagaagttctatggaaagtgaagtgcctacagaaatttcttggattctgtatcatctggattaggaaatgaatttgtttaatatttttgtttttaaacatgattgaaatcactgcttataaatgtgtgatttttttaaaacgaccaaaactgttctgaagaatgtacccaggtgcctttttgctaatttgatactataatagaatgagacataaaatgaattaatggaaacatatccacactgtactgtgatataggtactctgatttaaaactttggacatcctgtgatctgttttaaagttggggggtgggaaatttagctgactagggacaaacatgtaaacctattttcctatgaaaaaaattttaaatgtcccacttgaataacgtaattcttcatagtttttttaatctatggataaatggaaacctaattatttgtaatgaattatttagacagttctaagccctgtcttctgggagttatcaattttaaagagaacttttgtgcaattcaaatgaagtttttataagtaattgaaaatgacaacacaataacactttctgtataaaagtatatattttatgtgatttattcctactaaatgaaagtgcactactgcctcatgtaaagactcttgcacgcagagcctttaagtgactaaggaacaacatagatagtgagcatagtccccacctccacccctcacaatttatttgaatacttcaattgtgcctctcaattttttgtaatgctaaaaaatcagtatctagatggtttttaaatgtattctctggaaattgttttatgtaaaataaatgttacttaattccattaa

SEQ ID NO: 340012 - DNA, 3234 bp, Artificial Sequence
  derived and/or modified sequence
atggtgaatgcccagatccaggaggagaatgacagagtggtggccgtgggctacatcaatgaggccattgatgagggcaaccccctgcggaccctggagaccctgctgctgcccacagccaacatcagtgatgtggaccctgcccacgcccagcactaccaggatgtgctgtaccacgccaagagccagaagctgggggacagcgagagcgtgtccaaggtgctgtggctggatgagatccagcaggccgtggatgatgccaacgtggacaaggaccgggccaagcagtgggtgaccctggtggtggatgtgaaccagtgcctggagggcaagaagagcagtgacatcctgtctgtgctgaagagcagcaccagcaatgccaatgacatcatcccagaatgtgccgacaagtactatgatgccctggtgaaggccaaggagctgaagtctgagcgggtgtccagtgatggctcctggctgaagctgaacctgcacaagaagtatgactactactacaacacagacagcaaggagagctcctgggtgaccccagagagctgcctgtacaaggagagctggctgaccgggaaggagattgaggccttctggaagggctacaagcagaggaaggagtacatgcaccggcggcagaccttcatcgacaacacagacagcatcgtgaagatccagagctggttcaggatggccacagccaggaagagctacctgagccggctgcagtacttccgggaccacaacaatgagatcgtgaagatccagagcctgctgcgggccaacaaggccagagatgactacaagaccctggtgggctctgaaaatccacccctgaccgtcatcaggaagtttgtgtacctgctggaccagagcgacctggacttccaggaggagctggaggtggcccggctgcgggaggaggtggtgaccaagatccgggccaaccagcagctggagaaggacctgaacctgatggacatcaagattggcctgctggtgaagaaccgcatcaccctggaggatgtgatcagccacagcaagaagctgaacaagaagaagggcggggagatggagatcctgaacaacacagacaaccagggcatcaagagcctgagcaaggagaggaggaagaccctggagacctaccagcagctgttctacctgctgcagaccaaccccctgtacctggccaagctgatcttccagatgccccagaacaagagcaccaagttcatggacaccgtcatcttcaccctgtacaactatgccagcaaccagcgggaggagtacctgctgctgaagctgttcaagacagccctggaggaggagatcaagagcaaggtggaccaggtgcaggacatcgtgactggaaaccccaccgtcatcaagatggtggtgtccttcaacagaggagcccggggccagaacaccctgcggcagctgctggcccctgtggtgaaggagatcattgatgacaagagcctcatcatcaacaccaaccctgtggaggtgtacaaggcctgggtgaaccagctggagacccagacaggagaggccagcaagctgccctatgatgtgaccacagagcaggccctgacctacccagaggtgaagaacaagctggaggccagcattgagaacctgcggcgggtgacagacaaggtgctgaacagcatcatcagcagcctggacctgctgccctacggcctgcgctacatcgccaaggtgctgaagaacagcatccacgagaagttcccagatgccacagaagatgagctgctgaagatcgtgggcaacctgctgtactaccgctacatgaacccagccatcgtggccccagatggctttgacatcatcgacatgacagctgggggccagatcaacagcgaccagaggaggaacctgggctctgtggccaaggtgctgcagcacgccgccagcaacaagctgtttgaaggagaaaatgagcacctgagctccatgaacaactacctgtctgagacctaccaggagttcaggaagtacttcaaggaggcctgcaatgtgcctgagcctgaggagaagttcaacatggacaagtacacagacctggtgacagtgtccaagcctgtgatctacatcagcattgaggagatcatcagcacccacagcctgctgctggagcaccaggatgccatcgcccctgagaagaatgacctgctgtctgagctgctgggcagcctgggggaggtgcccaccgtggagagcttcctgggggagggcgctgtggaccccaatgaccccaacaaggccaacaccctgagccagctgagcaagacagagatcagcctggtgctgaccagcaaatatgacattgaagatggagaggccatcgacagccgcagcctgatgatcaagaccaagaagctgatcattgatgtgatccggaaccagcccggcaacaccctgacagagatcctggagaccccagccacagcccagcaggaggtggaccacgccacagacatggtgtcccgggccatgattgacagcaggaccccagaggagatgaagcacagccagagcatgattgaagatgcccagctgcccctggagcagaagaagaggaagatccagaggaacctgcggaccctggagcagacaggccacgtgtcctctgagaacaagtaccaggacatcctgaatgagatcgccaaggacatccggaaccagaggatctacaggaagctgaggaaggccgagctggccaagctgcagcagaccctgaatgccctgaacaagaaggccgccttctatgaggagcagatcaactactatgacacctacatcaagacctgcctggacaacctgaagaggaagaacaccaggaggagcatcaagctggatggaaaaggagagcccaagggggccaagagggccaagcctgtgaagtacacagctgccaagctgcacgagaagggcgtgctgctggacattgatgacctgcagaccaaccagttcaagaatgtgacctttgacatcatcgccacagaagatgtgggcatctttgatgtgcgcagcaagttcctgggcgtggagatggagaaggtgcagctgaacatccaggacctgctgcagatgcagtatgaaggagtggccgtgatgaagatgtttgacaaggtgaaggtgaatgtgaacctgctgatctacctgctgaacaagaagttctacggcaagtag

SEQ ID NO: 340013 - DNA, 3234 bp, Artificial Sequence
  derived and/or modified sequence
atggtgaacgcccagatccaggaggagaacgaccgggtggtggccgtcggatatattaacgaggccattgatgagggcaacccattgcggactctggagactttgttgctgcctaccgccaatattagcgatgtggatcccgctcacgcacagcactatcaggatgtcttgtaccatgcaaagagtcaaaagttgggcgactcagagagcgtctcgaaagtactgtggctggatgaaattcagcaggcagtagacgatgcgaatgtggacaaggatcgggccaaacagtgggtgactttagtagtagatgttaaccagtgtctagaaggcaaaaaatcatccgacattctttccgtactgaagtcgtcaacttctaacgctaatgacatcattccagaatgcgctgataaatactacgatgccttggtgaaggcaaaagagctgaagtctgagcgggtgagctcggatgggtcttggctcaagctgaatctccataagaagtacgactattactataacacagatagcaaagagagtagctgggtgacaccggagtcttgcctgtacaaggaatcatggctgacaggtaaagagatcgaggccttttggaagggctataagcagaggaaggagtatatgcatcgacggcagacattcattgataatacagactcaattgtgaaaatccaaagctggtttagaatggccactgcacgaaagtcttacctgtccagactgcagtacttcagagatcacaataatgaaatagtcaaaatccagagcttattaagggccaacaaggccagggacgactacaaaacgttggtggggtcggaaaacccccctctgaccgtcatccggaagttcgtctatctcctggatcagtctgacctggactttcaagaagaactggaagtcgccaggctgcgggaggaagtagtcaccaagatccgcgcaaaccagcagcttgagaaagacctgaatctgatggacataaagatcgggctgctggtgaaaaaccgcatcacgctagaggatgtgatcagccacagcaagaaattgaataagaaaaagggaggcgaaatggagatcctcaataacaccgacaaccaagggataaagtcactctctaaggagcggcggaaaaccctggagacttatcagcaattgttctatctcctgcagactaaccctctttacctggccaaattaattttccagatgccacaaaataaatccactaagtttatggatacagtgatctttaccctgtataactacgcatcaaatcaaagggaggaatacttgcttctcaagctctttaagactgccctcgaggaagaaattaagagcaaggttgaccaggtacaggacatcgtgactggaaaccccaccgtaattaagatggtagtgtctttcaatagaggtgctcgggggcaaaacaccttgagacaattactagctcccgtggtgaaggaaattattgacgataaatccctcattatcaacactaatcccgtcgaggtctacaaggcttgggttaatcagctcgagacgcagaccggggaagcctcaaaactgccctatgacgttacgacggagcaggctttaacttacccagaggtgaaaaacaagctggaggcatcaatcgagaaccttcgacgggtgaccgataaggttcttaatagcatcatcagctccctggacctacttccctacggcctcagatacatcgcaaaagtgctcaagaatagtatacacgagaagttccctgacgccactgaggacgaacttctgaaaatcgtaggcaatctgctctactaccggtatatgaatccggcaatcgtggccccagatgggtttgacatcatagacatgaccgctggcggacagatcaactccgatcagaggcgcaacctcggctctgtggctaaggtgctccagcatgctgccagtaacaagctgtttgagggcgagaatgaacatctgtcctcgatgaacaattatctgtctgagacttatcaggagttccgtaaatacttcaaagaggcctgcaacgtgcctgagcctgaagaaaagtttaatatggacaaatatacagacctcgtgacggtttccaaaccagtaatatatatcagtatcgaggaaataatctctacacacagcttactccttgagcaccaggacgccattgcccctgaaaaaaacgacctgttgtcagagttgctgggtagcctaggcgaggttccaacggtcgaatcttttctgggggagggcgccgtcgatccaaatgatcccaataaagccaacacactcagtcagctgtccaaaacagaaataagcctggtgctaacatccaagtacgacatagaagacggtgaggccatcgactcccgaagcctaatgatcaaaacaaagaaactgattatcgacgttatacgcaaccagcccggaaataccctcactgaaatactggagaccccagcgaccgcccagcaggaagtcgaccatgcaaccgacatggtcagcagagccatgatcgacagtagaactcctgaagaaatgaaacattctcagtctatgattgaggacgctcagctgcctctcgaacagaagaaaagaaagatccagagaaacctgaggacactggaacagactgggcatgtgagttcagaaaataagtatcaggatattctcaacgagatcgccaaggacatcagaaaccagcggatctacaggaaactgaggaaagccgaactggctaaattgcagcagaccctgaatgctctcaataagaaggccgccttctatgaggagcagatcaattattatgatacctacatcaagacatgcctagacaatttgaaacgaaaaaacacgagaagatctattaaattggacgggaaaggcgagccaaaaggtgccaaacgggctaagccggtgaagtacactgccgccaagttgcatgagaagggcgtgctcctggatatcgacgatcttcagacaaatcagtttaagaatgtgacttttgatataatagctaccgaagatgtcggcattttcgatgtgagaagcaagttccttggagtggagatggagaaggtccagttaaacattcaggatctactacaaatgcaatatgaaggcgtggccgtgatgaagatgttcgataaggtcaaggtcaacgtcaatctgctcatttacctcttgaacaagaagttttacggaaagtag

SEQ ID NO: 340014 - DNA, 3234 bp, Artificial Sequence
  derived and/or modified sequence
atggtcaatgcgcaaatccaggaggagaacgacagggttgtggctgtcggctacatcaatgaagccatcgacgagggaaaccccctcaggacactggaaactttacttctgcccaccgctaacatctccgacgtggacccagctcacgctcagcactatcaagacgtgctttaccacgccaaatcacagaaactcggggattccgagagtgtgagcaaggtgctgtggctggacgagatccaacaggcagtcgacgacgctaacgtggacaaagaccgagctaagcagtgggtcaccctcgtggttgatgtcaaccaatgcctcgagggtaaaaaatccagtgacatcctgagcgtcctgaaatctagtactagcaacgcaaatgatatcatcccagaatgcgctgacaaatattacgatgcgttggtgaaggcaaaagagctaaagtccgagagggtctctagcgacgggtcttggttaaagttgaatctgcacaagaagtatgactactactataacacggattcaaaggagtcaagctgggttacccccgagtcatgtctctacaaggagtcttggctgacagggaaagaaattgaagccttttggaaagggtacaagcagcggaaggagtacatgcacagacggcaaacgtttattgacaataccgacagtattgtgaagattcagtcatggtttcggatggccaccgctcgcaaaagttacctctcacgcttgcagtatttccgggaccacaacaatgagattgtgaagatccaatctctgctaagagctaataaagctagggatgactacaaaaccctggtcggctccgagaatccgcctctgacagtaatcagaaagttcgtctacctactcgaccagtcagatctggattttcaggaggagcttgaagttgctagattacgggaggaggtggttactaagattcgagcaaaccaacagcttgagaaggatctgaacttaatggacatcaagatcgggctgctggtgaaaaaccgcataactttggaggacgtgattagtcactcaaaaaagctaaacaaaaaaaagggcggagaaatggagattctcaacaatacggataaccagggcatcaagtcactgagtaaggagcgtcggaaaaccctggaaacataccagcagctgttctatctgctccagaccaatccactgtacctggccaaactgatctttcagatgccccagaataaatctaccaagttcatggacaccgtgatctttacactgtacaactatgcttctaatcagagggaggagtacctactactgaagctgtttaagacagcacttgaagaggagatcaaatccaaagtcgatcaggttcaggacatcgtcaccgggaacccaaccgtgataaagatggtggtgtcattcaataggggggctcgaggccagaatacactgcgacagctcctcgccccagttgtgaaggagatcatcgacgataaaagtctcattatcaataccaatcctgttgaggtctacaaggcatgggtgaaccaacttgagacacagactggcgaagccagtaaattaccatatgacgtgacgaccgagcaggcgcttacctatccagaggtgaagaataaactggaggcatccatcgagaacctaaggagggtaaccgacaaagtgctaaatagcatcatctcaagtctggatctgcttccctacggactgagatatattgccaaggtgctgaagaactccattcacgagaaattcccagatgcgactgaggacgaactcctgaagatcgtgggaaacctgctgtactatagatatatgaaccccgcaatcgttgcgccagatggatttgacattattgacatgactgccggtggccagataaatagcgatcagcggagaaatcttggtagtgtggcgaaagtgcttcaacatgcagcatccaacaagctgtttgagggtgagaatgagcacctcagctctatgaacaattacctgtctgagacctaccaggagtttagaaagtatttcaaggaagcctgcaatgtaccagagccggaggagaagtttaatatggacaaatataccgaccttgtgacggttagtaagcccgtgatttatatctcaatcgaggaaatcatcagtactcacagcctgttgctggaacaccaggatgccattgcccctgagaaaaacgacctcttatctgagcttctcggttcccttggcgaggtgcctaccgtagagagctttctgggcgagggggctgtcgacccaaacgaccctaacaaagccaataccttgtctcaattatctaaaacagagatctccctggtgcttacttcgaaatatgacatcgaggacggcgaggcgattgattccaggtctctcatgatcaagacgaaaaaactaattatcgatgtaattcggaatcagcccggaaacacgctgacagagatcctggaaactcctgccacggctcaacaggaagttgatcatgccactgatatggtgagtcgcgctatgattgactcccgcactccggaggagatgaagcatagccagagcatgatcgaggacgcacagttgccactggagcagaagaaaagaaaaattcaaagaaacctgcgcactctcgagcagacggggcatgtctctagcgaaaataagtatcaagacatcctgaacgagatcgcaaaagacatccgtaaccaacggatttatcggaaattgcggaaggcagaactggcgaagctccagcaaaccttgaacgccttgaacaaaaaggctgccttttacgaagagcagattaactactatgatacctatataaagacctgcctcgacaatctgaaacgaaagaacacaagaagaagcatcaaattagatggcaagggcgaacccaaaggagccaagcgggcaaagccagtcaaatacactgcagccaagttacacgagaagggcgtccttctggatattgacgacttgcagaccaaccagttcaagaatgtgaccttcgacataattgccacagaggacgtgggtatcttcgacgtgcgcagcaagtttctcggtgtagagatggaaaaagtgcagctcaatattcaggatcttttacagatgcagtacgagggagtggccgtaatgaaaatgttcgacaaagtcaaagtgaacgtgaaccttctcatctacctactgaataagaagttctatggcaagtag

SEQ ID NO: 340015 - DNA, 3234 bp, Artificial Sequence
  derived and/or modified sequence
atggtgaacgcccagatccaggaggagaacgacagagtggtggccgtgggctacatcaacgaggccatcgacgagggcaaccccctgagaaccctggagaccctgctgctgcccaccgccaacatcagcgacgtggaccccgcccacgcccagcactaccaggacgtgctgtaccacgccaagagccagaagctgggcgacagcgagagcgtgagcaaggtgctgtggctggacgagatccagcaggccgtggacgacgccaacgtggacaaggacagagccaagcagtgggtgaccctggtggtggacgtgaaccagtgcctggagggcaagaagagcagcgacatcctgagcgtgctgaagagcagcaccagcaacgccaacgacatcatccccgagtgcgccgacaagtactacgacgccctggtgaaggccaaggagctgaagagcgagagagtgagcagcgacggcagctggctgaagctgaacctgcacaagaagtacgactactactacaacaccgacagcaaggagagcagctgggtgacccccgagagctgcctgtacaaggagagctggctgaccggcaaggagatcgaggccttctggaagggctacaagcagagaaaggagtacatgcacagaagacagaccttcatcgacaacaccgacagcatcgtgaagatccagagctggttcagaatggccaccgccagaaagagctacctgagcagactgcagtacttcagagaccacaacaacgagatcgtgaagatccagagcctgctgagagccaacaaggccagagacgactacaagaccctggtgggcagcgagaacccccccctgaccgtgatcagaaagttcgtgtacctgctggaccagagcgacctggacttccaggaggagctggaggtggccagactgagagaggaggtggtgaccaagatcagagccaaccagcagctggagaaggacctgaacctgatggacatcaagatcggcctgctggtgaagaacagaatcaccctggaggacgtgatcagccacagcaagaagctgaacaagaagaagggcggcgagatggagatcctgaacaacaccgacaaccagggcatcaagagcctgagcaaggagagaagaaagaccctggagacctaccagcagctgttctacctgctgcagaccaaccccctgtacctggccaagctgatcttccagatgccccagaacaagagcaccaagttcatggacaccgtgatcttcaccctgtacaactacgccagcaaccagagagaggagtacctgctgctgaagctgttcaagaccgccctggaggaggagatcaagagcaaggtggaccaggtgcaggacatcgtgaccggcaaccccaccgtgatcaagatggtggtgagcttcaacagaggcgccagaggccagaacaccctgagacagctgctggcccccgtggtgaaggagatcatcgacgacaagagcctgatcatcaacaccaaccccgtggaggtgtacaaggcctgggtgaaccagctggagacccagaccggcgaggccagcaagctgccctacgacgtgaccaccgagcaggccctgacctaccccgaggtgaagaacaagctggaggccagcatcgagaacctgagaagagtgaccgacaaggtgctgaacagcatcatcagcagcctggacctgctgccctacggcctgagatacatcgccaaggtgctgaagaacagcatccacgagaagttccccgacgccaccgaggacgagctgctgaagatcgtgggcaacctgctgtactacagatacatgaaccccgccatcgtggcccccgacggcttcgacatcatcgacatgaccgccggcggccagatcaacagcgaccagagaagaaacctgggcagcgtggccaaggtgctgcagcacgccgccagcaacaagctgttcgagggcgagaacgagcacctgagcagcatgaacaactacctgagcgagacctaccaggagttcagaaagtacttcaaggaggcctgcaacgtgcccgagcccgaggagaagttcaacatggacaagtacaccgacctggtgaccgtgagcaagcccgtgatctacatcagcatcgaggagatcatcagcacccacagcctgctgctggagcaccaggacgccatcgcccccgagaagaacgacctgctgagcgagctgctgggcagcctgggcgaggtgcccaccgtggagagcttcctgggcgagggcgccgtggaccccaacgaccccaacaaggccaacaccctgagccagctgagcaagaccgagatcagcctggtgctgaccagcaagtacgacatcgaggacggcgaggccatcgacagcagaagcctgatgatcaagaccaagaagctgatcatcgacgtgatcagaaaccagcccggcaacaccctgaccgagatcctggagacccccgccaccgcccagcaggaggtggaccacgccaccgacatggtgagcagagccatgatcgacagcagaacccccgaggagatgaagcacagccagagcatgatcgaggacgcccagctgcccctggagcagaagaagagaaagatccagagaaacctgagaaccctggagcagaccggccacgtgagcagcgagaacaagtaccaggacatcctgaacgagatcgccaaggacatcagaaaccagagaatctacagaaagctgagaaaggccgagctggccaagctgcagcagaccctgaacgccctgaacaagaaggccgccttctacgaggagcagatcaactactacgacacctacatcaagacctgcctggacaacctgaagagaaagaacaccagaagaagcatcaagctggacggcaagggcgagcccaagggcgccaagagagccaagcccgtgaagtacaccgccgccaagctgcacgagaagggcgtgctgctggacatcgacgacctgcagaccaaccagttcaagaacgtgaccttcgacatcatcgccaccgaggacgtgggcatcttcgacgtgagaagcaagttcctgggcgtggagatggagaaggtgcagctgaacatccaggacctgctgcagatgcagtacgagggcgtggccgtgatgaagatgttcgacaaggtgaaggtgaacgtgaacctgctgatctacctgctgaacaagaagttctacggcaagtag

SEQ ID NO: 340016 - protein, 207 aa, Artificial Sequence
  derived and/or modified sequence
MNGHSDEESVRNSSGESSQSDDDSGSASGSGSGSSSGSSSDGSSSQSGSSDSDSGSESGSQSESESDTSRENKVQAKPPKVDGAEFWKSSPSILAVQRSAILKKQQQQQQQQQHQASSNSGSEEDSSSSEDSDDSSSEVKRKKHKDEDWQMSGSGSPSQSGSDSESEEEREKSSCDETESDYEPKNKVKSRKPQNRSKSKNEKKKKK

SEQ ID NO: 340017 - DNA, 624 bp, Artificial Sequence
  derived and/or modified sequence
atgaacggccactcagacgaagagtcagtgcgtaactctagcggagaatccagccaatccgatgacgactctggttctgcatctggaagcgggtccggttcaagtagtggatccagcagcgacggctcctcttcacagagtggttccagcgactccgactcaggctctgaatcaggctcacaatcagaatccgagtctgacacatctcgcgagaacaaggtccaggctaagccccctaaagtcgacggagccgaattttggaaaagctcaccgtccatcttagcagttcaacgcagtgctatcctgaaaaagcaacagcagcagcaacaacagcagcagcaccaagctagtagtaattcgggatccgaggaagacagcagcagctcagaagattcagatgactcctcatccgaagtgaagaggaaaaagcataaggacgaggactggcagatgtcgggctcgggcagcccttcccagagcggctcggactccgaaagcgaggaggaacgggagaagtcttcctgcgatgaaaccgaatccgactacgagcctaaaaacaaagtgaagtctagaaaaccacagaacagaagcaaaagtaagaatgagaagaagaaaaagaagtag

SEQ ID NO: 340018 - DNA, 624 bp, Artificial Sequence
  derived and/or modified sequence
atgaatggccacagtgatgaggagagcgtgaggaacagcagcggggagagcagccagagtgatgatgacagcggcagcgccagcggcagcggcagcggcagcagcagcggcagcagcagtgatggcagcagcagccagagcggcagcagtgacagcgacagcggcagcgagagcggcagccagagcgagagcgagagtgacaccagccgggagaacaaggtgcaggccaagccacccaaggtggatggagctgagttctggaagagcagccccagcatcctggccgtgcagaggtctgccatcctgaagaagcagcagcagcagcagcagcagcagcagcaccaggccagcagcaacagcggcagcgaggaggacagcagcagcagcgaggacagtgatgacagcagcagcgaggtgaagaggaagaagcacaaggatgaggactggcagatgagcggcagcggcagccccagccagagcggcagtgacagcgagagcgaggaggagcgggagaagagcagctgtgatgaaacagaaagtgactatgagcccaagaacaaggtgaagagcaggaagccccagaacagaagcaagagcaagaatgagaagaagaagaagaagtag

SEQ ID NO: 340019 - DNA, 624 bp, Artificial Sequence
  derived and/or modified sequence
atgaacggccacagcgacgaggagagcgtgcggaacagcagcggcgagtcatctcagtctgacgacgactctggctccgcatcgggctccggatccggttcctcctccggtagctccagtgacggcagttcttctcagtccgggtcatccgattcagactcaggctccgagtctgggtcacagtctgagtccgaatccgatacttcgagggaaaacaaggtacaggctaagcccccaaaggtggatggagcagagttttggaaatcatctcccagcatcctggcggtgcagcgctccgccatcctgaaaaaacagcagcagcagcaacagcaacagcagcatcaggcgtctagcaattcgggctcagaggaggactcttcttctagcgaagattcagacgactcatcttctgaggttaagagaaagaagcacaaggatgaggactggcaaatgagcgggagtggaagccctagtcagtccggttccgattcagaatccgaggaggagcgtgaaaaatcttcttgtgatgaaacagagtccgactacgagcctaagaataaagtgaaaagccggaaacctcagaatagatccaagtctaagaatgagaagaagaaaaagaagtag

SEQ ID NO: 340020 - DNA, 624 bp, Artificial Sequence
  derived and/or modified sequence
atgaacggacactctgatgaggagtccgttcgtaacagttccggcgaatcatcccagtccgacgatgatagcgggtctgctagcggcagcggcagtggctcgtcatccgggtcttcgtcggacgggtccagttctcaatcaggatcatctgattcagactccggcagcgagagcgggagtcaaagcgagtctgagtcggataccagccgcgagaataaagtgcaggcgaaacctcctaaggtcgacggagcagaattctggaaatcctcccccagcattcttgctgtccaacgttccgctatcctgaagaaacagcagcagcagcagcagcaacagcagcaccaggcaagttccaatagtgggagtgaggaagatagctcctcttcagaagattctgacgacagtagcagcgaggttaaacgaaaaaaacataaagatgaagattggcagatgtccggttctggttcaccctcccagagcgggagtgactctgaatctgaggaggagcgagagaagagcagctgcgatgagaccgagtctgattacgaaccaaagaacaaggtgaaatcccggaaaccacagaaccgttctaaatctaaaaacgagaagaagaaaaagaagtag

SEQ ID NO: 340021 - DNA, 771 bp, Artificial Sequence
  derived and/or modified sequence
aggtgaatcaaaggagagtcccagaaaacctgtgactgttgaagaaaattcatctgtgaatttttatattcaaggagtcagtatttatattcatcttttaaactgggaagatttatattttactttaaaacttcttgataataatttacaatgaatggacacagtgatgaagaaagtgttagaaacagtagtggagaatcaagccagtcggatgatgattctgggtcagcttcaggctctggatctggttcgagttctggaagcagtagtgatggaagcagtagccagtcaggtagcagtgactctgactccggatctgaatcaggcagtcagtcagagtctgagtcagacacttcccgagaaaacaaagttcaagcaaaaccaccgaaagttgatggagctgagttttggaaatctagtcctagtattctggccgttcagagatctgcaatcctcaagaagcagcaacagcagcagcagcaacaacaacatcaagcctcatctaatagcggatcagaagaggattcctctagcagtgaagattccgatgactcatcaagtgaggtcaaaaggaaaaagcataaagatgaagattggcaaatgtctgggtcaggatctccatctcagtctggttcagattcagaatctgaagaagagagagagaaaagcagttgtgatgaaacagaatctgattatgagccaaaaaacaaagtcaaaagcagaaaacctcaaaatagatctaagtcaaaaaatgaaaaaaaaaaaaaaaaa

SEQ ID NO: 340022 - DNA, 624 bp, Artificial Sequence
  derived and/or modified sequence
atgaacggccacagcgacgaggagagcgtgagaaacagcagcggcgagagcagccagagcgacgacgacagcggcagcgccagcggcagcggcagcggcagcagcagcggcagcagcagcgacggcagcagcagccagagcggcagcagcgacagcgacagcggcagcgagagcggcagccagagcgagagcgagagcgacaccagcagagagaacaaggtgcaggccaagccccccaaggtggacggcgccgagttctggaagagcagccccagcatcctggccgtgcagagaagcgccatcctgaagaagcagcagcagcagcagcagcagcagcagcaccaggccagcagcaacagcggcagcgaggaggacagcagcagcagcgaggacagcgacgacagcagcagcgaggtgaagagaaagaagcacaaggacgaggactggcagatgagcggcagcggcagccccagccagagcggcagcgacagcgagagcgaggaggagagagagaagagcagctgcgacgagaccgagagcgactacgagcccaagaacaaggtgaagagcagaaagccccagaacagaagcaagagcaagaacgagaagaagaagaagaagtag

SEQ ID NO: 340023 - protein, 468 aa, Artificial Sequence
  derived and/or modified sequence
MEILWKTLTWILSLIMASSEFHSDHRLSYSSQEEFLTYLEHYQLTIPIRVDQNGAFLSFTVKNDKHSRRRRSMDPIDPQQAVSKLFFKLSAYGKHFHLNLTLNTDFVSKHFTVEYWGKDGPQWKHDFLDNCHYTGYLQDQRSTTKVALSNCVGLHGVIATEDEEYFIEPLKNTTEDSKHFSYENGHPHVIYKKSALQQRHLYDHSHCGVSDFTRSGKPWWLNDTSTVSYSLPINNTHIHHRQKRSVSIERFVETLVVADKMMVGYHGRKDIEHYILSVMNIVAKLYRDSSLGNVVNIIVARLIVLTEDQPNLEINHHADKSLDSFCKWQKSILSHQSDGNTIPENGIAHHDNAVLITRYDICTYKNKPCGTLGLASVAGMCEPERSCSINEDIGLGSAFTIAHEIGHNFGMNHDGIGNSCGTKGHEAAKLMAAHITANTNPFSWSACSRDYITSFLEFLKLGDSISGS

SEQ ID NO: 340024 - DNA, 2221 bp, Artificial Sequence
  derived and/or modified sequence
gctgcaattcaagttggctgggggccggtagtgagatctagggctacttcaacaaaactttgctgcccttcctgctcctcttgtcttcttttctcctgataccttttgatgctctgcacatgttatttgcatagcaaaggcactaagctttccaggaagagagggcaccacttccacccccaataagtcttttttcccgtcttttctttcttttcctttccttttttggggggtggggagggagagaaagggggtttgcaaaggcagcatctcagagtgatagcctagatgtattgaaggcatctcttattctgccaaatcggaaagtcagttctctaaagcccgggttagccagaccatagggttttattctggctgcagaataactggctggtgtggctttgcaaaggggggcaaaaaataaaaaaataaaaaaaattaaaaaaagttagagaggagagggagtacgtgagtcgtccagtgcaatctctattgtctgaaacttactttttatcagaatttgaagatgaaaacggttaaaaaatggccatactttagtaactaatcagcctaatgctttgcttatgaaaacttttaccatcattatttttttcattttggattgagaaaatgaatccagatatagaagaaagtgcaggatgttggataaaagtggctcttaaacagtggaacatccaataactaatttgcaagaagttttaaagaaataaaattgttatgcttcgattttggtatggtattgactctttagcacataggtagccctcaaaaaaatcatccagttttctaaattatggaaattttgtggaagacgttgacctggattttgagcctcatcatggcttcatcggaatttcatagtgaccacaggctttcatacagttctcaagaggaattcctgacttatcttgaacactaccagctaactattccaataagggttgatcaaaatggagcatttctcagctttactgtgaaaaatgataaacactcaaggagaagacggagtatggaccctattgatccacagcaggcagtatctaagttattttttaaactttcagcctatggcaagcactttcatctaaacttgactctcaacacagattttgtgtccaaacattttacagtagaatattgggggaaagatggaccccagtggaaacatgattttttagacaactgtcattacacaggatatttgcaagatcaacgtagtacaactaaagtggctttaagcaactgtgttgggttgcatggtgttattgctacagaagatgaagagtattttatcgaacctttaaagaataccacagaggattccaagcattttagttatgaaaatggccaccctcatgttatttacaaaaagtctgcccttcaacaacgacatctgtatgatcactctcattgtggggtttcggatttcacaagaagtggcaaaccttggtggctgaatgacacatccactgtttcttattcactaccaattaacaacacacatatccaccacagacagaagagatcagtgagcattgaacggtttgtggagacattggtagtggcagacaaaatgatggtgggctaccatggccgcaaagacattgaacattacattttgagtgtgatgaatattgttgccaaactttaccgtgattccagcctaggaaacgttgtgaatattatagtggcccgcttaattgttctcacagaagatcagccaaacttggagataaaccaccatgcagacaagtccctcgatagcttctgtaaatggcagaaatccattctctcccaccaaagtgatggaaacaccattccagaaaatgggattgcccaccacgataatgcagttcttattactagatatgatatctgcacttataaaaataagccctgtggaacactgggcttggcctctgtggctggaatgtgtgagcctgaaaggagctgcagcattaatgaagacattggcctgggttcagcttttaccattgcacatgagattggtcacaattttggtatgaaccatgatggaattggaaattcttgtgggacgaaaggtcatgaagcagcaaaacttatggcagctcacattactgcgaataccaatcctttttcctggtctgcttgcagtcgagactacatcaccagctttctagaatttcttaaactcggtgattcaataagtggttcatga

SEQ ID NO: 340025 - DNA, 1407 bp, Artificial Sequence
  derived and/or modified sequence
atggaaattctctggaaaactctgacctggatactgagccttataatggcttccagtgagttccactccgatcacagactaagctatagctcccaagaagaattccttacgtacctcgagcattaccagttgaccattcccatcagagtcgaccaaaacggtgcctttctttctttcactgtgaagaacgacaagcattctcggaggaggaggtccatggatccgattgatccacagcaggccgtctctaagctgttcttcaaactctcagcctatggcaagcactttcacctcaaccttaccctgaacacggattttgtgtcaaagcatttcacagtagagtactggggcaaggacggaccgcaatggaagcatgactttctggataactgtcactatacggggtatctccaggaccagcggtccaccacaaaagtcgccttaagtaactgcgtggggctccacggagtgatcgccaccgaagatgaagagtacttcatcgagcctctgaagaatacaaccgaagactctaaacactttagctatgagaacgggcacccacacgtaatttataagaagagtgccttacagcaaagacacctgtacgaccactcacattgtggggtgtccgacttcactcgaagtgggaaaccttggtggctgaacgataccagcaccgtctcctattcattgccgatcaacaacacccacatacatcacagacaaaagcggagtgtgtcgatcgagcgttttgtcgagacactggtcgtggcagataagatgatggtaggttatcacggccgcaaggatatcgagcactatatcttatctgtgatgaacatcgtggcgaagctctatcgggactcctcgttggggaacgtcgttaatatcatcgtggcccgactcatcgtcctaaccgaggatcagcctaacttagagattaatcaccatgctgacaaatcgcttgactccttttgcaagtggcagaagagcatactcagccaccagtccgacggaaacacaattcccgaaaacgggattgctcaccatgataacgcagtgttgatcactcgatacgacatctgtacatacaagaataagccttgtgggactctcggccttgcctccgtggctggaatgtgcgaaccagagagatcctgtagcatcaatgaggatatcgggttaggctccgcttttacgatagcccacgagatcggacacaacttcggaatgaaccacgacggaatcgggaacagttgcgggacgaaaggccacgaggcagcaaaactaatggctgcccatatcaccgcaaataccaacccctttagctggagtgcctgttccagggactacatcacatcttttctagagttcttaaagttaggtgactctataagtggctcctag

SEQ ID NO: 340026 - DNA, 1407 bp, Artificial Sequence
  derived and/or modified sequence
atggagatcctgtggaagaccctgacctggatcctgagcctcatcatggccagcagcgagttccacagcgaccaccggctgagctacagcagccaggaggagttcctgacctacctggagcactaccagctgaccatccccatccgggtggaccagaatggagccttcctgtccttcaccgtgaagaatgacaagcacagcagaagaagaagatccatggaccccatcgacccccagcaggccgtgtccaagctgttcttcaagctgagcgcctacggcaagcacttccacctgaacctgaccctgaacacagactttgtgtccaagcacttcaccgtggagtactggggcaaggatggcccccagtggaagcatgacttcctggacaactgccactacacaggctacctgcaggaccagaggagcaccaccaaggtggccctgagcaactgtgtgggcctgcatggagtcatcgccacagaagatgaggagtacttcatcgagcccctgaagaacaccacagaggacagcaagcacttctcctatgaaaatggccacccccacgtgatctacaagaagagcgccctgcagcagaggcacctgtatgaccacagccactgcggcgtgtctgacttcaccaggtctgggaagccctggtggctgaatgacaccagcacagtgtcctacagcctgcccatcaacaacacccacatccaccaccggcagaagaggtctgtgtccattgaaagatttgtggagaccctggtggtggccgacaagatgatggtgggctaccacggcaggaaggacatcgagcactacatcctgtctgtgatgaacatcgtggccaagctgtacagagacagcagcctgggcaatgtggtgaacatcatcgtggcccggctgattgtgctgacagaggaccagcccaacctggagatcaaccaccacgccgacaagagcctggacagcttctgcaagtggcagaagagcatcctgagccaccagagtgatggcaacaccatcccagaaaatggaattgcccaccacgacaatgctgtgctgatcaccaggtatgacatctgcacctacaagaacaagccctgtggcaccctgggcctggcctctgtggccggcatgtgtgagcctgagaggagctgcagcatcaatgaagatattggcctgggcagcgccttcaccatcgcccatgaaattggccacaactttggcatgaaccatgatggcatcggcaacagctgtggcaccaagggccatgaagctgccaagctgatggccgcccacatcacagccaacaccaaccccttctcctggagcgcctgcagccgggactacatcaccagcttcctggagttcctgaagctgggggacagcatcagcggcagctag

SEQ ID NO: 340027 - DNA, 1407 bp, Artificial Sequence
  derived and/or modified sequence
atggagatcctgtggaagaccctgacctggatcctgagcctgatcatggcatcttcagagttccattccgaccaccgtctgtcctattcctcccaggaagagtttctgacatacctggaacactaccagctcactattccaatccgcgttgatcagaacggggcctttctgtctttcaccgtaaagaacgacaagcactcaagaaggagacgctctatggaccccatcgatccccagcaggctgtgtccaagctgttctttaagctctcagcttatggcaaacacttccacctgaatctcacccttaatactgactttgtttctaagcacttcactgtagagtactggggaaaggatggccctcagtggaagcatgacttcctggataactgccattacacaggctatctccaggaccagcgctctacgaccaaagtagccctaagcaattgcgtgggtcttcatggggtcatcgccacagaagatgaggagtacttcatcgagcctctgaaaaacacaaccgaggacagcaagcatttcagctatgaaaacggacaccctcacgtgatctataaaaaatctgcattgcagcagaggcatctgtacgatcactcacactgtggtgtaagcgactttacccgatcaggcaagccctggtggctgaacgatacaagcacagtgagctactccttgcccataaacaatacacatattcatcaccggcagaagaggtcagtgagcattgaaagatttgtggagactctcgttgtggccgacaaaatgatggtgggctatcatgggcggaaggatatcgagcactatatccttagtgtcatgaacatcgtggccaaactttatcgtgattcttcattgggaaacgttgttaatatcattgtggctcgcctgatagtcctgaccgaggaccagcctaatctcgagattaatcatcatgcagataagtcacttgattctttctgcaagtggcagaaatcaatcttgtctcatcagagcgatggcaatactattcccgagaatggtatagcccatcacgataatgccgtgctcatcacaaggtatgacatctgcacatataaaaacaaaccatgtggtacactgggcctggcatctgtggccggaatgtgcgagccagaacgctcatgcagcatcaacgaggacataggactcgggagcgcattcaccatagcacacgaaattggccacaatttcgggatgaaccatgacggcatcggaaactcctgtgggactaaaggccatgaagccgccaaactgatggcagcacacattaccgctaacacgaaccccttctcttggtccgcttgctctagagactatattacctcttttcttgagttcctgaaactgggagactccatttccggatcatag

SEQ ID NO: 340028 - DNA, 1407 bp, Artificial Sequence
  derived and/or modified sequence
atggagatcttgtggaaaactctgacatggatcttatctcttattatggcctcttctgaattccactctgaccatagattgtcctactcatctcaagaggaattcttaacctatcttgagcactatcaattgactatcccaatacgcgtggatcagaatggtgcgttcctctctttcacagttaagaacgataaacatagccggcgtaggagaagcatggaccccatcgacccacagcaggctgtgtccaaactgtttttcaaactatctgcatacggcaaacactttcacctaaatctgacccttaatacagacttcgtttccaaacacttcactgtggaatattggggtaaagacggtccccagtggaaacacgacttcctggataattgccactataccggttatcttcaggaccagagatccacaaccaaggtagctctttccaattgcgtgggtctacacggagtgatcgcaacggaagacgaagagtacttcatagagccacttaaaaatacaactgaggactctaaacattttagctacgagaatggccacccccacgtgatctacaaaaagtctgccctgcaacagcgacacttgtatgaccattcacactgtggagtgagtgattttacacgatcaggtaaaccatggtggctgaacgacacgtccaccgtgtcatactccctacccattaacaacactcacatccaccataggcagaagagaagtgtttccatcgagaggtttgtggagacacttgttgtagccgataagatgatggtgggataccacggtcgcaaggatatcgagcattatatccttagtgtgatgaatattgtcgccaagctttaccgcgattcctcgttggggaatgtagtgaacattattgtggctcgcctgattgtgctgaccgaagaccagccaaacctggagatcaaccatcatgccgataagagcctcgatagtttctgtaaatggcagaaatccatcctgtcccaccaatccgatgggaatacaattccagagaatggaatagctcatcacgacaatgcggtcctgattacccggtacgacatttgcacttataaaaacaaaccctgcggaaccctgggcttggcaagtgtggccggaatgtgtgagccggagagatcttgcagcatcaatgaagatataggactcggttctgcgttcaccatcgcacacgaaatcggccacaattttggaatgaatcacgatgggattggaaactcatgcgggacaaaaggtcacgaagcagccaaactgatggccgctcatataactgctaatacaaacccattttcttggagcgcctgcagccgagactacatcacaagttttttagagtttctcaagttgggcgatagcatctctgggtcttag

SEQ ID NO: 340029 - DNA, 1407 bp, Artificial Sequence
  derived and/or modified sequence
atggagatcctgtggaagaccctgacctggatcctgagcctgatcatggccagcagcgagttccacagcgaccacagactgagctacagcagccaggaggagttcctgacctacctggagcactaccagctgaccatccccatcagagtggaccagaacggcgccttcctgagcttcaccgtgaagaacgacaagcacagcagaagaagaagaagcatggaccccatcgacccccagcaggccgtgagcaagctgttcttcaagctgagcgcctacggcaagcacttccacctgaacctgaccctgaacaccgacttcgtgagcaagcacttcaccgtggagtactggggcaaggacggcccccagtggaagcacgacttcctggacaactgccactacaccggctacctgcaggaccagagaagcaccaccaaggtggccctgagcaactgcgtgggcctgcacggcgtgatcgccaccgaggacgaggagtacttcatcgagcccctgaagaacaccaccgaggacagcaagcacttcagctacgagaacggccacccccacgtgatctacaagaagagcgccctgcagcagagacacctgtacgaccacagccactgcggcgtgagcgacttcaccagaagcggcaagccctggtggctgaacgacaccagcaccgtgagctacagcctgcccatcaacaacacccacatccaccacagacagaagagaagcgtgagcatcgagagattcgtggagaccctggtggtggccgacaagatgatggtgggctaccacggcagaaaggacatcgagcactacatcctgagcgtgatgaacatcgtggccaagctgtacagagacagcagcctgggcaacgtggtgaacatcatcgtggccagactgatcgtgctgaccgaggaccagcccaacctggagatcaaccaccacgccgacaagagcctggacagcttctgcaagtggcagaagagcatcctgagccaccagagcgacggcaacaccatccccgagaacggcatcgcccaccacgacaacgccgtgctgatcaccagatacgacatctgcacctacaagaacaagccctgcggcaccctgggcctggccagcgtggccggcatgtgcgagcccgagagaagctgcagcatcaacgaggacatcggcctgggcagcgccttcaccatcgcccacgagatcggccacaacttcggcatgaaccacgacggcatcggcaacagctgcggcaccaagggccacgaggccgccaagctgatggccgcccacatcaccgccaacaccaaccccttcagctggagcgcctgcagcagagactacatcaccagcttcctggagttcctgaagctgggcgacagcatcagcggcagctag

SEQ ID NO: 340030 - protein, 858 aa, Artificial Sequence
  derived and/or modified sequence
MEILWKTLTWILSLIMASSEFHSDHRLSYSSQEEFLTYLEHYQLTIPIRVDQNGAFLSFTVKNDKHSRRRRSMDPIDPQQAVSKLFFKLSAYGKHFHLNLTLNTDFVSKHFTVEYWGKDGPQWKHDFLDNCHYTGYLQDQRSTTKVALSNCVGLHGVIATEDEEYFIEPLKNTTEDSKHFSYENGHPHVIYKKSALQQRHLYDHSHCGVSDFTRSGKPWWLNDTSTVSYSLPINNTHIHHRQKRSVSIERFVETLVVADKMMVGYHGRKDIEHYILSVMNIVAKLYRDSSLGNVVNIIVARLIVLTEDQPNLEINHHADKSLDSFCKWQKSILSHQSDGNTIPENGIAHHDNAVLITRYDICTYKNKPCGTLGLASVAGMCEPERSCSINEDIGLGSAFTIAHEIGHNFGMNHDGIGNSCRKVMKQQYGSSHYCEYQSFFLVCLQSRLHHQLSREVCRELWCLSKSNRCVTNSIPAAEGTLCQTGNIEKGWCYQGDCVPFGTWPQSIDGGWGPWSLWGECSRTCGGGVSSSLRHCDSPAPSGGGKYCLGERKRYRSCNTDPCPLGSRDFREKQCADFDNMPFRGKYYNWKPYTGGGVKPCALNCLAEGYNFYTERAPAVIDGTQCNADSLDICINGECKHVGCDNILGSDAREDRCRVCGGDGSTCDAIEGFFNDSLPRGGYMEVVQIPRGSVHIEVREVAMSKNYIALKSEGDDYYINGAWTIDWPRKFDVAGTAFHYKRPTDEPESLEALGPTSENLIVMVLLQEQNLGIRYKFNVPITRTGSGDNEVGFTWNHQPWSECSATCAGGKMPTRQPTQRARWRTKHILSYALCLLKKLIGNISCRFASSCNLAKETLL

SEQ ID NO: 340031 - protein, 622 aa, Artificial Sequence
  derived and/or modified sequence
MTYWRLENIAKTEPPKIFRVKPVLGIKRMIQIEWIKPELAPVSSDLKYTLRFRTVNSTSWMEVNFAKNRKDKNQTYNLTGLQPFTEYVIALRCAVKESKFWSDWSQEKMGMTEEEAPCGLELWRVLKPAEADGRRPVRLLWKKARGAPVLEKTLGYNIWYYPESNTNLTETMNTTNQQLELHLGGESFWVSMISYNSLGKSPVATLRIPAIQEKSFQCIEVMQACVAEDQLVVKWQSSALDVNTWMIEWFPDVDSEPTTLSWESVSQATNWTIQQDKLKPFWCYNISVYPMLHDKVGEPYSIQAYAKEGVPSEGPETKVENIGVKTVTITWKEIPKSERKGIICNYTIFYQAEGGKGFSKTVNSSILQYGLESLKRKTSYIVQVMASTSAGGTNGTSINFKTLSFSVFEIILITSLIGGGLLILIILTVAYGLKKPNKLTHLCWPTVPNPAESSIATWHGDDFKDKLNLKESDDSVNTEDRILKPCSTPSDKLVIDKLVVNFGNVLQEIFTDEARTGQENNLGGEKNGYVTCPFRPDCPLGKSFEELPVSPEIPPRKSQYLRSRMPEGTRPEAKEQLLFSGQSLVPDHLCEEGAPNPYLKNSVTAREFLVSEKLPEHTKGEV

SEQ ID NO: 340032 - DNA, 1869 bp, Artificial Sequence
  derived and/or modified sequence
atgacatattggcgcttggagaacattgccaagacagagccccctaagatttttcgggttaaaccagtgttgggaatcaagcgcatgatccagatcgaatggatcaagcccgagctggcgcccgtcagctctgacctgaagtataccctcagattccgcacagtcaactccacatcctggatggaggtgaactttgctaagaatcgcaaggataagaaccagacctacaatctgactgggctccaaccatttacagagtacgtcattgcactgcggtgcgcggtcaaagagtccaagttctggagcgactggagtcaggagaaaatggggatgaccgaggaagaagctccatgcgggttagaactttggcgagtgctgaagcctgctgaggccgatggccggcgtcccgttcgcttactgtggaagaaggcccgtggggcacctgtactggagaaaacactcgggtacaacatatggtactatcccgaatcaaacactaacctcacagaaactatgaacactactaatcagcagttagaactgcacctgggaggtgagtccttttgggtctccatgatttcttataactccttgggtaagagtcccgtggcaactcttcggattcccgccatccaagaaaagtcttttcagtgtatcgaggtgatgcaggcctgcgtggccgaggaccagctcgtggtgaaatggcagtcctctgcgcttgacgtcaatacctggatgattgagtggtttccagacgttgactctgaacctaccaccctgagttgggagtccgtgtcccaggcgaccaactggacgatccagcaggacaaactcaaaccattctggtgttataacatcagcgtgtatcccatgctgcacgacaaggtgggtgagccttactccatccaagcatatgccaaagagggtgtgccttcagagggccccgagacaaaagtcgaaaatatcggagtgaagacagttaccatcacctggaaggaaatcccaaagtctgaaaggaagggaattatctgcaactacacgatcttttatcaagcagagggtggaaaaggattctctaaaaccgtaaacagctcaatcttacagtatggactggagtcattgaagcgtaagacctcctacatcgtgcaagttatggcttccactagcgcaggagggaccaatggtacgtcaattaattttaaaactctcagcttttctgtttttgagatcatcttgatcactagcctgattggcggaggtctcctcatcctgatcatcttgaccgtggcctacggtctgaagaagcccaataagctgacacacctttgctggcccactgtccctaatcctgctgagagctcgattgcaacatggcacggagacgattttaaagacaagctcaatctgaaggaaagcgacgactccgtcaacactgaggatcggatcctaaagccatgctccacacccagcgacaaactggttattgacaagctagtggtcaactttggaaatgtgctgcaggagatcttcacggatgaagctcgaactggtcaagagaacaatctcggcggtgagaagaatgggtacgtgacatgccctttccggcctgactgccccttgggcaagtctttcgaggagcttccagtctctccagaaattcctccaagaaagtcccaatacctgagatccaggatgccggagggaacccggcccgaagctaaggagcaattgctcttcagcgggcagtcactcgtcccagaccacttgtgtgaggagggagctcccaatccttacctgaaaaactctgtgaccgcaagagaatttctggtctctgagaaactcccagagcatacaaaaggtgaagtgtag

SEQ ID NO: 340033 - DNA, 1869 bp, Artificial Sequence
  derived and/or modified sequence
atgacctactggaggctggagaacatcgccaagacagagccccccaagatcttccgggtgaagcctgtgctgggcatcaagaggatgatccagatcgagtggatcaagccagagctggcccctgtgtccagtgacctgaagtacaccctgcgcttcagaacagtgaacagcacctcctggatggaggtgaactttgccaagaacaggaaggacaagaaccagacctacaacctgaccggcctgcagcccttcacagaatatgtgattgccctgcgctgtgctgtgaaggagagcaagttctggagcgactggagccaggagaagatgggcatgacagaggaggaggccccctgtggcctggagctgtggagggtgctgaagccagctgaggctgatggccggcggcctgtgcggctgctgtggaagaaggcccggggggcccctgtgctggagaagaccctgggctacaacatctggtactacccagagagcaacaccaacctgacagagaccatgaacaccaccaaccagcagctggagctgcacctgggcggggagagcttctgggtgtccatgatctcctacaacagcctgggcaagagccctgtggccaccctgcgcatcccagccatccaggagaagagcttccagtgcatcgaggtgatgcaggcctgtgtggccgaggaccagctggtggtgaagtggcagagcagcgccctggatgtgaacacctggatgattgagtggttcccagatgtggacagcgagcccaccaccctgtcctgggagagcgtgtcccaggccaccaactggaccatccagcaggacaagctgaagcccttctggtgctacaacatctctgtgtaccccatgctgcatgacaaggtgggggagccctacagcatccaggcctatgccaaggagggcgtgcccagcgagggccctgagaccaaggtggagaacatcggcgtgaagacagtgaccatcacctggaaggagatccccaagtctgagaggaagggcatcatctgcaactacaccatcttctaccaggccgagggcggcaagggcttcagcaagacagtgaacagcagcatcctgcagtatggcctggagagcctgaagaggaagaccagctacatcgtgcaggtgatggccagcaccagcgctgggggcaccaacggcaccagcatcaacttcaagaccctgtccttctctgtgtttgagatcatcctgatcaccagcctgattggaggcggcctgctgatcctgatcatcctgactgtggcctacggcctgaagaagcccaacaagctgacccacctgtgctggcccaccgtgcccaacccagctgagagcagcatcgccacctggcatggagatgacttcaaggacaagctgaacctgaaggagagtgatgattctgtgaacacagaagatcgcatcctgaagccctgcagcacccccagcgacaagctggtgattgacaagctggtggtgaactttggaaatgtgctgcaggagatcttcacagatgaggccaggacaggccaggagaacaacctgggcggggagaagaatggctacgtgacctgccccttccggccagactgccccctgggcaagagctttgaggagctgcctgtgtccccagagatcccccccaggaagagccagtacctgcggagcaggatgcctgagggcaccaggcctgaggccaaggagcagctgctcttcagcggccagagcctggtgcctgaccacctgtgtgaggagggcgcccccaacccctacctgaagaacagcgtgacagcccgggagttcctggtgtctgagaagctgcctgagcacaccaagggggaggtgtag

SEQ ID NO: 340034 - DNA, 1869 bp, Artificial Sequence
  derived and/or modified sequence
atgacctactggcggctggagaacatcgccaagaccgagccccccaagatcttccgagtaaaacccgtgttgggtattaagcgcatgatccagattgaatggattaagcctgaactggcaccagtctcatcggatcttaagtataccttgaggtttaggacagttaactctacttcttggatggaggtgaattttgccaaaaatcgaaaagataaaaaccagacatataacttgaccggacttcagccttttaccgagtacgtgatcgcacttaggtgtgcagtcaaagagtctaagttctggagtgactggtcccaagaaaaaatgggtatgacagaggaagaggcaccgtgcggcctcgagctctggagagtcctgaaaccagcagaggctgatgggagacgaccagtccggttgctctggaaaaaagccaggggcgcccctgtgctggagaaaactttgggctataacatctggtattacccggagtctaacactaacctgactgaaacaatgaatacgaccaatcaacagttagaacttcatcttggcggcgaaagtttctgggtgagtatgatctcttataacagcctgggaaaaagccccgtggcgacactccggatccccgccattcaggagaagtccttccaatgcatcgaagtcatgcaggcctgcgtcgcagaggaccaactggtcgtgaagtggcagtcgagcgctctggacgtgaacacatggatgatagaatggtttccagacgtagacagtgaacctactaccctgagttgggagtctgtgtcccaggcaaccaactggacgattcagcaggacaagcttaaaccattctggtgctataacatttcagtgtaccccatgctgcatgacaaagtgggtgagccctacagcattcaggcgtatgcaaaggagggtgtcccatctgaggggccagagacgaaggtggagaacatcggagtgaagacagtgacgataacatggaaagagattcccaaatcagaacggaaagggattatctgcaactataccatcttttatcaggccgaaggtggcaaaggctttagcaagaccgtcaactcctcgatactccagtacggactcgaaagcctaaaaagaaagacatcatacattgtccaggtcatggcttccaccagtgcaggcggcaccaacggcacttctattaattttaaaaccctgtccttttctgtcttcgagatcatattaatcacttctctgatcggaggcgggctgttaatcttgattattctgaccgtcgcttacggactgaagaagccaaataagttgacacacctgtgctggccaactgtgcccaatcccgccgagtcctccattgccacatggcacggggacgacttcaaggataaactgaacctcaaagagagtgacgattcagtgaacaccgaagacagaattctgaaaccctgttcgactccttccgacaagctggtgattgacaagttggtggtgaacttcggcaacgttctgcaggaaatctttacagatgaggccaggacagggcaggaaaataacctaggtggcgagaagaacggctacgttacctgccctttcagacctgactgtcctctcggtaagagtttcgaggaactccccgtgtcacctgagatccctccacgtaaaagtcagtacttgagatcaagaatgccagagggaacccggcccgaggcgaaagagcagctattattctcaggtcagtccttggtccctgatcacctctgcgaagaaggagctcctaacccttatctaaagaactcagtgacagcccgagagttcttagtgagcgagaagctgccagaacatactaaaggagaggtgtag

SEQ ID NO: 340035 - DNA, 1869 bp, Artificial Sequence
  derived and/or modified sequence
atgacatactggcgtctggagaacatcgcaaagaccgagccgcctaagatcttccgtgtgaaacctgtcctcggcatcaagcgcatgatccagatcgaatggatcaaacccgagctggcgcctgtttcttccgatctcaagtacacgctgcgcttcaggacagtgaattcgacgagttggatggaggttaactttgctaagaatcgtaaagataaaaaccaaacttacaatttgacagggttacagccttttactgagtacgttatcgctttacggtgcgccgtgaaggaatcgaagttttggtccgattggtcacaggagaagatgggtatgacggaggaagaagccccatgtggacttgagttgtggcgggtgctaaagccagcagaagccgatggtcggcgacctgttagattgctctggaagaaggcacgcggagccccagtgcttgagaagactctcgggtacaacatttggtactatcctgagagcaacaccaatcttactgagacaatgaacaccacaaatcagcagctcgagctccacttaggtggcgaaagtttctgggtgtcaatgattagttataattcacttggcaagagcccagtggcaactcttcgaattcctgccatccaggaaaagtcgttccagtgtatagaggtcatgcaggcctgcgtggctgaggaccagctggtggtaaagtggcagtcgtcagcactggatgtgaacacttggatgatcgagtggtttccagatgttgatagtgagcctactacgttgtcctgggagtccgtgagtcaggccactaattggacaatccaacaagataagttgaagccgttctggtgttataacatctcagtatatccaatgctgcacgataaggtgggggagccatactctatccaagcttacgctaaggagggtgtgcccagcgaaggacccgaaacaaaggtcgagaatataggtgtcaaaaccgtcacaattacctggaaagaaatccccaagtctgagagaaagggcataatctgtaattacacaatcttttaccaggctgaaggcggtaaaggattctccaaaacagtcaactcatctattttacagtacggactggagtccctaaagcggaagacttcttatatagtccaggttatggctagcacctctgctggcggaaccaacggtacctctataaattttaaaaccctcagcttctcagtatttgagatcattttaataactagcctgattggcggaggcctactgattctgatcattctcacggtcgcttatgggctaaaaaagccaaacaagctcactcatctgtgctggccaacggtccctaatcccgctgaaagctctattgctacttggcacggagatgatttcaaagacaagctgaatttgaaggaatcagacgattccgtaaacactgaggacagaatcctcaagccttgtagcaccccctcggacaagctggtaattgataagctcgtggtgaattttgggaatgtcctacaggaaatctttactgatgaagcgcgaacgggacaggaaaataatttgggtggggaaaaaaatggatatgtcacatgcccattccgtcccgattgccccctgggcaagagtttcgaggaactgccagttagtcccgaaatcccccctcggaaaagccaatatctccgctcgagaatgccggagggaacaaggcctgaagccaaggagcagctcctgttctccggacagagcctcgtaccagatcatttatgcgaggaaggcgcaccgaatccctacctaaaaaactccgtcacagccagagagttcttagtcagcgagaagctgcctgagcacacaaaaggggaggtgtag

SEQ ID NO: 340036 - DNA, 1869 bp, Artificial Sequence
  derived and/or modified sequence
atgacctactggagactggagaacatcgccaagaccgagccccccaagatcttcagagtgaagcccgtgctgggcatcaagagaatgatccagatcgagtggatcaagcccgagctggcccccgtgagcagcgacctgaagtacaccctgagattcagaaccgtgaacagcaccagctggatggaggtgaacttcgccaagaacagaaaggacaagaaccagacctacaacctgaccggcctgcagcccttcaccgagtacgtgatcgccctgagatgcgccgtgaaggagagcaagttctggagcgactggagccaggagaagatgggcatgaccgaggaggaggccccctgcggcctggagctgtggagagtgctgaagcccgccgaggccgacggcagaagacccgtgagactgctgtggaagaaggccagaggcgcccccgtgctggagaagaccctgggctacaacatctggtactaccccgagagcaacaccaacctgaccgagaccatgaacaccaccaaccagcagctggagctgcacctgggcggcgagagcttctgggtgagcatgatcagctacaacagcctgggcaagagccccgtggccaccctgagaatccccgccatccaggagaagagcttccagtgcatcgaggtgatgcaggcctgcgtggccgaggaccagctggtggtgaagtggcagagcagcgccctggacgtgaacacctggatgatcgagtggttccccgacgtggacagcgagcccaccaccctgagctgggagagcgtgagccaggccaccaactggaccatccagcaggacaagctgaagcccttctggtgctacaacatcagcgtgtaccccatgctgcacgacaaggtgggcgagccctacagcatccaggcctacgccaaggagggcgtgcccagcgagggccccgagaccaaggtggagaacatcggcgtgaagaccgtgaccatcacctggaaggagatccccaagagcgagagaaagggcatcatctgcaactacaccatcttctaccaggccgagggcggcaagggcttcagcaagaccgtgaacagcagcatcctgcagtacggcctggagagcctgaagagaaagaccagctacatcgtgcaggtgatggccagcaccagcgccggcggcaccaacggcaccagcatcaacttcaagaccctgagcttcagcgtgttcgagatcatcctgatcaccagcctgatcggcggcggcctgctgatcctgatcatcctgaccgtggcctacggcctgaagaagcccaacaagctgacccacctgtgctggcccaccgtgcccaaccccgccgagagcagcatcgccacctggcacggcgacgacttcaaggacaagctgaacctgaaggagagcgacgacagcgtgaacaccgaggacagaatcctgaagccctgcagcacccccagcgacaagctggtgatcgacaagctggtggtgaacttcggcaacgtgctgcaggagatcttcaccgacgaggccagaaccggccaggagaacaacctgggcggcgagaagaacggctacgtgacctgccccttcagacccgactgccccctgggcaagagcttcgaggagctgcccgtgagccccgagatcccccccagaaagagccagtacctgagaagcagaatgcccgagggcaccagacccgaggccaaggagcagctgctgttcagcggccagagcctggtgcccgaccacctgtgcgaggagggcgcccccaacccctacctgaagaacagcgtgaccgccagagagttcctggtgagcgagaagctgcccgagcacaccaagggcgaggtgtag

SEQ ID NO: 340037 - DNA, 432 bp, Artificial Sequence
  derived and/or modified sequence
ctaaatgagaacactgacttcccagatgtaactgtgaagaatccaaaagttaagaaaaaagaagaaactgacttgtaactggatcatcattgtcaggattgcagatcatttgaggatcagagtgtgaaaacgagtttctcttttacagattctccaagatttgtttctgtgcccaactttcagaagaggaaaatcacacattatgtttacataagtagcaaaaatatatttatggtgatctgcattttcataataaagtgtcctattgtgaaacatttctgataatgtttttaatgtatgtagaatttttaggatttactgggagaattaaagtttaataattttagattatttacatttcttcttaatattctgctgtctagaaatattaaaaattatacaactaggaaataaagtaaaataataacattc

SEQ ID NO: 340038 - protein, 399 aa, Artificial Sequence
  derived and/or modified sequence
MDFFSSHLLADSSSPATNSSHTDAHEILVSDFLVSDENLQKMENVLDLWSSGLKTNIISELSKWRLNFIDWHRMEMRKEKEKHAAHLKQLCNQINELKELQKTFEISIGRKDEVISSLSHAIGKQKEKIELMRTFFHWRIGHVRARQDVYEGKLADQYYQRTLLKKVWKVWRSVVQKQWKDVVERACQARAEEVCIQISNDYEAKVAMLSGALENAKAEIQRMQHEKEHFEDSMKKAFMRGVCALNLEAMTIFQNRNDAGIDSTNNKKEEYGPGVQGKEHSAHLDPSAPPMPLPVTSPLLPSPPAAVGGASATAVPSAASMTSTRAASASSVHVPVSALGAGSAATAASEEMQTIPQATAAKYPRTIHPESSTSASRSLGTRSAHTQSLTSVHSIKVVD

SEQ ID NO: 340039 - DNA, 1200 bp, Artificial Sequence
  derived and/or modified sequence
atggacttcttcagcagccacctgctggccgacagcagcagccccgccaccaacagcagccacaccgacgcccacgagatcctggtgagcgacttcctggtgagcgacgagaacctgcagaagatggagaacgtgctggacctgtggagcagcggcctgaagaccaacatcatcagcgagctgagcaagtggagactgaacttcatcgactggcacagaatggagatgagaaaggagaaggagaagcacgccgcccacctgaagcagctgtgcaaccagatcaacgagctgaaggagctgcagaagaccttcgagatcagcatcggcagaaaggacgaggtgatcagcagcctgagccacgccatcggcaagcagaaggagaagatcgagctgatgagaaccttcttccactggagaatcggccacgtgagagccagacaggacgtgtacgagggcaagctggccgaccagtactaccagagaaccctgctgaagaaggtgtggaaggtgtggagaagcgtggtgcagaagcagtggaaggacgtggtggagagagcctgccaggccagagccgaggaggtgtgcatccagatcagcaacgactacgaggccaaggtggccatgctgagcggcgccctggagaacgccaaggccgagatccagagaatgcagcacgagaaggagcacttcgaggacagcatgaagaaggccttcatgagaggcgtgtgcgccctgaacctggaggccatgaccatcttccagaacagaaacgacgccggcatcgacagcaccaacaacaagaaggaggagtacggccccggcgtgcagggcaaggagcacagcgcccacctggaccccagcgccccccccatgcccctgcccgtgaccagccccctgctgcccagcccccccgccgccgtgggcggcgccagcgccaccgccgtgcccagcgccgccagcatgaccagcaccagagccgccagcgccagcagcgtgcacgtgcccgtgagcgccctgggcgccggcagcgccgccaccgccgccagcgaggagatgcagaccatcccccaggccaccgccgccaagtaccccagaaccatccaccccgagagcagcaccagcgccagcagaagcctgggcaccagaagcgcccacacccagagcctgaccagcgtgcacagcatcaaggtggtggactag

SEQ ID NO: 340040 - DNA, 1200 bp, Artificial Sequence
  derived and/or modified sequence
atggacttctttagctcccatctccttgctgactcttcgagcccagccacaaattcaagccacacagacgctcacgaaatccttgtgtcagatttcctggtctctgacgaaaacttgcagaaaatggagaacgtgctcgacctctggagttccggcttgaagactaatattatctctgaactgtcaaagtggcggttaaatttcatagactggcataggatggagatgaggaaagagaaagagaaacacgctgctcacttgaaacaactctgtaaccagatcaatgagctgaaagagctgcagaagacattcgagatcagtatcggtagaaaggacgaagtgatctccagtctgtcacacgcaattggcaaacagaaggagaagattgagctaatgaggactttttttcactggcgtattggtcacgttagggcgaggcaggacgtgtatgagggtaagctcgcagaccagtactaccaacgaacgctgctgaagaaggtttggaaggtgtggaggtcagtcgtgcagaagcagtggaaggatgtggtggaacgtgcctgtcaggcaagagccgaggaggtctgcatccaaatttccaatgattatgaagcgaaagtggcaatgctgtctggtgctctggagaatgccaaggcagaaattcaacgtatgcagcatgaaaaagaacactttgaggactcaatgaaaaaagcattcatgcgcggagtgtgtgctctgaacctggaggctatgacgatattccagaaccggaatgatgccggtatcgattccaccaacaataagaaagaagagtatggaccaggcgtgcagggtaaagagcatagcgcccacctggacccatctgcaccaccaatgccactgcctgtgactagtcctctccttcccagcccaccagcagctgtggggggagccagcgccacagccgttccctctgcggcaagcatgaccagcacccgcgcagccagcgcttcctcagtgcatgtgcccgtgagcgcacttggggcaggatctgccgcaacggctgcatctgaagaaatgcagaccatcccccaggcgaccgctgccaagtatccaaggacaatccatcccgagagctctacttctgcttctcgcagcctgggcacccgtagcgctcacacacagtccctcacaagcgtccattccatcaaggtggtcgattag

SEQ ID NO: 340041 - DNA, 1200 bp, Artificial Sequence
  derived and/or modified sequence
atggactttttctcttcacatctgcttgcagactcatctagcccggccacaaacagctcccatactgatgcgcatgaaattttagtgtcggattttctggtcagtgacgagaacctgcagaagatggaaaacgtactggacttgtggtcgagtggtctgaagacgaatattattagcgaactgtccaagtggcggctgaactttatagactggcaccgaatggagatgaggaaggaaaaggagaaacatgctgcacacctgaaacaactgtgcaaccagatcaatgaactcaaagaactgcaaaagacgttcgagatctctattgggcgtaaagacgaggtgatcagttctctgtcccacgccattgggaaacagaaggagaaaatcgaactgatgagaacctttttccattggagaatcggccatgtgagagcaagacaggacgtgtatgaaggtaagctcgcggaccaatattatcagagaacacttctgaagaaggtgtggaaagtgtggcggtccgtggtccagaaacagtggaaagacgtagtcgagcgtgcatgtcaggcaagggcagaggaagtctgtattcaaatttctaatgattacgaagcaaaggtggccatgctttcgggggcgctcgagaatgccaaggctgaaatccaaaggatgcagcacgaaaaagagcacttcgaggactctatgaagaaagcgttcatgcggggagtttgtgccctgaatctagaggcaatgaccatctttcagaaccgaaacgatgccggcatcgactcaacaaataacaagaaggaggagtacgggccgggcgttcagggtaaggaacactctgctcacctggacccttcagccccccccatgccattgccagtcacatcccctttactcccctcaccaccagcggctgtcggcggagctagcgccacggctgttccttccgccgcgtctatgaccagcacgcgcgccgcctctgcttcgtccgttcacgtgcctgtcagcgccctcggggctggtagtgcagccaccgccgccagcgaggagatgcagacaatcccacaggcaacagctgctaagtaccctagaacgatccatcccgaaagctctacgtcggccagccgcagcctcggaacaaggtccgcccatacccagagcctgacgagcgtacattctatcaaagtggtagattag

SEQ ID NO: 340042 - DNA, 1200 bp, Artificial Sequence
  derived and/or modified sequence
atggacttcttcagcagccacctgctggccgacagcagcagccctgccaccaacagcagccacacagatgcccacgagatcctggtgtctgacttcctggtgtctgatgagaacctgcagaagatggagaatgtgctggacctgtggagcagcggcctgaagaccaacatcatcagcgagctgagcaagtggaggctgaacttcatcgactggcacaggatggagatgaggaaggagaaggagaagcacgccgcccacctgaagcagctgtgcaaccagatcaatgagctgaaggagctgcagaagacctttgagatcagcatcggcaggaaggatgaggtgatcagcagcctgagccacgccatcggcaagcagaaggagaagattgagctgatgaggaccttcttccactggagaattggccacgtgcgggcccggcaggatgtgtatgagggcaagctggccgaccagtactaccagaggaccctgctgaagaaggtgtggaaggtgtggaggtctgtggtgcagaagcagtggaaggatgtggtggagcgggcctgccaggcccgggcagaggaggtgtgcatccagatcagcaatgactatgaggccaaggtggccatgctgagcggggccctggagaatgccaaggccgagatccagaggatgcagcacgagaaggagcactttgaagattccatgaagaaggccttcatgagaggagtgtgtgccctgaacctggaggccatgaccatcttccagaacagaaatgatgctggcatcgacagcaccaacaacaagaaggaggagtatggccctggggtgcagggcaaggagcacagcgcccacctggaccccagcgccccacccatgcccctgcctgtgaccagccccctgctgcccagccccccagctgctgtgggcggggccagcgccacagctgtgcccagcgctgcctccatgaccagcacccgggccgccagcgccagctctgtgcacgtgcctgtgtctgccctgggcgccggcagcgctgccacagctgccagcgaggagatgcagaccatcccccaggccacagctgccaagtaccccaggaccatccaccctgagagcagcaccagcgccagccgcagcctgggcaccaggtctgcccacacccagagcctgacctctgtgcacagcatcaaggtggtggactag

SEQ ID NO: 340043 - DNA, 1975 bp, Artificial Sequence
  derived and/or modified sequence
agattgctgaaacaaaggaccaatgcccagggcggtccttaattcctccctgcagtttgaaactgtcaggttgccgtctaggtagcggttgtgcttgctgaggctgcacttgctgacactgcagctgcgacgcggctaagaggcgcagagcgaggagtcgggatttggtcgcgagcggcgacgagcatttgtgcagaatgtcatcagatgaggagaaatactcacttccagttgtgcaaaatgactccagtcgaggcagttctgtctcttcgaatcttcaggaagaatatgaagaactgcttcattatgctatagtgactccaaatattgaaccctgtgcttcacagtcatctcatcctaagggagaattggtgccagatgtcagaatttctacaattcatgatattcttcatagtcaaggaaataactctgaagtaagagaaactgcaatagaagttggaaaaggatgtgatttccatatttcaagtcattcaaagacagatgagtcatcaccagtgttatcgccaaggaagccttctcacccagtcatggattttttcagttcacatcttttagctgactcttcctcaccagcaacaaattctagtcatacagatgcccatgaaatacttgtgagcgattttcttgtttctgatgaaaaccttcagaagatggaaaatgtgcttgatctttggagttcaggtcttaagacaaacatcatatctgaactaagtaaatggagacttaattttattgactggcaccgaatggaaatgagaaaagagaaagaaaaacatgcagcacatttaaaacaactgtgtaatcagatcaatgaattgaaggagctgcaaaaaacctttgaaatctccattgggagaaaagatgaggtgatttctagcttgtctcatgccataggcaagcaaaaggaaaagatagagttgatgagaacattcttccactggcgaatcggccatgtcagagccagacaggatgtttatgaaggtaaactagctgaccagtactaccagagaactttactgaagaaagtctggaaagtctggcgttccgtagtgcaaaagcagtggaaagatgtggtagaaagagcttgtcaagcaagagctgaagaagtttgtatccagatttccaatgattatgaagccaaagttgctatgttatctggagctttggaaaatgcaaaagctgagattcaaagaatgcaacatgaaaaagagcactttgaagattccatgaaaaaagctttcatgaggggtgtatgtgcattaaatcttgaagccatgactatatttcaaaacagaaatgatgcagggatagactccacaaataataaaaaggaagagtatggtcctggtgttcaaggaaaagaacattctgctcatttggatccttcagctcctccgatgcccttaccagttacatcaccactgctgccatccccaccagccgccgtcggaggagccagcgcgactgccgttccctcagctgcttcgatgacttctaccagggctgcttccgcatcttctgttcacgttcctgtttctgctcttggtgcaggatctgcagctactgctgcatcagaagaaatgcaaaccattcctcaagcaactgcagcaaaatatccccggaccattcatcctgaaagtagtacctcagcttccagatcacttggaaccagatcagctcacacccagtctctcacaagtgttcattccataaaagtggttgactaaagtgaatatgtccatagtggggtcttttaatccctctggtcttaccaagggttagaagtcttttggttttaacttttccatattgttagaacatcatggagacatcatgttcatctgttcaaaattacaagaggctttttcaagctctaccatgctttgtaactatatgtagaaattattttaatgttattttttatttaagcaattaagtaaaacttttttaaatt

SEQ ID NO: 340044 - DNA, 1200 bp, Artificial Sequence
  derived and/or modified sequence
atggacttcttcagcagccacctgctggccgacagcagcagccccgcaacgaattcttcccataccgacgctcatgagatcctggtgagtgatttcctcgtcagtgacgagaacctgcagaagatggagaacgtgctcgacctgtggagtagcggactgaaaacgaacataatctcggaactaagtaaatggaggctcaatttcatagactggcatcgtatggaaatgagaaaggaaaaggagaagcatgccgcacacctgaagcagttgtgcaatcagattaatgagttaaaagaacttcaaaagacattcgaaatttcgatcggccggaaggatgaagtgattagctcattgtcgcatgcaattggcaaacagaaagaaaagattgaactcatgagaaccttcttccactggagaatcgggcacgtgcgcgcccgccaggacgtgtacgagggaaaactggcagaccaatattaccagagaacattgctgaagaaagtttggaaggtctggcggagtgtggtgcagaagcagtggaaagatgtcgttgagagagcgtgccaggcccgcgctgaggaagtttgtatacagatctcaaacgattatgaagcgaaagtggccatgctctcgggcgccctggaaaacgcaaaggccgagatccagcgcatgcagcatgaaaaagaacatttcgaggattccatgaagaaggcgttcatgcgtggagtctgcgcactcaatctggaggccatgactatcttccagaatcgtaacgacgccgggatcgatagcaccaataataagaaagaggagtatggtcctggtgtccaggggaaagagcattcagcccatttagaccccagcgcccctccaatgcctttgccggttaccagtccactcttaccaagcccgccggctgcagtgggtggcgcctcggccacagccgtgccaagcgctgccagtatgaccagcaccagagctgctagcgcttcttctgtgcacgttcccgtgagtgctctcggtgctggctccgccgcgactgctgcaagcgaagagatgcaaactatcccacaggccacggcagcgaagtaccccagaaccatccaccccgaatcttcaacttcagctagtcgctctttggggacaaggtctgcccacactcagtccctcacaagtgtgcactctattaaagtggtggattag

SEQ ID NO: 340045 - DNA, 1200 bp, Artificial Sequence
  derived and/or modified sequence
atggacttcttcagcagccacctgctggccgacagcagcagccccgcaaccaatagcagtcataccgacgcccatgaaatcttggtgagtgacttcctagttagcgatgaaaacctgcaaaagatggaaaacgttctcgatctttggtctagcggcctgaaaacaaatatcattagcgaactaagtaagtggcgcctcaactttatcgactggcacagaatggaaatgcgcaaggagaaagaaaagcatgcagcccatctcaaacagttatgcaatcagatcaatgagctcaaggaactgcagaaaacctttgaaatatccatcggccgaaaagacgaagtaatttcttccctgtcccacgcaatcggaaaacaaaaagaaaagatcgagctcatgcgaaccttcttccattggcgcatcggtcacgttcgcgcccgacaggatgtctatgaggggaaattagcagaccagtactaccagcgcacactgttgaagaaggtttggaaagtttggagatctgtggttcagaagcaatggaaagacgtcgtcgagcgggcttgccaggctcgggcagaagaggtgtgtattcaaatttcaaatgactacgaggcaaaagtagccatgctgtccggcgcgctagaaaatgccaaggctgaaattcagcgcatgcaacacgagaaggagcacttcgaggactctatgaagaaggcttttatgcgcggtgtctgtgctctgaatctggaggcaatgaccatattccagaaccggaatgatgccggtatagacagtacaaataacaagaaggaggagtacggcccaggtgttcagggaaaagagcactccgcccatctcgacccctcagctcctcccatgccccttcccgtaacatcacccttgctcccctcacctccagctgcggtcggcggggcttccgctacagctgtgccttctgccgcgtccatgacttccacaagggccgcatcagcgagctccgttcacgtgcccgtctccgctttgggagccggctccgcagccacggctgccagtgaagagatgcaaactattccacaagcgacagcagcaaagtacccacggacaatccatcctgagagcagtactagcgctagccggtctctagggacgcgatctgcgcatacacagtcattgacaagtgttcactcaatcaaagtggttgactag

SEQ ID NO: 340046 - DNA, 1200 bp, Artificial Sequence
  derived and/or modified sequence
atggacttctttagctctcaccttcttgccgattcttcctcgcctgccactaactcttcacacactgatgcccacgagattctcgtttccgactttttggtgtccgatgagaacctgcagaaaatggagaacgtgctggatttatggtctagcggactgaaaaccaatatcatcagcgagctaagcaagtggaggctgaactttatcgactggcatcggatggagatgagaaaggagaaggagaaacatgctgcccacctgaagcagctttgcaatcagattaatgagctcaaagagctacagaagacctttgaaatctccatcggcaggaaggacgaggtcatatcctctctctcccatgccataggtaaacagaaagaaaaaatcgagttaatgaggaccttttttcactggaggatcggtcatgtccgagcccgtcaggatgtctacgaaggcaagcttgccgatcagtactaccagaggacgctgctgaaaaaagtctggaaggtgtggagatcagttgttcagaagcagtggaaagacgtagttgagagggcttgtcaggccagggccgaagaggtatgcattcaaatctcaaatgattatgaggccaaagttgcgatgctgtccggggcactagagaacgctaaggctgagatccagcgcatgcaacacgagaaggagcacttcgaggatagtatgaaaaaggcctttatgagaggtgtttgtgccctcaacctcgaagccatgactatcttccagaacaggaacgacgccggtatcgactctactaacaacaagaaggaggagtacggtcctggggtacagggtaaggagcactctgctcatctcgacccaagcgctccgccaatgcccctaccggttactagccctctgttaccatcccctcccgctgccgtcggaggagcttccgctactgccgtgccatcagccgcttccatgacctcaactagagccgcttctgctagctctgttcatgtgcccgtgtccgccctgggtgcgggttctgctgccaccgcggcatcagaggagatgcagacaatcccacaggccaccgcggctaaataccccaggactatccacccggagtcttccaccagcgcctcacgctctctaggaaccagaagcgctcatacacagtcattgacaagtgtacacagtataaaagttgtggattag

SEQ ID NO: 340047 - DNA, 1200 bp, Artificial Sequence
  derived and/or modified sequence
atggactttttcagttctcatttgctagctgatagcagttctccagcaacaaatagtagccacaccgacgcccatgagattctcgtctcagacttcttagtcagcgatgaaaatctgcagaagatggaaaacgtccttgatctttggtcttctggtctgaaaaccaacattatctcagagctctcaaaatggagattaaactttattgactggcacagaatggagatgcggaaagaaaaggagaaacacgctgcacatttgaagcagctgtgcaaccaaattaatgaactaaaggaattacagaaaaccttcgagatttcgatcggcagaaaagacgaggtgatcagttccctctcccatgccatagggaaacagaaggaaaagatcgagctaatgaggacctttttccactggcggataggccacgttcgtgccagacaagacgtgtacgagggtaagttggcagatcagtactaccagcgaactttacttaaaaaagtctggaaagtgtggagatcagtggtgcagaagcaatggaaagatgtggtagaaagagcttgccaggccagggctgaggaggtttgcatacagatcagtaacgattacgaagccaaggttgccatgctgtccggagccctggaaaacgcaaaagctgagatccagcgtatgcagcacgaaaaggagcatttcgaggacagtatgaaaaaggcctttatgaggggcgtgtgcgcactgaatctagaagcaatgacaattttccaaaatcgcaatgatgctgggattgacagcactaacaacaagaaggaggagtacggccctggagtacagggaaaagaacacagtgcacatctagatccctccgccccacctatgccactccccgtgacttctccactgctgccctctcctcccgctgcagtaggcggagcgtcggcgaccgctgttccgtcagccgcttctatgacctctacccgcgctgcctcagcctccagcgtgcacgtgcccgttagcgcacttggtgccggtagcgccgctaccgcagccagcgaggaaatgcagactataccacaggctacagccgctaagtatccgaggaccatccatcccgaaagtagcacaagcgcatccagaagccttggcacccgatccgcccatacccagtcactcactagcgtccatagcattaaggtagtggattag

SEQ ID NO: 340048 - DNA, 1524 bp, Artificial Sequence
  derived and/or modified sequence
aacattcagtacaatctgctgcccaggacctggacattgacagataaaatgaagaagaatatgaagaactgcttcattatgctatagtgactccaaatattgaaccctgtgcttcacagtcatctcatcctaagggagaattggtgccagatgtcagaatttctacaattcatgatattcttcatagtcaaggaaataactctgaagtaagagaaactgcaatagaagttggaaaaggatgtgatttccatatttcaagtcattcaaagacagatgagtcatcaccagtgttatcgccaaggaagccttctcacccagtcatggattttttcagttcacatcttttagctgactcttcctcaccagcaacaaattctagtcatacagatgcccatgaaatacttgtgagcgattttcttgtttctgatgaaaaccttcagaagatggaaaatgtgcttgatctttggagttcaggtcttaagacaaacatcatatctgaactaagtaaatggagacttaattttattgactggcaccgaatggaaatgagaaaagagaaagaaaaacatgcagcacatttaaaacaactgtgtaatcagatcaatgaattgaaggagctgcaaaaaacctttgaaatctccattgggagaaaagatgaggtgatttctagcttgtctcatgccataggcaagcaaaaggaaaagatagagttgatgagaacattcttccactggcgaatcggccatgtcagagccagacaggatgtttatgaaggtaaactagctgaccagtactaccagagaactttactgaagaaagtctggaaagtctggcgttccgtagtgcaaaagcagtggaaagatgtggtagaaagagcttgtcaagcaagagctgaagaagtttgtatccagatttccaatgattatgaagccaaagttgctatgttatctggagctttggaaaatgcaaaagctgagattcaaagaatgcaacatgaaaaagagcactttgaagattccatgaaaaaagctttcatgaggggtgtatgtgcattaaatcttgaagccatgactatatttcaaaacagaaatgatgcagggatagactccacaaataataaaaaggaagagtatggtcctggtgttcaaggaaaagaacattctgctcatttggatccttcagctcctccgatgcccttaccagttacatcaccactgctgccatccccaccagccgccgtcggaggagccagcgcgactgccgttccctcagctgcttcgatgacttctaccagggctgcttccgcatcttctgttcacgttcctgtttctgctcttggtgcaggatctgcagctactgctgcatcagaagaaatgcaaaccattcctcaagcaactgcagcaaaatatccccggaccattcatcctgaaagtagtacctcagcttccagatcacttggaaccagatcagctcacacccagtctctcacaagtgttcattccataaaagtggttgactaaagtg

SEQ ID NO: 340049 - protein, 51 aa, Artificial Sequence
  derived and/or modified sequence
MDFFSSHLLADSSSPATNSSHTDAHEILVSDFLVSDENLQKMENVLDLWSS

SEQ ID NO: 340050 - protein, 32 aa, Artificial Sequence
  derived and/or modified sequence
MDFFSSHLLADSSSPATNSSHTDAHEILVSDF

SEQ ID NO: 340051 - protein, 514 aa, Artificial Sequence
  derived and/or modified sequence
MNSGGGFGLGLGFGLTPTSVIQVTNLSSAVTSEQMRTLFSFLGEIEELRLYPPDNAPLAFSSKVCYVKFRDPSSVGVAQHLTNTVFIDRALIVVPCAEGKIPEESKALSLLAPAPTMTSLMPGAGLLPIPTPNPLTTLGVSLSSLGAIPAAALDPNIATLGEIPQPPLMGNVDPSKIDEIRRTVYVGNLNSQTTTADQLLEFFKQVGEVKFVRMAGDETQPTRFAFVEFADQNSVPRALAFNGVMFGDRPLKINHSNNAIVKPPEMTPQAAAKELEEVMKRVREAQSFISAAIEPESGKSNERKGGRSRSHTRSKSRSSSKSHSRRKRSQSKHRSRSHNRSRSRQKDRRRSKSPHKKRSKSRERRKSRSRSHSRDKRKDTREKIKEKERVKEKDREKEREREKEREKEKERGKNKDRDKEREKDREKDKEKDREREREKEHEKDRDKEKEKEQDKEKEREKDRSKEIDEKRKKDKNPEHHPGVTMHREDLVVPAGKGVGGGAGVLPDRQEHQKP

SEQ ID NO: 340052 - DNA, 1875 bp, Artificial Sequence
  derived and/or modified sequence
atgaacagcggcggcggcttcggcctgggcctgggcttcggcctgacccccaccagcgtgatccaggtgaccaacctgagcagcgccgtgaccagcgagcagatgagaaccctgttcagcttcctgggcgagatcgaggagctgagactgtacccccccgacaacgcccccctggccttcagcagcaaggtgtgctacgtgaagttcagagaccccagcagcgtgggcgtggcccagcacctgaccaacaccgtgttcatcgacagagccctgatcgtggtgccctgcgccgagggcaagatccccgaggagagcaaggccctgagcctgctggcccccgcccccaccatgaccagcctgatgcccggcgccggcctgctgcccatccccacccccaaccccctgaccaccctgggcgtgagcctgagcagcctgggcgccatccccgccgccgccctggaccccaacatcgccaccctgggcgagatcccccagccccccctgatgggcaacgtggaccccagcaagatcgacgagatcagaagaaccgtgtacgtgggcaacctgaacagccagaccaccaccgccgaccagctgctggagttcttcaagcaggtgggcgaggtgaagttcgtgagaatggccggcgacgagacccagcccaccagattcgccttcgtggagttcgccgaccagaacagcgtgcccagagccctggccttcaacggcgtgatgttcggcgacagacccctgaagatcaaccacagcaacaacgccatcgtgaagccccccgagatgaccccccaggccgccgccaaggagctggaggaggtgatgaagagagtgagagaggcccagagcttcatcagcgccgccatcgagcccgagagcggcaagagcaacgagagaaagggcggcagaagcagaagccacaccagaagcaagagcagaagcagcagcaagagccacagcagaagaaagagaagccagagcaagcacagaagcagaagccacaacagaagcagaagcagacagaaggacagaagaagaagcaagagcccccacaagaagagaagcaagagcagagagagaagaaagagcagaagcagaagccacagcagagacaagagaaaggacaccagagagaagatcaaggagaaggagagagtgaaggagaaggacagagagaaggagagagagagagagaaggagagagagaaggagaaggagagaggcaagaacaaggacagagacaaggagagagagaaggacagagagaaggacaaggagaaggacagagagagagagagagagaaggagcacgagaaggacagagacaaggagaaggagaaggagcaggacaaggagaaggagagagagaaggacagaagcaaggagatcgacgagaagagaaagaaggacaagaagagcagaaccccccccagaagctacaacgccagcagaagaagcagaagcagcagcagagagagaagaagaagaagaagcagaagcagcagcagaagccccagaaccagcaagaccatcaagagaaagagcagcagaagccccagccccagaagcagaaacaagaaggacaagaagagagagaaggagagagaccacatcagcgagagaagagagagagagagaagcaccagcatgagaaagagcagcaacgacagagacggcaaggagaagctggagaagaacagcaccagcctgaaggagaaggagcacaacaaggagcccgacagcagcgtgagcaaggaggtggacgacaaggacgcccccagaaccgaggagaacaagatccagcacaacggcaactgccagctgaacgaggagaacctgagcaccaagaccgaggccgtgtag

SEQ ID NO: 340053 - DNA, 1545 bp, Artificial Sequence
  derived and/or modified sequence
atgaacagcggcggcggcttcggcctgggcctgggcttcggcctgacccccaccagcgtgatccaggtgaccaacctgagcagcgccgtgaccagcgagcagatgagaaccctgttcagcttcctgggcgagatcgaggagctgagactgtacccccccgacaacgcccccctggccttcagcagcaaggtgtgctacgtgaagttcagagaccccagcagcgtgggcgtggcccagcacctgaccaacaccgtgttcatcgacagagccctgatcgtggtgccctgcgccgagggcaagatccccgaggagagcaaggccctgagcctgctggcccccgcccccaccatgaccagcctgatgcccggcgccggcctgctgcccatccccacccccaaccccctgaccaccctgggcgtgagcctgagcagcctgggcgccatccccgccgccgccctggaccccaacatcgccaccctgggcgagatcccccagccccccctgatgggcaacgtggaccccagcaagatcgacgagatcagaagaaccgtgtacgtgggcaacctgaacagccagaccaccaccgccgaccagctgctggagttcttcaagcaggtgggcgaggtgaagttcgtgagaatggccggcgacgagacccagcccaccagattcgccttcgtggagttcgccgaccagaacagcgtgcccagagccctggccttcaacggcgtgatgttcggcgacagacccctgaagatcaaccacagcaacaacgccatcgtgaagccccccgagatgaccccccaggccgccgccaaggagctggaggaggtgatgaagagagtgagagaggcccagagcttcatcagcgccgccatcgagcccgagagcggcaagagcaacgagagaaagggcggcagaagcagaagccacaccagaagcaagagcagaagcagcagcaagagccacagcagaagaaagagaagccagagcaagcacagaagcagaagccacaacagaagcagaagcagacagaaggacagaagaagaagcaagagcccccacaagaagagaagcaagagcagagagagaagaaagagcagaagcagaagccacagcagagacaagagaaaggacaccagagagaagatcaaggagaaggagagagtgaaggagaaggacagagagaaggagagagagagagagaaggagagagagaaggagaaggagagaggcaagaacaaggacagagacaaggagagagagaaggacagagagaaggacaaggagaaggacagagagagagagagagagaaggagcacgagaaggacagagacaaggagaaggagaaggagcaggacaaggagaaggagagagagaaggacagaagcaaggagatcgacgagaagagaaagaaggacaagaaccccgagcaccaccccggcgtgaccatgcacagagaggacctggtggtgcccgccggcaagggcgtgggcggcggcgccggcgtgctgcccgacagacaggagcaccagaagccctag

SEQ ID NO: 340054 - DNA, 1875 bp, Artificial Sequence
  derived and/or modified sequence
atgaactctgggggggggtttggcctcggtttaggcttcggattgacaccaacttccgtcattcaagttactaacctctctagcgcagtgacatccgagcagatgaggaccctgttctcgtttctgggggagattgaggagttgcgtctgtaccctcccgataatgccccgctggcgttttcaagcaaggtgtgctacgtaaaatttcgagatccctcctccgtgggagtggcacagcacctgactaacactgtgtttatagatcgggccctgatagtcgtgccatgtgccgaaggcaagatcccggaggagagcaaagccctgagtctccttgccccggcccccacgatgacctcgctaatgccaggggccggcctcctgccaattccaacacctaatcccctcaccacactgggcgtgtctcttagtagcctgggggccatccctgcagcggccctggaccctaacattgctactctgggggaaatcccacagccaccactgatggggaacgttgacccttcaaagattgacgagattaggcgcaccgtttatgtgggaaatctgaatagccagaccaccactgccgatcagttgctggaattttttaagcaggtcggagaggtgaagttcgtgcggatggctggagatgaaacacagcctactagattcgccttcgttgaatttgctgatcagaactccgttcctagagccctggcttttaacggagtaatgtttggtgacaggcccctgaagatcaaccactcaaataacgcaatcgtgaagcccccagagatgacccctcaggccgcggctaaggagctcgaggaggtgatgaaacgtgtccgggaggcgcagtccttcatttccgcggcaatcgagcctgaatcagggaaatctaacgagcgcaaaggggggaggagccgatcacatacgcgatccaagagtcgttcttcgtctaaatcacatagtcgccggaagcggtctcagtccaagcaccggtcgagaagccacaacagatctcgaagccggcagaaggacagaagacgctccaagtcaccccacaagaagcgctccaagtctagagagcggagaaaaagcagatctagaagccacagccgcgacaaacgcaaggacacacgcgagaaaatcaaggaaaaagagagagtgaaggaaaaagacagagaaaaagagcgggagcgcgagaaggaaagagaaaaagaaaaggagaggggcaaaaataaggatagggacaaggagcgggagaaggaccgggagaaggacaaggaaaaggatcgcgagcgcgagagagaaaaagaacacgagaaggatcgtgacaaggagaaggaaaaggagcaagacaaggagaaggagcgggaaaaagaccgaagcaaagaaattgatgaaaaacgaaagaaggataagaagtctcggactccacccagatcctacaatgccagccgccggtcacggtcctcaagccgcgagagacgccgaagacgaagcaggagctccagcagaagtccacggacatccaagacaatcaaacgcaagtcttctagatctccgagccctaggtctaggaacaagaaagataaaaaacgcgaaaaggagcgcgatcacatttccgaacgccgagagcgcgaacgaagcactagtatgcggaagtcttcaaatgaccgcgacggtaaagaaaaacttgagaaaaattctaccagtctgaaagaaaaggaacataacaaagaacctgacagtagtgtgtccaaggaggtagacgataaggacgccccccgcactgaggaaaacaaaatacagcacaatggcaattgtcagctgaatgaggagaatctgtctacgaagaccgaagccgtttag

SEQ ID NO: 340055 - DNA, 1545 bp, Artificial Sequence
  derived and/or modified sequence
atgaactctggcggcggcttcgggttaggattgggtttcgggctgacaccgacatctgtgatccaagtgaccaacctgagcagcgccgttacttctgagcagatgaggacactgttctctttcctaggagaaatcgaggagcttcggctgtatccacccgataatgcacctctggctttttctagtaaggtctgttacgtcaaatttagagacccttcctcagttggcgtggcacagcacttgacaaacacggtttttatagaccgtgcactgatcgtggtgccctgcgctgaggggaaaatccccgaggagagcaaggccctgtcattgctggcacccgcaccaacaatgacaagcctcatgcccggagccggtctcctgcctattccaactcccaaccctcttaccaccttgggagtctctctatctagtctgggtgccatccctgctgctgccctcgatcccaatatcgctaccctcggggagataccgcagccccccctcatgggtaacgtggatccctctaagatcgatgagattaggcgcactgtttacgtgggtaacctgaatagtcagacaacgacagcagaccaactgttggagttcttcaagcaagtgggggaggttaaatttgtcagaatggcaggcgacgaaacccagccgacacggttcgcctttgttgaattcgctgaccagaattccgtgccaagggctctcgcattcaacggtgtcatgtttggggatcgtcccctgaagatcaatcactccaacaacgccatcgtgaagccacctgagatgactccccaggcggctgccaaggagctggaagaggtgatgaagagggtcagggaagctcaaagctttataagcgcggctatcgaacccgaaagcgggaaatcaaatgagaggaaaggcgggcggtcccgctcccatacccggagcaaatcaagaagctcctccaagtcacacagtaggcgcaagcgctctcagagcaagcacaggtcgcggtcacacaatcggagtcgttccaggcagaaggatcgcagaaggtctaaatcgccccacaagaagcgctccaaatccagggaacgacggaagtctagatcccgcagccacagtagggataagcgtaaagatacacgggaaaagattaaggagaaagagagggttaaagaaaaggatcgcgaaaaggagagagaacgagagaaggagcgtgaaaaggaaaaggagagaggaaaaaataaggaccgtgataaggagcgggagaaagatcgcgagaaggataaagagaaagatagagaacgagaaagagagaaagaacacgagaaggaccgagacaaggaaaaagagaaagagcaagataaggagaaggagagggagaaagatcgctcaaaagaaattgatgagaagaggaagaaagacaaaaaccctgagcaccaccctggcgtaactatgcacagggaggatttagtggtccctgcgggcaaaggtgtgggtggtggcgccggcgtgctgcccgatcggcaggagcaccaaaagccttag

SEQ ID NO: 340056 - DNA, 1875 bp, Artificial Sequence
  derived and/or modified sequence
atgaacagcggcggcggcttcggcctgggcctgggcttcggcctgacccccaccagcgtcatccaggtgaccaacctgagcagcgctgtgaccagcgagcagatgaggaccctcttctccttcctgggggagattgaggagctgcggctgtaccccccagacaatgcccccctggccttcagcagcaaggtgtgctacgtgaagttccgggaccccagctctgtgggcgtggcccagcacctgaccaacacagtgttcatcgaccgggccctgattgtggtgccctgtgccgagggcaagatccctgaggagagcaaggccctgagcctgctggccccagcccccaccatgaccagcctgatgcctggggccggcctgctgcccatccccacccccaaccccctgaccaccctgggcgtgtccctgagcagcctgggcgccatcccagctgctgccctggaccccaacatcgccaccctgggggagatcccccagccccccctgatgggaaatgtggaccccagcaagattgatgagatcagaagaacagtgtatgtgggcaacctgaacagccagaccaccacagctgaccagctgctggagttcttcaagcaggtgggggaggtgaagtttgtgaggatggctggagatgagacccagcccaccaggtttgcctttgtggagtttgctgaccagaacagcgtgccccgggccctggccttcaacggggtgatgtttggagaccggcccctgaagatcaaccacagcaacaatgccatcgtgaagcccccagagatgaccccccaggccgccgccaaggagctggaggaggtgatgaagagggtgcgggaggcccagagcttcatctctgctgccatcgagcctgagagcggcaagagcaatgaaaggaagggcggccgcagccgcagccacaccaggagcaagagccgcagcagcagcaagagccacagcaggaggaagaggagccagagcaagcacaggagccgcagccacaacagaagccgcagccggcagaaggacagaagaagaagcaagagcccccacaagaagaggagcaagagccgggagaggaggaagagccgcagccgcagccacagccgggacaagaggaaggacacccgggagaagatcaaggagaaggagcgggtgaaggagaaggaccgggagaaggagcgggagcgggagaaggagcgggagaaggagaaggagcggggcaagaacaaggaccgggacaaggagcgggagaaggaccgggagaaggacaaggagaaggaccgggagcgggagcgggagaaggagcacgagaaggaccgggacaaggagaaggagaaggagcaggacaaggagaaggagcgggagaaggacaggagcaaggagattgatgagaagaggaagaaggacaagaagagcaggaccccacccaggagctacaatgccagccgccgcagccgcagcagcagccgggagaggagaagaagaagaagccgcagcagcagccgcagccccaggaccagcaagaccatcaagaggaagagcagccgcagccccagccccaggagcaggaacaagaaggacaagaagcgggagaaggagcgggaccacatcagcgagcggcgggagcgggagaggagcacctccatgaggaagagcagcaatgacagagatggcaaggagaagctggagaagaacagcaccagcctgaaggagaaggagcacaacaaggagccagacagctctgtgtccaaggaggtggatgacaaggatgcccccaggacagaggagaacaagatccagcacaatggaaactgccagctgaatgaggagaacctgagcaccaagacagaagctgtgtag

SEQ ID NO: 340057 - DNA, 1545 bp, Artificial Sequence
  derived and/or modified sequence
atgaacagcggcggcggcttcggcctgggcctgggcttcggcctgacccccaccagcgtcatccaggtgaccaacctgagcagcgctgtgaccagcgagcagatgaggaccctcttctccttcctgggggagattgaggagctgcggctgtaccccccagacaatgcccccctggccttcagcagcaaggtgtgctacgtgaagttccgggaccccagctctgtgggcgtggcccagcacctgaccaacacagtgttcatcgaccgggccctgattgtggtgccctgtgccgagggcaagatccctgaggagagcaaggccctgagcctgctggccccagcccccaccatgaccagcctgatgcctggggccggcctgctgcccatccccacccccaaccccctgaccaccctgggcgtgtccctgagcagcctgggcgccatcccagctgctgccctggaccccaacatcgccaccctgggggagatcccccagccccccctgatgggaaatgtggaccccagcaagattgatgagatcagaagaacagtgtatgtgggcaacctgaacagccagaccaccacagctgaccagctgctggagttcttcaagcaggtgggggaggtgaagtttgtgaggatggctggagatgagacccagcccaccaggtttgcctttgtggagtttgctgaccagaacagcgtgccccgggccctggccttcaacggggtgatgtttggagaccggcccctgaagatcaaccacagcaacaatgccatcgtgaagcccccagagatgaccccccaggccgccgccaaggagctggaggaggtgatgaagagggtgcgggaggcccagagcttcatctctgctgccatcgagcctgagagcggcaagagcaatgaaaggaagggcggccgcagccgcagccacaccaggagcaagagccgcagcagcagcaagagccacagcaggaggaagaggagccagagcaagcacaggagccgcagccacaacagaagccgcagccggcagaaggacagaagaagaagcaagagcccccacaagaagaggagcaagagccgggagaggaggaagagccgcagccgcagccacagccgggacaagaggaaggacacccgggagaagatcaaggagaaggagcgggtgaaggagaaggaccgggagaaggagcgggagcgggagaaggagcgggagaaggagaaggagcggggcaagaacaaggaccgggacaaggagcgggagaaggaccgggagaaggacaaggagaaggaccgggagcgggagcgggagaaggagcacgagaaggaccgggacaaggagaaggagaaggagcaggacaaggagaaggagcgggagaaggacaggagcaaggagattgatgagaagaggaagaaggacaagaaccctgagcaccaccctggggtgaccatgcaccgggaggacctggtggtgcctgctgggaagggcgtgggcggcggggccggcgtgctgcctgaccggcaggagcaccagaagccctag

SEQ ID NO: 340058 - DNA, 1875 bp, Artificial Sequence
  derived and/or modified sequence
atgaacagcggcggcggcttcggcctgggcctgggcttcggcctgacacccacaagcgttattcaggtgactaatctgtcttcagcggtcacctccgaacagatgaggactctgttttctttcctgggagaaatagaagagctgagactgtatccaccagataacgcgccattggccttttcctccaaagtatgttacgtgaagttccgcgacccctcaagtgtgggcgtggcccagcatctcactaacaccgtctttatcgatcgagctctgattgtcgtgccttgtgctgaggggaagatcccagaagaaagcaaagctctaagcctgctggcccctgctccaaccatgacatctctgatgccgggtgctggcttgttaccgataccaacgcccaatcctctcacgactctcggcgtttccctgtctagtctgggagccatcccagctgcagccctcgatcccaatattgccacattaggcgaaattccccagcccccacttatgggaaacgtggacccaagcaaaatcgatgaaatccggcggacggtgtacgttggtaacctcaactcccagaccactacagcagaccagttactggaatttttcaagcaggtcggagaagtgaaattcgtgcgtatggctggagacgagacccaacccaccaggtttgcatttgtcgagttcgctgatcagaattctgtccccagggcattggcattcaacggtgtcatgttcggcgatcgccccctgaaaataaaccactccaataatgctattgtcaaaccccctgagatgacaccccaggccgccgctaaggaactcgaggaggtaatgaagcgcgtgcgtgaggcccaatcttttatatcagctgctatcgagcccgagtctggcaagtctaatgaacgcaagggcggtagatcacggagtcatacccggtcgaagtcccgctcctcctcaaagtcccattctcgccgcaaaaggtcacagtctaagcataggtcaaggtcgcataacaggagtagaagccgtcagaaagatcggcgaagatccaagtcaccccataagaaaaggtcaaagtcacgggagcgacgcaagagtcggagcaggagtcactcccgggataaacgaaaggacaccagggagaaaatcaaagagaaggagagagtgaaagagaaagaccgagagaaagaacgggagcgcgagaaagagcgcgagaaggaaaaagaaaggggcaaaaacaaggacagagataaagaaagggagaaggatagggagaaggataaggagaaggatagggagcgggaacgggaaaaagaacacgagaaggaccgcgataaggaaaaggagaaggagcaagataaggaaaaggagagggagaaggatcggagtaaggaaatcgatgaaaaaaggaagaaagataagaagtctcgtaccccacctagaagttataatgccagtaggcgatctcgctcatcctcgcgggagcggcgccgtaggcgcagtcgcagcagctcaaggagccctaggacgtcaaagaccataaagagaaagtcatctcggagtccatcaccccggtcccggaacaagaaggataaaaagagggagaaggaacgggatcacatttcggaacgtcgggagcgggagcggtccacttcaatgagaaaaagcagtaacgaccgagacggaaaagaaaaactcgagaaaaattcaacatccctgaaagaaaaagaacacaacaaagagcctgattcctcagtgtccaaggaggtggacgataaagatgcccctcggaccgaggaaaataaaatacagcataacggaaattgccagctcaatgaggaaaatctgtcgactaagactgaggcggtctag

SEQ ID NO: 340059 - DNA, 1545 bp, Artificial Sequence
  derived and/or modified sequence
atgaacagcggcggcggcttcggcctgggcctgggcttcggcctgacccccacaagtgtaatccaggttactaatctatcctccgcagtaactagtgagcaaatgaggacattgttctcctttctgggggaaattgaagaacttcggctctatcctccagacaatgcgcccttggcatttagctcaaaagtgtgttacgtcaagtttagagatcctagctcagtgggggtggcccagcaccttacaaatacggtgtttatcgaccgggcgttgatcgtagtgccatgtgccgaagggaagatccccgaggaaagtaaggccctttctttactcgccccagccccaacaatgacctctctcatgcctggggccggcttactgcccattcccacccccaaccctctgaccaccctgggggtcagtctctcatctctgggagccatacccgccgccgcattagatcccaacatcgcaaccctcggcgaaataccacaaccccctctcatgggaaatgtggatccttcaaagattgacgagatccgacgaacagtttatgtgggcaacctgaattcccagactaccactgctgaccagctcctggagtttttcaagcaggtgggtgaagtaaagttcgtccggatggcaggagacgaaacccagccaaccaggttcgcattcgtcgagttcgctgatcagaacagcgtgccacgcgctttggccttcaacggcgtgatgttcggtgaccgccccctaaaaatcaatcacagcaataatgccatagtgaaaccacccgagatgacaccacaggctgcagcaaaagaactggaagaggtcatgaagagggtcagagaggcacagtcttttatttccgccgctatcgaacccgaatcaggaaaaagtaatgagcggaagggtgggaggtctcggtctcacacgagatctaagagccgctcttcttccaagtctcattccagacggaagcggtctcagagtaagcatcgttctcgctctcacaatcgctctagatcacggcagaaagataggagaagatctaaatcaccacacaaaaagcgatctaaatctcgcgagaggcggaagtcgagatcgcgctcccacagccgagataagcgcaaagacacacgggaaaaaatcaaggagaaggagcgcgtgaaagagaaggacagggagaaagaacgggaacgggaaaaggaaagagaaaaggagaaggagagaggcaaaaataaagatagggataaagagagggaaaaagatagagagaaggacaaggagaaagaccgggagagagaacgggagaaagaacatgagaaagaccgagacaaagagaaggaaaaagagcaggacaaggaaaaggagcgtgagaaggatagatccaaggaaattgatgaaaaaagaaagaaagacaagaacccagaacatcaccccggtgtaactatgcacagagaagatctggttgtccctgccgggaagggcgttggcggcggggccggtgtcttaccagatcggcaggagcaccaaaagccttag

SEQ ID NO: 340060 - DNA, 1875 bp, Artificial Sequence
  derived and/or modified sequence
atgaacagcggcggagggttcgggctcggtctggggttcggcctgacacctactagtgtcattcaagtcaccaatctgtcctcagctgttacgtcggagcagatgcgcactctgttttctttcttgggggagatagaggagctccgtctctatccaccagacaacgcccctttagcgtttagcagcaaggtgtgttatgtcaaattccgcgacccatcaagcgtcggtgtggcccagcaccttacaaacaccgtgttcatagaccgggctctgatagtggtgccctgcgctgagggcaaaattcccgaggaatctaaggcgctgtccttgctagcccctgcccctaccatgacctccctcatgccaggtgcgggtctgctgcctattccaacacctaatcccttgaccacactcggtgtgtctctctccagcttgggggcaattcctgcagctgctctggatccgaacatcgcaacactgggggaaataccgcagcctcccctcatgggaaatgtcgacccctcaaaaatcgacgagattcgcaggaccgtctacgtcggaaacctgaatagtcagaccaccactgcagaccagctgctagaattctttaaacaggtaggggaagtcaaattcgtgaggatggccggagatgaaacccaaccaacccggttcgctttcgtggaatttgccgaccaaaatagtgtgccacgagccttggcctttaatggtgtgatgttcggcgataggcccctgaaaataaaccacagtaataatgccattgtcaaaccccctgagatgacaccccaggctgctgctaaagagctggaggaagtgatgaagcgagtaagggaggctcagtcgtttatcagtgccgctatcgaacctgaatctggcaaatctaacgagaggaaggggggaaggagtaggagccatacgcgcagcaaatcacgctcctcatcaaagagccatagtcggcgaaagagatcacaaagtaagcataggagcaggtcccacaacaggagtagaagcagacaaaaggatagaagaaggtcaaaatcacctcataagaagagatctaagtctcgcgagagacgcaagtctcggagtagaagccacagcagggataagcgtaaggacacaagagagaagataaaagaaaaagagagagtgaaggagaaggaccgagagaaagagagggagagagagaaggaaagagaaaaagagaaggaacgcggtaaaaataaggaccgtgacaaggagcgcgaaaaagacagagaaaaggataaagagaaagaccgagagagggaacgtgagaaggagcacgaaaaggatcgtgataaagagaaggaaaaggagcaggacaaagagaaggagagggaaaaggatcggtctaaggagattgatgaaaaacgaaaaaaagacaagaagtcaaggaccccacccaggagttataacgcgtcccgcagaagccgttcctccagcagggaaaggaggaggaggagaagccgtagttcatctcggtcaccccgaacttccaagaccatcaagcgcaagtcctcacgctcaccgagcccacgtagccgcaataagaaggacaagaaacgcgaaaaagagagagaccatattagcgaaaggagggagcgggaaaggagcacctccatgcgaaagagcagtaacgatagggatgggaaggagaaactagagaagaactctactagtcttaaagagaaggaacataataaagagcccgattccagtgtgtccaaggaagtagatgataaggacgccccacggactgaagaaaataaaatccagcataacggaaactgtcagctgaacgaagagaatttgtcaaccaaaaccgaggctgtatag

SEQ ID NO: 340061 - DNA, 1545 bp, Artificial Sequence
  derived and/or modified sequence
atgaattcaggcggtggctttgggctggggttgggatttggactcacgcccacctctgtaattcaggtgacaaatttatcttcggctgtgacttctgagcagatgcggaccctgttctcatttttgggtgagatagaggagctcaggctgtatcctcccgacaatgccccactggccttctctagcaaagtctgctacgtcaagttcagagacccttcttccgtgggcgtggcacagcaccttactaataccgtcttcatagatagggctctgatcgttgtgccatgtgcagaaggtaagattcctgaagagtcaaaggccctgagcttactggctccagccccaactatgacaagcctcatgcctggagccggtcttcttcccatacccactcctaatccattgacgacccttggcgtgtcgctatcctcccttggagccatccccgctgccgctcttgacccaaatatcgcgacactcggggaaatcccacagccccctcttatgggcaacgtggatccgtctaaaatagatgagatccgcaggacggtctatgtgggcaatctaaactctcagaccaccactgccgaccagctgcttgaattctttaaacaggttggcgaagttaaatttgtgcggatggctggtgacgagacgcagcctactaggttcgccttcgtggaatttgccgaccagaacagcgtcccaagggctctggcgttcaatggcgtgatgttcggcgataggcccctcaagattaaccactccaacaacgctatcgtaaagccgccagaaatgacaccgcaagcggctgctaaagaactggaagaggtcatgaaacgagttagggaggctcagtcttttataagtgctgcaattgagccagagagcggcaagagcaacgagcggaaaggaggccgatccaggtcccataccaggtcaaagtcccgaagcagctcaaaatcacatagcaggaggaagaggtcgcaaagtaagcaccgtagccgaagtcacaaccgctcccggtccagacagaaggataggagaagaagcaagtctccacacaagaaaagatctaaaagtagggagcggaggaaatcaagatccagaagccactcccgcgataagcggaaggacactcgggaaaagattaaagagaaggagagagtgaaagagaaagatagggagaaggaaagagagagagagaaggagcgtgagaaggaaaaggaacgcggaaagaataaagacagggacaaggaacgagagaaggacagagaaaaggataaagagaaggaccgtgaacgagaacgcgagaaagagcacgagaaggacagggataaggagaaagaaaaggaacaagataaggagaaagagagagaaaaagataggagtaaggagattgatgagaagagaaaaaaagacaagaaccccgagcaccaccctggagtgaccatgcatagagaagatctggtggttcctgccggaaaaggagttggtggaggcgcaggagtacttcccgatcggcaggagcaccagaagccttag

SEQ ID NO: 340062 - DNA, 6781 bp, Artificial Sequence
  derived and/or modified sequence
gggagcaggggagttgtgaaatgggcggctagatctgcccggcgctgtgaattcgccagcgggagcgcgctcgcggccgcgcgttctccgctttcccggctccgtcgctgacgcgtcgtagacgttggggagcgggaaggcaacggcagcgggatcgggatgaacagcggcggcggcttcggtttgggcttaggcttcggcctcacccccacgtcggtgattcaggtgacgaatctgtcgtcggcggtgaccagcgagcagatgcggacgcttttttccttcctaggagaaatcgaggagctgcggctctaccccccggacaacgcacctcttgctttttcctccaaagtatgttatgttaagtttcgtgatccatcaagtgttggcgtggcccagcatctaactaacacggtttttattgacagagctctgatagttgttccttgtgcagaaggtaaaatcccagaggaatccaaagccctctctttattggctcctgctccaaccatgacaagtctgatgcctggtgcaggattgcttccaataccgaccccaaatcctttgactactcttggtgtttcacttagcagtttgggagctataccagcagcagcactagaccccaacattgcaacacttggagagataccacagccaccacttatgggaaacgtggatccttccaaaatagatgaaattaggagaacggtttatgttggaaatctgaattcccagacaacgacagctgatcaactacttgaattttttaaacaagttggagaagtgaagtttgtgcggatggcaggtgatgagactcagccaactcggtttgcttttgtggaatttgcagaccaaaattctgtaccaagggcccttgcttttaatggagttatgtttggagacaggccactgaaaataaatcactccaacaatgcaatagtaaaaccccctgagatgacacctcaggctgcagctaaggagttagaagaagtaatgaagcgagtacgagaagctcagtcatttatctcagcagctattgaaccagagtctggaaagagcaatgaaagaaaaggcggtcgatctcgttcccatactcgctcaaaatccaggtctagctcaaaatcccattctagaaggaaaagatcacaatcaaaacacaggagtagatcccataatagatcacgttcaagacagaaagacagacgtagatctaagagcccacataaaaaacgctctaaatcaagggagagacggaagtcaaggagtcgttcgcattcacgggacaagagaaaagacactcgagaaaagatcaaggaaaaggaaagagtgaaagagaaagacagggaaaaggagagagagagggaaaaggaacgtgaaaaagaaaaggaacggggtaaaaacaaagaccgggacaaggaacgggaaaaggaccgggaaaaagacaaggaaaaggacagagagagagaacgggaaaaagagcatgagaaggatcgagacaaagagaaggaaaaggaacaggacaaagaaaaggaacgagaaaaagacagatccaaagagatagatgaaaaaagaaagaaggataaaaaatccagaacaccacccaggagttacaatgcatcgcgaagatctcgtagttccagcagggaaaggcgtaggaggaggagcaggagttcttccagatcgccaagaacatcaaaaaccataaaaaggaaatcttctagatctccgtcccccaggagcagaaataagaaggataaaaagagagaaaaagaaagggaccacatcagtgaaagaagagagagagaacgttcaacgtctatgagaaagagttctaatgatagagatgggaaggagaagttggagaagaacagtacttcacttaaagagaaagagcacaataaagaaccagattcaagtgtgagcaaagaagtagatgacaaggatgcaccaaggactgaggaaaacaaaatacagcacaatgggaattgtcagctgaatgaagaaaacctctctaccaaaacagaagcagtataggaccgacaagtgtacctctgcactcaatgctggaatcaaatccaaagcttttaattctctcaacaagatgtaaacaggaaagaaatctagttgagcatgaagataggatctaacagcttttccagttgttagatgactttgtggccatcttgttattgagtaagaaaataaagcatggacatcatgaaaataacagatgttacccaaactcatcttctaaaatctgtgcatttccatggtggctgacacacttgtcatgtggtctgttagtgtttgccaagaaccattgcaaataaattgaacatcaaagatccaagtttgtactatccctaaagactggagataagcattggaggctcttttaaaaaatgctagttactgaattttgtattgttttacttttttttttatttcaatatatacagtttgatgatgtgcttgaaattggtgcaaatatatacacacccttgtaagtgcaaagtatgtaagaagttttaacatttacttcacaggacttgtgattgtgttaaattctcactattgtgttttcttttgctcactgtttaggacaatttttctttaaaatagttttgcagattaaaattgcttaaataagtggattaaaaaactgacaatgcatgctactgttctctttcaaaaggaagagcaaccgtgttgaatactaataatgatgaattagtattcagtgtttagaatcattgggactacccacaaagtgagcatttctttttaaattttcttgacatttccaagcttattatgaataatattgcagtgtgtcttgtcagctgtaggtggcaaaggtgcccttataaaaaaggaaactggcttttcaaaatgggctatgggagcacaagctgaagctttagtgccttctacaatgtggtatactgttttctagaattttatatgtgctagtcattctcaattcatatggaatctagatggatatttcatgcatacccatagagaagtgtgtaagtgatatgtcagaagagcttcttactgatttcacctaaaatgagaaggaagtcctgttttcaagaatgacattagagtcatgcagctttgggaccatcagttttatactgtgataattgaaaatgaaacatgttcttattttccttaaattgaagaaaaccctttagttgtctacattggatggccttattacctctcaatcatcttttcataaatgatgtgcagaaattgtacttaaggacttaggagtatatgggaggttattggttttatgtttaaggatacgtttacttgagtttaagatacaggtcatccatcattcttaggctcactttttacagaaagtatgcaaatagtaaagtgacagcactgctaatgtttttccccagtactataacttgtggtttctgaactcattattgttgtatttccaaaaaagtaataccttttaattagtgtattaaaagttaagtataattattttaatgcaatctaatacaatcagattactcagttgccttacctcatgggaagagttacttttttagatctaaaaagctgaatagcatgttagttacttggtttcaacttgagttttcttttaatgttaataagattgaaactttagtatttagtggggaatggaaagagttgcccttgttgcaagtaatgaagcctgatttgattatgaagctgcttaatcactcttcatgtgttcagaattactgttttttttgtttgtttttcctttttgtcactgtgtacattaaaattttggaagatgctttactatgtaaagtatagatggtcattttaatcattcagccacatacggttggctggtaaacagcttattctgatacaagaatgcttgggtgcatatggaaagattgtgaaagagtgtgtcttgcatcaacagctgtcttatttatgatatataagtagaaatagagcaaatgttggaatctgttatttttagtaccatgtctttaataaagctaagtattttagaggaaaatgtttgtttatgcatttcaaaaaagcattttagttttatcctgctcattttagttgtcatagagattgttgtgacgtggagagtgcatgtttgtgtggtgtctataaaacaagtcatttaaagtatgagtgttttcttgtactctggacctattacatgtttctttatgttggtaattaacatttaatttggttcttgctgctaattattttctctgctgatatttattaagctttaaaataatcgtactataatcttgaaacactgatttgtaaaaactaagaatgagtaggaatacaagagatctggaggaacaaatcagattgttattagggtttgactttttttttacatgggcttatggaagcaaggcattctagggtctagagggatgtgtgtgtgtgcttgtgtgtccatgtgtgcgcatgcgcacgtgtgtatctgtttgagacatactttctctgttcacttaaaagagctcatgttttcatttgtttattcttttctttcagggtattttgtttttttctttaagacttctttttttaaatcccaggtagatgttgtcagataaacttgaggtaaggccaagaagacagacattttatgcttcatactttctgtaattatcttttgtagcttgattacatagagtaccctctcttccttaagttgtagttgctatttatcattgtagacaaattctgttgcctttcagcaacgtatgctgaactagtatcataagatggtgcatcagttcataagctagtgcataagttttgtgtcaaaacttttaaatcctgaagttctgcagttatcatcttagttattttctatctaattagcttataattgcaaacactagtcagcttgtgatctctgtgtttcaagttcttttcttcacgaggttcagtacctgctatgttgatctttggcagtgccagaggcttaaattttgacctgctcaattaaaaataaacactggcgtttataatgaaaaggtttttttgtcgggggggggggggtcaagagaatttattttgtgatagtaataattttcaagaccttcagtcattcctatgtctatgttgctatctttattttaaaacttagaaccctgatctaactcccttctcaagtgaagatactgtgtagattcaagaattataatgtagagtaataggcctttaagtttttttttaatctgttagaaataaagagcatgatttaattattgttgaattaacaattaaaatgaatccctttggagggatggcattgaataacttataatttcagtgaatcatttacgttttcattggaagacagtatctgatttcaactggtgcgttacgaagtagagccattcccacaaagtaaatgtgcagtgcccatgtttcttgtgtttaaatattttttattttcactacatatatattattttctcatgtttatttactaatgtaattttcacttaaaattagatgtttattttcaaattttaaaagctagtgctcttaaaagagctaaattatatttctggaagcaggagtttagtataaatgtaataaaattttaaaataaaattgacttccctacttaatcttgggtttgtgggtgagtttgtttttagtacactcttattggtggttttgcctgaagagtaatacattattattattacttttctttttgagacagggtctcactctgtcactcaggctggagtgcagtgacacgatcatggctcactgcaatcttgacctttctcggcatggatgatcctctcacctcagcctcttgaatagctgggaccacagacatgtgccaccaagcccagttaattttagaattttttttgtagagacaggatcttgccatgttgcctagactggtctcaaactcctgggctcaaacaatctgtctgcctcagccttctaaagtgctgagattacaggtgtgaggtactgcacctggcaatacgttattttaaaagtaaacgctaagccatttatgactttggttatattcagtcagttggatttagtaactaataactagctttcttccattctaaggtacttttatagtttctagcaattagtttgttacaattagcttatatcagatataacagttcttaatataatgtttataaaaggttttaagtctgttgcctgatttttaaatttatatctagttaacattttaattttaaaattgccaacttttgggagatttcacatattttacctctatattttatttttccaggattggtatggaggagtagtaccttctattcttggtttatttttatttgctagacataatttcttaactacatatgtaagtataaattcataaaaatcacactgaaagaataggttgatttcaaccattttgagggtactggtaggtaacacactgttggggaataaactaaagaatttctgatttctacaatagatttaagtatgaaatttgagtatactgtgtagctgtgtagatcaacttaatgcttaaaaaattacctccttaatgattagattaatagaacagtgttagattatcaagggaagagtttggaatgtaaacataaacatgctgcataggtggtggttatttgtgagtaggactacttttaaatggtactagtaaagatttatcaaacaatgctgctattatgttgctatatttttaataaaatgaaaatcttaaaatctt

SEQ ID NO: 340063 - DNA, 2433 bp, Artificial Sequence
  derived and/or modified sequence
ttatttccccccgaacttaagatggccgcaggtgggcccggaacagccctcatggcaaacgtctcagagcgtttttccactctgaaaatcgcggagaccgcgcctgagccacagtccagtttttaaggccttggtgtcaggccgttttgctgacgagaaagcctgctgctggtgacaagatggaactggggctgtgtttgtttcccaggacggtcgcacaaacttagcattttggtttatctaaccgagcgcatccatgttcccaaagatcatgtctgttagcccttttgacagcagattaaattttcctcctgaaaggtcacactgtcccaaagctttcagaaaaagtcaacgcacctcttgctttttcctccaaagtatgttatgttaagtttcgtgatccatcaagtgttggcgtggcccagcatctaactaacacggtttttattgacagagctctgatagttgttccttgtgcagaagtgatgcagccaacacgaacggttgtcatgtgtaacacaactttcgatcaccgcgaaaacaccgtcctgggaaagcgtccatgcttgatatcgtttggttcatgaacattaagtttccagtacaggtaaaatcccagaggaatccaaagccctctctttattggctcctgctccaaccatgacaagtctgatgcctggtgcaggattgcttccaataccgaccccaaatcctttgactactcttggtgtttcacttagcagtttgggagctataccagcagcagcactagaccccaacattgcaacacttggagagataccacagccaccacttatgggaaacgtggatccttccaaaatagatgaaattaggagaacggtttatgttggaaatctgaattcccagacaacgacagctgatcaactacttgaattttttaaacaagttggagaagtgaagtttgtgcggatggcaggtgatgagactcagccaactcggtttgcttttgtggaatttgcagaccaaaattctgtaccaagggcccttgcttttaatggagttatgtttggagacaggccactgaaaataaatcactccaacaatgcaatagtaaaaccccctgagatgacacctcaggctgcagctaaggagttagaagaagtaatgaagcgagtacgagaagctcagtcatttatctcagcagctattgaaccagagtctggaaagagcaatgaaagaaaaggcggtcgatctcgttcccatactcgctcaaaatccaggtctagctcaaaatcccattctagaaggaaaagatcacaatcaaaacacaggagtagatcccataatagatcacgttcaagacagaaagacagacgtagatctaagagcccacataaaaaacgctctaaatcaagggagagacggaagtcaaggagtcgttcgcattcacgggacaagagaaaagacactcgagaaaagatcaaggaaaaggaaagagtgaaagagaaagacagggaaaaggagagagagagggaaaaggaacgtgaaaaagaaaaggaacggggtaaaaacaaagaccgggacaaggaacgggaaaaggaccgggaaaaagacaaggaaaaggacagagagagagaacgggaaaaagagcatgagaaggatcgagacaaagagaaggaaaaggaacaggacaaagaaaaggaacgagaaaaagacagatccaaagagatagatgaaaaaagaaagaaggataaaaaatccagaacaccacccaggagttacaatgcatcgcgaagatctcgtagttccagcagggaaaggcgtaggaggaggagcaggagttcttccagatcgccaagaacatcaaaaaccataaaaaggaaatcttctagatctccgtcccccaggagcagaaataagaaggataaaaagagagaaaaagaaagggaccacatcagtgaaagaagagagagagaacgttcaacgtctatgagaaagagttctaatgatagagatgggaaggagaagttggagaagaacagtacttcacttaaagagaaagagcacaataaagaaccagattcaagtgtgagcaaagaagtagatgacaaggatgcaccaaggactgaggaaaacaaaatacagcacaatgggaattgtcagctgaatgaagaaaacctctctaccaaaacagaagcagtataggaccgacaagtgtacctctgcactcaatgctggaatcaaatccaaagcttttaattctctcaacaagatgtaaacaggaaagaaatctagttgagcatgaagataggatctaacagcttttccagttgttagatgactttgtggccatcttgttattgagtaagaaaataaagcatggacatcatgaaaataacagatgttacccaaactcatcttctaaaatctgtgcatttccatggtggctga

SEQ ID NO: 340064 - DNA, 2222 bp, Artificial Sequence
  derived and/or modified sequence
gtagacgttggggagcgggaaggcaacggcagcgggatcgggatgaacagcggcggcggcttcggtttgggcttaggcttcggcctcacccccacgtcggtgattcaggtgacgaatctgtcgtcggcggtgaccagcgagcagatgcggacgcttttttccttcctaggagaaatcgaggagctgcggctctaccccccggacaacgcacctcttgctttttcctccaaagtatgttatgttaagtttcgtgatccatcaagtgttggcgtggcccagcatctaactaacacggtttttattgacagagctctgatagttgttccttgtgcagaaggtaaaatcccagaggaatccaaagccctctctttattggctcctgctccaaccatgacaagtctgatgcctggtgcaggattgcttccaataccgaccccaaatcctttgactactcttggtgtttcacttagcagtttgggagctataccagcagcagcactagaccccaacattgcaacacttggagagataccacagccaccacttatgggaaacgtggatccttccaaaatagatgaaattaggagaacggtttatgttggaaatctgaattcccagacaacgacagctgatcaactacttgaattttttaaacaagttggagaagtgaagtttgtgcggatggcaggtgatgagactcagccaactcggtttgcttttgtggaatttgcagaccaaaattctgtaccaagggcccttgcttttaatggagttatgtttggagacaggccactgaaaataaatcactccaacaatgcaatagtaaaaccccctgagatgacacctcaggctgcagctaaggagttagaagaagtaatgaagcgagtacgagaagctcagtcatttatctcagcagctattgaaccagagtctggaaagagcaatgaaagaaaaggcggtcgatctcgttcccatactcgctcaaaatccaggtctagctcaaaatcccattctagaaggaaaagatcacaatcaaaacacaggagtagatcccataatagatcacgttcaagacagaaagacagacgtagatctaagagcccacataaaaaacgctctaaatcaagggagagacggaagtcaaggagtcgttcgcattcacgggacaagagaaaagacactcgagaaaagatcaaggaaaaggaaagagtgaaagagaaagacagggaaaaggagagagagagggaaaaggaacgtgaaaaagaaaaggaacggggtaaaaacaaagaccgggacaaggaacgggaaaaggaccgggaaaaagacaaggaaaaggacagagagagagaacgggaaaaagagcatgagaaggatcgagacaaagagaaggaaaaggaacaggacaaagaaaaggaacgagaaaaagacagatccaaagagatagatgaaaaaagaaagaaggataaaaatccagaacaccacccaggagttacaatgcatcgcgaagatctcgtagttccagcagggaaaggcgtaggaggaggagcaggagttcttccagatcgccaagaacatcaaaaaccataaaaaggaaatcttctagatctccgtcccccaggagcagaaataagaaggataaaaagagagaaaaagaaagggaccacatcagtgaaagaagagagagagaacgttcaacgtctatgagaaagagttctaatgatagagatgggaaggagaagttggagaagaacagtacttcacttaaagagaaagagcacaataaagaaccagattcaagtgtgagcaaagaagtagatgacaaggatgcaccaaggactgaggaaaacaaaatacagcacaatgggaattgtcagctgaatgaagaaaacctctctaccaaaacagaagcagtataggaccgacaagtgtacctctgcactcaatgctggaatcaaatccaaagcttttaattctctcaacaagatgtaaacaggaaagaaatctagttgagcatgaagataggatctaacagcttttccagttgttagatgactttgtggccatcttgttattgagtaagaaaataaagcatggacatcatgaaaataacagatgttacccaaactcatcttctaaaatctgtgcatttccatggtggctgacacacttgtcatgtggtctgttagtgtttgccaagaaccattgcaaataaattgaacatc

SEQ ID NO: 340065 - protein, 462 aa, Artificial Sequence
  derived and/or modified sequence
MANMNSDSRHLGTSEVDHERDPGPMNIQFEPSDLRSKRPFCIEPTNIVNVNHVIQRVSDHASAMNKRIHYYSRLTTPADKALIAPDHVVPAPEECYVYSPLGSAYKLQSYTEGYGKNTSLVTIFMIWNTMMGTSILSIPWGIKQAGFTTGMCVIILMGLLTLYCCYRVVKSRTMMFSLDTTSWEYPDVCRHYFGSFGQWSSLLFSLVSLIGAMIVYWVLMSNFLFNTGKFIFNFIHHINDTDTILSTNNSNPVICPSAGSGGHPDNSSMIFYANDTGAQQFEKWWDKSRTVPFYLVGLLLPLLNFKSPSFFSKFNILGTVSVLYLIFLVTFKAVRLGFHLEFHWFIPTEFFVPEIRFQFPQLTGVLTLAFFIHNCIITLLKNNKKQENNVRDLCIAYMLVTLTYLYIGVLVFASFPSPPLSKDCIEQVRHRVPSLCDCVHFHVFIVGRVIQWQDITSDRPGF

SEQ ID NO: 340066 - protein, 131 aa, Artificial Sequence
  derived and/or modified sequence
MANMNSDSRHLGTSEVDHERDPGPMNIQFEPSDLRSKRPFCIEPTNIVNVNHVIQRVSDHASAMNKRIHYYSRLTTPADKALIAPDHVVPAPEECYVYSPLGSAYKLQSYTEGYGKNTSLVTIFMIWNTMM

SEQ ID NO: 340067 - DNA, 1389 bp, Artificial Sequence
  derived and/or modified sequence
atggccaacatgaacagcgacagcagacacctgggcaccagcgaggtggaccacgagagagaccccggccccatgaacatccagttcgagcccagcgacctgagaagcaagagacccttctgcatcgagcccaccaacatcgtgaacgtgaaccacgtgatccagagagtgagcgaccacgccagcgccatgaacaagagaatccactactacagcagactgaccacccccgccgacaaggccctgatcgcccccgaccacgtggtgcccgcccccgaggagtgctacgtgtacagccccctgggcagcgcctacaagctgcagagctacaccgagggctacggcaagaacaccagcctggtgaccatcttcatgatctggaacaccatgatgggcaccagcatcctgagcatcccctggggcatcaagcaggccggcttcaccaccggcatgtgcgtgatcatcctgatgggcctgctgaccctgtactgctgctacagagtggtgaagagcagaaccatgatgttcagcctggacaccaccagctgggagtaccccgacgtgtgcagacactacttcggcagcttcggccagtggagcagcctgctgttcagcctggtgagcctgatcggcgccatgatcgtgtactgggtgctgatgagcaacttcctgttcaacaccggcaagttcatcttcaacttcatccaccacatcaacgacaccgacaccatcctgagcaccaacaacagcaaccccgtgatctgccccagcgccggcagcggcggccaccccgacaacagcagcatgatcttctacgccaacgacaccggcgcccagcagttcgagaagtggtgggacaagagcagaaccgtgcccttctacctggtgggcctgctgctgcccctgctgaacttcaagagccccagcttcttcagcaagttcaacatcctgggcaccgtgagcgtgctgtacctgatcttcctggtgaccttcaaggccgtgagactgggcttccacctggagttccactggttcatccccaccgagttcttcgtgcccgagatcagattccagttcccccagctgaccggcgtgctgaccctggccttcttcatccacaactgcatcatcaccctgctgaagaacaacaagaagcaggagaacaacgtgagagacctgtgcatcgcctacatgctggtgaccctgacctacctgtacatcggcgtgctggtgttcgccagcttccccagcccccccctgagcaaggactgcatcgagcaggtgagacacagagtgcccagcctgtgcgactgcgtgcacttccacgtgttcatcgtgggcagagtgatccagtggcaggacatcaccagcgacagacccggcttctag

SEQ ID NO: 340068 - DNA, 1389 bp, Artificial Sequence
  derived and/or modified sequence
atggctaacatgaacagcgatagtagacatttgggaacttcagaggtggaccacgaaagggaccctggccctatgaacatccagttcgagccatccgatctcaggtctaagcgcccattttgcatcgaacccaccaatatcgtgaacgtaaatcatgtcatacagcgcgtgtccgaccacgcttccgctatgaataagcgaattcactattattctaggttgacaacccctgcggacaaggccctgatcgcaccagaccacgtggtgcctgcccctgaagagtgctacgtttattccccacttggtagtgcatataagctgcagtcttatacagagggatacggaaaaaacacttcattggtgaccattttcatgatctggaatacaatgatgggtacgtccattctcagtattccttggggaattaaacaggccgggttcactactggcatgtgcgtgataatcctgatgggactcctaacgctgtactgttgttaccgggtcgtgaagtcccgcacgatgatgttttcccttgatacgacatcttgggagtacccagatgtctgccgacattatttcgggtcatttggtcagtggtctagccttttattcagcttggtaagcctgattggagctatgatagtgtactgggtgctgatgtccaatttcctgtttaatactggcaaatttatcttcaacttcatccatcatattaacgacacagataccatcctcagtaccaataattccaatccagtgatctgcccttctgccgggtcaggaggtcaccccgataacagttcaatgattttctatgccaatgataccggcgctcagcaattcgaaaaatggtgggataagagcaggaccgtgccattctacctcgtgggtctgctattgcctctgctgaactttaagagcccatcatttttcagcaaattcaatattctgggtacagtatccgtcctatacctgatctttctggtgacctttaaggctgtgcggctaggattccatctggaattccattggttcatccctacagagttcttcgttccggaaattcgattccagttcccccaactgacaggtgtcctgactctcgctttctttatacataattgcatcatcacattactcaagaataacaaaaagcaggagaacaatgtgcgggacctgtgcatcgcttacatgctggtgaccctaacatacctttatattggcgttctcgtgttcgcctcctttccgtcccccccactgagtaaggattgtattgaacaagttaggcatcgggttccatcactttgtgactgcgttcattttcacgtgtttatcgtcggaagggtaattcagtggcaagatatcacctctgaccgtcccggtttttag

SEQ ID NO: 340069 - DNA, 1389 bp, Artificial Sequence
  derived and/or modified sequence
atggccaacatgaacagcgacagccgccacctgggcaccagcgaggtggaccacgagcgggaccccggccccatgaacatccagtttgagcccagcgacctgcggagcaagaggcccttctgcatcgagcccaccaacatcgtgaatgtgaaccacgtgatccagagggtgtctgaccacgccagcgccatgaacaagaggatccactactacagccggctgaccaccccagctgacaaggccctgattgccccagaccacgtggtgcctgcccctgaggagtgctacgtgtacagccccctgggcagcgcctacaagctgcagagctacacagagggctacggcaagaacaccagcctggtgaccatcttcatgatctggaacaccatgatgggcaccagcatcctgagcatcccctggggcatcaagcaggccggcttcaccaccggcatgtgtgtgatcatcctgatgggcctgctgaccctgtactgctgctacagagtggtgaagagcaggaccatgatgttcagcctggacaccacctcctgggagtacccagatgtgtgccgccactacttcggcagctttggccagtggagcagcctgctcttcagcctggtgtccctcatcggggccatgattgtgtactgggtgctgatgagcaacttcctgttcaacacaggcaagttcatcttcaacttcatccaccacatcaatgacacagacaccatcctgagcaccaacaacagcaaccctgtgatctgccccagcgctggcagcggcggccacccagacaacagctccatgatcttctacgccaatgacaccggggcccagcagtttgagaagtggtgggacaagagcaggacagtgcccttctacctggtgggcctgctgctgcccctgctgaacttcaagagccccagcttcttcagcaagttcaacatcctgggcaccgtgtctgtgctgtacctgatcttcctggtgaccttcaaggctgtgcggctgggcttccacctggagttccactggttcatccccacagagttctttgtgcctgagatccgcttccagttcccccagctgactggagtgctgaccctggccttcttcatccacaactgcatcatcaccctgctgaagaacaacaagaagcaggagaacaacgtgcgggacctgtgcatcgcctacatgctggtgaccctgacctacctgtacatcggcgtgctggtgtttgccagcttccccagcccccccctgagcaaggactgcatcgagcaggtgcgccaccgggtgcccagcctgtgtgactgtgtgcacttccacgtgttcatcgtgggccgggtcatccagtggcaggacatcaccagtgaccggcccggcttctag

SEQ ID NO: 340070 - DNA, 1389 bp, Artificial Sequence
  derived and/or modified sequence
atggccaacatgaacagcgacagccggcacctgggcaccagcgaggtagatcatgaaagggatccaggtcccatgaatatccaatttgagccttccgacctcagatcaaagcggccgttttgtatagagcctaccaacatcgttaatgtgaaccacgtgatacagagagtgagcgaccacgcctctgcaatgaataagaggatccattactactcccgactgacgacaccagctgataaagcgctgatcgcacctgatcacgtggtgcctgcccctgaggagtgctacgtgtattctcctctgggcagtgcctacaaactccagagctacaccgaaggatatgggaaaaatactagcctggttacaattttcatgatttggaataccatgatgggtactagcatcctgtccatcccatggggcatcaagcaggccggctttaccaccggtatgtgtgtcattatcctgatgggattattaaccctgtactgttgctacagagtggtgaaatctagaactatgatgtttagtttggacaccacaagttgggaataccctgatgtgtgcagacattatttcggctcatttgggcagtggtcctctctcctgttcagcttggtgtctctcatcggcgccatgatcgtgtattgggtgctgatgtctaattttttgtttaatacagggaagtttattttcaattttatccatcatatcaacgacacagatacaattctgtccacgaacaatagcaacccggtgatctgccctagtgccggctctggcggacatcctgacaactcatcgatgatcttttacgcgaacgacaccggggcccagcagtttgagaagtggtgggataagagtcgcaccgttccattctaccttgtgggtctgctcctccccctccttaatttcaagtcaccgtcctttttctctaaattcaacatcttggggacagtgtccgtcctctacctgatcttcctggtgacctttaaagccgtcaggctcgggttccacctggagttccactggttcatccctacagaattctttgtgccagaaattagattccagtttcctcagttgactggagtgctgactcttgctttttttatccacaactgcatcattaccttactgaagaacaataaaaagcaggagaataacgtgagagatttgtgtatagcatatatgcttgtcaccctgacttatctgtacataggggtcttagtattcgcctcctttccatccccgcctctgtctaaggattgcatcgagcaggttaggcaccgggttccatctctctgcgattgtgtgcactttcacgtattcattgtcggcagagtgatacagtggcaagacattactagtgatagacctggtttttag

SEQ ID NO: 340071 - DNA, 1389 bp, Artificial Sequence
  derived and/or modified sequence
atggccaatatgaacagtgactcgcggcatctcggaacgtccgaagtggatcatgaacgcgaccccggacctatgaacatccaattcgagccaagcgaccttaggtctaaaaggccgttctgtattgagcccaccaatatcgtcaatgtgaaccacgtgatccagagagtcagtgatcatgcctctgccatgaacaaaaggatacattattattctaggctgacgactcctgccgataaagctctcattgctccagaccatgttgtccctgcaccagaggaatgttacgtctattccccattgggaagcgcatacaaactgcaatcttacaccgagggatacggcaaaaataccagtctcgttacgatctttatgatctggaacactatgatggggacaagcatcctgagtattccttggggaattaaacaggccggatttaccacaggtatgtgcgttatcatcctgatggggctgctgactctctactgttgttaccgggtggtgaagtcccgaactatgatgttcagccttgatacaactagttgggaataccccgatgtttgtcgtcactattttggatccttcggacaatggtctagcctgctcttttcattagtgtccttgatcggagcaatgattgtctattgggtcctgatgagcaacttcctgttcaatactggaaagtttatcttcaactttattcaccatattaacgacactgacaccatcctaagcacaaacaatagcaaccccgtaatctgtccaagcgccggttccggtggccacccggacaattcctctatgatcttttacgctaacgacaccggagcacaacagtttgaaaagtggtgggacaagagccggacggtgccattttacctcgtaggattactcctgccactgctcaatttcaagagccctagttttttttccaagttcaacatcctcggcaccgtttcagtgctctacctgattttcctcgtgacattcaaagccgtgcgattgggcttccacctagagttccactggtttatacctaccgagttctttgttccagagatccggtttcagttcccacaactgaccggagttcttaccttagcctttttcattcacaactgcatcataacgctgcttaaaaataacaagaaacaggagaacaacgtccgggatctttgcattgcttacatgctcgtgacactcacatatttgtatatcggagtcctggtgttcgctagctttccgtcgccgccactgtccaaagattgcatcgagcaggtcagacacagagttccctcgttgtgcgattgcgttcactttcatgtctttatcgtgggcagggtaattcagtggcaggacattacatccgacaggccagggttctag

SEQ ID NO: 340072 - DNA, 4032 bp, Artificial Sequence
  derived and/or modified sequence
atggcaaatatgaatagtgattctaggcatcttggcacctctgaggtagatcatgaaagagatcctggacctatgaatatccagtttgagccatcggatctaagatccaaaaggcctttctgtatagagcccacaaacatcgtgaatgtgaatcatgtcattcagagggttagtgaccatgcctctgccatgaacaagagaattcattactacagccggctcaccactcctgcagacaaggcactgattgccccagaccatgtagttccagctccagaagagtgctatgtgtatagtccattgggctctgcttataaacttcaaagttacactgaaggatacggtaaaaacaccagtttagtaaccatttttatgatttggaataccatgatgggaacatctatactaagcattccttggggcataaaacaggctggatttactactggaatgtgtgtcatcatactgatgggccttttaacactttattgctgctacagagtagtgaaatcacggactatgatgttttcgttggataccactagctgggaatatccagatgtctgcagacattatttcggctcctttgggcagtggtcgagtctccttttctccttggtgtctctcattggagcaatgatagtttattgggtgcttatgtcaaattttctttttaatactggaaagtttatttttaattttattcatcacattaatgacacagacactatactgagtaccaataatagcaaccctgtgatttgtccaagtgccgggagtggaggccatcctgacaacagctctatgattttctatgccaatgacacaggagcccaacagtttgaaaagtggtgggataagtccaggacagtccccttttatcttgtagggctcctcctcccactgctcaatttcaagtctccttcatttttttcaaaatttaatatcctaggcacagtgtctgtcctttatttgattttccttgtcacctttaaggctgttcgcttgggatttcatttggaatttcattggtttataccaacagaattttttgtaccagagataagatttcagtttccacagctgactggagtgcttacccttgctttttttattcataattgtatcatcacactcttgaagaacaacaagaaacaagaaaacaatgtgagggacttgtgcattgcttatatgctggtgacattaacttatctctatattggagtcctggtttttgcttcatttccttcaccaccattatccaaagattgtattgagcaggtaaggcaccgtgtaccctctctgtgtgattgtgtacactttcatgtatttatagtaggtagggtgatacagtggcaagatataacatcagataggcctgggttttaataccatctctgctatctactccaagtatgggaatttaggcaccttcccttttctttctgagctttatttttcttttccattaaatagtataataagtacccccatttgatttttagatggactctgagataatgtactacatgccaggcaccttgtggtactcaaataaatgtctactattatgtacatatatttctctttttgtggggaactggtacaagtagttctcatgtagttataaaaccacagagaatacattgaaggaactccctatttttaaaagcctgtatcaggaatgccctggataaactagagtctttgtttatcagactctaatgattaatcagactctcattcttatattgagtgacaggcagcaaaacaaaaaaagagtatttggctgttaaaaaaagagagagagatgtcctatgagtcaccagagggttaaaaaaaaaaaaaaagagagacagagtaaaagaaaaaaatattttaataaaagattgccataactaatattttctttgatttaacccatcaaaaacttagcaatagtatagtctttagttataagtgactgaagagtttctcacaaaaaacaacatttcacaagtgactttctggtcagaagaaattcctcttatagagtacaatggaatatactaatgtgatttattacagctgaattataatggttatttcagcaaaataatgttaatagtgttctcatctttataagagaaataagtttgaattactgctattatggcagcttggaaatgttcttattttcttgatttccttgactccagaagttctttggcagccaaatgtttgctggcaatttccctgatatgaacaaactcatacaaagcctactcccttgggaataggaatatttgtggtatttgtatttgaaagaaaagataaaaattctaagtaattaacttttttttaagataccaaaccaaaatggagaaaagggtcatgaaaggaagtagagataaatccttttaaatttagtgatagactaaacaatgatgtagtaggtgatagacatactctcaccttattctgtcatctttacttcaaaagtgcttacagtgcttcagaggaggaaagcagcagagccagagagggtaaaataacactgaattaaattagctctttacatctttaaagtggactggtattttccttgaaccacataaagcaatgctttctcgatctatctgtggtgaaggacaaaattgtctttgctgttgctttaatgttaaataaattgcaggctgatacttttgtaaaatagaataaaattgtggcaatgtcagattcctgtaaaagtttctgaacactttcggtttctatacttacctcattgaaaaaatacttaacaagtagttgtggatgggcactagtccacaaaccacaatcggagtagcacctgtgttcaaaataagcagaagacattccattttatgaatgtgtgtactgaatttgatttttaacatgacctcattatctttcttggattagaattttttagacaacttccctagcagtgacaccctgtccttcattgcaaggatattcctgctgttccagatgatgactgtatacccactcttaggctacctggctcgtgtccagcttttgggccatatcttcggtgacatttatcctaggtaagggctcttctcttgaccagcaggatgtgccaagcaacaaatgactgtgcaagcagcattttccatgtgctgattcttaatctaattattgtgggagctggagtgatcatggcctgtttctacccaaacataggagggatcataagatattcaggagcagcatgtggactggcctttgtattcatatacccatctctcatctatataatttccctccaccaagaagagcgtctgacatggcctaaattaatcttccacgttttcatcatcattttgggcgtggctaacctgattgttcagttttttatgtgaaatacctcaactgtttttttcaagagctctcatgatattttgagccttgacaacagttctatataaattcacttgtaaatgctgctgttgtgtaattctaaatattttctaagataatttgaaagcaagggaaatagtggccccttaatgagtatttttttattggggtggggaaaggggcaaaaagaatgatcttagtgtctttacctttctcatattaactcacctctttattctgtggtcttttctgaatagaaatgtatgccctaggaagaaatcatgctgggttttgcttttagagataaaaggtggtggatttattttgcctgcagtaaagattctcagggtgtcagagcagcatattgtcaaatcctgcttctgttttatgtttcagtgtattcactttcattttcttacttactagaccatttctgcagtttgcccaaacctctactgtttgggacagtaagccaaatacctcatttttaaaaagaagttttcatggcatcagtgttaataaagtacatttttaactgagtcttaatctctatttgaagaaaaagtagagacaaaagtaatgtcaatgtaatccccaggatcatgaaatgtatacaaaataaataaagtaggagagtttgttgctgtc

SEQ ID NO: 340073 - DNA, 396 bp, Artificial Sequence
  derived and/or modified sequence
atggccaacatgaacagcgacagcagacacctgggcaccagcgaggtggaccacgagagagaccccggccccatgaacatccagttcgagcccagcgacctgagaagcaagagacccttctgcatcgagcccaccaacatcgtgaacgtgaaccacgtgatccagagagtgagcgaccacgccagcgccatgaacaagagaatccactactacagcagactgaccacccccgccgacaaggccctgatcgcccccgaccacgtggtgcccgcccccgaggagtgctacgtgtacagccccctgggcagcgcctacaagctgcagagctacaccgagggctacggcaagaacaccagcctggtgaccatcttcatgatctggaacaccatgatgtag

SEQ ID NO: 340074 - DNA, 114 bp, Artificial Sequence
  derived and/or modified sequence
atggccaacatgaacagcgacagcagacacctgggcaccagcgaggtggaccacgagagagaccccggccccatgaacatccagttcgagcccagcgacctgagaagcaagtag

SEQ ID NO: 340075 - DNA, 294 bp, Artificial Sequence
  derived and/or modified sequence
atggccaacatgaacagcgacagcagacacctgggcaccagcgaggtggaccacgagagagaccccggccccatgaacatccagttcgagcccagcgacctgagaagcaagagacccttctgcatcgagcccaccaacatcgtgaacgtgaaccacgtgatccagagagtgagcgaccacgccagcgccatgaacaagagaatccactactacagcagactgaccacccccgccgacaaggccctgatcgcccccgaccacgtggtgcccgcccccgaggagtgctacgtgtag

SEQ ID NO: 340076 - DNA, 396 bp, Artificial Sequence
  derived and/or modified sequence
atggccaatatgaattctgacagccggcacttgggcactagcgaagttgaccatgagcgcgacccaggaccgatgaacattcagtttgagccctctgacctacgctccaaacgaccattctgcattgagccaactaacatcgtgaacgttaaccacgttatacaaagagtatccgatcacgcctccgctatgaacaaaagaatccattactattcccgactcaccacccccgctgataaggcactgattgccccagatcatgtagtccctgcccccgaagaatgctatgtttattccccactcggtagtgcctacaaactacagagttacacggaaggctatggtaagaataccagtctagtcacgatatttatgatatggaataccatgatgtag

SEQ ID NO: 340077 - DNA, 114 bp, Artificial Sequence
  derived and/or modified sequence
atggccaatatgaactccgattccagacatctcgggacatcagaagtcgaccacgaacgtgatccaggtccaatgaatatacagtttgagccgtcagacctacgaagtaaatag

SEQ ID NO: 340078 - DNA, 114 bp, Artificial Sequence
  derived and/or modified sequence
atggccaacatgaatagtgacagccggcacctcggaacctctgaagtcgatcacgaaagggatcccgggccaatgaacattcagttcgaaccatccgaccttcggtccaagtag

SEQ ID NO: 340079 - DNA, 294 bp, Artificial Sequence
  derived and/or modified sequence
atggctaatatgaattctgattctcggcatttgggcacctccgaggtcgatcatgagagggaccccggtcccatgaacattcagtttgagccttccgatctgagaagcaagcgaccattctgtattgagcctacaaatatagtgaacgtcaatcacgtcatacaaagggtctctgatcatgcctctgctatgaataagcggattcattattattcccggctgacaacacccgccgacaaagctctcattgcacctgaccacgtcgtacctgcccccgaagagtgctatgtgtag

SEQ ID NO: 340080 - DNA, 396 bp, Artificial Sequence
  derived and/or modified sequence
atggccaacatgaacagcgacagccgccacctgggcaccagcgaggtggaccacgagcgggaccccggccccatgaacatccagtttgagcccagcgacctgcggagcaagaggcccttctgcatcgagcccaccaacatcgtgaatgtgaaccacgtgatccagagggtgtctgaccacgccagcgccatgaacaagaggatccactactacagccggctgaccaccccagctgacaaggccctgattgccccagaccacgtggtgcctgcccctgaggagtgctacgtgtacagccccctgggcagcgcctacaagctgcagagctacacagagggctacggcaagaacaccagcctggtgaccatcttcatgatctggaacaccatgatgtag

SEQ ID NO: 340081 - DNA, 114 bp, Artificial Sequence
  derived and/or modified sequence
atggccaacatgaacagcgacagccgccacctgggcaccagcgaggtggaccacgagcgggaccccggccccatgaacatccagtttgagcccagcgacctgcggagcaagtag

SEQ ID NO: 340082 - DNA, 294 bp, Artificial Sequence
  derived and/or modified sequence
atggccaacatgaacagcgacagccgccacctgggcaccagcgaggtggaccacgagcgggaccccggccccatgaacatccagtttgagcccagcgacctgcggagcaagaggcccttctgcatcgagcccaccaacatcgtgaatgtgaaccacgtgatccagagggtgtctgaccacgccagcgccatgaacaagaggatccactactacagccggctgaccaccccagctgacaaggccctgattgccccagaccacgtggtgcctgcccctgaggagtgctacgtgtag

SEQ ID NO: 340083 - DNA, 396 bp, Artificial Sequence
  derived and/or modified sequence
atggccaacatgaacagcgacagccggcacctgggcaccagcgaggtggaccacgagagggatcctgggccaatgaatatccaattcgaaccatcagaccttcgatccaagcgccctttttgtatcgaacccaccaatattgtgaatgtgaaccacgtcatccagagagtaagcgaccatgcgagcgctatgaacaagagaatccattattacagcagactgaccactccggccgacaaagccctcatcgcccccgaccacgtagtgccagcgccagaagagtgctatgtgtactcgccgctcggcagcgcttacaagctccaaagttacaccgaaggctatggcaaaaacacctcacttgtgaccatctttatgatctggaacactatgatgtag

SEQ ID NO: 340084 - DNA, 114 bp, Artificial Sequence
  derived and/or modified sequence
atggccaacatgaacagcgacagccggcacctgggcaccagcgaggtcgaccatgagagagatccaggcccaatgaatatccaattcgaaccctccgatctaaggagcaaatag

SEQ ID NO: 340085 - DNA, 114 bp, Artificial Sequence
  derived and/or modified sequence
atggccaacatgaacagcgacagccggcacctgggcaccagcgaggtggaccacgagcgggatccaggaccaatgaatatccaattcgagccttctgacttgcgaagcaagtag

SEQ ID NO: 340086 - DNA, 294 bp, Artificial Sequence
  derived and/or modified sequence
atggccaacatgaacagcgacagccggcacctgggcaccagcgaggtggaccatgaacgggaccctggaccgatgaacattcaatttgaaccctctgacctgcggagtaagcgcccgttttgtattgagcccaccaacatagtcaacgtcaatcacgttattcagagggtctcggatcatgcaagtgccatgaataaacgcattcattattactctcggctgacaactcccgccgacaaggcactgatcgcccccgatcacgtggttccggcaccagaagagtgctatgtgtag

SEQ ID NO: 340087 - DNA, 396 bp, Artificial Sequence
  derived and/or modified sequence
atggcaaatatgaacagcgattccagacacttgggaaccagcgaagtggatcatgaacgtgatccaggacctatgaacatccaatttgagccctccgatctgcggagtaagcgccctttttgcatcgaacccacaaatatcgtaaatgtcaatcacgtgatacagagggtaagcgaccacgcgtctgccatgaacaaacgcatacattattactctagattgaccactccggcagacaaggctctcatcgctcctgaccacgtggtccccgctcccgaggaatgctatgtgtacagccctttgggctcggcctataagttacagtcttataccgagggatacggcaagaatacctcacttgtaaccatctttatgatttggaacacgatgatgtag

SEQ ID NO: 340088 - DNA, 114 bp, Artificial Sequence
  derived and/or modified sequence
atggcaaacatgaactccgacagccggcacctgggcacaagcgaggtggaccacgagagggatcctggccctatgaatattcaattcgaaccgagcgacctccgtagtaaatag

SEQ ID NO: 340089 - DNA, 114 bp, Artificial Sequence
  derived and/or modified sequence
atggctaacatgaattccgactctaggcatctggggacaagtgaagtggatcacgaaagagatcctgggcctatgaacatacagtttgaacccagcgacttgagatccaagtag

SEQ ID NO: 340090 - DNA, 294 bp, Artificial Sequence
  derived and/or modified sequence
atggctaacatgaactctgattccagacacctcggcacaagcgaagtagaccatgagagagatcctggccctatgaatattcagtttgagcccagtgatttgcgcagtaagcgacctttttgcattgagcccactaacatcgtgaacgtgaatcatgtgatccaaagggtcagcgatcacgctagtgcaatgaacaagagaatccactactattcccgtctgaccacaccggctgataaggccctgatagcccctgatcacgtggtgccagcgcctgaagaatgctatgtctag

SEQ ID NO: 340091 - DNA, 541 bp, Artificial Sequence
  derived and/or modified sequence
attgccgcttcctgtttggactaggagccccgcggtcgcaaattgcgagaatttgggaagggaatctttatcttctcgtctagttctccgaggttgaaggctcggcctgctcaggactaacttcttcagtgcttagagtgtgagaaaaatggcaaatatgaatagtgattctaggcatcttggcacctctgaggtagatcatgaaagagatcctggacctatgaatatccagtttgagccatcggatctaagatccaaaaggcctttctgtatagagcccacaaacatcgtgaatgtgaatcatgtcattcagagggttagtgaccatgcctctgccatgaacaagagaattcattactacagccggctcaccactcctgcagacaaggcactgattgccccagaccatgtagttccagctccagaagagtgctatgtgtatagtccattgggctctgcttataaacttcaaagttacactgaaggatacggtaaaaacaccagtttagtaaccatttttatgatttggaataccatgatg

SEQ ID NO: 340092 - DNA, 370 bp, Artificial Sequence
  derived and/or modified sequence
aaattgcgagaatttgggaagggaatctttatcttctcgtctagttctccgaggttgaaggctcggcctgctcagagaaggaaactgaggtccaccgagttggagaaacctactcaacaccaggtaaccatttaatggcaaactcgaccaacacctaattgtcatgactcccaggcagtgtcttatccattgccgtgctctgtagatgagcacactataagttgactaacttcttcagtgcttagagtgtgagaaaaatggcaaatatgaatagtgattctaggcatcttggcacctctgaggtagatcatgaaagagatcctggacctatgaatatccagtttgagccatcggatctaagatccaaaag

SEQ ID NO: 340093 - DNA, 468 bp, Artificial Sequence
  derived and/or modified sequence
gctattgccgcttcctgtttggactaggagccccgcggtcgcaaattgcgagaatttgggaagggaatctttatcttctcgtctagttctccgaggttgaaggctcggcctgctcagagaaggaaactgaggtccaccgagttggagaaacctactcaacaccagtaggactaagctaatgagagctttgacttgcttaaacgttgggcaggaaagcagaagagaaaagggaagtggaaatcaaaacaacagagaaaagaaaatgcacatatttgggaaatagaacatgttactaacatctgtgtcacataataatcagtggactaacttcttcagtgcttagagtgtgagaaaaatggcaaatatgaatagtgattctaggcatcttggcacctctgaggtagatcatgaaagagatcctggacctatgaatatccagtttgagccatcggatctaagatccaaaag

SEQ ID NO: 340094 - DNA, 508 bp, Artificial Sequence
  derived and/or modified sequence
gcaaattgcgagaatttgggaagggaatctttatcttctcgtctagttctccgaggttgaaggctcggcctgctcagagaaggaaactgaggtccaccgagttggagaaacctactcaacaccagagtttcctgaataagtttttcccaagttctgtgttattctttttgatgaaaggatactggcttccctacaatcatcttttcaacttctaaaatgtttaattttttaaattgagtaggactaagctaatgagagctttgacttgcttaaacgttgggcaggaaagcagaagagaaaagggaagtggaaatcaaaacaacagagaaaagaaaatgcacatatttgggaaatagaacatgttactaacatctgtgtcacataataatcagtggactaacttcttcagtgcttagagtgtgagaaaaatggcaaatatgaatagtgattctaggcatcttggcacctctgaggtagatcatgaaagagatcctggacctatgaatat

SEQ ID NO: 340095 - DNA, 571 bp, Artificial Sequence
  derived and/or modified sequence
cccgcggtcgcaaattgcgagaatttgggaagggaatctttatcttctcgtctagttctccgaggttgaaggctcggcctgctcagagaaggaaactgaggtccaccgagttggagaaacctactcaacaccagagtttcctgaataagtttttcccaagttctgtgttattctttttgatgaaaggatactggcttccctacaatcatcttttcaacttctaaaatgtttaattttttaaattgaggactaacttcttcagtgcttagagtgtgagaaaaatggcaaatatgaatagtgattctaggcatcttggcacctctgaggtagatcatgaaagagatcctggacctatgaatatccagtttgagccatcggatctaagatccaaaaggcctttctgtatagagcccacaaacatcgtgaatgtgaatcatgtcattcagagggttagtgaccatgcctctgccatgaacaagagaattcattactacagccggctcaccactcctgcagacaaggcactgattgccccagaccatgtagttccagctccagaagagtgctatgt

SEQ ID NO: 340096 - protein, 192 aa, Artificial Sequence
  derived and/or modified sequence
MEWKLERTAPRRVRTEEEMLWVLDSVNATYSDFKSNFAKRLSAEVPVASSPITTRWQQSQTRALSSDSFGEEQSTTYLPEASGSVLKTPPEKETLTLGSRKEQLKTPSKGISETSNSALHFCKAPHAMDRDWKESVASKGQKCLKQLFVTQNVVQQANGKMQLCEQSECVWKDHFSGSMKKRFEQEDVGGKD

SEQ ID NO: 340097 - DNA, 579 bp, Artificial Sequence
  derived and/or modified sequence
atggagtggaagctggagagaaccgcccccagaagagtgagaaccgaggaggagatgctgtgggtgctggacagcgtgaacgccacctacagcgacttcaagagcaacttcgccaagagactgagcgccgaggtgcccgtggccagcagccccatcaccaccagatggcagcagagccagaccagagccctgagcagcgacagcttcggcgaggagcagagcaccacctacctgcccgaggccagcggcagcgtgctgaagaccccccccgagaaggagaccctgaccctgggcagcagaaaggagcagctgaagacccccagcaagggcatcagcgagaccagcaacagcgccctgcacttctgcaaggccccccacgccatggacagagactggaaggagagcgtggccagcaagggccagaagtgcctgaagcagctgttcgtgacccagaacgtggtgcagcaggccaacggcaagatgcagctgtgcgagcagagcgagtgcgtgtggaaggaccacttcagcggcagcatgaagaagagattcgagcaggaggacgtgggcggcaaggactag

SEQ ID NO: 340098 - DNA, 579 bp, Artificial Sequence
  derived and/or modified sequence
atggaatggaagttggaacgcacagccccacggcgtgtccggactgaggaggaaatgttgtgggtcctcgacagcgttaatgctacttactctgactttaagtccaatttcgcaaaaagactgtctgccgaagtgcctgtcgctagtagtccaataacgacccgttggcagcagtcacagaccagagctttgagctccgactctttcggagaagagcagtctacgacctatttaccagaggccagcgggagcgtgcttaagacgcccccagagaaagagaccctgacgctcgggagccgcaaggaacaactgaaaaccccatcaaaaggaatctccgagactagcaacagcgccctgcatttctgcaaggcacctcacgccatggaccgcgactggaaagagtccgtcgccagcaaaggccagaaatgtctgaagcagctctttgtcacacagaatgtggtgcagcaagccaacggaaaaatgcagctctgcgagcagtccgagtgtgtttggaaggaccactttagcggcagtatgaaaaagagattcgagcaagaggatgtcggtggaaaagactag

SEQ ID NO: 340099 - DNA, 579 bp, Artificial Sequence
  derived and/or modified sequence
atggagtggaagctggagaggacagcccccaggagagtgaggacagaggaggagatgctgtgggtgctggacagcgtgaatgccacctacagcgacttcaagagcaactttgccaagaggctgtctgctgaggtgcctgtggccagcagccccatcaccacccgctggcagcagagccagacccgggccctgagcagtgacagctttggagaggagcagagcaccacctacctgcctgaggccagcggctctgtgctgaagaccccacctgagaaggagaccctgaccctgggcagcaggaaggagcagctgaagacccccagcaagggcatcagcgagaccagcaacagcgccctgcacttctgcaaggccccccacgccatggaccgggactggaaggagagcgtggccagcaagggccagaagtgcctgaagcagctgtttgtgacccagaatgtggtgcagcaggccaacgggaagatgcagctgtgtgagcagagtgaatgtgtgtggaaggaccacttcagcggctccatgaagaagagatttgagcaggaggatgtgggcggcaaggactag

SEQ ID NO: 340100 - DNA, 579 bp, Artificial Sequence
  derived and/or modified sequence
atggagtggaagctggagcggaccgccccccggcgggtgcggaccgaggaagaaatgttatgggtacttgattctgtcaatgcgacttacagcgacttcaagagcaattttgcaaagcggctgtccgcagaggtcccagtcgcctcctcccccatcacaactcgctggcagcagtctcagaccagggcgctgagtagcgactcttttggggaagagcagtcaacaacttatctgcccgaagcatctggttctgtgctcaaaacgcccccagagaaggaaacattgacccttggaagtcggaaggagcagttgaaaactccatccaaagggatctctgaaacctctaattccgcactgcatttctgtaaggccccccatgccatggatagagactggaaggagtctgtcgcatccaaaggccagaagtgtctaaagcaactctttgtcacacagaacgtcgtacagcaggccaatggtaaaatgcagttgtgcgaacagtctgagtgtgtctggaaggaccattttagcggttctatgaagaagcgatttgaacaggaagacgtgggcggaaaagactag

SEQ ID NO: 340101 - DNA, 579 bp, Artificial Sequence
  derived and/or modified sequence
atggagtggaaactggagaggactgcccctagaagggtgcgtacggaagaagaaatgctgtgggtgttggattccgtgaacgctacctattccgactttaagtcaaattttgctaaaagattgagcgctgaagtacctgtggcgagctcccctattactaccaggtggcaacagtcccagacgcgtgcactttcttctgacagctttggggaggaacagagcacgacatatctgcccgaagccagtggaagcgtccttaaaactcctcccgagaaagagacgctgactctgggaagcaggaaggaacagctgaagacgcccagcaaagggatctctgagacgtccaacagtgccctgcacttctgcaaagcgccacacgcaatggatagggactggaaagagtccgtagcgtccaagggacagaaatgcctaaagcaactgtttgtaacccagaatgtagtgcagcaagccaatggcaagatgcagctgtgcgagcagtccgagtgcgtttggaaagaccacttcagcgggagcatgaaaaagcgctttgaacaggaagacgtaggaggtaaggattag

SEQ ID NO: 340102 - DNA, 756 bp, Artificial Sequence
  derived and/or modified sequence
gcagcggcggtgggaggagtgggggacctggagggaggtggtgaaatagaatggtcctgggggacgggactccaggggtttgacgattaggcgtcaagactgacttagacctgggaagaaaaccagaggcagtcgagcagagaggccaaacgccaggcagggcgaagtcagccggagatggagtggaaactggagcgcaccgcgcctcggagggtccgcacggaagaggagatgctgtgggtactcgattcagttaatgctacgtattctgactttaagagcaactttgcgaagaggctgtccgcagaggttcctgttgcgagtagccccattaccacaaggtggcagcaaagtcaaactagggctctgtcctctgattcctttggggaagagcagtcaaccacctacctcccagaagcttccggatcagtgctgaagacaccgcctgagaaagagaccttgactctaggatcccgcaaagaacaactgaagacccccagcaaaggaatttctgaaacaagtaactctgctctccatttttgcaaggcacctcatgcaatggacagagactggaaagaaagtgttgcctcaaaagggcagaaatgcctaaaacaactctttgtaacccagaacgtggttcagcaggctaatggaaaaatgcagctctgtgagcaatccgaatgtgtttggaaagatcactttagtggcagcatgaagaaacgatttgaacaggaggatgttggtggcaaagactaa

SEQ ID NO: 340103 - DNA, 593 bp, Artificial Sequence
  derived and/or modified sequence
gcattgcagcacacaacggaaggcttcagacgctggagctgccgtccgcacccagatgtctctctctcccttttcccctaacctcccccaactgcgggcccttttgggtgctgctctgacttcttccttggccttgggaaaagccgaagcggctctggagagaggagggcatggtttggagaagaggtgctgcggcaacaaagcgacccgcccaacgcctcctcaactttctcctgcccccgttactccacaggatccgctgaacataggatgttgccacaaaatctacctcgtgtatttttctctttcactcatgagctgcacaattgcagatttgagcacaatgtctgcagactgtgttgaaaaactctgaagaacctaattaacacaggatgacctaggagtgattctaagtctgtgtaacaagatattactcattagtgaatgtgtcagtcttggtactgaatgctgcagataacagcaagtaggttctcctttatttctgaagtattcacttgaccttccatcagtaagacggacttttctaatctgttcctggagatattaatggaatacagtcatgtccactcaag

SEQ ID NO: 340104 - protein, 226 aa, Artificial Sequence
  derived and/or modified sequence
MKVENFKTSEIQELFDIFTYSKGASMARMLSCFLNEHLFVSALKSYLKTFSYSNAEQDDLWRHFQMAIDDQSTVILPATIKNIMDSWTHQSGFPVITLNVSTGVMKQEPFYLENIKNRTLLTSNDTWIVPILWIKNGTTQPLVWLDQSSKVFPEMQVSDSDHDWVILNLNMTGYYRVNYDKLGWKKLNQQLEKDPKAIPVIHRLQLIDDAFSLSNLQDFGHLKVPN

SEQ ID NO: 340105 - DNA, 681 bp, Artificial Sequence
  derived and/or modified sequence
atgaaggtggagaacttcaagaccagcgagatccaggagctgttcgacatcttcacctacagcaagggcgccagcatggccagaatgctgagctgcttcctgaacgagcacctgttcgtgagcgccctgaagagctacctgaagaccttcagctacagcaacgccgagcaggacgacctgtggagacacttccagatggccatcgacgaccagagcaccgtgatcctgcccgccaccatcaagaacatcatggacagctggacccaccagagcggcttccccgtgatcaccctgaacgtgagcaccggcgtgatgaagcaggagcccttctacctggagaacatcaagaacagaaccctgctgaccagcaacgacacctggatcgtgcccatcctgtggatcaagaacggcaccacccagcccctggtgtggctggaccagagcagcaaggtgttccccgagatgcaggtgagcgacagcgaccacgactgggtgatcctgaacctgaacatgaccggctactacagagtgaactacgacaagctgggctggaagaagctgaaccagcagctggagaaggaccccaaggccatccccgtgatccacagactgcagctgatcgacgacgccttcagcctgagcaacctgcaggacttcggccacctgaaggtgcccaactag

SEQ ID NO: 340106 - DNA, 681 bp, Artificial Sequence
  derived and/or modified sequence
atgaaggtggaaaattttaagaccagcgagatacaggagctttttgatattttcacgtactcaaaaggggcgagcatggcaagaatgctgtcctgctttctgaatgaacatcttttcgtctcagccctcaagtcgtaccttaagacatttagttacagcaatgccgagcaggatgacctctggcggcattttcagatggctatagacgatcagagcacagtgattcttcctgccacgataaagaacattatggatagctggactcaccaaagcggcttccccgtgatcaccttgaacgtgtccacgggcgtaatgaagcaggaaccattttacctggaaaacattaagaataggactctgctcacaagcaacgacacatggatcgtacccatcctgtggattaaaaacggcaccacacagcccctcgtctggctagaccaatcttctaaagtctttcccgagatgcaagtgtctgactccgaccacgattgggtgatcctcaacctgaatatgaccggttactaccgcgtgaactacgacaagctaggttggaagaagctgaaccagcagcttgaaaaggacccaaaggccataccagtgatccatcggttgcaactgattgacgacgctttctccctttcaaacctacaagacttcggccacctgaaggtccctaactag

SEQ ID NO: 340107 - DNA, 681 bp, Artificial Sequence
  derived and/or modified sequence
atgaaggtggagaacttcaagaccagcgagatccaggagctgtttgacatcttcacctacagcaagggggcctccatggccaggatgctgagctgcttcctgaatgagcacctgtttgtgtctgccctgaagagctacctgaagaccttctcctacagcaatgctgagcaggatgacctgtggaggcacttccagatggccattgatgaccagagcaccgtcatcctgcctgccaccatcaagaacatcatggacagctggacccaccagagcggcttccctgtgatcaccctgaatgtgtccactggagtgatgaagcaggagcccttctacctggagaacatcaagaacagaaccctgctgaccagcaatgacacctggatcgtgcccatcctgtggatcaagaatggcaccacccagcccctggtgtggctggaccagagcagcaaggtgtttcctgagatgcaggtgtctgacagcgaccatgactgggtgatcctgaacctgaacatgacaggctactacagagtgaactatgacaagctgggctggaagaagctgaaccagcagctggagaaggaccccaaggccatccctgtgatccaccggctgcagctgattgatgatgccttcagcctgagcaacctgcaggactttggccacctgaaggtgcccaactag

SEQ ID NO: 340108 - DNA, 2294 bp, Artificial Sequence
  derived and/or modified sequence
aaccgctgtctgctgagctccagtccgtccaggctcttccaggaggaagaggcacgatacaagagaggaggggcaggggtcgcagcactgaacaccctggccggggttttgacagctgccacagtctctgagctccagcctcgcgcctgaacccggtccctgccatggggcccccttccagctcaggcttctatgtgagccgcgcagtggccctgctgctggctgggctggtagccgccctcctgctggcgctggccgtactcgccgccttgtacggccactgcgagcgcgtcccaccgtcggagctgcctggactcagggacttggaagccgagtcttcccctcccctcaggcagaagccgacgccaaccccgaaacccagcagtgcacgcgagctagcggtgacgaccaccccgagcaactggcgacccccggggccctgggaccagctacgcctgccgccctggctcgtgccgctgcactacgatctggagctgtggccgcagctgaggcccgacgagcttccggccgggtctttgcccttcactggccgcgtgaacatcacggtgcgctgcacggtggccacctctcgactgctgctgcatagcctcttccaggactgcgagcgcgccgaggtgcggggacccctttccccgggcactgggaacgccacagtgggccgcgtgcccgtggacgacgtgtggttcgcgctggacacggaatacatggtgctggagctcagtgagcccctgaaacctggtagcagctacgagctgcagcttagcttctcgggcctggtgaaggaagacctcagggagggactcttcctcaacgtctacaccgaccagggcgagcgcagggccctgttagcgtcccagctggaaccaacatttgccaggtatgttttcccttgttttgatgagccagctctgaaggcaacttttaatattacaatgattcatcatccaagttatgtggccctttccaacatgccaaagctaggtcagtctgaaaaagaagatgtgaatggaagcaaatggactgttacaaccttttccactacgccccacatgccaacttacttagtcgcatttgttatatgtgactatgaccacgtcaacagaacagaaaggggcaaggagatacgcatctgggcccggaaagatgcaattgcaaatggaagtgcagactttgctttgaacatcacaggtcccatcttctcttttctggaggatttgtttaatatcagttactctcttccaaaaacagatataattgccttgcctagttttgacaaccatgcaatggaaaactggggactaatgatatttgatgaatcaggattgttgttggaaccaaaagatcaactgacagaaaaaaagactctgatctcctatgttgtctcccacgagattggacaccagtggtttggaaacttggttaccatgaattggtggaacaatatctggctcaacgagggttttgcatcttattttgagtttgaagtaattaactactttaatcctaaactcccaagaaatgagatctttttttctaacattttacataatatcctcagagaagatcacgccctggtgactagagctgtggccatgaaggtggaaaatttcaaaacaagtgaaatacaggaactctttgacatatttacttacagcaagggagcgtctatggcccggatgctttcttgtttcttgaatgagcatttatttgtcagtgcactcaagtcatatttgaagacattttcctactcaaacgctgagcaagatgatctatggaggcattttcaaatggccatagatgaccagagtacagttattttgccagcaacaataaaaaacataatggacagttggacacaccagagtggttttccagtgatcactttaaatgtgtctactggcgtcatgaaacaggagccattttatcttgaaaacattaaaaatcggactcttctaaccagcaatgacacatggattgtccctattctttggataaaaaatggaactacacaacctttagtctggctagatcaaagcagcaaagtattcccagaaatgcaagtttcagattctgaccatgactgggtgattttgaatttgaatatgactggatattatagagttaattatgataaattaggttggaagaaactaaatcaacaacttgaaaaggatcctaaggcgattcctgttattcacagactgcagttgattgatgatgccttttccttgtctaaccttcaagactttggacacttgaaagtaccaaattga

SEQ ID NO: 340109 - DNA, 681 bp, Artificial Sequence
  derived and/or modified sequence
atgaaggtggagaacttcaagaccagcgagatccaggagctgttcgatatcttcacctactctaaaggagcaagcatggcgcggatgctatcctgctttcttaatgaacacctgttcgtgtctgctctcaaaagttacctcaaaacgttcagttatagcaatgctgagcaagacgatctgtggcgacattttcagatggcaattgacgatcagagcacagttattctcccagcgacgataaagaacatcatggattcatggacacatcagtctgggtttcccgttatcaccttgaacgttagcaccggggtcatgaagcaggagcctttctatctagaaaatattaagaatagaaccctcttaacatctaacgatacctggatcgtgcctatcctctggatcaagaatgggacaacgcagcctctagtgtggctggaccagtcctctaaagtgttcccagagatgcaggtgtccgacagcgatcatgattgggtaatactgaatttaaacatgaccggctattaccgagtaaattacgacaagctcgggtggaagaagcttaatcagcagctggaaaaagatcctaaagccataccagtaattcatagattgcagttgatagacgacgcgttttctctgtccaatttacaggactttggacatttgaaggtccctaactag

SEQ ID NO: 340110 - DNA, 681 bp, Artificial Sequence
  derived and/or modified sequence
atgaaggtagagaatttcaagacctctgagatccaggagctctttgacatatttacatactctaagggcgcttccatggctcgaatgctgtcgtgctttctaaacgaacatttattcgtgtctgcacttaaaagctacctgaaaacctttagttacagcaacgccgaacaggacgacctgtggcgacacttccagatggcaatcgatgaccagtctaccgtgatcttgcccgctaccattaagaacattatggacagctggacacaccagagcggtttcccagtaattacattgaatgtttcgactggcgtcatgaagcaggaaccattctaccttgagaacattaaaaatcgaactttgttgacctcaaatgatacatggatcgtgccaattctttggatcaagaacggaactacccagccactggtttggctggaccaatcttcaaaggttttccccgagatgcaggtaagtgactcagatcatgactgggtgattctgaatttgaacatgactggatattatcgagtgaattacgataaattgggctggaaaaaactgaatcagcagctggagaaggaccctaaggcaattcccgtaatccatcgcctccagctgatcgacgacgcctttagtttgtccaacctccaggactttggtcatctaaaggttccaaattag

SEQ ID NO: 340111 - protein, 326 aa, Artificial Sequence
  derived and/or modified sequence
MGFGSDLKNSHEAVLKLQDWELRLLETVKKFMALRIKSDKEYASTLQNLCNQVDKESTVQMNYVSNVSKSWLLMIQQTEQLSRIMKTHAEDLNSGPLHRLTMMIKDKQQVKKSYIGVHQQIEAEMIKVTKTELEKLKCSYRQLIKEMNSAKEKYKEALAKGKETEKAKERYDKATMKLHMLHNQYVLALKGAQLHQNQYYDITLPLLLDSLQKMQEEMIKALKGIFDEYSQITSLVTEEIVNVHKEIQMSVEQIDPSTEYNNFIDVHRTTAAKEQEIEFDTSLLEENENLQANEIMWNNLTAESLQVMKERRGYPNLNLFVIQLLE

SEQ ID NO: 340112 - DNA, 1486 bp, Artificial Sequence
  derived and/or modified sequence
gtcacaccctcgaataatgacgcatacctatcctactgttactgatcacctagtaataatcttgtagttcacattactcatttttcaccaaattcttttggtgaaggacgcttcagaaacggccatcactgaagagcagacccgtttgggttctccacgcattctagactcccgaagagatatgtgctgattagaaggctcacttgtgcagtgtggaggataaccagtgccttacaaaatggggtttgggagtgacctgaagaattcacatgaagcagtgttaaaattgcaagactgggaattacggttactggaaacagtaaagaaatttatggccctgagaataaaaagtgataaagaatatgcatctactttacagaacctttgtaatcaagttgataaggaaagtactgtccaaatgaattatgtcagcaacgtatccaagtcttggctacttatgattcagcagacagaacaacttagtaggataatgaagacacatgcagaggacttgaactctggacctttacacaggctcaccatgatgattaaggacaagcagcaggtgaagaaaagttacataggtgttcatcagcagatagaggcagagatgatcaaggttaccaaaacagaattggagaagttaaaatgcagctatagacaattaataaaagaaatgaattctgccaaagagaaatataaagaagctttagctaaagggaaggaaactgaaaaggccaaggaacgatacgacaaagccacaatgaaacttcatatgttgcacaatcagtatgtattggcgttgaaaggggcacagctccatcagaatcagtattatgatatcacacttcccctgcttctggactccttacaaaagatgcaagaagaaatgataaaagcactcaaaggtatatttgatgaatacagccagataaccagtcttgtcacagaggaaatagtgaatgtccataaagagattcaaatgtcggttgaacagatagatcctagtacagaatacaataatttcatagatgttcacagaacaacggctgctaaagaacaagaaatagagtttgatacttccttactggaagaaaatgaaaatcttcaggcaaatgagatcatgtggaataacttaacagcagaaagtttgcaagtaatgaaagaaaggagaggctatccaaatttgaatctattcgtcattcaattgctggaataattaggtctccaaaatctgcactgggctcttcagcactttctgatatgatctccatcagtgagaagcctttggcagaacaggactggtaccatggtgcaattcccagaatagaagctcaagaactgttaaaaaaacaaggagactttttggtgcgagagagtcatgggaaacctgaacatgtatcgattcgagggcactgggttttcaaacattcctcaacttatagatcatcactatacaacaaaacaggtcatcactaagaaatca

SEQ ID NO: 340113 - DNA, 981 bp, Artificial Sequence
  derived and/or modified sequence
atgggcttcggctccgacctaaagaacagccatgaagccgtcttgaagttgcaggactgggaactgcggctcctagaaacggtgaaaaagtttatggcactgaggataaagtccgacaaggaatacgccagcacgctgcagaacctgtgtaaccaggtggataaagagagcacggtgcagatgaactacgtctctaatgttagtaagtcatggctgctgatgatacagcaaacagagcagctgagccggatcatgaaaacccacgccgaggatctgaactcgggtccactgcataggctgaccatgatgatcaaggataagcaacaggtgaagaagtcatacatcggagtgcatcagcagatcgaagctgagatgattaaagtgactaaaaccgaactggaaaaactgaagtgtagctaccgccaactgatcaaggagatgaatagtgccaaagagaagtataaggaggccctggccaaaggcaaggagacggaaaaagcaaaggaaaggtatgacaaggctactatgaagctgcatatgctgcacaatcagtacgtcctcgccctgaagggcgcccaactgcaccagaaccagtattacgatataactctgcctttattattggatagcctgcagaagatgcaggaggagatgatcaaggccctgaagggcatcttcgacgagtatagccagatcacctccctggtcaccgaggagattgtgaacgtgcacaaagagattcagatgagcgtggaacagatagatccaagcactgaatataacaatttcatagacgtgcatcggaccacagcagctaaggaacaggaaatcgaattcgacaccagcctgctggaggagaacgagaatctccaggcaaacgagattatgtggaacaacctcacagcggaaagcttacaggtaatgaaagagcgccgggggtatcctaatttaaacttattcgttatacagttactggagtag

SEQ ID NO: 340114 - DNA, 981 bp, Artificial Sequence
  derived and/or modified sequence
atgggctttggaagtgacctgaagaacagccatgaagctgtgctgaagctgcaggactgggagctgcggctgctggagaccgtgaagaagttcatggccctgcgcatcaagagtgacaaggagtatgccagcaccctgcagaacctgtgcaaccaggtggacaaggagagcacagtgcagatgaactacgtgtccaatgtgtccaagtcctggctgctgatgatccagcagacagagcagctgagccgcatcatgaagacccatgctgaggacctgaacagcggccccctgcaccggctgaccatgatgatcaaggacaagcagcaggtgaagaagagctacatcggcgtgcaccagcagattgaagctgagatgatcaaggtgaccaagacagagctggagaagctgaagtgcagctaccggcagctgatcaaggagatgaacagcgccaaggagaagtacaaggaggccctggccaagggcaaggagacagagaaggccaaggagagatatgacaaggccaccatgaagctgcacatgctgcacaaccagtatgtgctggccctgaagggggcccagctgcaccagaaccagtactatgacatcaccctgcccctgctgctggacagcctgcagaagatgcaggaggagatgatcaaggccctgaagggcatctttgatgagtacagccagatcaccagcctggtgacagaggagatcgtgaatgtgcacaaggagatccagatgtctgtggagcagattgaccccagcacagagtacaacaacttcattgatgtgcacaggaccacagctgccaaggagcaggagattgaatttgacaccagcctgctggaggagaatgaaaacctgcaggccaatgagatcatgtggaacaacctgacagctgagagcctgcaggtgatgaaggagcggcggggctaccccaacctgaacctcttcgtcatccagctgctggagtag

SEQ ID NO: 340115 - DNA, 981 bp, Artificial Sequence
  derived and/or modified sequence
atgggcttcggcagcgacctgaagaacagccacgaggccgtgctgaagctgcaagattgggagctccgcttactggagactgtgaagaagtttatggccctgagaatcaagagcgataaagaatacgccagtaccctgcagaatctttgtaatcaagtggataaggaatccactgttcagatgaactatgtctccaatgttagcaagagttggctacttatgatccaacaaactgagcagctcagtcgcatcatgaaaactcatgccgaggatctcaactcgggtcctctccatcgactcacgatgatgatcaaggataaacaacaagtgaaaaagtcctatataggggttcatcagcagatcgaagcagagatgattaaagtgacgaagactgaactcgagaagctgaagtgcagctaccgccagctgattaaagaaatgaacagtgctaaggagaagtataaggaagctctggccaagggaaaagaaaccgagaaggcaaaggagagatatgataaggcaacaatgaaactgcatatgttacacaatcaatacgttctggcactcaagggggcacaattacaccagaaccaatattacgatatcacgctgcctctgcttctcgattctctgcaaaaaatgcaagaagagatgattaaagctctgaaaggcatctttgacgagtattctcagattaccagcttagtaacagaggaaattgtcaatgtccacaaagagatacagatgtcagttgagcaaattgatccttccaccgagtataataacttcattgatgttcacagaactacagccgcaaaagaacaggagatagaatttgataccagtctgctcgaagaaaatgaaaatctccaggccaacgagataatgtggaataacttaacggctgaatctttgcaagtcatgaaagagcgccgcgggtatccgaatctgaatttattcgtgatacagctcctggaatag

SEQ ID NO: 340116 - DNA, 981 bp, Artificial Sequence
  derived and/or modified sequence
atgggatttggtagtgatttgaagaattcacacgaagccgtgctgaaactgcaagattgggagctcaggctgctggagacagtgaagaagtttatggccctcaggattaaatccgacaaagagtacgctagcacactgcagaacctgtgtaatcaggtggacaaagagagtaccgtacaaatgaactatgtatccaacgtgtccaaatcttggctgcttatgatccaacaaacagagcagctttcccggattatgaagacacacgccgaagacttgaattcgggtcctctccataggttgaccatgatgatcaaggacaaacagcaggtgaagaaaagctacatcggggtccatcaacagattgaggccgaaatgatcaaggtgacaaaaaccgagttagagaagttaaagtgtagctaccgacagctcattaaggaaatgaacagcgcaaaagagaaatacaaggaagcgcttgccaaagggaaagagactgagaaagcgaaggagagatatgacaaggctactatgaagttgcacatgctgcataatcagtacgtactggcactaaagggcgcacaactccatcagaaccaatattatgacatcacattaccactcctcctggactccttgcagaagatgcaggaggagatgatcaaagccctcaagggcatatttgatgagtactctcagattacttcacttgtgactgaagaaatagtgaacgtacataaggagatccagatgtcggtggaacagattgatcccagtactgaatacaataactttattgacgtgcatcggaccaccgcagcaaaggagcaggagatcgaattcgacaccagccttctggaagaaaatgaaaacttacaggccaacgaaataatgtggaacaacctgactgcggagtccctgcaggtgatgaaagaaagacggggataccccaacctgaacctgttcgtaattcagctgctcgagtag

SEQ ID NO: 340117 - DNA, 981 bp, Artificial Sequence
  derived and/or modified sequence
atgggcttcggcagcgacctgaagaacagccacgaggccgtgctgaagctgcaggactgggagctgagactgctggagaccgtgaagaagttcatggccctgagaatcaagagcgacaaggagtacgccagcaccctgcagaacctgtgcaaccaggtggacaaggagagcaccgtgcagatgaactacgtgagcaacgtgagcaagagctggctgctgatgatccagcagaccgagcagctgagcagaatcatgaagacccacgccgaggacctgaacagcggccccctgcacagactgaccatgatgatcaaggacaagcagcaggtgaagaagagctacatcggcgtgcaccagcagatcgaggccgagatgatcaaggtgaccaagaccgagctggagaagctgaagtgcagctacagacagctgatcaaggagatgaacagcgccaaggagaagtacaaggaggccctggccaagggcaaggagaccgagaaggccaaggagagatacgacaaggccaccatgaagctgcacatgctgcacaaccagtacgtgctggccctgaagggcgcccagctgcaccagaaccagtactacgacatcaccctgcccctgctgctggacagcctgcagaagatgcaggaggagatgatcaaggccctgaagggcatcttcgacgagtacagccagatcaccagcctggtgaccgaggagatcgtgaacgtgcacaaggagatccagatgagcgtggagcagatcgaccccagcaccgagtacaacaacttcatcgacgtgcacagaaccaccgccgccaaggagcaggagatcgagttcgacaccagcctgctggaggagaacgagaacctgcaggccaacgagatcatgtggaacaacctgaccgccgagagcctgcaggtgatgaaggagagaagaggctaccccaacctgaacctgttcgtgatccagctgctggagtag

SEQ ID NO: 340118 - protein, 117 aa, Artificial Sequence
  derived and/or modified sequence
  misc_feature (1)..(1): Xaa can be any naturally occurring amino acid
XEMYQVSRLQHICELFIITQLQSMPSRELASMNLDIVDLLKKAKFHHSDCLSTWLLHFIATNYLIFSQKPEFQDLSVEERSFVEKHRWPSNMYLKQLAEYRKYIHSRKCRCLVIKRH

SEQ ID NO: 340119 - DNA, 354 bp, Artificial Sequence
  derived and/or modified sequence
taagaaatgtaccaggtgagccgcctgcagcacatctgcgaactctttattatcactcaactgcaaagcatgccatcccgcgagcttgcgtctatgaacctggacatagtcgatttgttgaaaaaggccaaatttcaccacagcgactgcctgtccacctggcttctgcatttcatcgcgaccaattacttgatcttctcacagaaacccgaatttcaggacctgagtgttgaggagcgaagcttcgtcgagaaacatagatggccttccaatatgtatcttaaacagctggcggaatatagaaaatacattcatagcaggaagtgccgctgcctagtgatcaagcgacactag

SEQ ID NO: 340120 - DNA, 354 bp, Artificial Sequence
  derived and/or modified sequence
tgagaaatgtaccaggtgtcccggctgcagcacatctgtgagctgttcatcatcacccagctgcagagcatgcccagccgggagctggcctccatgaacctggacatcgtggacctgctgaagaaggccaagttccaccacagcgactgcctgagcacctggctgctgcacttcatcgccaccaactacctgatcttcagccagaagccagagttccaggacctgtctgtggaggagaggagctttgtggagaagcaccgctggcccagcaacatgtacctgaagcagctggccgagtacaggaagtacatccacagcaggaagtgccgctgcctggtgatcaagaggcactag

SEQ ID NO: 340121 - DNA, 354 bp, Artificial Sequence
  derived and/or modified sequence
tgagagatgtaccaggtgagccggctgcagcacatctgcgagctgttcatcattactcagttacagtcaatgccctcacgggaacttgccagcatgaatttggacatcgttgaccttcttaagaaggctaagttccatcattcagactgcctgagcacctggctgctgcatttcatcgcaaccaactatctgattttcagccagaagcccgagttccaggacctgtccgtcgaagagcgctctttcgtcgaaaaacatagatggcccagcaacatgtacctcaagcagctcgccgagtacaggaagtacatccattctcggaaatgccgctgtttggtaatcaagcgccattag

SEQ ID NO: 340122 - DNA, 354 bp, Artificial Sequence
  derived and/or modified sequence
taggagatgtatcaggtgagccgtcttcagcacatttgtgagctattcatcatcacacaactccagtcaatgccttctcgggagctcgctagcatgaacctcgatatcgtagaccttcttaagaaggctaagtttcaccattcagactgcctctccacctggcttctccattttatcgccactaactacctgatcttttcacagaagcctgaatttcaagatctcagtgtcgaggaaagatcttttgtggagaaacaccgttggccatctaacatgtatctgaaacagctagccgaatatcgcaaatatatacacagccgcaaatgtcgttgtcttgtgatcaaaagacactag

SEQ ID NO: 340123 - DNA, 653 bp, Artificial Sequence
  derived and/or modified sequence
cgagatgtaccaagtgtccagactgcagcacatctgtgagctgttcatcattacccagctgcagagcatgccaagcagggaactggcatccatgaaccttgatatagttgacctgcttaaaaaggccaagtttcaccactctgattgcctttcaacctggctacttcatttcattgctactaactacctcatcttcagtcaaaagcctgaatttcaggatctttcagtggaagaacgcagttttgttgaaaagcacagatggccgtcgaatatgtacttgaagcagcttgcggaatacaggaagtatattcactcccggaaatgtcgttgcttagtaataaaaaggcactgatataaagggaagagaaggaggctcaccggagggaagagaacatagtgaagattcccgcctttggggaggtctggaccacccagggcctccactgccaccttggctggcaagggagaaatgtgttgtgttgtcttagctttaaaacagtcacagttcttgctctatcatagatgaacaaatactttcttgatcattctgtaagaccaggaggttggtaagagtgactaaccagcctaactttaatacacatgtataaagatgttcacagagaaagatgctctgtagagaatttgctaccgaa

SEQ ID NO: 340124 - DNA, 354 bp, Artificial Sequence
  derived and/or modified sequence
tgagagatgtaccaggtgagcagactgcagcacatctgcgagctgttcatcatcacccagctgcagagcatgcccagcagagagctggccagcatgaacctggacatcgtggacctgctgaagaaggccaagttccaccacagcgactgcctgagcacctggctgctgcacttcatcgccaccaactacctgatcttcagccagaagcccgagttccaggacctgagcgtggaggagagaagcttcgtggagaagcacagatggcccagcaacatgtacctgaagcagctggccgagtacagaaagtacatccacagcagaaagtgcagatgcctggtgatcaagagacactag

SEQ ID NO: 340125 - protein, 390 aa, Artificial Sequence
  derived and/or modified sequence
MAAGGTGGLREEQRYGLSCGRLGQDNITVLHVKLTETAIRALETYQSHKNLIPFRPSIQFQGLHGLVKIPKNDPLNEVHNFNFYLSNVGKDNPQGSFDCIQQTFSSSGASQLNCLGFIQDKITVCATNDSYQMTRERMTQIVNSNSNSPSTPEGRGTQDLPVDSFSQNDSIYEDQQDKYTSRTSLETLPPGSVLLKCPKPMEENHSMSHKKSKKKSKKHKEKDQIKKHDIETIEEKEEDLKREEEIAKLNNSSPNSSGGVKEDCTASMEPSAIELPDYLIKYIAIVSYEQRQNYKDDFNAEYDEYRALHARMETVARRFIKLDAQRKRLSPGSKEYQNVHEEVLQEYQKIKQSSPNYHEEKYRCEYLHNKLAHIKRLIGEFDQQQAESWS

SEQ ID NO: 340126 - DNA, 1173 bp, Artificial Sequence
  derived and/or modified sequence
atggccgcggggggcaccggggggctgagagaagagcagaggtatgggttgtcctgcggccggctgggacaggataacatcacagtcctccacgtgaaactgacagagacagcgatacgtgctctcgagacctatcagtcccataagaatctaatccctttcaggccctcgattcagttccaggggctgcacgggctggtcaaaatcccaaaaaacgaccctctgaacgaagtccacaacttcaatttctatctgtcaaacgtcggcaaagacaatccacaggggagctttgactgcattcaacaaacattctcaagctccggcgcatcgcaactgaactgtctcggcttcatccaggacaaaatcaccgtgtgtgccacaaacgattcctaccagatgacccgggagcgcatgacacaaatagtgaattctaatagtaattctccatcaaccccagagggccgagggacacaggatttgcccgttgacagtttcagtcaaaatgactccatttacgaagatcagcaggacaaatacacgagtcggacctcattggagactctcccaccgggaagtgttctgctgaagtgcccaaaacctatggaagagaatcatagtatgagtcataaaaaatccaagaagaagtcaaaaaaacacaaggaaaaggatcagatcaagaagcacgacatagagactatcgaagaaaaggaggaggatttgaaacgcgaggaggagatcgcaaaattgaataactcttccccaaacagtagcggaggcgtcaaagaagactgcaccgcgagcatggagccttcggctatcgaactgcccgactatctgatcaagtacatcgctatcgtgagctatgagcagcgccagaactacaaggacgactttaacgctgagtatgacgaataccgcgctctccacgctcggatggagacggtggctcgtcgctttataaagcttgacgcacagaggaaaaggctttccccaggctcaaaggagtaccaaaatgtccatgaggaagtcctgcaggaatatcagaagataaaacagagctcccccaattaccatgaggaaaagtatcggtgtgaatatctccataacaagctagctcacatcaagaggctcatcggagagtttgaccagcagcaagcagaatcctggtcctag

SEQ ID NO: 340127 - DNA, 1173 bp, Artificial Sequence
  derived and/or modified sequence
atggctgctgggggcaccggcggcctgcgggaggagcagagatatggcctgagctgtggccgcctgggccaggacaacatcaccgtgctgcacgtgaagctgacagaaacagccatccgggccctggagacctaccagagccacaagaacctgatccccttccggcccagcatccagttccagggcctgcacggcctggtgaagatccccaagaatgaccccctgaatgaggtgcacaacttcaacttctacctgagcaatgtgggcaaggacaacccccagggcagctttgactgcatccagcagaccttcagcagcagcggggccagccagctgaactgcctgggcttcatccaggacaagatcaccgtgtgtgccaccaatgacagctaccagatgacccgggagaggatgacccagatcgtgaacagcaacagcaacagccccagcaccccagagggccggggcacccaggacctgcctgtggacagcttcagccagaatgacagcatctatgaggaccagcaggacaagtacaccagcaggaccagcctggagaccctgcccccaggctctgtgctgctgaagtgccccaagcccatggaggagaaccacagcatgagccacaagaagagcaagaagaagagcaagaagcacaaggagaaggaccagatcaagaagcatgacatcgagaccatcgaggagaaggaggaggacctgaagcgggaggaggagatcgccaagctgaacaacagcagccccaacagcagtggaggagtgaaggaggactgcacagcctccatggagcccagcgccatcgagctgcctgactacctgatcaagtacatcgccatcgtgtcctatgagcagaggcagaactacaaggatgacttcaatgcagaatatgatgagtaccgggccctgcacgccaggatggagaccgtggcccggcgcttcatcaagctggatgcccagaggaagaggctgagccctggcagcaaggagtaccagaatgtgcatgaggaggtgctgcaggagtaccagaagatcaagcagagcagccccaactaccacgaggagaagtaccgctgtgagtacctgcacaacaagctggcccacatcaagaggctcatcggggagtttgaccagcagcaggccgagagctggagctag

SEQ ID NO: 340128 - DNA, 1173 bp, Artificial Sequence
  derived and/or modified sequence
atggccgccggcggcaccggcggcctgcgggaggagcagcggtacggcctctcgtgcggccgcctcggccaggataatataaccgtcctccatgtgaaactcaccgaaacagcaattagggctctggagacataccaatcccacaaaaacctgatcccctttcgaccaagcatccaattccagggcctccatggcctggttaaaattccaaaaaatgatcctctgaatgaggtgcataactttaatttctatctttctaacgtgggaaaggataatccccagggctccttcgactgcatccagcagacattttcctcttcaggggcgagtcagcttaactgccttgggtttatacaggataagattacggtgtgcgctacaaacgattcataccagatgacccgggaaaggatgacacaaattgtgaactccaactctaattcaccaagcacacctgaggggagagggacacaggacctcccagtggactccttttcccaaaacgattctatttatgaggaccagcaggacaaatacacatcgaggacatccctagaaacactgccccctggttccgtgttattgaaatgccctaagccaatggaggaaaatcacagtatgagccacaagaagagcaaaaagaaaagtaagaaacataaggagaaagatcagattaaaaagcatgatatcgaaacgattgaagagaaggaggaagaccttaagagggaggaagaaatcgccaagctcaacaatagttcaccaaacagcagcggtggtgtgaaagaggattgtaccgcttccatggagccttctgcaatagagctgccagactacctcataaagtacattgccattgtcagttatgagcagagacagaattacaaggatgatttcaacgcggaatatgatgaatacagggcattgcacgcaaggatggaaactgtggctagacggtttataaagctggatgctcaaaggaagagactttcccccgggtctaaggaataccagaatgttcatgaagaggtcctccaggagtaccagaaaattaagcaaagcagcccaaattaccacgaggaaaagtatcggtgcgaatacttgcacaacaaacttgcacacatcaaaaggctcattggcgagttcgaccagcaacaggcagagtcctggtcctag

SEQ ID NO: 340129 - DNA, 1173 bp, Artificial Sequence
  derived and/or modified sequence
atggccgctggtgggaccggaggcttgcgagaggaacaaagatatggactctcctgcggtaggctggggcaggacaatattacagtgctgcatgtgaaactaacagaaactgccattagagcattggagacttaccagtctcataagaatctcataccctttcgcccatcaatccagtttcaagggctgcacggtcttgttaagatccctaagaacgacccgttaaatgaggtccataattttaacttctatttgtctaacgttggaaaagacaatccccaggggtccttcgattgcattcaacagacgttcagcagttctggtgcctcgcagttaaactgcttgggtttcattcaggataagatcacagtgtgcgcgactaacgattcatatcagatgacaagagaaaggatgacccagattgtcaacagtaattctaattcaccatctacacccgaaggcaggggcacacaggacctgccggtcgatagcttttctcaaaatgattctatttatgaggaccagcaggataagtacactagtcggacctcacttgaaactcttccgccaggatcggtacttctcaagtgtcctaaaccgatggaggaaaaccacagtatgtcccacaagaagtccaaaaagaagagtaagaagcataaagaaaaggatcagatcaaaaaacatgacattgagacaatcgaggagaaagaggaagacctaaagcgagaagaggagatcgcaaaactcaacaatagctcccccaatagctccggtggcgtcaaggaagattgtacagcctcaatggaacctagcgcaatagagctcccagactacctgatcaaatatattgccatagtaagctatgagcaaagacagaattataaagatgattttaatgccgaatatgacgagtaccgggcattgcatgctcgtatggagactgtggccaggaggttcatcaagctagatgcccagcggaagagactgagtcccggatccaaagagtatcaaaacgtccacgaggaagtattgcaggaataccagaagattaaacagagcagccccaattaccacgaggaaaaatacaggtgtgaatacctgcataacaagctggctcacattaaacgcctgattggtgagtttgatcagcaacaggctgagtcttggtcctag

SEQ ID NO: 340130 - DNA, 1173 bp, Artificial Sequence
  derived and/or modified sequence
atggccgccggcggcaccggcggcctgagagaggagcagagatacggcctgagctgcggcagactgggccaggacaacatcaccgtgctgcacgtgaagctgaccgagaccgccatcagagccctggagacctaccagagccacaagaacctgatccccttcagacccagcatccagttccagggcctgcacggcctggtgaagatccccaagaacgaccccctgaacgaggtgcacaacttcaacttctacctgagcaacgtgggcaaggacaacccccagggcagcttcgactgcatccagcagaccttcagcagcagcggcgccagccagctgaactgcctgggcttcatccaggacaagatcaccgtgtgcgccaccaacgacagctaccagatgaccagagagagaatgacccagatcgtgaacagcaacagcaacagccccagcacccccgagggcagaggcacccaggacctgcccgtggacagcttcagccagaacgacagcatctacgaggaccagcaggacaagtacaccagcagaaccagcctggagaccctgccccccggcagcgtgctgctgaagtgccccaagcccatggaggagaaccacagcatgagccacaagaagagcaagaagaagagcaagaagcacaaggagaaggaccagatcaagaagcacgacatcgagaccatcgaggagaaggaggaggacctgaagagagaggaggagatcgccaagctgaacaacagcagccccaacagcagcggcggcgtgaaggaggactgcaccgccagcatggagcccagcgccatcgagctgcccgactacctgatcaagtacatcgccatcgtgagctacgagcagagacagaactacaaggacgacttcaacgccgagtacgacgagtacagagccctgcacgccagaatggagaccgtggccagaagattcatcaagctggacgcccagagaaagagactgagccccggcagcaaggagtaccagaacgtgcacgaggaggtgctgcaggagtaccagaagatcaagcagagcagccccaactaccacgaggagaagtacagatgcgagtacctgcacaacaagctggcccacatcaagagactgatcggcgagttcgaccagcagcaggccgagagctggagctag

SEQ ID NO: 340131 - DNA, 1508 bp, Artificial Sequence
  derived and/or modified sequence
tatatgacagtacgtcagcagcgggatggccctagcagtggcggcggctgcagaagcccaagcagccgcggccgcagtggaggctagagccggagcggcggcggcggcggcaccccggggagtttaagatggcggcgggggggacagggggcctgcgggaggagcagcgctatgggctgtcgtgcggacggctggggcaggacaacatcaccgtactgcatgtgaagctcaccgagacggcgatccgggcgctcgagacttaccagagccacaagaatttaattccttttcgaccttcaatccagttccaaggactccacgggcttgtcaaaattcccaaaaatgatcccctcaatgaagttcataactttaacttttatttgtcaaatgtgggcaaagacaaccctcagggcagctttgactgcatccagcaaacattctccagctctggagcctcccagctcaattgcctgggatttatacaagataaaattacagtgtgtgcaacaaacgactcgtatcagatgacacgagaaagaatgacccagattgtaaattctaactccaactcccctagcactccagaaggccgggggactcaagacctacctgttgacagttttagtcaaaacgatagtatctatgaggaccagcaagacaaatatacctctaggacttctctggaaaccttaccccctggttccgttctactaaagtgtccaaagcctatggaagaaaaccattcaatgtctcacaaaaagtccaaaaagaagtctaaaaaacataaggaaaaggaccaaataaaaaagcacgacattgagactattgaggaaaaggaggaagatcttaagagagaagaggaaattgccaagctaaataactccagtccaaattccagtggaggagttaaagaggattgcactgcctccatggaaccttcagcaattgaactcccagattatttgataaaatatatcgctatcgtctcctatgagcaacgccagaattataaggatgacttcaatgcagagtatgatgagtacagagctttgcatgccaggatggagactgtagctagaagatttatcaaactagatgcacaaagaaagcgcctttctccaggctcaaaagagtatcagaatgttcatgaagaagtcttacaagaatatcagaagataaagcagtctagtcccaattaccatgaagaaaaatacagatgtgaatatcttcataacaagctggctcacatcaaaaggctaataggtgaatttgaccaacagcaagcagagtcatggtcctagaactctgcttggaccagaagatgtgaataaacttaagcttatttatttaaaattccaaatgagttgctctagattctaaaaaggtgaaactttggctgttgaaagtttcagtattagtaaacttgagttactttttcttttccattttactttgcttccctgcatttcgaagctgctctttctggtcctccccaccaccccaccccc

SEQ ID NO: 340132 - protein, 673 aa, Artificial Sequence
  derived and/or modified sequence
MKPGGFWLHLTLLGASLPAALGWMDPGTSRGPDVGVGESQAEEPRSFEVTRREGLSSHNELLASCGKKFCSRGSRCVLSLAPEDRVSVTTVTVGLSTVLTCAVHGDLRPPIIWKRNGLTLNFLDLEDINDFGEDDSLYITKVTTIHMGNYTCHASGHEQLFQTHVLQVNVPPVIRVYPESQAQEPGVAASLRCHAEGIPMPRITWLKNGVDVSTQMSKQLSLLANGSELHISSVRYEDTGAYTCIAKNEVGVDEDISSLFIEDSARKTLANILWREEGLSVGNMFYVFSDDGIIVIHPVDCEIQRHLKPTEKIFMSYEEICPQREKNATQPCQWVSAVNVRNRYIYVAQPALSRVLVVDIQAQKVLQSIGVDPLPAKLSYDKSHDQVWVLSWGDVHKSRPSLQVITEASTGQSQHLIRTPFAGVDDFFIPPTNLIINHIRFGFIFNKSDPAVHKVDLETMMPLKTIGLHHHGCVPQAMAHTHLGGYFFIQCRQDSPASAARQLLVDSVTDSVLGPNGDVTGTPHTSPDGRFIVSAAADSPWLHVQEITVRGEIQTLYDLQINSGISDLAFQRSFTESNQYNIYAALHTEPDLLFLELSTGKVGMLKNLKEPPAGPAQPWGGTHRIMRDSGLFGQYLLTPARESLFLINGRQNTLRCEVSGIKGGTTVVWVGEV

SEQ ID NO: 340133 - protein, 791 aa, Artificial Sequence
  derived and/or modified sequence
MEEKRRKYSISSDNSDTTDSHATSTSASRCSKLPSSTKSGWPRQNEKKPSEVFRTDLITAMKIPDSYQLSPDDYYILADPWRQEWEKGVQVPAGAEAIPEPVVRILPPLEGPPAQASPSSTMLGEGSQPDWPGGSRYDLDEIDAYWLELINSELKEMERPELDELTLERVLEELETLCHQNMARAIETQEGLGIEYDEDVVCDVCRSPEGEDGNEMVFCDKCNVCVHQACYGILKVPTGSWLCRTCALGVQPKCLLCPKRGGALKPTRSGTKWVHVSCALWIPEVSIGCPEKMEPITKISHIPASRWALSCSLCKECTGTCIQCSMPSCVTAFHVTCAFDHGLEMRTILADNDEVKFKSFCQEHSDGGPRNEPTSEPTEPSQAGEDLEKVTLRKQRLQQLEEDFYELVEPAEVAERLDLAEALVDFIYQYWKLKRKANANQPLLTPKTDEVDNLAQQEQDVLYRRLKLFTHLRQDLERVRNLCYMVTRRERTKHAICKLQEQIFHLQMKLIEQDLCRAGLSTSFPIDGTFFNSWLAQSVQITAENMAMSEWPLNNGHREDPAPGLLSEELLQDEETLLSFMRDPSLRPGDPARKARGRTRLPAKKKPPPPPPQDGPGSRTTPDKAPKKTWGQDAGSGKGGQGPPTRKPPRRTSSHLPSSPAAGDCPILATPESPPPLAPETPDEAASVAADSDVQVPGPAASPKPLGRLRPPRESKVTRRLPGARPDAGMGPPSAVAERPKVSLHFDTETDGYFSDGEMSDSDVEAEDGGVQRGPREAGAEEVVRMGVLAS

SEQ ID NO: 340134 - DNA, 2376 bp, Artificial Sequence
  derived and/or modified sequence
atggaagaaaagcggcgcaagtactctatcagctcagacaactcagatacaactgattcgcatgcgacctctacatcggcaagtcgctgttctaaactcccctccagcacaaaatcaggctggcctcggcagaacgaaaagaagccctctgaggtgttcaggacagacctcattaccgcgatgaaaattcccgattcataccaactctcgcctgatgactactatatccttgccgatccttggagacaggaatgggagaaaggcgtccaggtcccggccggcgctgaagctattccagagccagtggtacgcatcttgcctcccctggaaggcccaccagcccaggcctctccttcgtcgacgatgcttggcgaagggtcccagcccgattggcctggaggctctaggtacgacctcgacgaaattgatgcctactggttggagctaatcaattccgaactaaaagagatggagagaccagaactggacgaactgacacttgagagggttctggaggagctggagaccctgtgtcaccagaacatggcacgggccatcgaaacacaggaaggccttggaatcgagtatgacgaagatgtggtatgcgacgtgtgtcgcagcccagagggggaagacggaaacgagatggtgttttgcgacaaatgtaacgtctgcgttcaccaggcctgttatgggattctcaaggtgccgacgggatcctggttatgtaggacatgcgccctcggcgtgcagccgaagtgtctcttgtgcccgaagagggggggcgccttgaaacccaccagaagtggtacaaagtgggtccacgtcagttgcgcgttgtggatcccagaggtgtcaattggatgtcccgagaagatggaaccaatcacaaagattagccacatcccagcctctcgttgggcactgagttgtagcctgtgcaaagagtgtacgggaacatgtattcagtgctctatgcccagctgtgtgaccgcgttccacgtcacatgcgctttcgatcacggactagaaatgaggaccattctcgctgacaatgatgaggtcaagttcaagtctttctgccaggagcatagcgacggcggaccgcggaacgagccaacatctgagccaactgagccctctcaagcaggagaagatctcgaaaaagtgactctacgaaagcaaagactccagcagctggaggaagacttctacgagcttgtcgagccagcagaggtagccgagcgcctggacctcgctgaagctcttgtggacttcatctaccaatattggaaactgaagcgcaaagcaaatgccaaccagcctctgctcacccccaagactgatgaagtcgataatctggcacagcaagagcaggacgtactgtatagacggctgaagctttttacacatctgcgccaggacctggagcgggtgcgcaatctgtgctacatggtcacgaggcgcgagcgtaccaagcatgcgatttgtaaactccaagaacagatctttcacctccaaatgaaactgattgaacaggatctttgccgtgccgggctgtccactagctttcctattgatggtacattcttcaacagctggctggctcagtctgtgcagatcacggctgagaatatggccatgagtgaatggcctttgaataatggacatcgggaggatcctgcaccaggactgctgtcagaggaactgctgcaggacgaagagaccctactgtcattcatgcgcgaccctagcttacgaccgggcgatccagcccgcaaagcaaggggaaggactcgactgcccgcaaagaaaaagcctcccccacctcccccccaagatggtccgggatccagaactacgccggataaagctcccaagaagacttggggccaggatgctgggagcggcaaaggagggcagggaccacctacacgcaaaccgccacggcgtacttcttcccatctcccgtccagccccgctgcaggagattgcccgatccttgcaacccccgaaagccctccacccctggcccccgaaactcctgatgaggctgcctccgtcgcagctgatagtgatgtgcaggtcccaggacctgcggcctctcctaaacccctcggacgcctgagaccaccccgcgaaagtaaagtgactaggagattgcctggtgccagacctgacgccggtatgggaccgccttcagcagtggcagagaggcccaaagtgagcctgcattttgatactgagactgatggttatttctccgatggcgaaatgagtgattctgatgtggaggcggaagacggtggcgtgcagcggggaccacgtgaggctggtgcggaggaggttgttagaatgggagttcttgcatcatag

SEQ ID NO: 340135 - DNA, 2784 bp, Artificial Sequence
  derived and/or modified sequence
atacacagggggttggtgaatggtgccgaccgcggccatcgcagttggaggctattttttggggggggtgagtagcgtccatggagttactttgcgcccactcctagcggcaccggcttaggtcctgcgggccgaccccctcccgcgccggccccaggagctcccggcttcgggagcatccttcccgcgccggtccctgcagcggcgcgtagccgagggcagcgcccgtcaggggggcaccgcggagcaagatggaagagaagaggcgaaaatactccatcagcagtgacaactctgacaccactgacagtcatgcgacatctacatccgcatcaagatgctccaaactgcccagcagcaccaagtcgggctggccccgacagaacgaaaagaagccctccgaggttttccggacagacttgatcacagccatgaagatcccggactcataccagctcagcccggatgactactacatcctggcagacccatggcgacaggaatgggagaaaggtgtgcaggtgcctgccggggcagaggccatcccagagcccgtggtgaggatcctcccaccactggaaggcccccctgcccaggcatccccgagcagcaccatgcttggtgagggctcccagcctgattggccagggggcagccgctatgacttggacgagattgatgcctactggctggagctcatcaactcggagcttaaggagatggagaggccggagctggacgagctgacattagagcgtgtgctggaggagctggagaccctgtgccaccagaatatggccagggccattgagacgcaggaggggctgggcatcgagtacgacgaggatgttgtctgcgacgtgtgtcgctctcctgagggcgaggatggcaacgagatggtcttctgtgacaagtgcaacgtctgtgtgcatcaggcatgctacgggatcctcaaggtgcccacgggcagctggctgtgccggacgtgtgccctgggtgtccagccaaagtgcctgctctgccccaagcgaggaggagccttgaagcccactagaagtgggaccaagtgggtgcatgtcagctgtgccctatggattcctgaggtcagcatcggctgcccagagaagatggagcccatcaccaagatctcgcatatcccagccagccgctgggctctgtcctgcagcctctgcaaggaatgcacaggcacctgcatccagtgttccatgccttcctgcgtcacagcgttccatgtcacatgcgcctttgaccacggcctggaaatgcggactatattagcagacaacgatgaggtcaagttcaagtcattctgccaggagcacagtgacgggggcccacgtaatgagcccacatctgagcccacggaacccagccaggctggcgaggacctggaaaaggtgaccctgcgcaagcagcggctgcagcagctagaggaggacttctacgagctggtggagccggctgaggtggctgagcggctggacctggctgaggcactggtcgacttcatctaccagtactggaagctgaagaggaaagccaatgccaaccagccgctgctgacccccaagaccgacgaggtggacaacctggcccagcaggagcaggacgtcctctaccgccgcctgaagctcttcacccatctgcggcaggacctagagagggttagaaatctgtgctacatggtgacaaggcgcgagagaacgaaacacgccatctgcaaactccaggagcagatattccacctgcagatgaaacttattgaacaggatctgtgtcgagcaggcctgtccacctcattccccatcgatggcaccttcttcaacagctggctggcacagtcggtgcagatcacagcagagaacatggccatgagcgagtggccactgaacaatgggcaccgcgaggaccctgctccagggctgctgtcagaggaactgctgcaggacgaggagacactgctcagcttcatgcgggacccctcgctgcgacctggtgaccctgctaggaaggcccgaggccgcacccgcctgcctgccaagaagaaaccaccaccaccaccaccgcaggacgggcctggttcacggacgactccagacaaagcccccaagaagacctggggccaggatgcaggcagtggcaaggggggtcaagggccacctaccaggaagccaccacgtcggacatcttctcacttgccgtccagccctgcagccggggactgtcccatcctagccacccctgaaagccccccgccactggcccctgagaccccggacgaggcagcctcagtagctgctgactcagatgtccaagtgcctggccctgcagcaagccctaagcctttgggccggctccggccaccccgcgagagcaaggtaacccggagattgccgggtgccaggcctgatgctgggatgggaccaccttcagctgtggctgagaggcccaaggtcagcctgcattttgacactgagactgatggctacttctctgatggggagatgagcgactcagatgtagaggccgaggacggtggggtgcagcggggtccccgggaggcaggggcagaggaggtggtccgcatgggcgtactggcctcctaactcacccccttccctgtcccaggccctgccctggtccccccacaaggcctcagcccagtcacaactgccatttccagtctctgctgagtgtcccagaccctcgaggctgccactccgtcgtggttttatttttaatatagagagagttttgaattct

SEQ ID NO: 340136 - DNA, 2376 bp, Artificial Sequence
  derived and/or modified sequence
atggaggagaagaggaggaagtacagcatcagcagtgacaacagcgacaccacagacagccacgccaccagcaccagcgccagccgctgcagcaagctgcccagcagcaccaagagcggctggccccggcagaatgagaagaagcccagcgaggtgttcagaacagacctgatcacagccatgaagatcccagacagctaccagctgagcccagatgactactacatcctggccgacccctggaggcaggagtgggagaagggcgtgcaggtgcctgctggagctgaggccatccctgagcctgtggtgcgcatcctgccccccctggagggccccccagcccaggccagccccagcagcaccatgctgggggagggcagccagcctgactggccaggcggcagccgctatgacctggatgaaattgatgcctactggctggagctgatcaacagcgagctgaaggagatggagaggcctgagctggatgagctgaccctggagcgggtgctggaggagctggagaccctgtgccaccagaacatggcccgggccatcgagacccaggagggcctgggcatcgagtatgatgaagatgtggtgtgtgatgtgtgccgcagcccagaaggagaagatggaaatgagatggtgttctgtgacaagtgcaatgtgtgtgtgcaccaggcctgctacggcatcctgaaggtgcccaccggctcctggctgtgcaggacctgtgccctgggcgtgcagcccaagtgcctgctgtgccccaagagaggaggagccctgaagcccaccaggagcggcaccaagtgggtgcacgtgtcctgtgccctgtggatccctgaggtgtccatcggctgcccagagaagatggagcccatcaccaagatcagccacatcccagccagccgctgggccctgagctgcagcctgtgcaaggagtgcaccggcacctgcatccagtgcagcatgcccagctgtgtgacagccttccacgtgacctgtgcctttgaccacggcctggagatgaggaccatcctggccgacaatgatgaggtgaagttcaagagcttctgccaggagcacagtgatggcggccccagaaatgagcccaccagcgagcccacagagcccagccaggccggggaggacctggagaaggtgaccctgaggaagcagaggctgcagcagctggaggaggacttctatgagctggtggagcctgctgaggtggccgagcggctggacctggccgaggccctggtggacttcatctaccagtactggaagctgaagaggaaggccaatgccaaccagcccctgctgacccccaagacagatgaggtggacaacctggcccagcaggagcaggatgtgctgtaccgccgcctgaagctgttcacccacctgcggcaggacctggagcgggtgaggaacctgtgctacatggtgacccggcgggagaggaccaagcacgccatctgcaagctgcaggagcagatcttccacctgcagatgaagctgattgagcaggacctgtgccgggccggcctgagcaccagcttccccattgatggcaccttcttcaacagctggctggcccagagcgtgcagatcacagctgagaacatggccatgtctgagtggcccctgaacaacggccacagagaagatcctgcccctggcctgctgtctgaggagctgctgcaggatgaggagaccctgctgtccttcatgagggaccccagcctgcggcctggggaccctgccaggaaggcccggggccgcacccggctgcctgccaagaagaagcccccacctcctccaccccaggacggccctggcagcaggaccaccccagacaaggcccccaagaagacctggggccaggatgctggcagcggcaagggcggccagggcccccccaccaggaagccacccaggaggaccagcagccacctgcccagcagccctgctgctggggactgccccatcctggccaccccagagagccccccacccctggcccctgagaccccagatgaagctgcctctgtggccgctgacagtgatgtgcaggtgcccggccctgctgccagccccaagcccctgggccgcctgcggcccccccgggagagcaaggtgacccggcggctgcccggggcccggccagatgctggcatgggcccccccagcgctgtggccgagcggcccaaggtgtccctgcactttgacacagaaacagatggctacttcagtgatggagagatgtctgacagtgatgtggaggctgaagatggcggcgtgcagaggggcccccgggaggccggggctgaggaggtggtgaggatgggcgtgctggccagctag

SEQ ID NO: 340137 - DNA, 2376 bp, Artificial Sequence
  derived and/or modified sequence
atggaggagaagcggcggaagtacagcatcagcagcgacaacagcgacaccacagattctcatgctacgagtaccagtgcctcccgttgcagcaagctgcctagctccacaaaatcggggtggccgaggcagaacgagaaaaagcccagtgaggtgtttaggaccgatctgatcacagccatgaaaatccctgacagctaccagctgagcccagacgactactatatcctcgctgacccatggagacaggaatgggagaaaggagtgcaggtgcctgctggggccgaagctatccccgagccggttgtgcggattttgccgccgttagaaggcccccctgcccaggccagcccatcctccacaatgctgggggaaggatcccaacccgactggcctggaggtagcagatacgatctggacgagattgacgcatactggctggaattaatcaactctgagctgaaggagatggagcgaccagagctggatgagctgacactggagcgagtgttggaggagctcgagactctgtgtcaccagaatatggctagagccatagaaacacaagagggtctggggatagaatatgacgaggatgtcgtgtgtgatgtctgccggtcaccggagggcgaagatgggaatgaaatggttttttgtgacaaatgtaatgtctgtgtgcatcaggcctgttacgggatcttaaaagtgcctaccggctcatggctatgtcgcacttgtgcgcttggcgtgcagccaaagtgtcttctgtgtcccaaaaggggcggggctctgaagccaacccggtccggcactaaatgggttcatgtttcttgtgccctctggataccagaagtgagtatcggatgcccagaaaagatggagcccataacaaagattagtcacattcccgcttcccggtgggcccttagttgcagtctgtgtaaagaatgtactggtacttgcatacaatgcagtatgcccagctgtgtgacggcattccacgtcacttgcgccttcgatcacggccttgagatgcggactatcctcgcagataatgatgaggtgaaatttaagagtttttgccaggagcattcggatgggggccctagaaatgaaccgacatctgagcccactgaaccttcccaggcaggcgaggaccttgaaaaagttactctgcggaagcagagactgcagcaactggaagaagacttttatgaactggtggaacctgccgaggtggccgagcgattagacctggcagaagccctagtggatttcatctaccagtactggaagcttaaaaggaaagcgaacgcaaaccagccgcttcttaccccaaagaccgacgaggtagacaatctggcgcaacaggagcaagatgtgctctataggcgactaaaactgttcacacatcttaggcaggacctcgagcgagttcgaaacttgtgttatatggtgactagacgtgaacggacaaagcacgcgatctgcaagctgcaggagcaaatttttcatctgcagatgaagctgatcgagcaggacctttgccgcgcggggctttccacttcgttcccgattgatggcactttctttaatagctggttagcccaaagcgtgcagataacagccgagaacatggccatgtctgagtggcctctgaataatggacacagagaggacccggctcccggactgttgagtgaggaactcctgcaggacgaggaaactctgctctcttttatgagggaccccagtctgaggcctggggatcccgcaaggaaagctcggggtcgtacgcgcctgcctgcaaagaaaaaacctccaccacctccgccgcaggatggtccaggatcacgcacgacaccagacaaggctccaaagaaaacctggggacaggatgctggctcaggaaaaggaggccagggaccccccactcgaaagccaccacggcgcacatcctctcatttgcccagtagccccgccgctggggactgcccaattctcgccactccggagtcgccgccacctctggcccccgagacgcccgacgaagctgccagtgtcgcggctgatagcgacgtccaggttcccggaccggctgcaagcccaaagcccctcggaaggcttcggcctcctcgggaaagcaaggtaacccgccgtctgccgggtgctcgacctgacgcgggtatgggcccaccctccgctgtcgctgaaaggcccaaagtgagcctgcactttgacacggaaacagacggctactttagcgatggtgagatgtccgactctgacgtcgaagcggaagacggcggcgtccagaggggtccaagggaggccggcgccgaagaagtagtccggatgggtgtcttggctagctag

SEQ ID NO: 340138 - DNA, 2376 bp, Artificial Sequence
  derived and/or modified sequence
atggaggagaaaaggagaaagtactccatctcatcggataattccgacactacagactcccacgcgacctctacgtcagcctctaggtgttcaaagcttcccagcagcactaaatctgggtggccccgacagaatgaaaaaaaaccttccgaggtgtttaggacagacctgatcaccgccatgaaaatccctgactcatatcaactctctcccgatgactattatatcctggcggatccctggcggcaggagtgggaaaagggggtccaagttcctgcaggtgctgaagcgattccagaacccgtggttcggatactgccccctttggagggtccacccgcacaggcatcacccagctccaccatgctgggtgaaggctctcagccagattggccaggcggttctcgatacgatctcgatgaaattgacgcctattggctagagttgatcaattctgaactgaaggagatggagagaccagagctggacgagctgacactggagagggttttggaggagctcgagaccctgtgccaccaaaatatggcgagggcaatcgaaacccaggaaggtctgggcatagaatacgacgaagatgtggtctgcgatgtgtgccggtccccggagggggaggatggcaacgagatggtgttttgtgataagtgtaatgtttgtgtccaccaagcatgctacgggatcctgaaggtaccgacaggctcctggctgtgtcgcacctgtgctctaggagtgcagccgaaatgtctgctgtgtccaaaacgcggaggagcgttaaagcctacgcgttcaggtacaaaatgggttcatgtctcctgtgccctctggatccccgaggtttcgatcgggtgtcccgaaaagatggagcccatcaccaaaatctcccatatccctgccagccggtgggctctgtcgtgctctctgtgtaaagagtgcaccgggacatgtattcagtgtagcatgcccagttgtgtcactgcctttcacgtcacatgtgccttcgaccatggacttgaaatgagaacaattctcgcggacaatgatgaagtgaaatttaagtctttttgtcaggagcatagtgatggaggcccaaggaacgaacccaccagtgagcccactgaaccctcccaggccggagaggatctggaaaaggtgacactgcgcaaacagaggctgcagcagttagaggaagacttttatgagctagtcgagccagcagaggtcgccgagcgtctcgacctggccgaggcccttgtggatttcatttatcaatactggaaacttaaacgcaaggctaatgctaaccagcctctgttgaccccgaagaccgatgaagtcgataacctggcccaacaggaacaagatgtgctctatcggaggctgaagctgtttactcaccttcgccaggacctcgagagggtcagaaacctctgctacatggtgactaggagggagcggacaaaacacgcaatctgtaagctccaggagcagatcttccacctacagatgaaactaattgagcaggacctgtgtcgggcaggtctcagcacatcttttcctatcgatgggactttctttaatagttggctggcccagtcagtgcagatcaccgccgagaatatggccatgagcgagtggcctctaaataatggccatcgagaagacccagccccaggccttcttagcgaggagcttctgcaggatgaggaaacccttctgtcatttatgcgggacccttctttacgccctggagatccggctagaaaggccagaggcagaacaagactccccgcaaaaaagaagcctcctcctcctcctccacaggacgggccaggatcacgtaccacccccgacaaagcaccaaaaaagacctggggtcaggatgccggatctggtaagggtggacagggcccacccactcgcaaacctcctagaagaacttctagtcatctgccatcttctccagcggctggggattgcccaatcctggccactccggaaagcccacctccgctcgcaccagaaactcccgatgaggccgcaagtgtggccgcagactctgatgtgcaggttcctggcccagcggcatctccaaagcctcttggcagattgaggccaccccgtgagtctaaggtaactaggcgtctgcctggcgctagacccgatgccggaatgggacctccatccgctgttgcagagaggccaaaggtgagccttcactttgatacagaaaccgacggctatttcagcgacggagagatgtccgacagtgatgttgaggctgaggacggaggtgttcagcggggtccgagagaagcaggcgctgaggaggtggttcgcatgggtgtacttgcctcctag

SEQ ID NO: 340139 - DNA, 2376 bp, Artificial Sequence
  derived and/or modified sequence
atggaggagaagagaagaaagtacagcatcagcagcgacaacagcgacaccaccgacagccacgccaccagcaccagcgccagcagatgcagcaagctgcccagcagcaccaagagcggctggcccagacagaacgagaagaagcccagcgaggtgttcagaaccgacctgatcaccgccatgaagatccccgacagctaccagctgagccccgacgactactacatcctggccgacccctggagacaggagtgggagaagggcgtgcaggtgcccgccggcgccgaggccatccccgagcccgtggtgagaatcctgccccccctggagggcccccccgcccaggccagccccagcagcaccatgctgggcgagggcagccagcccgactggcccggcggcagcagatacgacctggacgagatcgacgcctactggctggagctgatcaacagcgagctgaaggagatggagagacccgagctggacgagctgaccctggagagagtgctggaggagctggagaccctgtgccaccagaacatggccagagccatcgagacccaggagggcctgggcatcgagtacgacgaggacgtggtgtgcgacgtgtgcagaagccccgagggcgaggacggcaacgagatggtgttctgcgacaagtgcaacgtgtgcgtgcaccaggcctgctacggcatcctgaaggtgcccaccggcagctggctgtgcagaacctgcgccctgggcgtgcagcccaagtgcctgctgtgccccaagagaggcggcgccctgaagcccaccagaagcggcaccaagtgggtgcacgtgagctgcgccctgtggatccccgaggtgagcatcggctgccccgagaagatggagcccatcaccaagatcagccacatccccgccagcagatgggccctgagctgcagcctgtgcaaggagtgcaccggcacctgcatccagtgcagcatgcccagctgcgtgaccgccttccacgtgacctgcgccttcgaccacggcctggagatgagaaccatcctggccgacaacgacgaggtgaagttcaagagcttctgccaggagcacagcgacggcggccccagaaacgagcccaccagcgagcccaccgagcccagccaggccggcgaggacctggagaaggtgaccctgagaaagcagagactgcagcagctggaggaggacttctacgagctggtggagcccgccgaggtggccgagagactggacctggccgaggccctggtggacttcatctaccagtactggaagctgaagagaaaggccaacgccaaccagcccctgctgacccccaagaccgacgaggtggacaacctggcccagcaggagcaggacgtgctgtacagaagactgaagctgttcacccacctgagacaggacctggagagagtgagaaacctgtgctacatggtgaccagaagagagagaaccaagcacgccatctgcaagctgcaggagcagatcttccacctgcagatgaagctgatcgagcaggacctgtgcagagccggcctgagcaccagcttccccatcgacggcaccttcttcaacagctggctggcccagagcgtgcagatcaccgccgagaacatggccatgagcgagtggcccctgaacaacggccacagagaggaccccgcccccggcctgctgagcgaggagctgctgcaggacgaggagaccctgctgagcttcatgagagaccccagcctgagacccggcgaccccgccagaaaggccagaggcagaaccagactgcccgccaagaagaagcccccccccccccccccccaggacggccccggcagcagaaccacccccgacaaggcccccaagaagacctggggccaggacgccggcagcggcaagggcggccagggcccccccaccagaaagccccccagaagaaccagcagccacctgcccagcagccccgccgccggcgactgccccatcctggccacccccgagagccccccccccctggcccccgagacccccgacgaggccgccagcgtggccgccgacagcgacgtgcaggtgcccggccccgccgccagccccaagcccctgggcagactgagaccccccagagagagcaaggtgaccagaagactgcccggcgccagacccgacgccggcatgggcccccccagcgccgtggccgagagacccaaggtgagcctgcacttcgacaccgagaccgacggctacttcagcgacggcgagatgagcgacagcgacgtggaggccgaggacggcggcgtgcagagaggccccagagaggccggcgccgaggaggtggtgagaatgggcgtgctggccagctag

SEQ ID NO: 340140 - protein, 790 aa, Artificial Sequence
  derived and/or modified sequence
MEEKRRKYSISSDNSDTTDSHATSTSASRCSKLPSSTKSGWPRQNEKKPSEVFRTDLITAMKIPDSYQLSPDDYYILADPWRQEWEKGVQVPAGAEAIPEPVVRILPPLEGPPAQASPSSTMLGEGSQPDWPGGSRYDLDEIDAYWLELINSELKEMERPELDELTLERVLEELETLCHQNMARAIETQEGLGIEYDEDVVCDVCRSPEGEDGNEMVFCDKCNVCVHQACYGILKVPTGSWLCRTCALGVQPKCLLCPKRGGALKPTRSGTKWVHVSCALWIPEVSIGCPEKMEPITKISHIPASRWALSCSLCKECTGTCIQCSMPSCVTAFHVTCAFDHGLEMRTILADNDEVKFKSFCQEHSDGGPRNEPTSEPTEPSQAGEDLEKVTLRKQRLQQLEEDFYELVEPAEVAERLDLAEALVDFIYQYWKLKRKANANQPLLTPKTDEVDNLAQQEQDVLYRRLKLFTHLRQDLERVRNLCYMVTRRERTKHAICKLQEQIFHLQMKLIEQDLCRGLSTSFPIDGTFFNSWLAQSVQITAENMAMSEWPLNNGHREDPAPGLLSEELLQDEETLLSFMRDPSLRPGDPARKARGRTRLPAKKKPPPPPPQDGPGSRTTPDKAPKKTWGQDAGSGKGGQGPPTRKPPRRTSSHLPSSPAAGDCPILATPESPPPLAPETPDEAASVAADSDVQVPGPAASPKPLGRLRPPRESKVTRRLPGARPDAGMGPPSAVAERPKVSLHFDTETDGYFSDGEMSDSDVEAEDGGVQRGPREAGAEEVVRMGVLAS

SEQ ID NO: 340141 - DNA, 6463 bp, Artificial Sequence
  derived and/or modified sequence
ctctcttgctcgctcgctccctctctctcctgctggctgcctgttctaggaagccagcgcggagaggggggggatgcacagcacaggggagagagattgcgcatgttggtcagtcgtgttttaaagagtacagtgcggggaggctgagaggggcgcatgcaacaacaacttttggaaggatggaagagaagaggcgaaaatactccatcagcagtgacaactctgacaccactgacagtcatgcgacatctacatccgcatcaagatgctccaaactgcccagcagcaccaagtcgggctggccccgacagaacgaaaagaagccctccgaggttttccggacagacttgatcacagccatgaagatcccggactcataccagctcagcccggatgactactacatcctggcagacccatggcgacaggaatgggagaaaggtgtgcaggtgcctgccggggcagaggccatcccagagcccgtggtgaggatcctcccaccactggaaggcccccctgcccaggcatccccgagcagcaccatgcttggtgagggctcccagcctgattggccagggggcagccgctatgacttggacgagattgatgcctactggctggagctcatcaactcggagcttaaggagatggagaggccggagctggacgagctgacattagagcgtgtgctggaggagctggagaccctgtgccaccagaatatggccagggccattgagacgcaggaggggctgggcatcgagtacgacgaggatgttgtctgcgacgtgtgtcgctctcctgagggcgaggatggcaacgagatggtcttctgtgacaagtgcaacgtctgtgtgcatcaggcatgctacgggatcctcaaggtgcccacgggcagctggctgtgccggacgtgtgccctgggtgtccagccaaagtgcctgctctgccccaagcgaggaggagccttgaagcccactagaagtgggaccaagtgggtgcatgtcagctgtgccctatggattcctgaggtcagcatcggctgcccagagaagatggagcccatcaccaagatctcgcatatcccagccagccgctgggctctgtcctgcagcctctgcaaggaatgcacaggcacctgcatccagtgttccatgccttcctgcgtcacagcgttccatgtcacatgcgcctttgaccacggcctggaaatgcggactatattagcagacaacgatgaggtcaagttcaagtcattctgccaggagcacagtgacgggggcccacgtaatgagcccacatctgagcccacggaacccagccaggctggcgaggacctggaaaaggtgaccctgcgcaagcagcggctgcagcagctagaggaggacttctacgagctggtggagccggctgaggtggctgagcggctggacctggctgaggcactggtcgacttcatctaccagtactggaagctgaagaggaaagccaatgccaaccagccgctgctgacccccaagaccgacgaggtggacaacctggcccagcaggagcaggacgtcctctaccgccgcctgaagctcttcacccatctgcggcaggacctagagagggttagaaatctgtgctacatggtgacaaggcgcgagagaacgaaacacgccatctgcaaactccaggagcagatattccacctgcagatgaaacttattgaacaggatctgtgtcgaggcctgtccacctcattccccatcgatggcaccttcttcaacagctggctggcacagtcggtgcagatcacagcagagaacatggccatgagcgagtggccactgaacaatgggcaccgcgaggaccctgctccagggctgctgtcagaggaactgctgcaggacgaggagacactgctcagcttcatgcgggacccctcgctgcgacctggtgaccctgctaggaaggcccgaggccgcacccgcctgcctgccaagaagaaaccaccaccaccaccaccgcaggacgggcctggttcacggacgactccagacaaagcccccaagaagacctggggccaggatgcaggcagtggcaaggggggtcaagggccacctaccaggaagccaccacgtcggacatcttctcacttgccgtccagccctgcagccggggactgtcccatcctagccacccctgaaagccccccgccactggcccctgagaccccggacgaggcagcctcagtagctgctgactcagatgtccaagtgcctggccctgcagcaagccctaagcctttgggccggctccggccaccccgcgagagcaaggtaacccggagattgccgggtgccaggcctgatgctgggatgggaccaccttcagctgtggctgagaggcccaaggtcagcctgcattttgacactgagactgatggctacttctctgatggggagatgagcgactcagatgtagaggccgaggacggtggggtgcagcggggtccccgggaggcaggggcagaggaggtggtccgcatgggcgtactggcctcctaactcacccccttccctgtcccaggccctgccctggtccccccacaaggcctcagcccagtcacaactgccatttccagtctctgctgagtgtcccagaccctcgaggctgccactccgtcgtggttttatttttaatatagagagagttttgaattctacactgttgtctttcctctgtgctggcctaggacattaggattccttccacggctccggccgctaggaccctgccaggtcccgcgcaccatccctgccctgcccacgtggtattgctgggctcctggctagatgcaagcaaggtggacaagagctcaggactccagcccactgccactgggtgacacagactgtcgtttgggcattatttcatggcagatgggccagtccagggcctaccccgccttgcccccagatcccactggggtccatttggggggtcctgctacactccaccgatccccaaggaagtataataaacgatacccagccagagtctactcactgtcacaagcacaacgagtttatatgagaaagcactgagggggtgcagagggcccgctagttccaggggaactgaaagctgttcctgatcagcccgtatcatctgaggcctgcctgcccaccctgccaccctcccctcccttgctgctctgcccctgccagtgcccagcccagcggctctgggaaggggttcccagaatccctcctgagctgtgccatttactcaggggactcccaaacagccagctgccagtgcaggtggagggctgtaggggagggccagtgcccagacagggtcatggggctcagaccagcccactgtagagaatcactctgaggctccaacttccttccttccttcggggccagtctcggccgaagtctggtcacgctcagacagagctgaccagaccagaccgtttgccttttcaagtttcctagtcctgctacaagatgagcttcttccgtggtttccttttggaaactcctccttccaacaagcagtgggatcccggggcccagggcgggccggtgttggccgctggggctgttgtaagtcttgctggatgttcccctgttcctgagccttaacccctcgcacagccatccccccccccgtcctgccatccccccccgccgtcctgccttccccaccccacccttaggtcccaggtagttgctctgaagagtttcagtagagtggccccagggtgatagctcagggaacaacaaaaaaggaattccgtgaaaacatttttttttctttgatgaattactcctgggtcacttccaccactggtaaagccagaacttctccaaaaagaaccttgcaaaaagtccagtgaatcagtcgaatcattctgtggatgccaaagaatattttgaccataatacagcacagcctggacctgacaacttgtcatttggacttttttttaaatggagttctttagcaacaaagtatagaaacatgttcattgcacacacccaaggagaagagctcaagcgcttggaagaggatgctttgctgctgctgaagtgtacctgggtgttagatttcagatcctgggctgagcccactgtgagctttcctaaactgtgagactcacagaggggaaagatactgacggtgaaaccagcatggaaaacgtctttaccatgtggttccctcctccccaaatacataaagcaaataagcaggatggggaacagcttgaccttcatccacccctaactccaaaactatcaaggtacgacagtggcattgtcatcgacactcaatttcatgtgaattttagcaaaacaggaaacaaagataatgactcagttcagaggatcggacaaatgtgtctagtccgggtggactcggagggagtggggtgggcttcaaggattctgggcgttgggatggcatgagctaccctgtagagtttagtctgcctgcccgccttggtagtagtgaccagtcagtgtcagcatcagtgtcccaaccccagtctctgtttactgcctttgaacagaacttcttccttccccatgctttgggtcacctcgggctgcaaccctgtctgtgccagattgcccggtctgaccctgcaggaagcaaagaggtgagcttaaagaacaaccaaactctgccaggggtcccagaaagcccagggtccagcagtctcagcacttggccccttgccccttcacaccatcctggggcaggggctgggcctccctggtggcaggggtgggtggagaattagggagagggtgcaacgagtctggccccttgcctcgggctggctggtgttcttccaagagcctctgctcacattgttggcctctggattctggcccttcttcattggctgttgctttggactggactgttgctgagcctgtgtcctgcagaacccagatgtctgttaggctggctggctgctgcgaggggaggggggtggcctttcatttggggtgccctttcactcccaggccaagccctggagcaatcttcttcaggcagctgtctccacctccaggatgtccagcaggctgcaaggagaaggatgccagccacccatcctcccccagttcccagcctttcccctgttggtcacagccgcttctgtctttttccggtctactgtccccagtgtagagggctttgctgtccctgagactgaggcaggttccttttccaggtcagaggtggaggtagatctttctctcaaccacatctgcctccacacacagctcctccgcagggaaggagaagctgctctgtaactcattctggctatcgtcccccttctcactgacctgaccgcccaccacctccttccccctcatcacatgacaaaggataatgtgcaagaaaagtatttttatgtatcataaatgtattttgaaacaaatgagaagaagaaaggtagaagggtttattttattaaatgagcctgacttagtgacagtgtgtgagcatttgcaatgtaagggcctcagcttccttggagaagccaccccaggtttccagacatagatgttgaattgtttgtggggggtgtgccaggccacgtctcgtgtgtccgtatgcaggcatgcctgtgtatactgtgtatgggcacactgggactagctgggacaattcctagagattcaactgcccaattctaaccaacattggcagcggctgaacttggcatttccttgctaactgccagatgtggccaacctttgtccatatgcaaaccactgaaaaatgatctggatttctatagcaaggcccttggggagggcactctcccatgcccttggcctcgctggccacattggccaatgagccagggctggagtctgagacctttggttgttctttaaggcacctcctgccactttctccctcagaggcacaaacactttgtgttccacgtcagtttgaggggacggtggggggatgatatgaatgtcacaggaggagacaccttctgtctttgtttcaaagaaagtgatgtgccatttgttaatatacaagagaaatattgaaaatatattgaaaagagcaattttaaattatttttggcttatgttgcaatatttattttcttgtattagaaaagattcctttgtagagaaaaaatgtatttttcattaacgcaaagacctatttctcctttttgtacattgtccatgtgcgcaacccttaacgagcaatagaatgtatggtcacctgggtgtggccagtgcccgctgtgccctgcatgattctgtgttgccgctgctgcatagttcccagccccatcctgtcctgctcactcatgggggcttccagaccccggccccaccagggcttgtgtcatagggagccctttgcactcctcgtgtgttggcaaacgcagttaataaagcagtgttttctgtgc

SEQ ID NO: 340142 - DNA, 2373 bp, Artificial Sequence
  derived and/or modified sequence
atggaggagaaacggcgtaagtattccattagctccgataattctgacacgaccgactcccatgctacttcgaccagtgcatccagatgctcgaagctcccctcttcaaccaagtctggctggcctcgccagaacgagaagaaaccttccgaagtcttccgaacagacttaataaccgccatgaagattcccgatagttaccagttgagtcctgacgattattatatactcgctgacccctggcgccaggaatgggaaaaaggagtacaggttcctgccggagcggaagccatccctgagcccgtggtgcggattcttccacctctggagggcccaccggcccaggcctctccaagcagcactatgctgggcgagggctcccagccagactggcctggcggaagcaggtacgacctggacgagatcgatgcttattggctagagctcatcaattcagagctcaaggagatggagcggccagagctggacgagctgaccctcgagcgggttttagaagaattagagacgctgtgccatcagaatatggcccgggctattgagactcaagaggggttaggaatagagtacgacgaagatgtggtctgcgatgtgtgcagatctcccgagggagaagatggcaacgagatggtgttttgtgataagtgcaacgtctgcgtgcaccaggcttgctacggaatcctgaaggtgcctaccggttcttggctgtgtcgcacgtgcgccctgggagtccagccaaaatgtcttctgtgtcccaaacgtggaggggccctcaagcctacccggagcggaactaaatgggtacatgtgtcttgcgcactgtggatcccggaagtatccattggatgcccggagaaaatggagcccataactaagatctcgcacattcccgcatcccggtgggcgctgtcctgctcactctgcaaagagtgcaccgggacgtgcatccaatgctccatgccttcttgcgtgacggcttttcatgtgacctgtgccttcgaccacggcctggaaatgaggactatcctggctgataacgacgaggtaaaatttaagtccttttgccaggaacattccgatggtggcccaaggaacgaacccactagtgaacccaccgaaccttcacaggccggcgaggatctggagaaggtgaccctgagaaagcaaaggttgcagcagctggaggaggatttttatgagcttgttgaacctgctgaggttgctgagagattggacttggcagaggccttggtggactttatttatcagtattggaaactgaagcggaaggcgaacgccaaccagccactgctcacccctaagacagacgaagtggataatcttgcacagcaggaacaggatgtgctgtaccgtcgcctcaaactgttcacacacctgcgccaggaccttgagcgcgtgcgcaacctctgctacatggtgactagacgcgaaaggacaaagcatgccatttgtaagcttcaggagcagatctttcacctccagatgaagctgatcgagcaagatctgtgccgaggactgtctactagttttccaatcgacggaaccttctttaatagctggctggcccagtcagtgcaaataaccgccgaaaacatggccatgagtgagtggcccttgaataacgggcacagggaggaccccgcacctggtctgctgtctgaagagttgctgcaggacgaggagactctgctgtcctttatgcgggatccttcacttcgacccggcgacccggcccgtaaggcaagagggcggactagattgccagcgaaaaagaaacccccaccacccccaccacaagatggtccgggttcccgaacaactccggacaaggcccccaagaagacctggggccaggacgcaggcagtggaaaaggtgggcagggaccaccaactagaaagccacccagacgcactagctctcacctgccaagtagccctgccgctggagactgcccaattcttgccacccccgagtcaccgccgcctctggccccggagacccccgatgaggctgcatcagtcgctgccgattcagatgtacaggtgcccggcccggccgcaagtccaaagccactgggccgcctgcgtccgccacgggagtccaaggtgactcggcggttgcccggagcccggcccgatgcaggcatgggaccccccagtgcagtggcagaaaggccaaaggtgagcctccatttcgacacggaaactgacggttacttttcggacggcgagatgtccgactccgatgtggaagcagaggacggaggggtccaacggggaccaagagaggcaggtgcagaggaggtggtcaggatgggggtgctcgcctcatag

SEQ ID NO: 340143 - DNA, 768 bp, Artificial Sequence
  derived and/or modified sequence
atggaagaaaaaaggcggaaatactcgatctcatctgacaattccgatacaactgattcacatgcaacttcaaccagcgctagtcgctgctcaaaactgccaagcagtacgaaaagcggctggccacgacagaacgaaaaaaaaccttccgaggtctttcgtaccgacttaattactgccatgaagattccagactcttatcaattgagtccagatgattattatatcctggccgatccgtggcgccaggagtgggagaaaggagtgcaagtgcctgccggcgcggaggcgatcccagagccggtagttcggatcctgcctcctttggaaggtcctcccgcccaggccagcccctccagtaccatgctgggggagggctcacagccggattggcccgggggttcacgctacgacctcgatgaaatagacgcctactggctggaattaattaactccgagctgaaagaaatggagaggcctgagctcgatgagttgactttagagagggtgttggaggagctcgagaccctgtgccatcagaatatggcgcgcgcaatcgagacacaagaaggcttggggatcgagtacgacgaggatgtggtttgtgacgtgtgcaggtctcccgagggggaggacggaaatgaaatggtcttctgtgataagtgcaacgtctgtgtgcaccaggcatgctacggtattctgaaggtgccgacagggagctggctgtgtcggacatgcgctctgggggtgcagcctaagtgcctctag

SEQ ID NO: 340144 - DNA, 450 bp, Artificial Sequence
  derived and/or modified sequence
atggaggaaaagcgcaggaagtactctatttcctcagacaatagcgatacaacagacagccacgccacatctactagcgcctcccggtgctccaagcttccttccagcacaaaatctgggtggcctcggcagaacgagaagaagccgagcgaggttttccgcacagacctgatcaccgccatgaaaatcccggattcatatcagctttcaccagacgactactatatcttagccgatccttggcgccaggagtgggagaaaggggttcaggtccctgccggagctgaggcaatccccgagccggtggttagaattttacctcccctggaaggccctccagctcaggcaagccctagcagcacaatgcttggagaggggagccagccagactggcccggagggagccgctacgatctggatgaaattgatgcttattggctagagctctag

SEQ ID NO: 340145 - DNA, 887 bp, Artificial Sequence
  derived and/or modified sequence
cccctctcccggcccggtgcacgcgggcgctgcacgcgggggcagcatgctcggctcctggggttggaggctctgcacaaattagacagtttttttggaggggcgggggacaccctttccagatggaagagaagaggcgaaaatactccatcagcagtgacaactctgacaccactgacagtcatgcgacatctacatccgcatcaagatgctccaaactgcccagcagcaccaagtcgggctggccccgacagaacgaaaagaagccctccgaggttttccggacagacttgatcacagccatgaagatcccggactcataccagctcagcccggatgactactacatcctggcagacccatggcgacaggaatgggagaaaggtgtgcaggtgcctgccggggcagaggccatcccagagcccgtggtgaggatcctcccaccactggaaggcccccctgcccaggcatccccgagcagcaccatgcttggtgagggctcccagcctgattggccagggggcagccgctatgacttggacgagattgatgcctactggctggagctcatcaactcggagcttaaggagatggagaggccggagctggacgagctgacattagagcgtgtgctggaggagctggagaccctgtgccaccagaatatggccagggccattgagacgcaggaggggctgggcatcgagtacgacgaggatgttgtctgcgacgtgtgtcgctctcctgagggcgaggatggcaacgagatggtcttctgtgacaagtgcaacgtctgtgtgcatcaggcatgctacgggatcctcaaggtgcccacgggcagctggctgtgccggacgtgtgccctgggtgtccagccaaagtgcctg

SEQ ID NO: 340146 - DNA, 567 bp, Artificial Sequence
  derived and/or modified sequence
aacagacccaaggccccgccaccgccggctagcagcccgacagcccgcccgcctggcgagcgcaggctcttcttccagaaactgcgaggatccgagcgtactgtttgtgcaccacaagatggaagagaagaggcgaaaatactccatcagcagtgacaactctgacaccactgacagtcatgcgacatctacatccgcatcaagatgctccaaactgcccagcagcaccaagtcgggctggccccgacagaacgaaaagaagccctccgaggttttccggacagacttgatcacagccatgaagatcccggactcataccagctcagcccggatgactactacatcctggcagacccatggcgacaggaatgggagaaaggtgtgcaggtgcctgccggggcagaggccatcccagagcccgtggtgaggatcctcccaccactggaaggcccccctgcccaggcatccccgagcagcaccatgcttggtgagggctcccagcctgattggccagggggcagccgctatgacttggacgagattgatgcctactggctggagctcat

SEQ ID NO: 340147 - DNA, 2373 bp, Artificial Sequence
  derived and/or modified sequence
atggaggagaagaggaggaagtacagcatcagcagtgacaacagcgacaccacagacagccacgccaccagcaccagcgccagccgctgcagcaagctgcccagcagcaccaagagcggctggccccggcagaatgagaagaagcccagcgaggtgttcagaacagacctgatcacagccatgaagatcccagacagctaccagctgagcccagatgactactacatcctggccgacccctggaggcaggagtgggagaagggcgtgcaggtgcctgctggagctgaggccatccctgagcctgtggtgcgcatcctgccccccctggagggccccccagcccaggccagccccagcagcaccatgctgggggagggcagccagcctgactggccaggcggcagccgctatgacctggatgaaattgatgcctactggctggagctgatcaacagcgagctgaaggagatggagaggcctgagctggatgagctgaccctggagcgggtgctggaggagctggagaccctgtgccaccagaacatggcccgggccatcgagacccaggagggcctgggcatcgagtatgatgaagatgtggtgtgtgatgtgtgccgcagcccagaaggagaagatggaaatgagatggtgttctgtgacaagtgcaatgtgtgtgtgcaccaggcctgctacggcatcctgaaggtgcccaccggctcctggctgtgcaggacctgtgccctgggcgtgcagcccaagtgcctgctgtgccccaagagaggaggagccctgaagcccaccaggagcggcaccaagtgggtgcacgtgtcctgtgccctgtggatccctgaggtgtccatcggctgcccagagaagatggagcccatcaccaagatcagccacatcccagccagccgctgggccctgagctgcagcctgtgcaaggagtgcaccggcacctgcatccagtgcagcatgcccagctgtgtgacagccttccacgtgacctgtgcctttgaccacggcctggagatgaggaccatcctggccgacaatgatgaggtgaagttcaagagcttctgccaggagcacagtgatggcggccccagaaatgagcccaccagcgagcccacagagcccagccaggccggggaggacctggagaaggtgaccctgaggaagcagaggctgcagcagctggaggaggacttctatgagctggtggagcctgctgaggtggccgagcggctggacctggccgaggccctggtggacttcatctaccagtactggaagctgaagaggaaggccaatgccaaccagcccctgctgacccccaagacagatgaggtggacaacctggcccagcaggagcaggatgtgctgtaccgccgcctgaagctgttcacccacctgcggcaggacctggagcgggtgaggaacctgtgctacatggtgacccggcgggagaggaccaagcacgccatctgcaagctgcaggagcagatcttccacctgcagatgaagctgattgagcaggacctgtgccggggcctgagcaccagcttccccattgatggcaccttcttcaacagctggctggcccagagcgtgcagatcacagctgagaacatggccatgtctgagtggcccctgaacaacggccaccgggaggaccctgcccctggcctgctgtctgaggagctgctgcaggatgaggagaccctgctgtccttcatgagggaccccagcctgcggcctggggaccctgccaggaaggcccggggccgcacccggctgcctgccaagaagaagcccccacctcctccaccccaggacggccctggcagcaggaccaccccagacaaggcccccaagaagacctggggccaggatgctggcagcgggaaaggaggccagggcccccccaccaggaagccacccaggaggaccagcagccacctgcccagcagccctgctgctggggactgccccatcctggccaccccagagagccccccacccctggcccctgagaccccagatgaggccgcctctgtggccgctgacagtgatgtgcaggtgcccggccctgctgccagccccaagcccctgggccgcctgcggcccccccgggagagcaaggtgacccggcggctgcccggggcccggccagatgctggcatgggccccccatctgctgtggccgagcggcccaaggtgtccctgcactttgacacagaaacagatggctacttcagtgatggagagatgtctgacagtgatgtggaggccgaggatggaggagtgcagaggggcccccgggaggccggggctgaggaggtggtgaggatgggcgtgctggccagctag

SEQ ID NO: 340148 - DNA, 768 bp, Artificial Sequence
  derived and/or modified sequence
atggaggagaagaggaggaagtacagcatcagcagtgacaacagcgacaccacagacagccacgccaccagcaccagcgccagccgctgcagcaagctgcccagcagcaccaagagcggctggccccggcagaatgagaagaagcccagcgaggtgttcagaacagacctgatcacagccatgaagatcccagacagctaccagctgagcccagatgactactacatcctggccgacccctggaggcaggagtgggagaagggcgtgcaggtgcctgctggagctgaggccatccctgagcctgtggtgcgcatcctgccccccctggagggccccccagcccaggccagccccagcagcaccatgctgggggagggcagccagcctgactggccaggcggcagccgctatgacctggatgaaattgatgcctactggctggagctgatcaacagcgagctgaaggagatggagaggcctgagctggatgagctgaccctggagcgggtgctggaggagctggagaccctgtgccaccagaacatggcccgggccatcgagacccaggagggcctgggcatcgagtatgatgaagatgtggtgtgtgatgtgtgccgcagcccagaaggagaagatggaaatgagatggtgttctgtgacaagtgcaatgtgtgtgtgcaccaggcctgctacggcatcctgaaggtgcccaccggctcctggctgtgcaggacctgtgccctgggcgtgcagcccaagtgcctgtag

SEQ ID NO: 340149 - DNA, 450 bp, Artificial Sequence
  derived and/or modified sequence
atggaggagaagaggaggaagtacagcatcagcagtgacaacagcgacaccacagacagccacgccaccagcaccagcgccagccgctgcagcaagctgcccagcagcaccaagagcggctggccccggcagaatgagaagaagcccagcgaggtgttcagaacagacctgatcacagccatgaagatcccagacagctaccagctgagcccagatgactactacatcctggccgacccctggaggcaggagtgggagaagggcgtgcaggtgcctgctggagctgaggccatccctgagcctgtggtgcgcatcctgccccccctggagggccccccagcccaggccagccccagcagcaccatgctgggggagggcagccagcctgactggccaggcggcagccgctatgacctggatgaaattgatgcctactggctggagctgtag

SEQ ID NO: 340150 - DNA, 2373 bp, Artificial Sequence
  derived and/or modified sequence
atggaggagaagcggcggaagtacagcatcagcagcgacaacagcgacacaacagacagccacgcaacatccacatccgcctccaggtgcagcaaactgccttcgagcacgaaatcaggatggcccaggcagaacgaaaagaagccaagcgaggtattcaggactgacctgatcaccgccatgaagatccccgatagctaccagctgagtccggacgactattacatcctagcagatccttggcggcaggagtgggaaaaaggcgtccaggttcccgcgggagctgaagccatccctgaacccgtcgtgcgcattttaccgcctctggagggccctccagcgcaggcttcgccatcctctacaatgctcggggaaggcagccagccggattggccgggcggatctagatacgaccttgacgagattgatgcctactggctggagctcatcaatagcgagctaaaggagatggaacggccagaacttgacgagctgaccttggagcgggtgttagaggaactggaaacactctgtcaccaaaatatggccagagctatcgagacacaggagggactcggcatcgagtacgacgaagatgtggtgtgcgatgtgtgccggtcaccggaaggtgaggacggaaatgaaatggtgttttgcgacaagtgcaacgtctgcgttcaccaagcatgctacgggattctcaaggtgccaaccggaagctggctgtgtcgtacctgtgccttgggtgtgcagcctaaatgcctactttgccctaaaagggggggcgccttgaagcctacacgatccggaaccaagtgggttcacgtgagctgcgctctgtggatccctgaggtcagtataggctgccccgaaaagatggagccaattacaaagatttcccacatccctgcttccaggtgggcactgtcctgctctctctgcaaagaatgtactggcacgtgcatccagtgtagtatgcccagctgcgtgacggcctttcacgtcacgtgcgcctttgatcacgggctcgagatgcgcaccatcttggctgataatgatgaggtgaagttcaagagcttttgccaagaacatagcgatggcggaccccggaatgagccgacatcagaacctactgaaccctcccaggccggagaggacctcgagaaggtcaccctgcggaagcaacgcctgcaacaactagaggaagacttctacgaactggtggagccagcagaagtggccgagagactagacctcgccgaagccttggtggattttatctaccaatattggaagttgaaacggaaggccaatgcaaaccaacccctgctgacacctaagaccgacgaggttgataatttagctcagcaagaacaggatgtcttataccgaagactgaagttgtttacccatctgcgccaggacctcgagagagtgcggaacctgtgctacatggtaacacgcagagaacgtacaaagcacgccatctgtaagttgcaagagcagatttttcacctccagatgaagcttattgagcaagacttatgtcggggattgagcacgagcttcccgattgacggcaccttcttcaactcgtggttggcccaatctgtgcagatcacggccgagaatatggccatgtccgaatggccgttgaataatggacaccgcgaagatcctgcgccaggcctgctgtctgaagaactactccaggacgaggagacgcttttgagcttcatgcgcgatccgtccctgagaccaggcgaccctgccaggaaggctcggggtcgcactcgactgccagccaagaaaaagccccctcccccacctccccaggatggcccaggctcacgtactactcccgacaaagccccgaagaaaacctgggggcaggatgccggaagcggcaagggtggacagggaccaccgactcgaaagccccctaggcggacatcctctcacctcccgtcttccccggccgccggggattgtcccatccttgcaactcctgaatcccctcccccactcgcccccgaaacaccagatgaggcagcctccgtcgccgctgactcagacgtacaggtgcctggccccgccgcttcgcccaagcccctgggaagactgcgtcctcctcgggaatctaaggtgactcgccgtctgccaggggccaggcccgacgccggcatggggcccccgagcgccgtggcagaacgccctaaggtgtccctacactttgatactgagaccgatggatatttctccgatggcgagatgtctgactccgacgttgaagcagaagatgggggagtgcagagagggccccgggaggcaggtgccgaggaagtagtgaggatgggagtcctagcttcttag

SEQ ID NO: 340151 - DNA, 768 bp, Artificial Sequence
  derived and/or modified sequence
atggaggagaagcggcggaagtacagcatcagcagcgacaacagcgataccacagacagtcacgccacctctacctccgctagtcgttgctcaaagcttccatccagcacaaagagcggctggccgcggcagaacgaaaagaagccctcagaagtgttccgcacagacctaataaccgcaatgaaaatcccggattcttaccagctcagccccgatgactactatatcctggccgacccgtggcgccaggaatgggaaaagggagttcaggtaccagctggtgctgaagcaataccggagcccgtcgtgagaattcttccaccacttgaaggtccccctgcccaggccagccccagcagcactatgctcggcgaggggtcccagcctgactggcctgggggctcccggtacgatttggacgagatcgacgcctattggctggaactcatcaacagcgagctcaaagagatggaaagacctgaactggacgaactcaccttagagcgtgtgctggaagaactggagactctgtgccaccagaacatggcgagagccatcgagacgcaagaaggactgggcatcgaatatgacgaagatgttgtatgcgatgtgtgtcgctctccagaaggggaggacggtaatgagatggtattttgcgataagtgtaatgtgtgtgttcatcaggcctgttacggaatactgaaagttccaaccggaagttggctctgtagaacttgtgctcttggagtccaacctaagtgcctgtag

SEQ ID NO: 340152 - DNA, 450 bp, Artificial Sequence
  derived and/or modified sequence
atggaggagaagcggcggaagtacagcatcagcagcgacaacagcgataccaccgattctcacgccacatccacttcagccagccggtgttccaagctgccttcttccaccaaatctggatggccgaggcagaatgaaaaaaagcccagcgaggtatttcggacggacctcatcacagctatgaaaatacccgatagctatcaactctctcctgatgattattacatactggccgacccgtggagacaggaatgggaaaaaggagttcaagtgcccgccggagccgaggcgatcccagaacccgtggtgcgcatcctgcctccactggagggtcccccggcacaggcatcccccagctccaccatgttgggtgaggggtcacagccagactggcctggaggaagccgatatgatctggatgaaatagatgcctattggctcgagttgtag

SEQ ID NO: 340153 - DNA, 2373 bp, Artificial Sequence
  derived and/or modified sequence
atggaggaaaagaggcgaaaatactctatatctagcgataattctgatacaactgatagccacgccaccagtacaagcgccagtagatgtagtaagttaccaagttccacaaagtcaggttggccccgacaaaacgagaaaaagccatctgaagtgtttaggactgacctgatcacagcaatgaagattcccgatagttatcaactgagtccagacgattattatatcctcgctgacccatggcgccaggaatgggagaaaggggtgcaagtgccagcgggagcagaggcaatccccgaacctgtcgtgcgcattctgcctcctttggaagggccacctgctcaggcctcaccctcgtccactatgctgggtgagggttcgcaacctgattggcccggaggcagtaggtacgatcttgacgaaatcgacgcctactggttagaactcataaacagcgaattgaaagaaatggagcgcccagaactggacgagttgacactcgaacgggtgctcgaggaattggagacgctgtgccatcagaatatggctagggcaattgagactcaggaggggctaggtatagaatacgacgaggacgttgtatgtgatgtctgcaggagccccgaaggcgaggacgggaacgagatggtcttctgcgacaagtgtaatgtatgtgtccaccaggcgtgttacggtatactgaaggttcccaccggcagttggctctgccggacttgtgccctcggcgtgcagcctaagtgcttgctgtgccccaaacgcggtggagcattgaagccgacaagaagcgggacaaaatgggttcatgtaagctgtgccctgtggataccggaggtgtcaatcggctgccccgagaaaatggagccgattacaaagataagtcacatacctgcttcgagatgggctctgtcctgctccctctgcaaggagtgcactgggacctgtatccagtgttctatgcccagctgtgtgactgccttccacgttacctgcgcatttgaccacgggctggagatgcgaacgattctggctgataacgacgaagttaaattcaagtcattctgtcaagagcactctgatggcggtccacggaacgagccgacctccgagcctaccgagccctcccaggcaggggaagacttagaaaaggtcacacttcgcaagcaacgtctccagcagctcgaagaagacttctatgaactggttgagccagcagaggtggcggagcggctggacttagctgaagcattggtcgattttatctaccaatattggaagcttaagcgaaaagccaacgccaaccagccacttcttacacccaagaccgatgaagtggataacttggctcagcaggagcaggatgtgctgtataggcggcttaaattgttcacacacctgcgccaggatctggagagggtacggaacctttgctacatggtaactcgacgagagaggactaagcacgctatctgcaaactgcaggagcagatcttccaccttcagatgaagttaatcgagcaggatctctgccggggtctcagcacatcctttcccatcgacggaacctttttcaattcttggcttgcccaatccgtgcagataactgcggagaacatggccatgtctgaatggccgctgaataatggtcatcgagaggaccccgctcccggactgcttagcgaagagttgctgcaggacgaggagaccctgctgtccttcatgcgggatccgagtctgcgcccaggcgatcctgctagaaaggcgagaggaaggactcgacttccagccaaaaagaagccgccaccccctccaccccaagacgggccaggctcgcgcacaacccccgacaaggctccgaaaaagacctgggggcaggatgcgggaagcggcaagggcggacaggggccaccaacccgcaagccaccaagaaggacttctagtcacctcccctcctctccagccgctggcgactgccccattctggctacacctgagtccccaccacctttggctcctgagacgcctgatgaggccgctagcgtggccgctgactccgacgtgcaagtacccggacctgcggcttcccccaagcctctcggacgcctccggcctcctcgggaatcaaaagttaccaggcgacttcctggggcacggcctgacgccggtatgggaccaccctccgcggtggcggagcggcctaaagtgagtctccattttgacaccgagaccgacggatatttctcagatggagagatgagtgactctgatgtggaagcagaggacgggggagtccagcgtggacccagagaggcgggagccgaggaggtggtaaggatgggcgtcctagcatcctag

SEQ ID NO: 340154 - DNA, 768 bp, Artificial Sequence
  derived and/or modified sequence
atggaggagaaaagacggaagtacagcattagtagcgacaatagtgacactaccgacagtcatgccacaagcaccagtgcaagcagatgttctaagttaccgagtagtaccaagtcaggatggccaaggcagaatgagaaaaaacccagcgaggtattcaggaccgatctgattactgccatgaagatcccagattcctatcaactgtccccagatgactattacatactggccgatccctggaggcaggaatgggagaagggggtgcaggtccctgccggtgcggaagccatccccgagccagtggtcaggattttacctcctctggaaggtcctccagcccaggcatccccctcctcaacaatgctgggcgaaggatctcaacccgactggcctggtggctcacgttacgatctggatgaaattgacgcgtattggttggagctgattaactcagagctcaaagaaatggagcggcctgaactcgatgagctcacactggagagggtgctggaagaacttgagacactttgccaccagaacatggcacgcgctatagagacacaggagggacttgggatagaatatgatgaagatgtggtgtgtgacgtgtgccggtcacccgagggagaagacggaaatgagatggtgttctgcgacaagtgcaacgtgtgcgtgcaccaggcctgctatggtatcctgaaagtgcccacaggcagttggctgtgtcgtacttgtgcactgggtgtccagcccaaatgtctgtag

SEQ ID NO: 340155 - DNA, 450 bp, Artificial Sequence
  derived and/or modified sequence
atggaagagaaaaggcgaaagtacagcatcagctccgacaattcagacacaaccgatagtcatgccacatccacctcagcctcccgctgttccaagctgccatcctccacgaagtctggttggcccaggcagaacgaaaagaagccatcggaagtttttaggacggatctgatcaccgccatgaaaattcccgatagctaccagctgtcgcccgacgactactacatcctcgctgatccatggcgccaagagtgggaaaaaggggtccaggtccctgctggtgcggaagcaattcctgaacccgttgttagaatactgcctcccttagaagggcctcctgctcaggctagcccctcctctacgatgttgggggagggcagccaaccggattggcccggtgggtcaaggtacgatctggatgaaattgacgcatactggctcgaattatag

SEQ ID NO: 340156 - DNA, 2373 bp, Artificial Sequence
  derived and/or modified sequence
atggaggagaagagaagaaagtacagcatcagcagcgacaacagcgacaccaccgacagccacgccaccagcaccagcgccagcagatgcagcaagctgcccagcagcaccaagagcggctggcccagacagaacgagaagaagcccagcgaggtgttcagaaccgacctgatcaccgccatgaagatccccgacagctaccagctgagccccgacgactactacatcctggccgacccctggagacaggagtgggagaagggcgtgcaggtgcccgccggcgccgaggccatccccgagcccgtggtgagaatcctgccccccctggagggcccccccgcccaggccagccccagcagcaccatgctgggcgagggcagccagcccgactggcccggcggcagcagatacgacctggacgagatcgacgcctactggctggagctgatcaacagcgagctgaaggagatggagagacccgagctggacgagctgaccctggagagagtgctggaggagctggagaccctgtgccaccagaacatggccagagccatcgagacccaggagggcctgggcatcgagtacgacgaggacgtggtgtgcgacgtgtgcagaagccccgagggcgaggacggcaacgagatggtgttctgcgacaagtgcaacgtgtgcgtgcaccaggcctgctacggcatcctgaaggtgcccaccggcagctggctgtgcagaacctgcgccctgggcgtgcagcccaagtgcctgctgtgccccaagagaggcggcgccctgaagcccaccagaagcggcaccaagtgggtgcacgtgagctgcgccctgtggatccccgaggtgagcatcggctgccccgagaagatggagcccatcaccaagatcagccacatccccgccagcagatgggccctgagctgcagcctgtgcaaggagtgcaccggcacctgcatccagtgcagcatgcccagctgcgtgaccgccttccacgtgacctgcgccttcgaccacggcctggagatgagaaccatcctggccgacaacgacgaggtgaagttcaagagcttctgccaggagcacagcgacggcggccccagaaacgagcccaccagcgagcccaccgagcccagccaggccggcgaggacctggagaaggtgaccctgagaaagcagagactgcagcagctggaggaggacttctacgagctggtggagcccgccgaggtggccgagagactggacctggccgaggccctggtggacttcatctaccagtactggaagctgaagagaaaggccaacgccaaccagcccctgctgacccccaagaccgacgaggtggacaacctggcccagcaggagcaggacgtgctgtacagaagactgaagctgttcacccacctgagacaggacctggagagagtgagaaacctgtgctacatggtgaccagaagagagagaaccaagcacgccatctgcaagctgcaggagcagatcttccacctgcagatgaagctgatcgagcaggacctgtgcagaggcctgagcaccagcttccccatcgacggcaccttcttcaacagctggctggcccagagcgtgcagatcaccgccgagaacatggccatgagcgagtggcccctgaacaacggccacagagaggaccccgcccccggcctgctgagcgaggagctgctgcaggacgaggagaccctgctgagcttcatgagagaccccagcctgagacccggcgaccccgccagaaaggccagaggcagaaccagactgcccgccaagaagaagcccccccccccccccccccaggacggccccggcagcagaaccacccccgacaaggcccccaagaagacctggggccaggacgccggcagcggcaagggcggccagggcccccccaccagaaagccccccagaagaaccagcagccacctgcccagcagccccgccgccggcgactgccccatcctggccacccccgagagccccccccccctggcccccgagacccccgacgaggccgccagcgtggccgccgacagcgacgtgcaggtgcccggccccgccgccagccccaagcccctgggcagactgagaccccccagagagagcaaggtgaccagaagactgcccggcgccagacccgacgccggcatgggcccccccagcgccgtggccgagagacccaaggtgagcctgcacttcgacaccgagaccgacggctacttcagcgacggcgagatgagcgacagcgacgtggaggccgaggacggcggcgtgcagagaggccccagagaggccggcgccgaggaggtggtgagaatgggcgtgctggccagctag

SEQ ID NO: 340157 - DNA, 768 bp, Artificial Sequence
  derived and/or modified sequence
atggaggagaagagaagaaagtacagcatcagcagcgacaacagcgacaccaccgacagccacgccaccagcaccagcgccagcagatgcagcaagctgcccagcagcaccaagagcggctggcccagacagaacgagaagaagcccagcgaggtgttcagaaccgacctgatcaccgccatgaagatccccgacagctaccagctgagccccgacgactactacatcctggccgacccctggagacaggagtgggagaagggcgtgcaggtgcccgccggcgccgaggccatccccgagcccgtggtgagaatcctgccccccctggagggcccccccgcccaggccagccccagcagcaccatgctgggcgagggcagccagcccgactggcccggcggcagcagatacgacctggacgagatcgacgcctactggctggagctgatcaacagcgagctgaaggagatggagagacccgagctggacgagctgaccctggagagagtgctggaggagctggagaccctgtgccaccagaacatggccagagccatcgagacccaggagggcctgggcatcgagtacgacgaggacgtggtgtgcgacgtgtgcagaagccccgagggcgaggacggcaacgagatggtgttctgcgacaagtgcaacgtgtgcgtgcaccaggcctgctacggcatcctgaaggtgcccaccggcagctggctgtgcagaacctgcgccctgggcgtgcagcccaagtgcctgtag

SEQ ID NO: 340158 - DNA, 450 bp, Artificial Sequence
  derived and/or modified sequence
atggaggagaagagaagaaagtacagcatcagcagcgacaacagcgacaccaccgacagccacgccaccagcaccagcgccagcagatgcagcaagctgcccagcagcaccaagagcggctggcccagacagaacgagaagaagcccagcgaggtgttcagaaccgacctgatcaccgccatgaagatccccgacagctaccagctgagccccgacgactactacatcctggccgacccctggagacaggagtgggagaagggcgtgcaggtgcccgccggcgccgaggccatccccgagcccgtggtgagaatcctgccccccctggagggcccccccgcccaggccagccccagcagcaccatgctgggcgagggcagccagcccgactggcccggcggcagcagatacgacctggacgagatcgacgcctactggctggagctgtag

SEQ ID NO: 340159 - protein, 454 aa, Artificial Sequence
  derived and/or modified sequence
MARPNKFLLWFCCFAWLCFPISLGSQASGGEAQIAASAELESGAMPWSLLQHIDERDRAGLLPALFKVLSVGRGGSPRLQPDSRALHYMKKLYKTYATKEGIPKSNRSHLYNTVRLFTPCTRHKQAPGDQVTGILPSVELLFNLDRITTVEHLLKSVLLYNINNSVSFSSAVKCVCNLMIKEPKSSSRTLGRAPYSFTFNSQFEFGKKHKWIQIDVTSLLQPLVASNKRSIHMSINFTCMKDQLEHPSAQNGLFNMTLVSPSLILYLNDTSAQAYHSWYSLHYKRRPSQGPDQERSLSAYPVGEEAAEDGRSSHHRHRRGQETVSSELKKPLGPASFNLSEYFRQFLLPQNECELHDFRLSFSQLKWDNWIVAPHRYNPRYCKGDCPRAVGHRYGSPVHTMVQNIIYEKLDSSVPRPSCVPAKYSPLSVLTIEPDGSIAYKEYEDMIATKCTCR

SEQ ID NO: 340160 - DNA, 1365 bp, Artificial Sequence
  derived and/or modified sequence
atggccagacccaacaaatttctactatggttttgttgtttcgcctggctgtgtttccctatcagccttggatcccaagcctctggaggagaggcccagatcgccgctagtgccgaattagagtcaggtgcaatgccgtggtcattactgcaacacattgatgagcgagatagggccggactcttgccagctctgttcaaggtgctgtccgttggcagaggaggtagtcccaggcttcaaccggactccagggccctccactacatgaaaaaactgtataagacctacgccaccaaagaagggatcccaaagagtaatagatcgcacctgtacaataccgttcgactctttactccatgtacccggcataaacaagcccctggcgaccaggtcaccggcattttgccctctgtcgaactgctgtttaatttggatcgcattacaactgtcgaacacctgcttaaatccgtcctcctgtacaacatcaacaactctgtcagtttctccagcgccgtgaaatgcgtatgtaatctgatgatcaaagaaccaaaatcatcatctcgcaccctggggcgtgctccttattcattcacattcaacagccagttcgagttcggtaagaagcataagtggatccagatcgacgttaccagcctcctgcagcctctggtagcctccaataaaagatccattcacatgagcataaacttcacctgcatgaaagaccaactggagcatccatccgcccaaaacggcttatttaatatgacgctggtatctccaagcctgatactgtacctgaatgacacctccgcccaggcttatcattcttggtattccctgcactacaagaggagaccttcccaggggccagaccaagaacgcagtttaagtgcatatccagtcggggaggaagcagccgaagatgggagaagctcgcaccaccgccatcggaggggccaggaaaccgtcagctctgagttgaagaagcccctaggcccagctagcttcaatctaagtgagtatttcagacaatttctactgcctcagaatgaatgcgagctgcatgatttcagactcagctttagccagctgaagtgggacaattggattgtcgcaccccatcgatataatcctcggtattgcaagggggactgccctagagcggtgggccacagatatggctctcccgtgcataccatggtacaaaacatcatctacgagaaactggattccagcgttccccgaccatcctgcgtgccagccaaatattctcctctttctgtgttgaccatagaacccgatggtagtatagcctacaaggaatacgaagatatgatagctactaagtgcacttgcagatag

SEQ ID NO: 340161 - DNA, 1365 bp, Artificial Sequence
  derived and/or modified sequence
atggccagacctaacaaattcttgctgtggttctgctgcttcgcatggctgtgcttccctatcagtctggggtcccaggctagcggtggagaagctcagattgctgcgtccgccgaactggagtcaggcgctatgccctggtccctgctgcagcacatcgatgaacgagacagggcaggtttactgcccgcactgttcaaggtgttgtccgtgggcagaggtgggtcccctcggttgcaacccgacagcagagctttgcattacatgaagaagctatataaaacttatgctaccaaagaaggcattcctaaaagcaatcgatcccacctatataacacggtgaggctttttaccccttgcacacgacacaagcaggcgccaggggatcaggtgaccggcattctgcccagcgtggaattactgtttaatctagacaggatcactactgtggagcacctgctgaagtcagttctgctatacaacatcaacaacagcgtctcattttcatccgcggtaaagtgtgtgtgcaatctgatgataaaagagccaaagagcagctctcggaccttaggacgggcaccttattcatttacttttaatagtcagttcgaattcgggaaaaagcacaagtggattcagatagacgtcaccagccttctccagcctctggtggcctccaataaacgatctatccatatgagtataaactttacttgtatgaaagatcaactcgagcacccctctgcccagaacgggcttttcaatatgacccttgtatcgccctctctcatcttatacttaaatgatacctccgcccaggcctaccacagctggtattcccttcattataaaagaaggccatcccagggaccagatcaggagcgctccctctcagcttatccagtcggggaggaagcggctgaagatggtcggtcctcgcaccatcggcaccgtaggggccaggagacagtgtcgtcagaactgaaaaaaccattaggccctgcctcatttaacctttcagagtattttcgccaatttctgctaccccagaatgaatgtgaattacacgacttcagactctccttttctcaattgaaatgggataattggatcgtagcgccacacaggtacaatcctagatattgcaaaggggactgcccccgagccgtggggcaccggtatgggtcccctgtgcacactatggtgcaaaatatcatctacgagaaactggatagcagcgtacctcggcctagctgcgtaccagcgaagtatagtcccttgagtgtcctcacgatagagccagacggctccattgcctacaaggagtacgaagacatgatcgctactaagtgcacttgccggtag

SEQ ID NO: 340162 - DNA, 1365 bp, Artificial Sequence
  derived and/or modified sequence
atggccagaccaaacaagttcttactctggttctgctgcttcgcctggctgtgcttccccatttcactggggagtcaggctagtggaggggaagctcaaattgccgcctcggccgaactggagtccggagccatgccatggagtctgctgcagcatattgacgagcgtgatcgcgctggattgttacccgcccttttcaaggttctctcggtaggccgtggaggaagccctaggcttcagccggacagtcgggccctacactacatgaagaaactctacaaaacttatgctaccaaggagggtatacctaagagcaaccgttcacacttgtataataccgttcggctgttcaccccctgcactagacacaaacaggctcccggagatcaggtcaccgggatcttaccttcagttgagctgctctttaaccttgatcgcatcactacagtggaacatcttctaaagagtgtactgctgtacaatataaacaactcagttagcttcagctctgccgttaagtgcgtgtgcaacctgatgataaaggagccaaaatcttcgtcaaggacactcggccgcgcaccatattcgttcacttttaactcacagtttgaatttggcaaaaagcacaagtggatccagatcgatgttactagtctcctgcagccactcgtagcctccaataagaggtcgatccatatgtcaattaatttcacttgtatgaaggaccaactcgagcacccctctgcccagaatggtctgttcaatatgaccctggtatctccctcattgatcttgtacctgaacgacacgagtgcccaagcttatcactcttggtatagtctgcactataagcgtcggccttctcagggaccagaccaggaacgttccctgagcgcttaccctgtgggggaggaggccgccgaggatggcagaagctctcatcacaggcatagacgggggcaagaaactgtgtcctccgagcttaaaaagcccttgggtccagcctcatttaacctcagcgagtatttccgacagttcctactgccccagaacgagtgtgagttacatgactttagattgtctttctcccagctcaaatgggacaactggattgtcgctcctcatcgatacaatccaaggtactgcaaaggggattgcccaagagccgtgggccacagatacggctcaccagttcacaccatggtccagaatattatctatgaaaaactcgattcttccgttccaaggccgtcttgcgtgcccgcgaaatacagtccgttaagcgtactgacaattgaaccagatggatctattgcctacaaagaatacgaggatatgattgcgacaaaatgtacatgtcgatag

SEQ ID NO: 340163 - DNA, 1365 bp, Artificial Sequence
  derived and/or modified sequence
atggccagaccaaataaattcctcctttggttctgttgcttcgcatggctctgtttccccatctccttaggctcccaggcatcagggggtgaggcacaaattgctgcaagtgcagagctggaaagtggcgccatgccatggtctctgctgcaacacatcgatgagagggaccgcgccggtctcctccccgctttgttcaaagtgctgtcagtgggcaggggcggctctcccaggctgcagcccgattcccgggctctgcactatatgaaaaagctatacaaaacatacgccaccaaagaaggtatacctaagtcaaataggtctcacttgtacaacacggtgcgtctgttcaccccttgcacgcggcataaacaggccccaggggatcaggtgaccggaatattaccttccgtggaacttcttttcaacctggataggatcacaaccgtcgagcacctcctcaaatctgtgttattgtataacatcaataattccgtgtccttcagctccgcggtcaagtgcgtgtgtaacctgatgattaaagagcctaagtcttcctctcgcactctgggacgtgccccctatagttttacttttaacagtcaatttgagttcggtaaaaagcacaagtggattcaaatcgacgttactagtctacttcaacccctcgtcgcgtctaataagaggtcaatccacatgtccataaatttcacttgcatgaaagaccaattggaacatccttccgcacaaaacggcctgttcaacatgactctcgtaagcccctcattgatactctacttgaatgacacctcagcccaagcatatcatagttggtactctctccactacaagcggagacctagccaaggcccagaccaagaaaggagcttgtcggcataccctgttggtgaagaggcagccgaagacggtagaagttctcatcacaggcacaggcgaggccaggaaacagtgtccagcgagctgaaaaagccactgggtcccgcgagttttaacctcagtgagtacttccgtcagttcctccttccccagaacgagtgtgaactccacgacttccgtctctccttcagtcagctcaagtgggacaattggattgtggcaccacataggtataatcccagatactgcaagggcgactgtcctcgcgcagtgggacaccggtacggcagtcctgtgcacaccatggtgcaaaatattatctacgaaaagctggactcgagtgtgcctcgcccaagctgtgtacctgccaagtactctccattatctgttcttacgatagaaccagatggctctattgcttataaagaatatgaggatatgattgcaaccaaatgcacctgcaggtag

SEQ ID NO: 340164 - DNA, 1365 bp, Artificial Sequence
  derived and/or modified sequence
atggctcgacctaacaagttcctgctctggttctgttgtttcgcctggctgtgtttcccaattagtctcggctcccaggcttctgggggcgaagcccagattgcagcttccgccgaattagaatccggcgctatgccttggtctctgcttcagcacatcgatgaacgagaccgagcagggcttcttcccgcactgtttaaagttctctccgtgggtcgcggtggtagtcctcgacttcagcccgactccagggcactgcattatatgaaaaagttatacaagacctatgcaaccaaagagggcataccaaaaagcaatagatcccatctctacaacaccgtccgattatttacaccttgtaccagacacaaacaagcaccaggcgaccaagtcacaggcattctgcccagcgtggagttgctatttaacctagataggatcacaaccgtcgagcatctcctcaaatcagtcctgctgtacaacatcaacaattccgtatcgtttagcagcgcagtgaagtgcgtgtgtaacttaatgatcaaggagccaaaatcttcatcaaggactcttgggagggcaccttactctttcacttttaattcccaattcgaatttgggaaaaagcacaagtggattcagatcgacgttaccagcttgcttcagcctctcgtggcttctaacaaaagatctatccatatgagcattaattttacttgtatgaaagaccagctagaacacccaagcgcccagaacggcctgttcaatatgacacttgtgagcccaagcctgatcctctatctcaatgacacttccgcacaagcctatcacagttggtactccctccactacaaaaggcgtccttcccagggtcccgaccaagagagatcgctaagcgcctatcccgtaggagaggaagctgcggaggacggtagaagctcgcaccatagacaccggcgcgggcaagaaacagtctcctcagagctcaagaaacccctaggccctgcgagttttaatctctcagagtatttcagacaatttctacttcctcagaatgaatgtgaacttcacgatttcagattaagtttttcccaacttaagtgggacaattggatcgtggctccacacaggtataaccctcgatattgtaaaggagattgtcctagggctgtgggccaccgttacggttccccagtccacacaatggtccagaatatcatatacgaaaaattggactcgtcagtgccccgcccgtcctgcgttcccgctaagtactctccgctctccgtattgaccattgagcccgacgggagcatcgcttataaagaatacgaagacatgatagctacaaaatgtacatgccgatag

SEQ ID NO: 340165 - DNA, 1365 bp, Artificial Sequence
  derived and/or modified sequence
atggctcgccccaacaagtttctactttggttctgctgttttgcttggctgtgctttcccatatccctcggatcacaagcgtctggcggagaagctcagatcgctgcttcagccgaattggaatctggcgcgatgccgtggagcctgttgcagcacatcgacgaacgcgaccgcgccggccttctgccagcccttttcaaggttctgagcgtaggcaggggcggcagtcccagacttcaaccggatagtagggcactccactacatgaagaaactgtataaaacatacgccacaaaggaaggaatccccaagtctaaccgaagccacctctataataccgtgcgactgtttaccccttgtactcgtcacaaacaggcgcccggcgatcaagttaccggcatccttccctcggtggagctgcttttcaatctagataggataactacagtcgaacacttgttaaagagcgttttgctctacaacatcaacaattccgtctcttttagttcagcggtcaaatgtgtgtgcaatctgatgatcaaagagcctaaatcctcatcacgtacacttggacgggccccttacagctttacctttaattctcaatttgaatttgggaaaaaacacaaatggattcagattgatgtgacttccctgctgcagcccctcgttgcctcaaacaaaagatccatacatatgagtatcaatttcacctgcatgaaagaccagctcgaacatccctctgctcagaacggcctattcaacatgaccctcgtatctccatcgctgatactctacctgaacgacacttctgcacaggcctatcacagctggtatagcctgcattataagagaaggccctctcaaggacccgaccaagaacgctcccttagtgcctatcccgtgggcgaagaggctgcagaagatgggcggagcagccaccaccgccatagaagaggacaagaaaccgtcagcagcgagctgaaaaagccactgggtcccgcctcgtttaatctcagcgaatatttccgccagtttctcctgccacaaaatgaatgtgaactacacgatttccgcctgtccttcagtcagctaaagtgggacaactggatcgtggctccacatcggtataatcctaggtactgcaagggcgactgtccaagagctgttggtcatagatacggttccccagttcacaccatggtccaaaatatcatttacgaaaaactggattccagcgttccccgcccaagttgcgtccctgccaaatatagtccactgtccgtgctcaccattgaacctgacggttccatcgcctacaaagaatatgaagacatgatagccacaaaatgcacgtgccggtag

SEQ ID NO: 340166 - DNA, 2020 bp, Artificial Sequence
  derived and/or modified sequence
gaaaagagaggaaagctaaataaccaagtaaatctgtatctaattaacaaattggctaaataaggtgttatcagctgcttgatatagagctgataaaatcttcagctaggcatacttgaggcctgattacagaagtgaccgtagtccacccacacacctgaaatttatttaagagaccaagctaggctcttcctggcctttaggaagaggactggcatggagaaatatgttcctcactagttctcccaagccatggcacgtcccaacaaattcctcctttggttttgctgctttgcctggctgtgttttcctattagccttggttctcaggcttctgggggagaagctcagattgctgctagtgctgagttggaatctggggctatgccttggtccttgctgcagcatatagatgagagagacagagctggcctccttcccgcgcttttcaaagttctatctgttgggcgaggtgggtcacctaggctgcagccagactccagagctttgcactacatgaagaagctctataagacatatgctaccaaggaagggattcctaaatccaatagaagtcacctctacaacactgttcggctcttcaccccctgtacccggcacaagcaggctcctggagaccaggtaacaggaatccttccatcagtggaactgctatttaacctggatcgcattactaccgttgaacacttactcaagtcagtcttgctgtacaatatcaacaactcagtttctttttcctctgctgtcaaatgtgtgtgcaatctaatgataaaggagccaaagtcttctagcaggactctcggcagagctccatactcatttacctttaactcacagtttgaatttggaaagaaacacaaatggattcagattgatgtgaccagcctccttcaacctttagtggcctccaacaagagaagtattcacatgtctataaattttacttgcatgaaagaccagctggagcatccttcagcacagaatggtttgtttaacatgactctggtgtccccctcactgatcttatatttgaatgacacaagtgctcaggcttatcacagctggtattcccttcactataaaaggaggccttcccagggtcctgaccaggagagaagtctgtctgcctatcctgtgggagaagaggctgctgaggatgggagatcttcccatcaccgtcaccgcagaggtcaggaaactgtcagttctgaattgaagaagcccttgggcccagcttccttcaatctgagtgaatacttcagacaatttcttcttccccaaaatgagtgtgagctccatgactttagacttagctttagtcagctgaagtgggacaactggattgtggctccgcacaggtacaaccctcgatactgtaaaggggactgtccaagggcagttggacatcggtatggctctccagttcacaccatggtacagaacatcatctatgagaagctggactcctcagtgccaagaccgtcatgtgtacctgccaaatacagccccttgagtgttttgaccattgagcccgatggctcaattgcctataaagagtacgaagatatgatagctacaaagtgcacctgtcgttaacaaatggtcctcttaaaaccttgagcctatttggcaaagtaactactgtgtgcctatgtgtgccttcaagagaaagcttcatatattaagtctctaaatgtagcatatgttatataaagaggagcctgtgtaggttagtaccttctatggcatctatcaggataaagggataacatcaattgttgctacagagcctttttttatttccaaatttaaatgaaatataattattgtggagaactttacatttttttccttgagtgattttttttcttttcataggagtcttattcttgatagggaaaaaaccttaattagcatcaatcctggatggacttgcagctataaataggcaattcagattgctgtagtcttaatagaagaataaatttctgtcaatggc

SEQ ID NO: 340167 - DNA, 1365 bp, Artificial Sequence
  derived and/or modified sequence
atggccagacccaacaagttcctgctgtggttctgctgcttcgcctggctgtgcttccccatcagcctgggcagccaggccagcggcggcgaggcccagatcgccgccagcgccgagctggagagcggcgccatgccctggagcctgctgcagcacatcgacgagagagacagagccggcctgctgcccgccctgttcaaggtgctgagcgtgggcagaggcggcagccccagactgcagcccgacagcagagccctgcactacatgaagaagctgtacaagacctacgccaccaaggagggcatccccaagagcaacagaagccacctgtacaacaccgtgagactgttcaccccctgcaccagacacaagcaggcccccggcgaccaggtgaccggcatcctgcccagcgtggagctgctgttcaacctggacagaatcaccaccgtggagcacctgctgaagagcgtgctgctgtacaacatcaacaacagcgtgagcttcagcagcgccgtgaagtgcgtgtgcaacctgatgatcaaggagcccaagagcagcagcagaaccctgggcagagccccctacagcttcaccttcaacagccagttcgagttcggcaagaagcacaagtggatccagatcgacgtgaccagcctgctgcagcccctggtggccagcaacaagagaagcatccacatgagcatcaacttcacctgcatgaaggaccagctggagcaccccagcgcccagaacggcctgttcaacatgaccctggtgagccccagcctgatcctgtacctgaacgacaccagcgcccaggcctaccacagctggtacagcctgcactacaagagaagacccagccagggccccgaccaggagagaagcctgagcgcctaccccgtgggcgaggaggccgccgaggacggcagaagcagccaccacagacacagaagaggccaggagaccgtgagcagcgagctgaagaagcccctgggccccgccagcttcaacctgagcgagtacttcagacagttcctgctgccccagaacgagtgcgagctgcacgacttcagactgagcttcagccagctgaagtgggacaactggatcgtggccccccacagatacaaccccagatactgcaagggcgactgccccagagccgtgggccacagatacggcagccccgtgcacaccatggtgcagaacatcatctacgagaagctggacagcagcgtgcccagacccagctgcgtgcccgccaagtacagccccctgagcgtgctgaccatcgagcccgacggcagcatcgcctacaaggagtacgaggacatgatcgccaccaagtgcacctgcagatag

SEQ ID NO: 340168 - DNA, 1365 bp, Artificial Sequence
  derived and/or modified sequence
atggccaggcctaataaatttttgctctggttttgctgctttgcctggctgtgctttcctattagtttgggctcacaggccagtggaggcgaagcacagattgctgcctcagccgagctggaatcaggcgccatgccctggagtctgcttcagcacattgatgagagagacagagcgggattgttacccgcactttttaaagtgcttagtgttggccgcggggggtcccctagactgcagcccgatagtcgcgccctccactacatgaaaaagctgtataagacctacgctaccaaggagggtattccaaagtcaaacaggtcacatctgtacaacacggtgcgcctcttcaccccgtgcacacgccataaacaggcacccggggaccaggtgaccggaatattgccctcagtggaactgttgtttaacctggatcgaatcactactgtggaacacctattaaaatctgttttgctatataatattaataactccgttagctttagtagtgctgtgaagtgcgtatgcaatctgatgattaaggagcctaagtccagctcacggacactgggacgcgcgccgtattctttcacgttcaatagccaatttgaattcggcaagaagcacaagtggattcagatcgacgtcacctcactgctgcagccccttgtcgcttcaaacaagcgatctattcatatgagtattaattttacttgcatgaaggaccagctggagcacccctcagcccagaatgggctgttcaatatgactcttgtgtctccttccctaatcctttacctgaatgacactagcgcccaggcttaccactcttggtatagtctgcattataagcggcgtccttcacaggggcccgaccaggaaaggtccctatcagcctaccctgttggggaggaagcggctgaggatggtaggtcatcacaccacagacaccggcgaggccaggaaacggtctctagcgagctgaaaaaaccacttggtcctgccagcttcaatctgagtgagtactttaggcagtttctgttgccacagaatgaatgcgaacttcacgattttaggttgagcttctcccagctgaagtgggacaattggatagttgctccccaccgatacaacccccggtattgcaagggagattgtccccgggccgtgggacatcggtatgggagcccagtgcacacaatggtccagaacattatctatgagaaactcgactccagcgtgcctcggccttcgtgcgtacctgctaagtactcaccgctgtctgtcctgactatcgaacctgatggatcgatcgcctacaaagagtatgaggatatgatcgcaactaagtgtacttgtaggtag

SEQ ID NO: 340169 - DNA, 1365 bp, Artificial Sequence
  derived and/or modified sequence
atggctcggcctaacaaattcctgttgtggttttgctgcttcgcctggctatgctttcccatttctctgggctctcaggcgagtggcggggaagcccagatcgccgcctccgcagaactggagagtggagctatgccatggtcactgttgcagcacatcgatgaacgcgacagagccggcctcctgcctgctctattcaaagtgctgagcgttggacggggtggttctccacgcctgcagccggattcaagggccctacattacatgaagaaattatataagacatatgcaactaaggaaggcatccccaagtcgaatcgaagccatctgtataacactgtcaggctgtttaccccctgcacaagacataaacaggctccaggagaccaagtgacaggtatactcccaagcgtggagttactgttcaatctcgacaggatcacgaccgtggagcaccttttaaaatccgttctgctgtacaatatcaacaacagcgtttccttctcctctgcagtaaaatgtgtgtgtaatctaatgatcaaagagcccaagtctagctcacgcacgctcggacgggctccatactcttttactttcaatagtcaatttgagtttgggaagaagcataaatggatacagatcgacgtgacctctctgttgcagcccctagtcgcaagcaacaagaggtcaattcacatgagtataaactttacatgcatgaaagatcagctcgaacacccgtccgctcagaatggcctcttcaatatgactctagttagtccctctctaatcctttacctgaacgacacgagtgcgcaggcatatcactcctggtattccttgcattataagcgccgccctagccagggcccggaccaggagcgttccctgtccgcttatcctgtcggcgaagaggccgctgaggacggaaggtcatcgcatcatcgacacagacgaggccaggagacggtgagttcagaactgaaaaaacctctgggccccgcctccttcaacctgagcgagtactttaggcagtttttgctgcctcagaatgaatgtgagctgcacgatttccggctgagttttagccagctgaaatgggataattggattgtggccccacaccggtataaccctaggtattgtaagggtgattgtcctagggccgtgggccataggtatggtagtccggttcacactatggtccagaacatcatttacgagaagctagatagctctgtcccccggcccagctgcgtccccgctaagtactctccactcagcgttcttaccatagaaccggatggttcaatcgcctacaaagagtacgaagatatgattgctactaagtgcacctgccggtag

SEQ ID NO: 340170 - DNA, 1365 bp, Artificial Sequence
  derived and/or modified sequence
atggcccggcccaacaagttcctgctgtggttctgctgctttgcctggctgtgcttccccatcagcctgggcagccaggccagcggcggggaggcccagattgctgccagcgctgagctggagagcggggccatgccctggagcctgctgcagcacattgatgagcgggacagagctggcctgctgcctgccctcttcaaggtgctgtctgtgggccggggcggcagcccccggctgcagcctgacagccgggccctgcactacatgaagaagctgtacaagacctacgccaccaaggagggcatccccaagagcaacagaagccacctgtacaacacagtgcggctcttcaccccctgcaccaggcacaagcaggcccctggggaccaggtgacaggcatcctgcccagcgtggagctgctcttcaacctggaccgcatcaccaccgtggagcacctgctgaagtctgtgctgctgtacaacatcaacaacagcgtgtccttcagcagcgctgtgaagtgtgtgtgcaacctgatgatcaaggagcccaagagcagcagcaggaccctgggccgggccccctacagcttcaccttcaacagccagtttgaatttgggaagaagcacaagtggatccagattgatgtgaccagcctgctgcagcccctggtggccagcaacaagaggagcatccacatgagcatcaacttcacctgcatgaaggaccagctggagcaccccagcgcccagaatggcctcttcaacatgaccctggtgagccccagcctcatcctgtacctgaatgacaccagcgcccaggcctaccacagctggtacagcctgcactacaagagaagacccagccagggccctgaccaggagaggagcctgagcgcctaccctgtgggggaggaggccgcagaagatggccgcagcagccaccaccgccaccggcggggccaggagaccgtgagcagcgagctgaagaagcccctgggccctgccagcttcaacctgtctgagtacttccggcagttcctgctgccccagaatgaatgtgagctgcatgacttccggctgtccttcagccagctgaagtgggacaactggatcgtggccccccaccgctacaacccccgctactgcaagggggactgccccagggctgtgggccacagatatggcagccctgtgcacaccatggtgcagaacatcatctatgagaagctggacagctctgtgccccggcccagctgtgtgcctgccaagtacagccccctgtctgtgctgaccatcgagccagatggcagcatcgcctacaaggagtatgaggacatgattgccaccaagtgcacctgcaggtag

SEQ ID NO: 340171 - DNA, 2640 bp, Artificial Sequence
  derived and/or modified sequence
tttccggcaaggttggaagccgctcttggaggtcgtgagcatctgcaaacatcccaaaacctttcaaccaaaatatgtatagatgagtgtgcagaccaaagtaaggacatcagtatgttacatttaaaaataagtcaaggttaaaggcggtgtcctcttttaagaacatcgcaaatacaattccagtactccaagtacgtattctgtacccagccacctgggaggactgagagacctaatggttttctgctttctggaacttctatgccaattgtgactttctcacccaaatttgtaaattcgcaaattaacatgcagcgaataattacaattgtaaacacctggaagtggaaaaggccgtgaggataaattgagaggaagagtaaacctaataccataagttgcataccagcagatctgagtatcgtcatgaataattggttagcttttccacatgccttagaagtttcagcaagcacctagcgaacatcttaatccaaatttctcaaaaaatgagagattttatttaagatcattcctcaatttatcttagactttcagctacatagttagtccggtagtgtaacagtaacgggttttacgtaaatgccaggggaaaagagaggaaagctaaataaccaagtaaatctgtatctaattaacaaattggctaaataaggtgttatcagctgcttgatatagagctgataaaatcttcagctaggcatacttgaggcctgattacagaagtgaccgtagtccacccacacacctgaaatttatttaagagaccaagctaggctcttcctggcctttaggaagaggactggcatggagaaatatgttcctcactagttctcccaagccatggcacgtcccaacaaattcctcctttggttttgctgctttgcctggctgtgttttcctattagccttggttctcaggcttctgggggagaagctcagattgctgctagtgctgagttggaatctggggctatgccttggtccttgctgcagcatatagatgagagagacagagctggcctccttcccgcgcttttcaaagttctatctgttgggcgaggtgggtcacctaggctgcagccagactccagagctttgcactacatgaagaagctctataagacatatgctaccaaggaagggattcctaaatccaatagaagtcacctctacaacactgttcggctcttcaccccctgtacccggcacaagcaggctcctggagaccaggtaacaggaatccttccatcagtggaactgctatttaacctggatcgcattactaccgttgaacacttactcaagtcagtcttgctgtacaatatcaacaactcagtttctttttcctctgctgtcaaatgtgtgtgcaatctaatgataaaggagccaaagtcttctagcaggactctcggcagagctccatactcatttacctttaactcacagtttgaatttggaaagaaacacaaatggattcagattgatgtgaccagcctccttcaacctttagtggcctccaacaagagaagtattcacatgtctataaattttacttgcatgaaagaccagctggagcatccttcagcacagaatggtttgtttaacatgactctggtgtccccctcactgatcttatatttgaatgacacaagtgctcaggcttatcacagctggtattcccttcactataaaaggaggccttcccagggtcctgaccaggagagaagtctgtctgcctatcctgtgggagaagaggctgctgaggatgggagatcttcccatcaccgtcaccgcagaggtcaggaaactgtcagttctgaattgaagaagcccttgggcccagcttccttcaatctgagtgaatacttcagacaatttcttcttccccaaaatgagtgtgagctccatgactttagacttagctttagtcagctgaagtgggacaactggattgtggctccgcacaggtacaaccctcgatactgtaaaggggactgtccaagggcagttggacatcggtatggctctccagttcacaccatggtacagaacatcatctatgagaagctggactcctcagtgccaagaccgtcatgtgtacctgccaaatacagccccttgagtgttttgaccattgagcccgatggctcaattgcctataaagagtacgaagatatgatagctacaaagtgcacctgtcgttaacaaatggtcctcttaaaaccttgagcctatttggcaaagtaactactgtgtgcctatgtgtgccttcaagagaaagcttcatatattaagtctctaaatgtagcatatgttatataaagaggagcctgtgtaggttagtaccttctatggcatctatcaggataaagggataacatcaattgttgctacagagcctttttttatttccaaatttaaatgaaatataattattgtggagaactttacatttttttccttgagtgattttttttcttttcataggagtcttattcttgatagggaaaaaaccttaattagcatcaatcctggatggacttgcagctataaataggcaattcagattgctgtagtcttaatagaagaataaatttctgtcaatggcataaa

SEQ ID NO: 340172 - DNA, 1365 bp, Artificial Sequence
  derived and/or modified sequence
atggcccggcccaacaagttcctgctgtggttctgctgcttcgcctggttgtgttttcctattagtcttggatctcaggcatctgggggggaggcccagattgcagccagtgctgaactggagtctggggccatgccatggtcgctccttcagcacatcgacgaacgggatcgggcgggccttctgcctgccctctttaaggtgttgagtgtgggtaggggaggttcaccacgactgcagccagattcccgcgcactgcattatatgaaaaagttgtataagacatacgcaaccaaggagggcatccccaaaagcaatcggtctcatctgtataataccgtgcgcctgttcaccccttgcactcgacataaacaggcccccggcgaccaagtgacaggaattctgcctagtgtcgagctattgttcaaccttgaccgcatcacaactgtggaacacttactcaagagcgtgttgctgtacaacattaacaattccgtgtccttttccagcgctgtgaagtgcgtttgcaatctgatgatcaaggagccaaaaagttctagtagaaccctcggacgagccccctattccttcacttttaacagtcaattcgagttcggcaagaagcataaatggatccagatcgacgtcacttcacttcttcagccgcttgtggcttctaataagaggtcaattcatatgtccattaactttacttgcatgaaggaccaattagaacatcccagcgctcagaatggattgttcaacatgactttagtcagtccctcccttatcctttatctgaatgatacttcagcgcaggcttatcattcttggtactcactgcattacaagcgtaggccgtcccaaggcccagaccaagaaagatccttgtctgcctacccagttggcgaagaggcagctgaggacgggcggagttcacatcaccggcataggagaggtcaggaaacagtgtcatcagagcttaagaagccactcgggccagcatccttcaatctaagcgagtacttcaggcagttcctgctaccccagaacgagtgtgagctccatgattttcgcctgagctttagtcagctgaagtgggacaactggatcgtagccccccaccgctataatcctcgctactgtaagggtgattgccctcgagcggtcggccaccgctatggatcaccggtgcacaccatggtgcaaaatattatctacgagaaactagactcctctgtcccgagacctagttgtgtgcctgctaagtactcccccctatccgtgctcacaatcgagcctgacggcagtattgcctacaaagagtacgaagatatgatcgccaccaagtgcacatgtcgatag

SEQ ID NO: 340173 - DNA, 1365 bp, Artificial Sequence
  derived and/or modified sequence
atggcccggcccaacaagttcctgctgtggttctgctgcttcgcctggctgtgcttccctatctctcttggaagtcaagcgtcaggaggcgaagcccagatcgcagcaagcgccgagttagaaagcggagccatgccttggagcctgttgcaacacattgatgagagagacagggcagggctgctcccagccctctttaaggtcctgagtgtaggacgaggggggagtccacgacttcaaccagatagtcgcgctttgcactacatgaagaaactgtacaaaacatacgcaaccaaagagggtatccccaaatccaaccgcagccacctctacaacactgtgcgcttgtttaccccttgtacgcgtcacaagcaagcccccggcgatcaggtgactgggattctcccaagtgtagagctgctatttaatcttgacagaattacgacagtagagcatctactgaaaagtgtcttgttatataatattaataatagcgtctccttttcaagtgccgtaaagtgcgtttgtaaccttatgattaaggagcccaaaagttcttctagaacactgggacgtgccccttactcctttactttcaacagccagtttgagttcggaaaaaaacataaatggattcaaattgatgtcacctccttgctccaacctctcgtggccagcaataagcgcagcatccacatgagcattaacttcacatgcatgaaagatcaactggaacaccccagtgcacagaatgggctatttaatatgaccctggtctcaccttcactaatactttatcttaacgatacctctgcccaggcttatcattcttggtacagcctgcactataagcgaaggcctagtcagggccccgatcaggaacgtagcctcagcgcttaccccgtgggagaagaagcagcagaggacggcaggtcttctcaccacagacacaggcgggggcaggagactgtctcctccgaactgaagaagccccttggccccgccagcttcaacctcagcgagtatttccggcagttcttattgccacagaacgaatgtgagttacacgattttcggctctccttctcccagctgaaatgggacaattggatcgtcgccccacatcgttataatcctcggtactgcaaaggcgactgtccacgagccgttgggcataggtatggttccccggttcatacgatggtacaaaacataatttatgagaagttagactcttctgttccacgcccctcttgcgtcccagcgaagtattctccactgtccgtcctgacaatagagccagatggcagtattgcatacaaagaatatgaggatatgatagccacgaagtgcacatgcagatag

SEQ ID NO: 340174 - RNA, 1365 nt, Artificial Sequence
  derived and/or modified sequence
auggccagaccaaacaaguucuuacucugguucugcugcuucgccuggcugugcuuccccauuucacuggggagucaggcuaguggaggggaagcucaaauugccgccucggccgaacuggaguccggagccaugccauggagucugcugcagcauauugacgagcgugaucgcgcuggauuguuacccgcccuuuucaagguucucucgguaggccguggaggaagcccuaggcuucagccggacagucgggcccuacacuacaugaagaaacucuacaaaacuuaugcuaccaaggaggguauaccuaagagcaaccguucacacuuguauaauaccguucggcuguucacccccugcacuagacacaaacaggcucccggagaucaggucaccgggaucuuaccuucaguugagcugcucuuuaaccuugaucgcaucacuacaguggaacaucuucuaaagaguguacugcuguacaauauaaacaacucaguuagcuucagcucugccguuaagugcgugugcaaccugaugauaaaggagccaaaaucuucgucaaggacacucggccgcgcaccauauucguucacuuuuaacucacaguuugaauuuggcaaaaagcacaaguggauccagaucgauguuacuagucuccugcagccacucguagccuccaauaagaggucgauccauaugucaauuaauuucacuuguaugaaggaccaacucgagcaccccucugcccagaauggucuguucaauaugacccugguaucucccucauugaucuuguaccugaacgacacgagugcccaagcuuaucacucuugguauagucugcacuauaagcgucggccuucucagggaccagaccaggaacguucccugagcgcuuacccugugggggaggaggccgccgaggauggcagaagcucucaucacaggcauagacgggggcaagaaacuguguccuccgagcuuaaaaagcccuuggguccagccucauuuaaccucagcgaguauuuccgacaguuccuacugccccagaacgagugugaguuacaugacuuuagauugucuuucucccagcucaaaugggacaacuggauugucgcuccucaucgauacaauccaagguacugcaaaggggauugcccaagagccgugggccacagauacggcucaccaguucacaccaugguccagaauauuaucuaugaaaaacucgauucuuccguuccaaggccgucuugcgugcccgcgaaauacaguccguuaagcguacugacaauugaaccagauggaucuauugccuacaaagaauacgaggauaugauugcgacaaaauguacaugucgauag

SEQ ID NO: 340175 - RNA, 1365 nt, Artificial Sequence
  derived and/or modified sequence
auggccagaccaaauaaauuccuccuuugguucuguugcuucgcauggcucuguuuccccaucuccuuaggcucccaggcaucagggggugaggcacaaauugcugcaagugcagagcuggaaaguggcgccaugccauggucucugcugcaacacaucgaugagagggaccgcgccggucuccuccccgcuuuguucaaagugcugucagugggcaggggcggcucucccaggcugcagcccgauucccgggcucugcacuauaugaaaaagcuauacaaaacauacgccaccaaagaagguauaccuaagucaaauaggucucacuuguacaacacggugcgucuguucaccccuugcacgcggcauaaacaggccccaggggaucaggugaccggaauauuaccuuccguggaacuucuuuucaaccuggauaggaucacaaccgucgagcaccuccucaaaucuguguuauuguauaacaucaauaauuccguguccuucagcuccgcggucaagugcguguguaaccugaugauuaaagagccuaagucuuccucucgcacucugggacgugcccccuauaguuuuacuuuuaacagucaauuugaguucgguaaaaagcacaaguggauucaaaucgacguuacuagucuacuucaaccccucgucgcgucuaauaagaggucaauccacauguccauaaauuucacuugcaugaaagaccaauuggaacauccuuccgcacaaaacggccuguucaacaugacucucguaagccccucauugauacucuacuugaaugacaccucagcccaagcauaucauaguugguacucucuccacuacaagcggagaccuagccaaggcccagaccaagaaaggagcuugucggcauacccuguuggugaagaggcagccgaagacgguagaaguucucaucacaggcacaggcgaggccaggaaacaguguccagcgagcugaaaaagccacugggucccgcgaguuuuaaccucagugaguacuuccgucaguuccuccuuccccagaacgagugugaacuccacgacuuccgucucuccuucagucagcucaagugggacaauuggauuguggcaccacauagguauaaucccagauacugcaagggcgacuguccucgcgcagugggacaccgguacggcaguccugugcacaccauggugcaaaauauuaucuacgaaaagcuggacucgagugugccucgcccaagcuguguaccugccaaguacucuccauuaucuguucuuacgauagaaccagauggcucuauugcuuauaaagaauaugaggauaugauugcaaccaaaugcaccugcagguag

SEQ ID NO: 340176 - RNA, 1365 nt, Artificial Sequence
  derived and/or modified sequence
auggcucgaccuaacaaguuccugcucugguucuguuguuucgccuggcuguguuucccaauuagucucggcucccaggcuucugggggcgaagcccagauugcagcuuccgccgaauuagaauccggcgcuaugccuuggucucugcuucagcacaucgaugaacgagaccgagcagggcuucuucccgcacuguuuaaaguucucuccgugggucgcggugguaguccucgacuucagcccgacuccagggcacugcauuauaugaaaaaguuauacaagaccuaugcaaccaaagagggcauaccaaaaagcaauagaucccaucucuacaacaccguccgauuauuuacaccuuguaccagacacaaacaagcaccaggcgaccaagucacaggcauucugcccagcguggaguugcuauuuaaccuagauaggaucacaaccgucgagcaucuccucaaaucaguccugcuguacaacaucaacaauuccguaucguuuagcagcgcagugaagugcguguguaacuuaaugaucaaggagccaaaaucuucaucaaggacucuugggagggcaccuuacucuuucacuuuuaauucccaauucgaauuugggaaaaagcacaaguggauucagaucgacguuaccagcuugcuucagccucucguggcuucuaacaaaagaucuauccauaugagcauuaauuuuacuuguaugaaagaccagcuagaacacccaagcgcccagaacggccuguucaauaugacacuugugagcccaagccugauccucuaucucaaugacacuuccgcacaagccuaucacaguugguacucccuccacuacaaaaggcguccuucccagggucccgaccaagagagaucgcuaagcgccuaucccguaggagaggaagcugcggaggacgguagaagcucgcaccauagacaccggcgcgggcaagaaacagucuccucagagcucaagaaaccccuaggcccugcgaguuuuaaucucucagaguauuucagacaauuucuacuuccucagaaugaaugugaacuucacgauuucagauuaaguuuuucccaacuuaagugggacaauuggaucguggcuccacacagguauaacccucgauauuguaaaggagauuguccuagggcugugggccaccguuacgguuccccaguccacacaaugguccagaauaucauauacgaaaaauuggacucgucagugccccgcccguccugcguucccgcuaaguacucuccgcucuccguauugaccauugagcccgacgggagcaucgcuuauaaagaauacgaagacaugauagcuacaaaauguacaugccgauag

SEQ ID NO: 340177 - RNA, 1365 nt, Artificial Sequence
  derived and/or modified sequence
auggcucgccccaacaaguuucuacuuugguucugcuguuuugcuuggcugugcuuucccauaucccucggaucacaagcgucuggcggagaagcucagaucgcugcuucagccgaauuggaaucuggcgcgaugccguggagccuguugcagcacaucgacgaacgcgaccgcgccggccuucugccagcccuuuucaagguucugagcguaggcaggggcggcagucccagacuucaaccggauaguagggcacuccacuacaugaagaaacuguauaaaacauacgccacaaaggaaggaauccccaagucuaaccgaagccaccucuauaauaccgugcgacuguuuaccccuuguacucgucacaaacaggcgcccggcgaucaaguuaccggcauccuucccucgguggagcugcuuuucaaucuagauaggauaacuacagucgaacacuuguuaaagagcguuuugcucuacaacaucaacaauuccgucucuuuuaguucagcggucaaaugugugugcaaucugaugaucaaagagccuaaauccucaucacguacacuuggacgggccccuuacagcuuuaccuuuaauucucaauuugaauuugggaaaaaacacaaauggauucagauugaugugacuucccugcugcagccccucguugccucaaacaaaagauccauacauaugaguaucaauuucaccugcaugaaagaccagcucgaacaucccucugcucagaacggccuauucaacaugacccucguaucuccaucgcugauacucuaccugaacgacacuucugcacaggccuaucacagcugguauagccugcauuauaagagaaggcccucucaaggacccgaccaagaacgcucccuuagugccuaucccgugggcgaagaggcugcagaagaugggcggagcagccaccaccgccauagaagaggacaagaaaccgucagcagcgagcugaaaaagccacugggucccgccucguuuaaucucagcgaauauuuccgccaguuucuccugccacaaaaugaaugugaacuacacgauuuccgccuguccuucagucagcuaaagugggacaacuggaucguggcuccacaucgguauaauccuagguacugcaagggcgacuguccaagagcuguuggucauagauacgguuccccaguucacaccaugguccaaaauaucauuuacgaaaaacuggauuccagcguuccccgcccaaguugcgucccugccaaauauaguccacuguccgugcucaccauugaaccugacgguuccaucgccuacaaagaauaugaagacaugauagccacaaaaugcacgugccgguag

SEQ ID NO: 340178 - protein, 938 aa, Artificial Sequence
  derived and/or modified sequence
MDWDDEYSHNSFDLHCLLNSFPGDLEFEQIFSDIDEKIEQNAASIKHCIKEIQSEINKQCPGVQLQTTTDCFEWLTNYNYSTSESSFISHGDLIKFFKTLQDLLKNEQNQEEMTLDLLWDLSCHSSVSFPSTLSGTSFHFLSRTSLHSVEDNSSMDVKSMWDDIRLHLRRFLVSKLQSHNEINNSQQKILLKKQCLQQLLFLYPESEVIIKYQNIQNKLLANLLWNCFPSYNRDSNLDVIAHGYQSTMLKLYSVIKEDFNTLCEILAPSSMVKFIKETYLDTVTEEMAKFLENFCELQFRENAVRVVKTSKSSSKHRGAVHALVTTECPQKGRNFSLPLDKVEFLSQLIKSFMKLEKGVQELFDEILLSLKITRDTSGILEKSDREVVMEKPRANETNIPSEQSLPGKEATLLDFGWRSAFKEVSLPMAHCVVTAIEGFSTKILQQEQNERSSAVSYAMNLVNVQQVWQDSHMFPEEEQPKKIGKFCSDIMEKLDTMLPLALACRDDSFQEIRANLVEACCKVATAVLQRLQERAKEVPSKAPLKNLHTYLSTAVYVFQHFKRYDNLMKEMTKKPIFLVLVQRYQEFINTLQFQVTNYCVRVCATSILQDAESHHWDDYKAFYEGERCSFSIQMWHYFCWSLHYDLWTILPPKLAQEILVEVLEKSLSLLASRYARAHPSRKRTPQLRLDVTTILICTENMLWSVCTSVQKLLNPHQHTDDKIFKIHTHCNNLFTTLVILTSPLTELYKTFQHGLDESASDSLKSFFKQPLYWVSCISHFYPSLLRTPSAGGLKAEGQLKLLLSQPRCNWNLLLETLLHHDGLLLRILLKSSKRTFQEQVSDTENNLNQGPSLMEAIFKILYHCSFSPQTFANVFVSYMEEEQLWDFLYNIPGMRHLLFVKEMFYRYLYVPLKMFRSCIDTGFAESVVGESLPYIFSV

SEQ ID NO: 340179 - protein, 324 aa, Artificial Sequence
  derived and/or modified sequence
MDWDDEYSHNSFDLHCLLNSFPGDLEFEQIFSDIDEKIEQNAASIKHCIKEIQSEINKQCPGVQLQTTTDCFEWLTNYNYSTSESSFISHGDLIKFFKTLQDLLKNEQNQEEMTLDLLWDLSCHSSVSFPSTLSGTSFHFLSRTSLHSVEDNSSMDVKSMWDDIRLHLRRFLVSKLQSHNEINNSQQKILLKKQCLQQLLFLYPESEVIIKYQNIQNKLLANLLWNCFPSYNRDSNLDVIAHGYQSTMLKLYSVIKEDFNTLCEILAPSSMVKFIKETYLDTVTEEMAKFLENFCELQFRENAVRVVKTSKSSSKHRGAVHALG

SEQ ID NO: 340180 - DNA, 2817 bp, Artificial Sequence
  derived and/or modified sequence
atggactgggacgacgagtacagccacaacagcttcgacctgcactgcctgctgaacagcttccccggcgacctggagttcgagcagatcttcagcgacatcgacgagaagatcgagcagaacgccgccagcatcaagcactgcatcaaggagatccagagcgagatcaacaagcagtgccccggcgtgcagctgcagaccaccaccgactgcttcgagtggctgaccaactacaactacagcaccagcgagagcagcttcatcagccacggcgacctgatcaagttcttcaagaccctgcaggacctgctgaagaacgagcagaaccaggaggagatgaccctggacctgctgtgggacctgagctgccacagcagcgtgagcttccccagcaccctgagcggcaccagcttccacttcctgagcagaaccagcctgcacagcgtggaggacaacagcagcatggacgtgaagagcatgtgggacgacatcagactgcacctgagaagattcctggtgagcaagctgcagagccacaacgagatcaacaacagccagcagaagatcctgctgaagaagcagtgcctgcagcagctgctgttcctgtaccccgagagcgaggtgatcatcaagtaccagaacatccagaacaagctgctggccaacctgctgtggaactgcttccccagctacaacagagacagcaacctggacgtgatcgcccacggctaccagagcaccatgctgaagctgtacagcgtgatcaaggaggacttcaacaccctgtgcgagatcctggcccccagcagcatggtgaagttcatcaaggagacctacctggacaccgtgaccgaggagatggccaagttcctggagaacttctgcgagctgcagttcagagagaacgccgtgagagtggtgaagaccagcaagagcagcagcaagcacagaggcgccgtgcacgccctggtgaccaccgagtgcccccagaagggcagaaacttcagcctgcccctggacaaggtggagttcctgagccagctgatcaagagcttcatgaagctggagaagggcgtgcaggagctgttcgacgagatcctgctgagcctgaagatcaccagagacaccagcggcatcctggagaagagcgacagagaggtggtgatggagaagcccagagccaacgagaccaacatccccagcgagcagagcctgcccggcaaggaggccaccctgctggacttcggctggagaagcgccttcaaggaggtgagcctgcccatggcccactgcgtggtgaccgccatcgagggcttcagcaccaagatcctgcagcaggagcagaacgagagaagcagcgccgtgagctacgccatgaacctggtgaacgtgcagcaggtgtggcaggacagccacatgttccccgaggaggagcagcccaagaagatcggcaagttctgcagcgacatcatggagaagctggacaccatgctgcccctggccctggcctgcagagacgacagcttccaggagatcagagccaacctggtggaggcctgctgcaaggtggccaccgccgtgctgcagagactgcaggagagagccaaggaggtgcccagcaaggcccccctgaagaacctgcacacctacctgagcaccgccgtgtacgtgttccagcacttcaagagatacgacaacctgatgaaggagatgaccaagaagcccatcttcctggtgctggtgcagagataccaggagttcatcaacaccctgcagttccaggtgaccaactactgcgtgagagtgtgcgccaccagcatcctgcaggacgccgagagccaccactgggacgactacaaggccttctacgagggcgagagatgcagcttcagcatccagatgtggcactacttctgctggagcctgcactacgacctgtggaccatcctgccccccaagctggcccaggagatcctggtggaggtgctggagaagagcctgagcctgctggccagcagatacgccagagcccaccccagcagaaagagaaccccccagctgagactggacgtgaccaccatcctgatctgcaccgagaacatgctgtggagcgtgtgcaccagcgtgcagaagctgctgaacccccaccagcacaccgacgacaagatcttcaagatccacacccactgcaacaacctgttcaccaccctggtgatcctgaccagccccctgaccgagctgtacaagaccttccagcacggcctggacgagagcgccagcgacagcctgaagagcttcttcaagcagcccctgtactgggtgagctgcatcagccacttctaccccagcctgctgagaacccccagcgccggcggcctgaaggccgagggccagctgaagctgctgctgagccagcccagatgcaactggaacctgctgctggagaccctgctgcaccacgacggcctgctgctgagaatcctgctgaagagcagcaagagaaccttccaggagcaggtgagcgacaccgagaacaacctgaaccagggccccagcctgatggaggccatcttcaagatcctgtaccactgcagcttcagcccccagaccttcgccaacgtgttcgtgagctacatggaggaggagcagctgtgggacttcctgtacaacatccccggcatgagacacctgctgttcgtgaaggagatgttctacagatacctgtacgtgcccctgaagatgttcagaagctgcatcgacaccggcttcgccgagagcgtggtgggcgagagcctgccctacatcttcagcgtgtag

SEQ ID NO: 340181 - DNA, 2817 bp, Artificial Sequence
  derived and/or modified sequence
atggattgggacgacgagtactcccacaattctttcgacttgcactgtctgctgaactcatttccaggggatttggaattcgagcagattttctccgatattgacgaaaagatcgagcaaaatgccgctagtattaaacactgtattaaggaaattcaaagcgaaatcaacaaacagtgtccaggtgtgcagttgcagacaaccaccgattgctttgaatggcttaccaactataattacagcacaagcgagagcagcttcatttcccacggcgacctcattaagtttttcaagaccctgcaagatctcctgaagaacgagcagaatcaggaagagatgactttagatctgttgtgggacctcagctgtcattcctccgtgagcttcccatcaacactgagcgggaccagcttccacttcttgtctcggacctcccttcactcagtcgaggacaatagctcaatggacgtgaagtcaatgtgggatgacattcgcctgcatctccgacggtttttggtctccaaactccagtcccacaatgaaataaataacagtcagcaaaaaattctgttgaagaaacagtgtttacagcagctgctgtttctttatcccgaatccgaggtgataataaaatatcaaaacatccagaacaagctgcttgccaacctcctctggaactgcttcccatcctataaccgggactcaaatttggacgtaatcgcgcacgggtaccagtctacaatgctgaagctgtacagcgtgataaaggaagacttcaacacactgtgtgaaattctagctccttcctctatggtaaagttcattaaagaaacgtacctggataccgtgaccgaggaaatggctaagtttctcgagaatttctgtgagctacaatttagggagaacgccgtgcgagtagtgaaaacttcaaaaagcagctccaagcataggggagccgtacacgccctggtgaccacagagtgcccccagaaagggcgtaattttagtctgcccctggataaagtagaattcttgagccagcttatcaagagcttcatgaaattagaaaaaggcgtgcaggagcttttcgatgagattctcctctctctaaaaattacacgagatacttcagggatcctggaaaaaagcgaccgagaggtggtaatggagaagcccagggctaatgagaccaatatcccgagtgagcagtctctgccagggaaagaggctaccctgctggatttcggctggcgctctgcgtttaaggaggtctcattgccgatggcacactgcgtggtgaccgcaattgagggctttagtacaaagatcttgcagcaagagcagaacgagaggagcagcgcggtctcttacgccatgaatctggtgaacgtccagcaggtatggcaagactctcatatgtttccagaggaggagcagcccaaaaagatcggtaaattctgctcagatatcatggagaaattagataccatgctgcctttggcgcttgcatgcagagatgattccttccaggagatcagggcaaatcttgtcgaagcctgctgtaaagtagcgacagccgtgctccagcgccttcaagagcgagccaaggaagtcccctctaaggccccactgaagaacttgcacacctacctctcaacagccgtgtatgtgttccagcattttaagaggtacgataatcttatgaaggagatgactaaaaagccaatctttctcgtcctggttcaaaggtaccaggaatttatcaacaccctccaatttcaggtcaccaactattgtgtcagggtgtgcgcaaccagtatcctccaggacgccgagtcccatcactgggatgattacaaggccttttacgagggcgagcgctgcagtttttcaatacaaatgtggcattacttttgttggagtctgcactatgatctttggaccatcctgccccctaaacttgcccaggagattctggtagaggtgctggaaaaaagcctgtccttgctggcttccagatatgccagagcacaccctagcaggaagaggacccctcagctacggctggatgtgacgaccatactgatatgcaccgaaaatatgctgtggtctgtgtgcacctccgtccaaaaacttctgaacccgcaccagcatacggacgataaaatctttaagatacacacccactgcaacaatctattcactacactcgtgatcctcacctccccattaacggagctttataagactttccaacacggactggatgaatccgcctctgactcactgaagtcctttttcaaacagccgctgtattgggtgagttgtattagccacttttacccctcacttctccggaccccctcagctggaggcctcaaggccgagggtcaacttaagttgttgttaagccagcccagatgcaactggaatctgctccttgaaactctgctgcaccacgatggcttgctgctcagaatcctgctgaaatcatctaaaaggacattccaggagcaggtgagtgacactgaaaacaatctaaatcagggacctagtttgatggaagccatattcaagatattgtatcactgttctttctcccctcagactttcgcaaatgttttcgtgtcttatatggaggaagaacagctctgggactttctgtacaatatcccagggatgcggcacttgctgtttgtcaaagaaatgttttaccggtacctttatgtgcccctgaaaatgttccgctcctgtattgacacaggatttgccgagtcagtggtgggtgagtccctgccatatatatttagcgtgtag

SEQ ID NO: 340182 - DNA, 2817 bp, Artificial Sequence
  derived and/or modified sequence
atggactgggatgatgagtacagccacaacagctttgacctgcactgcctgctgaacagcttccctggggacctggagtttgagcagatcttcagtgacattgatgagaagattgagcagaatgctgccagcatcaagcactgcatcaaggagatccagagcgagatcaacaagcagtgccctggggtgcagctgcagaccaccacagactgctttgagtggctgaccaactacaactacagcaccagcgagagcagcttcatcagccacggggacctgatcaagttcttcaagaccctgcaggacctgctgaagaatgagcagaaccaggaggagatgaccctggacctgctgtgggacctgagctgccacagctctgtgtccttccccagcaccctgagcggcaccagcttccacttcctgagcaggaccagcctgcacagcgtggaggacaacagctccatggatgtgaagtccatgtgggatgacatccggctgcacctgcggcgcttcctggtgtccaagctgcagagccacaatgagatcaacaacagccagcagaagatcctgctgaagaagcagtgcctgcagcagctgctcttcctgtacccagagagcgaggtgatcatcaagtaccagaacatccagaacaagctgctggccaacctgctgtggaactgcttccccagctacaacagagacagcaacctggatgtgattgcccacggctaccagagcaccatgctgaagctgtacagcgtcatcaaggaggacttcaacaccctgtgtgagatcctggcccccagctccatggtgaagttcatcaaggagacctacctggacacagtgacagaggagatggccaagttcctggagaacttctgtgagctgcagttcagagaaaatgctgtgcgggtggtgaagaccagcaagagcagcagcaagcacagaggagctgtgcacgccctggtgaccacagaatgtccccagaagggcaggaacttcagcctgcccctggacaaggtggagttcctgagccagctgatcaagagcttcatgaagctggagaagggcgtgcaggagctgtttgatgagatcctgctgagcctgaagatcacccgggacaccagcggcatcctggagaagagtgaccgggaggtggtgatggagaagccccgggccaatgagaccaacatccccagcgagcagagcctgcccgggaaggaggccaccctgctggactttggctggaggtctgccttcaaggaggtgtccctgcccatggcccactgtgtggtgacagccatcgagggcttcagcaccaagatcctgcagcaggagcagaatgaaagaagcagcgctgtgtcctatgccatgaacctggtgaatgtgcagcaggtgtggcaggacagccacatgtttcctgaggaggagcagcccaagaagattggcaagttctgcagcgacatcatggagaagctggacaccatgctgcccctggccctggcctgcagagatgacagcttccaggagatccgggccaacctggtggaggcctgctgcaaggtggccacagctgtgctgcagaggctgcaggagcgggccaaggaggtgcccagcaaggcccccctgaagaacctgcacacctacctgagcacagctgtgtatgtgttccagcacttcaagagatatgacaacctgatgaaggagatgaccaagaagcccatcttcctggtgctggtgcagcgctaccaggagttcatcaacaccctgcagttccaggtgaccaactactgtgtgcgggtgtgtgccaccagcatcctgcaggatgctgagagccaccactgggatgactacaaggccttctatgaaggagagcgctgcagcttcagcatccagatgtggcactacttctgctggagcctgcactatgacctgtggaccatcctgccccccaagctggcccaggagatcctggtggaggtgctggagaagagcctgagcctgctggccagccgctatgcccgggcccaccccagcaggaagaggaccccccagctgcggctggatgtgaccaccatcctgatctgcacagagaacatgctgtggagcgtgtgcacctctgtgcagaagctgctgaacccccaccagcacacagatgacaagatcttcaagatccacacccactgcaacaacctcttcaccaccctggtgatcctgaccagccccctgacagagctgtacaagaccttccagcacggcctggatgagagcgccagtgacagcctgaagagcttcttcaagcagcccctgtactgggtgtcctgcatcagccacttctaccccagcctgctgcggaccccatctgctgggggcctgaaggccgagggccagctgaagctgctgctgagccagccccgctgcaactggaacctgctgctggagaccctgctgcaccatgatggcctgctgctgcgcatcctgctgaagagcagcaagaggaccttccaggagcaggtgtctgacacagagaacaacctgaaccagggccccagcctgatggaggccatcttcaagatcctgtaccactgcagcttcagcccccagacctttgccaacgtgtttgtgtcctacatggaggaggagcagctgtgggacttcctgtacaacatccctggcatgaggcacctgctgtttgtgaaggagatgttctaccgctacctgtatgtgcccctgaagatgttccgcagctgcatcgacaccggctttgctgagagcgtggtgggggagagcctgccctacatcttctctgtgtag

SEQ ID NO: 340183 - DNA, 2817 bp, Artificial Sequence
  derived and/or modified sequence
atggactgggacgacgagtacagccacaacagcttcgacctgcactgtctgctgaacagtttcccaggggatttagagttcgagcaaatctttagtgacatcgacgaaaaaattgaacagaatgctgccagtataaagcactgtataaaggagattcagtcagagattaataagcagtgccctggcgtgcagctccagacaactacggactgctttgaatggctcaccaattataattacagcaccagtgaatcatcttttatctcgcacggtgacctgataaagtttttcaagaccctgcaagacttgctcaaaaatgaacaaaatcaagaggaaatgaccttagacctactctgggatctatcctgccatagctccgtctcctttccaagtacactgagcggcactagctttcactttctctcccgcacatccctccacagcgtggaggataacagctctatggacgtgaagtctatgtgggatgatattcgcctgcatttgcgtaggtttctggtgagtaagctccagtcgcataatgagatcaacaattctcagcagaagattctgttgaagaagcaatgtctgcagcagctgctattcctctacccggaatccgaggtcatcattaagtaccagaacatccagaataagttgttggccaatctgttgtggaattgctttccttcatacaaccgtgatagcaatctcgacgtcatcgcacatgggtaccaatctactatgctgaagttatactctgtaataaaggaggactttaacacactttgcgagattctagcacccagttccatggtgaaatttataaaggaaacttatttagacactgttacggaagaaatggctaagttcctggaaaatttctgcgagttgcaattcagggagaacgccgtgcgggtcgttaaaacctctaagtccagttcaaagcataggggggccgtgcacgccctggttaccaccgagtgtccacagaaaggccgtaatttttctctcccattggataaagtggagtttctgtctcagctcattaaatctttcatgaagcttgaaaaaggcgtccaggagcttttcgatgagattttgctttccctcaagatcaccagagatacaagcggcattctggagaagtctgaccgtgaagtggttatggagaagccgagagccaacgagacgaacatccctagcgagcaaagcttgcctggaaaggaggccacactcctggattttggatggcggtctgcctttaaggaagtgagtctacccatggcccattgcgtggtcactgctattgaaggattttccactaagattttacaacaggagcaaaacgagagatcctcagctgtgagctacgctatgaacctggtcaacgtgcaacaagtttggcaggattctcatatgttccctgaggaggagcaacccaagaagatcggaaaattttgcagtgacatcatggagaagcttgatacaatgctgccactggcactggcttgccgcgacgacagtttccaggagatccgggccaacttggtggaagcttgctgcaaagtggcaacggccgttctgcaaagattgcaggagagggctaaggaggtgccttcaaaggccccactgaaaaatctgcacacgtacttaagtactgctgtctatgttttccagcacttcaaacgttacgataacctgatgaaggagatgacgaagaagccgatctttcttgttctggtccagcgttaccaggaatttattaacaccttacagttccaggtcaccaattactgtgtaagagtgtgtgccacatccattctgcaagatgcagagagccaccactgggacgactataaagccttttacgaaggcgaacgttgttcgttcagtattcagatgtggcactacttctgctggtctctccattatgacctgtggacgatactacctcctaagctggcacaagagattctcgtggaagtgttggaaaagtctctttctttactcgcatcacggtatgcgcgggctcacccctccagaaaacgtactccccagctcagattggatgtgaccactatactgatatgtaccgaaaatatgctgtggagcgtgtgcacatccgtccagaagttactcaacccccatcagcatactgatgataagattttcaagattcatactcactgcaataacctgtttaccacacttgtcatacttacctcccctctgacagagctgtacaagacttttcagcatggtctcgacgaatccgctagcgactcgcttaagtcttttttcaagcagccattatactgggtttcttgcatctctcacttttacccctcactgctccggacccctagcgctggtggactaaaggcagagggccaattgaagctcctcctctcacaaccccggtgcaactggaacctcttactcgaaacactgcttcaccatgacggcctactgttaaggatactgctgaagtcctctaaaagaacgtttcaggagcaggtatctgacacagaaaataacctcaaccagggaccgtctctcatggaagcaattttcaaaatcttataccactgcagcttctctccccagacctttgccaatgtcttcgtgtcttacatggaggaggagcagctttgggatttcttgtacaatatacctggcatgcgccatctcctcttcgtgaaggagatgttttacagatatctgtatgtacctctcaaaatgttccggagttgcattgatacggggtttgctgagagcgtcgtcggtgaaagcctcccttacattttctctgtgtag

SEQ ID NO: 340184 - DNA, 2817 bp, Artificial Sequence
  derived and/or modified sequence
atggattgggatgatgaatacagccacaactctttcgacttgcattgtctgcttaacagctttcctggagatctcgagttcgaacagattttttccgatatcgacgagaaaattgaacagaatgcggcatccataaagcactgtataaaggaaatccagagcgagattaacaagcaatgccctggcgttcaactacagactacaacagactgcttcgaatggcttacaaactacaactatagcacttcagaatcctccttcatctcgcacggagatcttatcaaattttttaaaactctgcaggatttgttgaagaacgagcagaaccaggaagagatgacgctggatttactctgggacctctcctgccatagcagcgtcagttttccttctacactctctgggacctcctttcacttcctgtcccgcacctccctgcattccgtggaagacaattctagtatggacgtaaaatccatgtgggatgatattagactccatctcaggcgattcctggtgagcaaactgcagagtcacaatgagatcaataattcacagcagaaaattcttctgaagaaacaatgtctacaacagttactgtttttgtatcctgaatccgaagtgattataaaatatcaaaatatacaaaacaaactactggccaacctcctctggaactgcttcccctcatacaatcgggattcaaatttggatgtcatcgctcacggttatcagtccacaatgctgaagctctacagcgtgatcaaagaagacttcaacaccctttgtgagattctcgctccttcttccatggtgaaatttataaaggagacctatctcgatactgtcactgaggaaatggccaaatttctcgagaacttttgcgaactacaattcagggagaacgccgtgcgcgtggtaaagacctcgaaatctagctccaaacaccggggtgcagttcatgctctggttaccaccgaatgtccacaaaaaggacgtaacttctctctcccactggataaggtggaattcctttcacagcttatcaagtccttcatgaagctggagaagggagtccaagaactgttcgatgaaatcctgcttagccttaagattactcgggacactagcggcatactggagaaatccgatagagaggtggtcatggaaaagccaagagcgaacgaaaccaatatcccctccgaacagtccctgcctggcaaagaggcaactctcctggattttgggtggcgatcggctttcaaggaagtctctttgccaatggctcattgtgtcgttactgccatcgaagggttcagcactaagattttacagcaggaacagaacgagaggagcagtgcagtgtcgtacgcaatgaacctggtgaatgtacagcaggtgtggcaagactctcacatgtttcccgaagaggagcagccaaaaaagattgggaagttctgttcagatattatggaaaagctggataccatgctgcctctggcactggcctgccgggatgatagcttccaggagattcgagctaacctggttgaggcctgttgcaaagtagcaaccgcagtccttcaacgcctgcaggagcgtgccaaggaagtgccgtcaaaggcccctcttaagaacctgcacacctacctgtccacggccgtttatgtgtttcagcattttaaaaggtacgataatttgatgaaagagatgactaagaagccgatatttctcgttttggtacagagataccaggaatttataaacactctgcagttccaggtgacaaattattgtgtgcgggtctgtgctacttctatcctccaggacgccgaatcccatcactgggatgactacaaggccttctatgagggcgagcggtgtagtttcagcatacagatgtggcactacttttgctggagcctgcattatgacctgtggaccattctgcctccaaaacttgctcaagaaatcttagttgaggtgctggaaaaaagcctgtctctgctggcgtcccggtatgccagggctcacccatcccgcaaaaggactccacagttgcgactggatgtgacgaccatcttgatctgcactgagaatatgctgtggtcagtctgcacctccgttcagaaattactgaacccgcaccaacatacagatgacaagatctttaaaatacacactcactgtaataacctgttcacgaccttggtcatccttacaagtccactcactgagctgtacaagacgttccaacacggcctggatgagtccgccagcgactctctaaagtccttcttcaaacagcctctgtactgggtgagctgtatctcacatttctacccgagccttttgagaacgccttcagctgggggactcaaggcggaaggccagctcaaattactgttatcccaacctcgatgcaactggaacctcctgctcgagaccctgctgcatcatgatggtctgctgcttaggatcctgctgaagagctctaagagaacttttcaagaacaagtctctgatacagagaataatctgaaccaggggccatctctcatggaagctatctttaagatactctaccattgcagtttttcaccgcagacttttgcaaacgtgttcgtcagctatatggaagaggaacaactctgggatttcctatataatatcccgggaatgaggcacctgctgttcgtgaaggaaatgttctatagatatctgtacgtgcctctcaaaatgttccgtagttgtattgatacgggcttcgctgagtccgtggttggtgaatctctgccctatattttcagcgtctag

SEQ ID NO: 340185 - DNA, 3074 bp, Artificial Sequence
  derived and/or modified sequence
agtgacgctccggagccgtcgccagggtggtaatacctggtgcagagcttgagtctggccagcgggtcaggctcttgctagatcagcaccggaggtggaagactggtacattttacatactttgggaaaaaaaaacgttgctgaagttactagaaaagagacagttcttctgctgacaactcttcaggaaataattttctacctccttaggattcgaagaccagttcattcttagtgtcttctgaaataaaattagaatggattgggatgatgaatattctcataattcttttgacctacattgtttgttaaactcatttcctggagacttggagtttgagcagatcttcagtgacattgatgaaaagattgaacaaaatgctgcaagcataaaacattgcattaaagagatacagtccgaaattaacaaacaatgtccaggtgtgcagctgcaaacaacaactgactgctttgaatggctaactaactataattacagtacatctgaatcatctttcatttctcatggagacttgataaaatttttcaaaacactgcaagatttgttgaagaatgaacaaaatcaagaagaaatgacattggatttactttgggacctctcctgccacagcagcgtttcattcccatcaaccctaagtggaacatctttccatttcctctctaggacgtctcttcattctgttgaagataattcctctatggatgtcaagtctatgtgggatgatataagactgcatcttcgacgcttcttagtgagcaaattacaaagccataatgaaataaacaattcacagcaaaaaattttattgaaaaagcagtgcttacaacaactcttgtttctttatccagaatcagaagttataatcaaataccaaaacatacagaataaactgttggctaatcttctgtggaactgctttccttcttacaacagagattcaaatttagatgtaatagctcatggatatcaaagtacaatgcttaagttatactcagtaataaaagaggattttaacacactatgtgaaattttagctccatcttcaatggtgaaattcattaaagaaacttacctggatactgttacagaagaaatggcaaaatttcttgaaaatttttgtgagctgcagttcagagaaaatgctgttcgtgtggttaaaacaagcaagagctccagcaagcatagaggagcagtgcatgctttggttactactgaatgcccacagaaaggaagaaacttctctctccctttagacaaagtcgaattcttatcgcagctcataaaatcctttatgaaactggaaaaaggtgttcaagaattgtttgacgaaatacttttatcactcaagataaccagggatacttcaggaattttggagaaatccgatagagaggttgtaatggaaaaacctagagcaaacgaaaccaatattccttccgagcaatcactaccaggaaaagaggctaccttactagattttggctggagaagtgcatttaaagaagtgtctcttcccatggcgcactgcgtagtaactgcaattgaaggtttttccacaaaaattctccaacaggaacagaatgaaaggtcttcagctgtgagctatgctatgaaccttgtaaatgtccagcaagtttggcaagacagccatatgtttcctgaggaggaacaaccaaagaaaattggaaaattttgttctgacatcatggaaaaacttgacacaatgcttccactggctctggcatgcagagatgattcttttcaggaaattagagcaaacttggtggaggcctgttgtaaagtggcaacagctgtcctgcagagactgcaagagagagccaaggaggttccttccaaagcacccctgaaaaacttgcacacatacctctccacagcggtgtatgtcttccagcatttcaagcgatatgataatttgatgaaggaaatgactaaaaaacccatattcctggtgcttgtccaacgatatcaggaattcatcaacactctacagtttcaggttacgaactactgcgtcagagtttgtgctacaagcattttacaggatgctgagagccaccactgggatgactacaaagctttttatgagggggaaagatgttccttctcgatccagatgtggcattatttctgctggtctcttcattacgatctctggaccattctgcctcctaagttagcccaggagattctagtggaagtgctggagaaatctttgagtctactggcctccagatacgctcgggcccaccccagccgtaaaagaactccacagttaagacttgatgtcacaacaattttgatatgcactgagaacatgttatggtcagtttgtacatctgtacagaaacttttgaatcctcatcagcatacagatgataaaatttttaaaattcacactcattgtaataatctgtttacaacattagtcattttgacttcaccattaacagaattatataagacttttcagcatggcctggatgagtctgcttcagattccttaaaatcattttttaagcaaccattatattgggtttcttgcatatcacatttctacccttctttactcaggactccatcagctggaggactgaaagccgagggtcagttgaaactgctcttatcccagccacgttgtaactggaacttgcttctggaaaccctactgcatcatgatggacttttactgagaatcttgctgaagagctcaaaacgtacctttcaagaacaagtttccgacacagaaaataacctgaaccaaggacccagcttgatggaagccatctttaaaatattgtaccattgcagtttttctccacaaacatttgcaaacgtttttgtgagctacatggaagaagagcaattatgggactttttatataacatcccaggtatgagacatttactgtttgtaaaagaaatgttctatagatacttatatgtacctttaaagatgtttagaagttgtattgatactggttttgctgaatctgttgttggtgaaagtttaccttacattttttcagtataa

SEQ ID NO: 340186 - DNA, 291 bp, Artificial Sequence
  derived and/or modified sequence
atgaagagaagcaaggagctgatcaccaagaaccacagccaggaggagaccagcatcctgagatgctggaagtgcagaaagtgcatcgccagcagcggctgcttcatggagtacctggagaaccaggtgatcaaggacaaggacgacagcgtggacgcccagaacatctgccacgtgtggcacatgaacgtggaggccctgcccgagtggatcagctgcctgatccagaagggcaagtacagcggcgtgggcctgctggaccacatggtgagcatctacctgctgatctag

SEQ ID NO: 340187 - DNA, 324 bp, Artificial Sequence
  derived and/or modified sequence
atgaagagaagcaaggagctgatcaccaagaaccacagccaggaggagaccagcatcctgagatgctggaagtgcagaaagtgcatcgccagcagcggctgcttcatggagtacctggagaaccaggtgatcaaggacaaggacgacagcgtggacgcccagaacatctgccacgtgtggcacatgaacgtggaggccctgcccgagtggatcagctgcctgatccagaaggcccagtggaccgtgggcaagctgaactgccccttctgcggcgccagactgggcggcttcaacttcgtgagcacccccaagtgcagctgctag

SEQ ID NO: 340188 - DNA, 291 bp, Artificial Sequence
  derived and/or modified sequence
atgaaacgcagtaaggagctcataaccaagaaccactcccaggaggagactagcatcttgaggtgctggaagtgtcgaaaatgcattgcatcatccggatgctttatggagtacctggaaaaccaggtcatcaaagataaggacgattctgttgatgcacagaatatttgccacgtgtggcacatgaatgtggaggctttgcccgagtggatctcctgcctgattcagaaaggtaagtacagtggagtgggccttctagaccacatggtctcgatatatctgctgatctag

SEQ ID NO: 340189 - DNA, 324 bp, Artificial Sequence
  derived and/or modified sequence
atgaagcggtccaaagagctgataaccaaaaatcattcccaagaggaaacatccattctgagatgctggaagtgcagaaagtgcatcgcaagctccggctgtttcatggagtatttggagaaccaggtaatcaaggataaagatgacagtgtggacgctcagaatatctgtcatgtgtggcatatgaatgtggaagcgctgcccgagtggatcagctgtctgattcagaaagcacagtggacggtgggtaagctgaactgtccattttgcggagctcggctgggcggattcaacttcgtctccacacctaaatgctcgtgttag

SEQ ID NO: 340190 - DNA, 291 bp, Artificial Sequence
  derived and/or modified sequence
atgaagaggagcaaggagctgatcaccaagaaccacagccaggaggagaccagcatcctgcgctgctggaagtgcaggaaatgtattgccagcagcggctgcttcatggagtacctggagaaccaggtgatcaaggacaaggatgacagcgtggatgcccagaacatctgccacgtgtggcacatgaatgtggaggccctgcctgagtggatcagctgcctgatccagaagggcaagtacagcggcgtgggcctgctggaccacatggtgtccatctacctgctgatctag

SEQ ID NO: 340191 - DNA, 324 bp, Artificial Sequence
  derived and/or modified sequence
atgaagaggagcaaggagctgatcaccaagaaccacagccaggaggagaccagcatcctgcgctgctggaagtgcaggaaatgtattgccagcagcggctgcttcatggagtacctggagaaccaggtgatcaaggacaaggatgacagcgtggatgcccagaacatctgccacgtgtggcacatgaatgtggaggccctgcctgagtggatcagctgcctgatccagaaggcccagtggacagtgggcaagctgaactgccccttctgtggggcccggctgggcggcttcaactttgtgtccacccccaagtgcagctgctag

SEQ ID NO: 340192 - DNA, 291 bp, Artificial Sequence
  derived and/or modified sequence
atgaagcggagcaaggagctgatcaccaagaaccacagccaggaggaaacaagcattctccgctgttggaagtgtagaaagtgtattgccagttctggatgcttcatggagtacctggagaaccaggtgattaaggacaaagatgatagtgtggatgcccagaacatatgccatgtttggcacatgaatgtggaagcactgccagagtggatcagctgcttgatacagaaagggaaatattcgggagttggattgttggaccatatggtgtctatatacctcctgatttag

SEQ ID NO: 340193 - DNA, 324 bp, Artificial Sequence
  derived and/or modified sequence
atgaagcggagcaaggagctgatcaccaagaaccacagccaggaggagacgtccatcttacggtgctggaaatgtagaaagtgcatcgccagttctggatgtttcatggaatatctggaaaatcaggtaattaaggacaaagatgatagtgtcgatgctcaaaacatttgtcatgtttggcacatgaacgttgaagccctgcccgagtggatttcatgtttaattcagaaggcccagtggacagtcggaaaattgaactgtcctttctgcggagcacgactaggcggctttaatttcgttagcactccaaaatgttcctgctag

SEQ ID NO: 340194 - DNA, 291 bp, Artificial Sequence
  derived and/or modified sequence
atgaaacggtctaaggagctgatcacaaaaaaccatagccaagaagaaacgtcaatcttgagatgctggaaatgtcgtaaatgtatagcgtccagcggatgtttcatggagtacctagaaaatcaagttattaaagacaaagacgattctgtcgacgctcagaacatctgccacgtttggcacatgaatgtggaggcactcccagagtggatctcatgtctcatccagaagggtaaatactctggcgttggcctgctggaccacatggtgtccatatacttgcttatatag

SEQ ID NO: 340195 - DNA, 324 bp, Artificial Sequence
  derived and/or modified sequence
atgaagcggtctaaagagctcattacaaagaaccattcgcaggaagagacatccatcctcaggtgttggaaatgccgcaaatgtatagcctcctctggctgcttcatggaatatcttgaaaatcaggtcataaaagacaaagatgattccgtggatgcacagaacatctgccacgtgtggcatatgaacgtcgaggcattgcccgagtggatttcatgtctgattcaaaaggcccagtggaccgtggggaaactcaattgccccttttgtggtgccagactgggtggattcaacttcgtgagcactccaaaatgttcatgctag

SEQ ID NO: 340196 - DNA, 767 bp, Artificial Sequence
  derived and/or modified sequence
aaccggcatcgccgccgccggagccgcagcgagtcctcagagcctggctgctggcggccgggagcgccgggacggggcgcgaagccggaggctccgggacgtggatacagatgaaaagaagcaaagaattgataactaaaaatcatagtcaagaggaaacaagtattcttcgttgttggaaatgtagaaaatgtatagcaagctctggttgttttatggagtatcttgagaatcaagtgattaaggataaagatgattcagttgatgctcaaaatatttgtcatgtgtggcacatgaatgtagaagcccttccagaatggataagctgcctaatccaaaaaggtaaatactcaggagtgggattgctggatcatatggtaagtatatatttacttatatgagaaattgtcaaattgttttccagaatggctgtaccattttgcattccaagcagcaaagacttccattttctgtgcgtccttgaaagcaagcactggtattctcagtgttttaaaattttagtcattcaaatacatagacagttgtatcacatcatgactttaatttgcttttccttaaggatgctgaacatatgtgcttattttacatttgtatatattctttagttaagtgtcttcaaatcttttgggctggtgtggcagcttatgtctataatcccagcacttttgagaggccaaggcaggaggattgcttgagttcaggagttcaagaccagcctgggcaacatagcaaaaccttatctctac

SEQ ID NO: 340197 - DNA, 421 bp, Artificial Sequence
  derived and/or modified sequence
tcgcacctgaggctctcggagcggcctcggggcgcgcccacctggaggttggaattacacagggtcgaaaaagctgagtcctggaggcgaggcgctgtagatgaaaagaagcaaagaattgataactaaaaatcatagtcaagaggaaacaagtattcttcgttgttggaaatgtagaaaatgtatagcaagctctggttgttttatggagtatcttgagaatcaagtgattaaggataaagatgattcagttgatgctcaaaatatttgtcatgtgtggcacatgaatgtagaagcccttccagaatggataagctgcctaatccaaaaagcccagtggacagttggaaaactgaattgtcctttctgtggggcccgtttagggggctttaattttgtcagcactccaaaatgttcctgt

SEQ ID NO: 340198 - DNA, 252 bp, Artificial Sequence
  derived and/or modified sequence
atggcagccgctaccgcctcgccgcggagtttgctcgtactgctccaggtggttgtgctggcactggctcagattaggggacccccgggggaaagggggcccccagggccaccaggcccacctggagtgcctgggtctgatggaatcgacggacctccaggccctgtgggattgccaggcgaaattggcatccgcggacctaaaggtgatcctggcccagacggtccgtctgggcccccgggacccccgtag

SEQ ID NO: 340199 - protein, 888 aa, Artificial Sequence [sequence omitted]

SEQ ID NO: 340200 - protein, 819 aa, Artificial Sequence
  derived and/or modified sequence
MHSHPVYLLPVPEFTSTWIKIYFGYCWPFHNFLKFCIQYSCHSLLRQRIDRLEEALPFFLLLIDLSRASTLAKFALSSNSQDEVRENIARGMAILGPTFTLDALVECLVIGVGTMSGVRQLEIMCCFGCMSVLANYFVFMTFFPACVSLVLELSRESREGRPIWQLSHFARVLEEEENKPNPVTQRVKMIMSLGLVLVHAHSRWIADPSPQNSTADTSKVSLGLDENVSKRIEPSVSLWQFYLSKMISMDIEQVITLSLALLLAVKYIFFEQTETESTLSLKNPITSPVVTQKKVPDNCCRREPMLVRNNQKCDSVEEETGINRERKVEVIKPLVAETDTPNRATFVVGNSSLLDTSSVLVTQEPEIELPREPRPNEECLQILGNAEKGAKFLSDAEIIQLVNAKHIPAYKLETLMETHERGVSIRRQLLSKKLSEPSSLQYLPYRDYNYSLVMGACCENVIGYMPIPVGVAGPLCLDEKEFQVPMATTEGCLVASTNRGCRAIGLGGGASSRVLADGMTRGPVVRLPRACDSAEVKAWLETSEGFAVIKEAFDSTSRFARLQKLHTSIAGRNLYIRFQSRSGDAMGMNMISKGTEKALSKLHEYFPEMQILAVSGNYCTDKKPAAINWIEGRGKSVVCEAVIPAKVVREVLKTTTEAMIEVNINKNLVGSAMAGSIGGYNAHAANIVTAIYIACGQDAAQNVGSSNCITLMEASGPTNEDLYISCTMPSIEIGTVGGGTNLLPQQACLQMLGVQGACKDNPGENARQLARIVCGTVMAGELSLMAALAAGHLVKSHMIHNRSKINLQDLQGACTKKTA

SEQ ID NO: 340201 - DNA, 57 bp, Artificial Sequence
  derived and/or modified sequence
atgctgtcccgccttttccgaatgcatgggctgtttgtggcgtctcatccatggtag

SEQ ID NO: 340202 - DNA, 4585 bp, Artificial Sequence
  derived and/or modified sequence
ctcttattggtcgaaggctcgtccagctccgagcgtgcgtaaggtgagggctccttccgctccgcgactgcgttaactggagccaggctgagcgtcggcgccggggttcggtggcctctagtgagatctggaggatccaaggattctgtagctacaatgttgtcaagactttttcgaatgcatggcctctttgtggcctcccatccctgggaagtcatagtggggacagtgacactgaccatctgcatgatgtccatgaacatgtttactggtaacaataagatctgtggttggaattatgaatgtccaaagtttgaagaggatgttttgagcagtgacattataattctgacaataacacgatgcatagccatcctgtatatttacttccagttccagaatttacgtcaacttggatcaaaatatattttgggtattgctggccttttcacaattttctcaagttttgtattcagtacagttgtcattcacttcttagacaaagaattgacaggcttgaatgaagctttgccctttttcctacttttgattgacctttccagagcaagcacattagcaaagtttgccctcagttccaactcacaggatgaagtaagggaaaatattgctcgtggaatggcaattttaggtcctacgtttaccctcgatgctcttgttgaatgtcttgtgattggagttggtaccatgtcaggggtacgtcagcttgaaattatgtgctgctttggctgcatgtcagttcttgccaactacttcgtgttcatgactttcttcccagcttgtgtgtccttggtattagagctttctcgggaaagccgcgagggtcgtccaatttggcagctcagccattttgcccgagttttagaagaagaagaaaataagccgaatcctgtaactcagagggtcaagatgattatgtctctaggcttggttcttgttcatgctcacagtcgctggatagctgatccttctcctcaaaacagtacagcagatacttctaaggtttcattaggactggatgaaaatgtgtccaagagaattgaaccaagtgtttccctctggcagttttatctctctaaaatgatcagcatggatattgaacaagttattaccctaagtttagctctccttctggctgtcaagtacatcttctttgaacaaacagagacagaatctacactctcattaaaaaaccctatcacatctcctgtagtgacacaaaagaaagtcccagacaattgttgtagacgtgaacctatgctggtcagaaataaccagaaatgtgattcagtagaggaagagacagggataaaccgagaaagaaaagttgaggttataaaacccttagtggctgaaacagataccccaaacagagctacatttgtggttggtaactcctccttactcgatacttcatcagtactggtgacacaggaacctgaaattgaacttcccagggaacctcggcctaatgaagaatgtctacagatacttgggaatgcagagaaaggtgcaaaattccttagtgatgctgagatcatccagttagtcaatgctaagcatatcccagcctacaagttggaaactctgatggaaactcatgagcgtggtgtatctattcgccgacagttactttccaagaagctttcagaaccttcttctctccagtacctaccttacagggattataattactccttggtgatgggagcttgttgtgagaatgttattggatatatgcccatccctgttggagtggcaggacccctttgcttagatgaaaaagaatttcaggttccaatggcaacaacagaaggttgtcttgtggccagcaccaatagaggctgcagagcaataggtcttggtggaggtgccagcagccgagtccttgcagatgggatgactcgtggcccagttgtgcgtcttccacgtgcttgtgactctgcagaagtgaaagcctggctcgaaacatctgaagggttcgcagtgataaaggaggcatttgacagcactagcagatttgcacgtctacagaaacttcatacaagtatagctggacgcaacctttatatccgtttccagtccaggtcaggggatgccatggggatgaacatgatttcaaagggtacagagaaagcactttcaaaacttcacgagtatttccctgaaatgcagattctagccgttagtggtaactattgtactgacaagaaacctgctgctataaattggatagagggaagaggaaaatctgttgtttgtgaagctgtcattccagccaaggttgtcagagaagtattaaagactaccacagaggctatgattgaggtcaacattaacaagaatttagtgggctctgccatggctgggagcataggaggctacaacgcccatgcagcaaacattgtcaccgccatctacattgcctgtggacaggatgcagcacagaatgttggtagttcaaactgtattactttaatggaagcaagtggtcccacaaatgaagatttatatatcagctgcaccatgccatctatagagataggaacggtgggtggtgggaccaacctactacctcagcaagcctgtttgcagatgctaggtgttcaaggagcatgcaaagataatcctggggaaaatgcccggcagcttgcccgaattgtgtgtgggaccgtaatggctggggaattgtcacttatggcagcattggcagcaggacatcttgtcaaaagtcacatgattcacaacaggtcgaagatcaatttacaagacctccaaggagcttgcaccaagaagacagcctgaatagcccgacagttctgaactggaacatgggcattgggttctaaaggactaacataaaatctgtgaattaaaaaagctcaatgcattgtcttgtggaggatgaatagatgtgatcactgagacagccacttggtttttggctctttcagagaggtctcaggttctttccatgcagactcctcagatctgaacacagtttagtgctttacatgctgtgctctttgaagagatttcaacaagaatattgtatgttaaagcatcagagatggtaatctacagctcacctctgaaggcaaatataagctgggaaaaaagttttgatgaaattcttgaagttcatggtgatcagtgcaattgaccttctccctcactcctgccagttgaaaatggatttttaaattatactgtagctgatgaaactcctgattttgtagttaatttattaagtctgggatgtagaacttcaagaagtaagagctaagttctaagttcatgtttgtaaattaatacttcatttggtgctggtctattttgattttggggggtaatcagcattattcttcagaaggggacctgttttcttcaagggaagaaacactcttattcccaaactacagaataatgtgttaaacatgctaaatagttctatcaggaaaacaaatcactgtatttatctccgcaggctatttgttcagagaggccttttgtttaaatataaatgtttaaatataaatgtttgtctggattggctataacatgtctttcagcattaggcttttaagaaacacagggttttgtattctttactaaagatatcagagctcttaatgttgcttagatgagggtgactgtcaagtacaagcaagactgggaccttagaaatcattgtagaaacacagttttgaaagaaaaataccatgtctctaagccaactttaattgcttaaaagacatttttatttagttgaaaaatctagttttttttgtaaactgtatcaaatctgtatatgttgtaataaaacttatgctagtttattggaagtgttcaagaaataaaaatcaacttgtgtactgataaaatactctagcctgggccagagaagataatgttctttaatgttgtccaggaaaccctggcttgcttgccgagcctaatgaaagggaaagtcagctttcagagccagtgaaggagccacgtgaatggccctagaactgtgcctagttcctgtggccaggaggttggtgactgaaacattcacacagggctctttgatggacccacgaacgctcttagctttctcagggggtcagcagagttattgaatcttaattttttttaatgtacaagttttgtataaataataaagaactccttattttgtattacatctaatgcttcaagtgttgctcttggaaagctgatgatgtctcttgtagaagatggactctgaaaaacattccaggaaaccatggcagcatggagagcctcttagtgattgtgtctgcattgttattgtggaagatttaccttttctgttgtacgtaaagcttaaattgcttttgttgtgactttttagccagtgactttttctgagcttttcatggaagtggcagtgaaaaatatgttgagtgttcattttagtgactgtaattaatatcttgctggattaatgttttgtacaattactaaattgtatacattttgttatagaatacttttttctagtttcagtaaataatgaaaaggaagttaataccaataa

SEQ ID NO: 340203 - DNA, 3395 bp, Artificial Sequence
  derived and/or modified sequence
ctttctttaatccagtagacaatgagaaacgctgatttgggtctatggcataataggaagtagtatgccacatactgcatgtgggagttctgcaggacagattgggaagtgcatgcgtgtaagactgggaagaccagttaggagaggctattgcactgttttaagtaagacataataaagccctgcaccaggcggagagcagaaggaacgcacagaagacgcaggagaggcacatttcagagagaatccagtatgcaatggatgtcgcacacaagagagagagacgcaggatccaaggattctgtagctacaatgttgtcaagactttttcgaatgcatggcctctttgtggcctcccatccctgggaagtcatagtggggacagtgacactgaccatctgcatgatgtccatgaacatgtttactggtaacaataagatctgtggttggaattatgaatgtccaaagtttgaagaggatgttttgagcagtgacattataattctgacaataacacgatgcatagccatcctgtatatttacttccagttccagaatttacgtcaacttggatcaaaatatattttgggtattgctggccttttcacaattttctcaagttttgtattcagtacagttgtcattcacttcttagacaaagaattgacaggcttgaatgaagctttgccctttttcctacttttgattgacctttccagagcaagcacattagcaaagtttgccctcagttccaactcacaggatgaagtaagggaaaatattgctcgtggaatggcaattttaggtcctacgtttaccctcgatgctcttgttgaatgtcttgtgattggagttggtaccatgtcaggggtacgtcagcttgaaattatgtgctgctttggctgcatgtcagttcttgccaactacttcgtgttcatgactttcttcccagcttgtgtgtccttggtattagagctttctcgggaaagccgcgagggtcgtccaatttggcagctcagccattttgcccgagttttagaagaagaagaaaataagccgaatcctgtaactcagagggtcaagatgattatgtctctaggcttggttcttgttcatgctcacagtcgctggatagctgatccttctcctcaaaacagtacagcagatacttctaaggtttcattaggactggatgaaaatgtgtccaagagaattgaaccaagtgtttccctctggcagttttatctctctaaaatgatcagcatggatattgaacaagttattaccctaagtttagctctccttctggctgtcaagtacatcttctttgaacaaacagagacagaatctacactctcattaaaaaaccctatcacatctcctgtagtgacacaaaagaaagtcccagacaattgttgtagacgtgaacctatgctggtcagaaataaccagaaatgtgattcagtagaggaagagacagggataaaccgagaaagaaaagttgaggttataaaacccttagtggctgaaacagataccccaaacagagctacatttgtggttggtaactcctccttactcgatacttcatcagtactggtgacacaggaacctgaaattgaacttcccagggaacctcggcctaatgaagaatgtctacagatacttgggaatgcagagaaaggtgcaaaattccttagtgatgctgagatcatccagttagtcaatgctaagcatatcccagcctacaagttggaaactctgatggaaactcatgagcgtggtgtatctattcgccgacagttactttccaagaagctttcagaaccttcttctctccagtacctaccttacagggattataattactccttggtgatgggagcttgttgtgagaatgttattggatatatgcccatccctgttggagtggcaggacccctttgcttagatgaaaaagaatttcaggttccaatggcaacaacagaaggttgtcttgtggccagcaccaatagaggctgcagagcaataggtcttggtggaggtgccagcagccgagtccttgcagatgggatgactcgtggcccagttgtgcgtcttccacgtgcttgtgactctgcagaagtgaaagcctggctcgaaacatctgaagggttcgcagtgataaaggaggcatttgacagcactagcagatttgcacgtctacagaaacttcatacaagtatagctggacgcaacctttatatccgtttccagtccaggtcaggggatgccatggggatgaacatgatttcaaagggtacagagaaagcactttcaaaacttcacgagtatttccctgaaatgcagattctagccgttagtggtaactattgtactgacaagaaacctgctgctataaattggatagagggaagaggaaaatctgttgtttgtgaagctgtcattccagccaaggttgtcagagaagtattaaagactaccacagaggctatgattgaggtcaacattaacaagaatttagtgggctctgccatggctgggagcataggaggctacaacgcccatgcagcaaacattgtcaccgccatctacattgcctgtggacaggatgcagcacagaatgttggtagttcaaactgtattactttaatggaagcaagtggtcccacaaatgaagatttatatatcagctgcaccatgccatctatagagataggaacggtgggtggtgggaccaacctactacctcagcaagcctgtttgcagatgctaggtgttcaaggagcatgcaaagataatcctggggaaaatgcccggcagcttgcccgaattgtgtgtgggaccgtaatggctggggaattgtcacttatggcagcattggcagcaggacatcttgtcaaaagtcacatgattcacaacaggtcgaagatcaatttacaagacctccaaggagcttgcaccaagaagacagcctgaatagcccgacagttctgaactggaacatgggcattgggttctaaaggactaacataaaatctgtgaattaaaaaagctcaatgcattgtcttgtggaggatgaatagatgtgatcactgagacagccacttggtttttggctctttcagagaggtctcaggttctttccatgcagactcctcagatctgaacacagtttagtgctttacatgctgtgctctttgaagagatttcaacaagaatattgtatgttaaagcatcagagatggtaatctacagctcacctctgaaggcaaatataagctgggaaaaaagttttgatgaaattcttgaagttcatggtgatcagtgcaattgaccttctccctcactcctgccagttgaaaatggatttttaaattatactgtagctgatg

SEQ ID NO: 340204 - DNA, 57 bp, Artificial Sequence
  derived and/or modified sequence
atgctgagccgcctcttcaggatgcacggcctgtttgtggccagccacccctggtag

SEQ ID NO: 340205 - DNA, 57 bp, Artificial Sequence
  derived and/or modified sequence
atgctgagccggctgttccggatgcacggcctgttcgtggccagccacccttggtag

SEQ ID NO: 340206 - DNA, 57 bp, Artificial Sequence
  derived and/or modified sequence
atgctgagcagactgtttcgtatgcacgggttattcgtggcctctcacccctggtag

SEQ ID NO: 340207 - DNA, 57 bp, Artificial Sequence
  derived and/or modified sequence
atgctgagcagactgttcagaatgcacggcctgttcgtggccagccacccctggtag

SEQ ID NO: 340208 - protein, 265 aa, Artificial Sequence
  derived and/or modified sequence
MLSRLFRMHGLFVASHPWEVIVGTVTLTICMMSMNMFTEGTEKALSKLHEYFPEMQILAVSGNYCTDKKPAAINWIEGRGKSVVCEAVIPAKVVREVLKTTTEAMIEVNINKNLVGSAMAGSIGGYNAHAANIVTAIYIACGQDAAQNVGSSNCITLMEASGPTNEDLYISCTMPSIEIGTVGGGTNLLPQQACLQMLGVQGACKDNPGENARQLARIVCGTVMAGELSLMAALAAGHLVKSHMIHNRSKINLQDLQGACTKKTA

SEQ ID NO: 340209 - protein, 111 aa, Artificial Sequence
  derived and/or modified sequence
MLSRLFRMHGLFVASHPWEVIVGTVTLTICMMSMNMFTGNNKICGWNYECPKFEEDVLSSDIIILTITRCIAILYIYFQFQNLRQLGSKYILGIAGLFTIFSSFVFSTVVI

SEQ ID NO: 340210 - DNA, 3681 bp, Artificial Sequence
  derived and/or modified sequence
cgactgcgttaactggagccaggctgagcgtcggcgccggggttcggtggcctctagtgagatctggaggatccaaggattctgtagctacaatgttgtcaagactttttcgaatgcatggcctctttgtggcctcccatccctgggaagtcatagtggggacagtgacactgaccatctgcatgatgtccatgaacatgtttactggtaacaataagatctgtggttggaattatgaatgtccaaagtttgaagaggatgttttgagcagtgacattataattctgacaataacacgatgcatagccatcctgtatatttacttccagttccagaatttacgtcaacttggatcaaaatatattttgggtattgctggccttttcacaattttctcaagttttgtattcagtacagttgtcattcacttcttagacaaagaattgacaggcttgaatgaagctttgccctttttcctacttttgattgacctttccagagcaagcacattagcaaagtttgccctcagttccaactcacaggatgaagtaagggaaaatattgctcgtggaatggcaattttaggtcctacgtttaccctcgatgctcttgttgaatgtcttgtgattggagttggtaccatgtcaggggtacgtcagcttgaaattatgtgctgctttggctgcatgtcagttcttgccaactacttcgtgttcatgactttcttcccagcttgtgtgtccttggtattagagctttctcgggaaagccgcgagggtcgtccaatttggcagctcagccattttgcccgagttttagaagaagaagaaaataagccgaatcctgtaactcagagggtcaagatgattatgtctctaggcttggttcttgttcatgctcacagtcgctggatagctgatccttctcctcaaaacagtacagcagatacttctaaggtttcattaggactggatgaaaatgtgtccaagagaattgaaccaagtgtttccctctggcagttttatctctctaaaatgatcagcatggatattgaacaagttattaccctaagtttagctctccttctggctgtcaagtacatcttctttgaacaaacagagacagaatctacactctcattaaaaaaccctatcacatctcctgtagtgacacaaaagaaagtcccagacaattgttgtagacgtgaacctatgctggtcagaaataaccagaaatgtgattcagtagaggaagagacagggataaaccgagaaagaaaagttgaggttataaaacccttagtggctgaaacagataccccaaacagagctacatttgtggttggtaactcctccttactcgatacttcatcagtactggtgacacaggaacctgaaattgaacttcccagggaacctcggcctaatgaagaatgtctacagatacttgggaatgcagagaaaggtgcaaaattccttagtgatgctgagatcatccagttagtcaatgctaagcatatcccagcctacaagttggaaactctgatggaaactcatgagcgtggtgtatctattcgccgacagttactttccaagaagctttcagaaccttcttctctccagtacctaccttacagggattataattactccttgcttggtggaggtgccagcagccgagtccttgcagatgggatgactcgtggcccagttgtgcgtcttccacgtgcttgtgactctgcagaagtgaaagcctggctcgaaacatctgaagggttcgcagtgataaaggaggcatttgacagcactagcagatttgcacgtctacagaaacttcatacaagtatagctggacgcaacctttatatccgtttccagtccaggtcaggggatgccatggggatgaacatgatttcaaagggtacagagaaagcactttcaaaacttcacgagtatttccctgaaatgcagattctagccgttagtggtaactattgtactgacaagaaacctgctgctataaattggatagagggaagaggaaaatctgttgtttgtgaagctgtcattccagccaaggttgtcagagaagtattaaagactaccacagaggctatgattgaggtcaacattaacaagaatttagtgggctctgccatggctgggagcataggaggctacaacgcccatgcagcaaacattgtcaccgccatctacattgcctgtggacaggatgcagcacagaatgttggtagttcaaactgtattactttaatggaagcaagtggtcccacaaatgaagatttatatatcagctgcaccatgccatctatagagataggaacggtgggtggtgggaccaacctactacctcagcaagcctgtttgcagatgctaggtgttcaaggagcatgcaaagataatcctggggaaaatgcccggcagcttgcccgaattgtgtgtgggaccgtaatggctggggaattgtcacttatggcagcattggcagcaggacatcttgtcaaaagtcacatgattcacaacaggtcgaagatcaatttacaagacctccaaggagcttgcaccaagaagacagcctgaatagcccgacagttctgaactggaacatgggcattgggttctaaaggactaacataaaatctgtgaattaaaaaagctcaatgcattgtcttgtggaggatgaatagatgtgatcactgagacagccacttggtttttggctctttcagagaggtctcaggttctttccatgcagactcctcagatctgaacacagtttagtgctttacatgctgtgctctttgaagagatttcaacaagaatattgtatgttaaagcatcagagatggtaatctacagctcacctctgaaggcaaatataagctgggaaaaaagttttgatgaaattcttgaagttcatggtgatcagtgcaattgaccttctccctcactcctgccagttgaaaatggatttttaaattatactgtagctgatgaaactcctgattttgtagttaatttattaagtctgggatgtagaacttcaagaagtaagagctaagttctaagttcatgtttgtaaattaatacttcatttggtgctggtctattttgattttggggggtaatcagcattattcttcagaaggggacctgttttcttcaagggaagaaacactcttattcccaaactacagaataatgtgttaaacatgctaaatagttctatcaggaaaacaaatcactgtatttatctccgcaggctatttgttcagagaggccttttgtttaaatataaatgtttaaatataaatgtttgtctggattggctataacatgtctttcagcattaggcttttaagaaacacagggttttgtattctttactaaagatatcagagctcttaatgttgcttagatgagggtgactgtcaagtacaagcaagactgggaccttagaaatcattgtagaaacacagttttgaaagaaaaataccatgtctctaagccaactttaattgcttaaaagacatttttatttagttgaaaaatctagttttttttgtaaactgtatcaaatctgtatatgttgtaataaaacttatgctagtttattggaagtgttcaagaaataaaaatcaacttgtgtactgataaaata

SEQ ID NO: 340211 - DNA, 268 bp, Artificial Sequence
  derived and/or modified sequence
gagatcccgccactgcactccagcctgggcgacagagcgagactccgtctcaaaaaaaaaaaaaaaaaaaaattaatttttattgcagcattgcataaatactgtcaacttaatttgcaggagctatcctgtagcctgcttgtgacatttgcaactgctgatgaaggtggacgattgaattctatggcatgatccaaggattctgtagctacaatgttgtcaagactttttcgaatgcatggcctctttgtggcctcccatccctggg

SEQ ID NO: 340212 - DNA, 527 bp, Artificial Sequence
  derived and/or modified sequence
agaacagttaatttctgcagtaggaggaggtcgatgtactccattcttaagtagtcgtttgaaatatttcaggatttgaggatattccttcttagacatggtcctgcagagtcgtaggaagcatttgtttctgggctatactaaatgtgcatgatttcggcgtcccacaaggatccaaggattctgtagctacaatgttgtcaagactttttcgaatgcatggcctctttgtggcctcccatccctgggaagtcatagtggggacagtgacactgaccatctgcatgatgtccatgaacatgtttactggtaacaataagatctgtggttggaattatgaatgtccaaagtttgaagaggatgttttgagcagtgacattataattctgacaataacacgatgcatagccatcctgtatatttacttccagttccagaatttacgtcaacttggatcaaaatatattttgggtattgctggccttttcacaattttctcaagttttgtattcagtacagttgtcatt

SEQ ID NO: 340213 - DNA, 405 bp, Artificial Sequence
  derived and/or modified sequence
atgagaatgctgctgcacctgagcctgctggccctgggcgccgcctacgtgtacgccatccccaccgagatccccaccagcgccctggtgaaggagaccctggccctgctgagcacccacagaaccctgctgatcgccaacgagaccctgagaatccccgtgcccgtgcacaagaaccaccagctgtgcaccgaggagatcttccagggcatcggcaccctggagagccagaccgtgcagggcggcaccgtggagagactgttcaagaacctgagcctgatcaagaagtacatcgacggccagaagaagaagtgcggcgaggagagaagaagagtgaaccagttcctggactacctgcaggagttcctgggcgtgatgaacaccgagtggatcatcgagagctag

SEQ ID NO: 340214 - DNA, 405 bp, Artificial Sequence
  derived and/or modified sequence
atgaggatgcttctgcacctgtctctcctcgcactgggggctgcatacgtttacgccatacctacagagattcccaccagtgcgctcgtgaaggagacattagcccttctgtcaactcaccgtaccctgctgattgccaatgagactttaaggatacccgtgcccgtccacaaaaatcaccagttatgcacggaggaaatttttcaaggtattgggactctcgaatcacagactgtccagggcggaacggttgagcggctttttaagaatcttagtctcattaaaaaatatattgacggtcagaaaaagaaatgtggtgaagagcgcaggagagtgaaccaattcttagactacctgcaggaatttctgggtgtaatgaatacggaatggataatcgaatcatag

SEQ ID NO: 340215 - DNA, 405 bp, Artificial Sequence
  derived and/or modified sequence
atgaggatgctgctgcacctgagcctgctggccctgggcgccgcctacgtgtatgccatccccacagagatccccaccagcgccctggtgaaggagaccctggccctgctgagcacccacaggaccctgctgattgccaatgagaccctgcgcatccctgtgcctgtgcacaagaaccaccagctgtgcacagaggagatcttccagggcatcggcaccctggagagccagacagtgcagggcggcaccgtggagcggctcttcaagaacctgagcctcatcaagaagtacattgatggccagaagaagaagtgtggggaggagcggcggcgggtgaaccagttcctggactacctgcaggagttcctgggcgtgatgaacacagagtggatcatcgagagctag

SEQ ID NO: 340216 - DNA, 405 bp, Artificial Sequence
  derived and/or modified sequence
atgcggatgctgctgcacctgagcctgctggccctgggcgccgcctatgtgtacgcgatacccactgaaattccaaccagcgcgcttgtgaaagagaccctagccctgcttagtacccatagaacattgctgattgcgaacgaaaccctccgcattcctgtgccagttcacaaaaaccaccagctctgcaccgaagagatcttccaggggataggaactttagaatcgcagactgtccagggcggcaccgttgaaaggctgttcaagaacctgtctctgattaaaaaatatatagacggccagaaaaaaaagtgcggtgaagaacgtcgaagggtgaatcaatttctcgattacctgcaagagtttctcggagtgatgaacacagaatggattatcgagtcatag

SEQ ID NO: 340217 - DNA, 405 bp, Artificial Sequence
  derived and/or modified sequence
atgaggatgttactccacctttcactcttagccttaggagccgcttatgtctacgccatcccaacagagatacctacatctgcccttgtgaaggaaacccttgcactgctgtctactcatagaactctgctgatcgcaaatgagactctgcggattccggtgcccgtgcacaagaatcaccaactgtgtaccgaggaaatcttccagggaatcggcactttggaaagtcaaactgtccagggaggcaccgtggagcgactgttcaagaacctctctctgatcaagaaatacatcgatgggcagaagaagaaatgcggagaggaaagacgccgtgttaatcaattcctggactatctgcaggagtttttgggagtgatgaacacagaatggattattgagagctag

SEQ ID NO: 340218 - DNA, 2511 bp, Artificial Sequence
  derived and/or modified sequence
cggcggcagcagcccatgcctccggtgcaacagctgcgcctcctccggtgccccggcggcgggggcgggagataacctgtccctgctgctccgcacctcctcgcccggcggcgccttccggacccgcacctcctcgccgctgtcgggctcgtcctgctgctgctgctgctgctcgtcgcgccggggcagccagctcaatgtgagcgagctgacgccgtccagccatgccagtgcgctccggcagcagtacgcgcagcagtccgcgcagcagtcggcgtccgcctcccagtaccaccagtgccacagcctgcagcccgccgccagccccacgggcagcctcggcagtctgggctccgggcccccgctctcgcaccaccaccaccacccgcacccggcgcaccaccagcaccaccagccccaggcgcgccgcgagagcaaccccttcaccgaaatagccatgagcagctgcaggtacaacgggggcgtcatgcggccgctcagcaacttgagcgcgtcccgccggaacctgcacgagatggactcagaggcgcagcccctgcagccccccgcgtctgtcggaggaggtggcggcgcgtcctccccgtctgcagccgctgccgccgccgccgctgtttcgtcctcagcccccgagatcgtggtgtctaagcccgagcacaacaactccaacaacctggcgctctatggaaccggcggcggaggcagcactggaggaggcggcggcggtggcgggagcgggcacggcagcagcagtggcaccaagtccagcaaaaagaaaaaccagaacatcggctacaagctgggccaccggcgcgccctgttcgaaaagcgcaagcggctcagcgactacgcgctcatcttcggcatgttcggcatcgtggtcatggtcatcgagaccgagctgtcgtggggcgcctacgacaaggcgtcgctgtattccttagctctgaaatgccttatcagtctctccacgatcatcctgctcggtctgatcatcgtgtaccacgccagggaaatacagttgttcatggtggacaatggagcagatgactggagaatagccatgacttatgagcgtattttcttcatctgcttggaaatactggtgtgtgctattcatcccatacctgggaattatacattcacatggacggcccggcttgccttctcctatgccccatccacaaccaccgctgatgtggatattattttatctataccaatgttcttaagactctatctgattgccagagtcatgcttttacatagcaaacttttcactgatgcctcctctagaagcattggagcacttaataagataaacttcaatacacgttttgttatgaagactttaatgactatatgcccaggaactgtactcttggtttttagtatctcattatggataattgccgcatggactgtccgagcttgtgaaaggtaccatgatcaacaggatgttactagcaacttccttggagcgatgtggttgatatcaataacttttctctccattggttatggtgacatggtacctaacacatactgtggaaaaggagtctgcttacttactggaattatgggtgctggttgcacagccctggtggtagctgtagtggcaaggaagctagaacttaccaaagcagaaaaacacgtgcacaatttcatgatggatactcagctgactaaaagagtaaaaaatgcagctgccaatgtactcagggaaacatggctaatttacaaaaatacaaagctagtgaaaaagatagatcatgcaaaagtaagaaaacatcaacgaaaattcctgcaagctattcatcaattaagaagtgtaaaaatggaacagaggaaactgaatgaccaagcaaacactttggtggacttggcaaagacccagaacatcatgtatgatatgatttctgacttaaacgaaaggagtgaagacttcgagaagaggattgttaccctggaaacaaaactagagactttgattggtagcatccacgccctccctgggctcataagccagaccatcaggcagcagcagagagatttcattgaggctcagatggagagctacgacaagcacgtcacttacaatgctgagcggtcccggtcctcgtccaggaggcggcggtcctcttccacagcaccaccaacttcatcagagagtagctagaagagaataagttaaccacaaaataagactttttgccatcatatggtcaatattttagcttttattgtaaagcccctatggttctaatcagcgttatccgggttctgatgtcagaatcctgggaacctgaacactaagttttaggccaaaatgagtgaaaactctttttttttctttcagatgcacagggaatgcacctattattgctatatagattgttcctcctgtaatttcactaactttttattcatgcacttcaaacaaactttactactacattatatgatatataataaaaaaagttaatttctgca

SEQ ID NO: 340219 - DNA, 3171 bp, Artificial Sequence
  derived and/or modified sequence
agagcagctggaggccggcggtggctgagcagcccccacacctttgagcgagccgcctgcctctccaccggcaaggaagccctgggacctccggattcgggctgccggagggcctgagcgccagagcccaggacccggcggccgggggcgccatcccctcatgttctggagaaggcgcaaatgtgatgtcatgcccattgttttggtgcgcccaaccaatcggactcgccgcctggattctaccggagccggcatgggcccttcctcgcaccagcagcaggagtccccgctcccgaccataacgcattgcgcagggtgcaccaccgcttggtctccctgcagctttaacagccctgacatggaaaccccattgcagttccagcgcggcttcttcccagagcagccgccgccgccgccgcgctcctcacacctgcattgccagcagcagcaacagagccaggacaagccgtgcccgcccttcgcgcccctcccgcaccctcaccaccacccgcacctcgcgcaccagcagccggccagcggcggcagcagcccatgcctccggtgcaacagctgcgcctcctccggtgccccggcggcgggggcgggagataacctgtccctgctgctccgcacctcctcgcccggcggcgccttccggacccgcacctcctcgccgctgtcgggctcgtcctgctgctgctgctgctgctcgtcgcgccggggcagccagctcaatgtgagcgagctgacgccgtccagccatgccagtgcgctccggcagcagtacgcgcagcagtccgcgcagcagtcggcgtccgcctcccagtaccaccagtgccacagcctgcagcccgccgccagccccacgggcagcctcggcagtctgggctccgggcccccgctctcgcaccaccaccaccacccgcacccggcgcaccaccagcaccaccagccccaggcgcgccgcgagagcaaccccttcaccgaaatagccatgagcagctgcaggtacaacgggggcgtcatgcggccgctcagcaacttgagcgcgtcccgccggaacctgcacgagatggactcagaggcgcagcccctgcagccccccgcgtctgtcggaggaggtggcggcgcgtcctccccgtctgcagccgctgccgccgccgccgctgtttcgtcctcagcccccgagatcgtggtgtctaagcccgagcacaacaactccaacaacctggcgctctatggaaccggcggcggaggcagcactggaggaggcggcggcggtggcgggagcgggcacggcagcagcagtggcaccaagtccagcaaaaagaaaaaccagaacatcggctacaagctgggccaccggcgcgccctgttcgaaaagcgcaagcggctcagcgactacgcgctcatcttcggcatgttcggcatcgtggtcatggtcatcgagaccgagctgtcgtggggcgcctacgacaaggcgtcgctgtattccttagctctgaaatgccttatcagtctctccacgatcatcctgctcggtctgatcatcgtgtaccacgccagggaaatacagttgttcatggtggacaatggagcagatgactggagaatagccatgacttatgagcgtattttcttcatctgcttggaaatactggtgtgtgctattcatcccatacctgggaattatacattcacatggacggcccggcttgccttctcctatgccccatccacaaccaccgctgatgtggatattattttatctataccaatgttcttaagactctatctgattgccagagtcatgcttttacatagcaaacttttcactgatgcctcctctagaagcattggagcacttaataagataaacttcaatacacgttttgttatgaagactttaatgactatatgcccaggaactgtactcttggtttttagtatctcattatggataattgccgcatggactgtccgagcttgtgaaaggtaccatgatcaacaggatgttactagcaacttccttggagcgatgtggttgatatcaataacttttctctccattggttatggtgacatggtacctaacacatactgtggaaaaggagtctgcttacttactggaattatgggtgctggttgcacagccctggtggtagctgtagtggcaaggaagctagaacttaccaaagcagaaaaacacgtgcacaatttcatgatggatactcagctgactaaaagagtaagttactatccatatatcttcaaagagaatattattgtgattttttcagtgttaggaaatatggcataagattgccataggaagaagggaacctttctgataccagattctatcttttagattaagaagtgtaaaaatggaacagaggaaactgaatgaccaagcaaacactttggtggacttggcaaagacccagaacatcatgtatgatatgatttctgacttaaacgaaaggagtgaagacttcgagaagaggattgttaccctggaaacaaaactagagactttgattggtagcatccacgccctccctgggctcataagccagaccatcaggcagcagcagagagatttcattgaggctcagatggagagctacgacaagcacgtcacttacaatgctgagcggtcccggtcctcgtccaggaggcggcggtcctcttccacagcaccaccaacttcatcagagagtagctagaagagaataagttaaccacaaaataagactttttgccatcatatggtcaatattttagcttttattgtaaagcccctatggttctaatcagcgttatccgggttctgatgtcagaatcctgggaacctgaacactaagttttaggccaaaatgagtgaaaactctttttttttctttcagatgcacagggaatgcacctattattgctatatagattgttcctcctgtaatttcactaactttttattcatgcacttcaaacaaactttactactacattatatgatatataataaaaaaagttaatttctgcacatactcgtttggtcacttgacatttctaaagcttcacttctcatattattttcaaggtaaaatagcggattatcatctgatgcacactgataattttgatagccaaaagtttggctggttggaaaaa

SEQ ID NO: 340220 - protein, 14 aa, Artificial Sequence
  derived and/or modified sequence
ELIHISDWLPTLVK

SEQ ID NO: 340221 - protein, 227 aa, Artificial Sequence
  derived and/or modified sequence
MGRKKIQITRIMDERNRQVTFTKRKFGLMKKAYELSVLCDCEIALIIFNSTNKLFQYASTDMDKVLLKYTEYNEPHESRTNSDIVEALNKKENKGCESPDPDSSYALTPRTEEKYKKINEEFDNMIKSHKIPAVPPPNFEMPVSIPVSSHNSLVYSNPVSSLGNPNLLPLAHPSLQRNSMSPGVTHRPPSAGNTGGLMGGDLTSGAGTSAGNGYGNPRNSPGLLVSP

SEQ ID NO: 340222 - protein, 242 aa, Artificial Sequence
  derived and/or modified sequence
MGRKKIQITRIMDERNRQVTFTKRKFGLMKKAYELSVLCDCEIALIIFNSTNKLFQYASTDMDKVLLKYTEYNEPHESRTNSDIVEALNKKENKGCESPDPDSSYALTPRTEEKYKKINEEFDNMIKSHKIPAVPPPNFEMPVSIPVSSHNSLVYSNPVSSLGNPNLLPLAHPSLQRNSMSPGVTHRPPSAGNTGGLMGGDLTSGAGTSAGNGYGNPRNSPGLLVSPGNLNKNMQAKSPPPM

SEQ ID NO: 340223 - protein, 441 aa, Artificial Sequence
  derived and/or modified sequence
MGRKKIQITRIMDERNRQVTFTKRKFGLMKKAYELSVLCDCEIALIIFNSTNKLFQYASTDMDKVLLKYTEYNEPHESRTNSDIVETLRKKGLNGCDSPDPDADDSVGHSPESEDKYRKINEDIDLMISRQRLCAVPPPNFEMPVSIPVSSHNSLVYSNPVSSLGNPNLLPLAHPSLQRNSMSPGVTHRPPSAGNTGGLMGGDLTSGAGTSAGNGYGNPRNSPGLLVSPGNLNKNMQAKSPPPMNLGMNNRKPDLRVLIPPGSKNTMPSVSEDVDLLLNQRINNSQSAQSLATPVVSVATPTLPGQGMGGYPSAISTTYGTEYSLSSADLSSLSGFNTASALHLGSVTGWQQQHLHNMPPSALSQLGDRTTTPSRYPQHTRHEAGRSPVDSLSSCSSSYDGSDREDHRNEFHSPIGLTRPSPDERESPSVKRMRLSEGWAT
